United States Patent Application Publication US 2006/0134663 A1 - sequence listing, part 59

SEQ ID NO: 143866 - DNA, 776 bp, Homo Sapiens
caggatttggtatgttttattagagcaaatttttaacaaaaggtggctttcatttacagaatttaatgtgtgtggggactgtccaacccatgtggactcaagtaaggataaccattaagcttgctaatgtattttcttattttcagtttacatacaaattttttttgtttgcttcacattcataaaaaccccaatactgtaaatgacaaataacccctcccatcccttaattaaatatacaaacagcctgaaaacatacaatttaaattggtttaatcttgaagtgtaatccaataagactgaaaactaaacatttcaagtcttgtaccaaatagtaaaatactcgaaggccttcaggatcctttgactgatttacatcaataagagaacctatttttgatgtggtaaaagatatgtgctcatctccaattacaatttcaagctcctgtcggccaaccctatcagggggaggccacaaagcatcatcttcttttgtaatttcactgtcatcaataattctcttcagttcttccattacactcttgtgcacataagcctcttttctgatcatcacatcatttttgtaattgctgttgttggcatatctaagctttccgtccggccgaaattcgaactccagaaactcgtgcccaaacttgcccttgtgccctacgtagtagcgcaggtagaaatcgctagccacagccatttttgtacccgggaagcccgccgaaaacgcagccaacgtgtcccccggcgccttgcagtgacgtccc

SEQ ID NO: 143867 - DNA, 781 bp, Homo Sapiens
tcattaatttatttgctattttaatattttaagaaactacattttaatcacatagacaagcagataagtaaggcttcttctaccaggtgggcttatgaaatgcaaaataagcaaaaggagcatttttttgctccccacagaggcaaagacatcttttaacctaactctcctaatgcatgatggtaacaaacccaaaatgaatgcaggttcacatgtactataattgttgggagtcgaatgcatgtattcttcaggttcacttctggaaatttagataacttatttattacacgctttatttgagttaaagatagaaaacaatatacttttatgtaaattgctatggcaatgtagtttacagtaattccttttatatatacttcgtattattcttttagacattttataaggaataaagctaattgtatattaagtttaacaataatcagaaaatattctccaaaagaatttcctgaagtggcttgctaggtataaagctcataattgtcaagatacttatattagggacatgaacccaagtcgttaaataaaaataagatatttgtaaaaaagtgctatagaagaaggtgcacaaaaaacatgcacttacacatactttccaaaaggatgtaaactgtacttttaggcactgtcatctcttcaaatttcctttaccaatgatatatagcacaatttttgatgtctagatggtgctgtaggaagatgactaaggcaaccacgtgcagaaaagcatgtgtgtgatgcacagaaaatataaaga

SEQ ID NO: 143868 - DNA, 570 bp, Homo Sapiens
tggccactgcgcagaccagacttcgctcgtactcgtgcgcctcgcttcggtgagccccaggcccctgcctccttcctcctgccgtcctgcctccgtccccgccctttcatcatccgcgtccctgtgaaggcattccctaaatccgagcccgagtggttctccccgggaaggctactttggggagctggggggatgcgaaacaccctagatactggataatggggtggggaaatcgatgatttaagaacaaaaccgaaaaactggcgttttgccgtgccgctcggaggggacattaaaaaatttcttagtgtttgcccgcaaaggtattgtgcgttgccttggaggctgagatatgggggaatagacaagtcctttgttctgaggttcatcttccgagccccgagcctcctcccagcctcggacggctgcgcgggctgcatctgtgcagcctggcggcggcggggctgtgctatgacatctttacagtccttcttgcagagacatgtgtgccagggatgccgaattgccgggagagcaggcaagaccggcttcggggcgcgcggcggccgc

SEQ ID NO: 143869 - DNA, 453 bp, Homo Sapiens
ctatgttcttaagagtgctagtttaacaggaaatctccaatgcattattatctagactcatctcaaaggctcacttttcatttgcatgggcccttgctatttgtagggtaggaggcagcacctcgttctggtggctgccaccttcatgaggagacactccttgttaacaggatggttagcccacggctcttcccagcccccttttccacacccagtaaattgttttagtttatggccctcagctgcagttgcaatcatcatcaaattccagttttgaatttaaaggtgaataatgaatgcaatgaactttctagaatttatgaagggcagtgatgttcctttttatctaataattctacatgtgtagcctttcagtatgctattctgtggactgaatttacaaattgtcatttgtttaatgaactgttaatataacatgatgactaactgaaa

SEQ ID NO: 143870 - DNA, 614 bp, Homo Sapiens
tttgaagaaataaatttttttaatgaagtgttatttgagcattctggagcatcatacaaatataggacagactgaaggaatacatgcagcttaatttgagttaacattttttgaaattttatattgcaaaagtatacgtatttaccgttgtgaaattagaaaggataggcaaagagggcggtctacaaagcactccctagatccaccatactgagacaacgcttaatgctttgatggatttatttattttattctttctatgcgtatgcatgtattgtatacatacatgttcatggttaaatataaacagttctccttggtgttctgtttatccatttattgttatgaagtaaatccccaaagagtacatttcctttgcccgagggagtcttttgctacatactgctgtacataatgaaaactaaaaaaggggctaacttttcagccttgtgacgttatggtgattcaaacagaggcttcatcaaaggcagattcagcaatgaacttggtgtgtgtaggtggttatgcttggcattattgcctgtaatagtatgatagggatgatttcagtgtctgccaaaagggaattggttaagtaaactgaggtacatcca

SEQ ID NO: 143871 - DNA, 474 bp, Homo Sapiens
ttttggagaaacgggacgcgattcattggcgagaccagtggagggcggggctgatcacaaaggaggcagggcggaatggtaggggcgggaacggggcgaggcttatcggaggaggcgggattacgcaaaagaatgattctgattaggccggataggaggccgggctgattctcgaaggaggggtgtgttggaaagtgggagaggtcaaacaaagggtaggacgcgttatcgcaacagtgaacccgcttctctgggttagtcttgtcgttgtacaaatgggaaaactgaggctcccgagggtgtgggtctgcggaagacgggcaggcgtgcgtccctctcccgcttctgttagatcttcgcgcccctcctggctgagtagccgcaaggccccctgggagtcgaagccttctgcgttgctatggcgccgggggcgggtcggacccctgggcccactcggcggtttggcgggaggga

SEQ ID NO: 143872 - DNA, 452 bp, Homo Sapiens
aaagaatatttgtagtaagaatttgtttttgtattaatcatttaactccctagtgctattaacttctgatgtgaactatagcttttgacaaagagtcttgatacataatctattttttgtattatttttcattatggaatctttcattatggatacattagagtataacagtatgtattacagaagtttttttgtcttatctttacagtgacatttgattcaaatatacccaactgctgagaatttttttattggccttggtaaataagattttatactaactatttattagtagccaaattagccaagtgatttatgccatctgagggaacacagcagtattactgtcgtactgtgtaacacatcctattcttgtaatactgaaccactataattagctttatataaaactttagaaagcttatatggagtaaaattatatctttaaccaa

SEQ ID NO: 143873 - DNA, 1142 bp, Homo Sapiens
  misc_feature (238)..(300): n is a, c, g, or t
tttgttttactactaagtttatttgataaagaattagagaactaaaatgtattgagcacctaacatgtaccaaggactgcacttggaattttacaattattcacaaatgttgtcattaaagttgcttcaaaaaaggaatgcgaatttgtctttgctcatgtgttatgtagatccatgctgttataactatgatatagtgcattcagtctttccatctctataaattttagtctcttcnnnnnnnnnnnnnnnnnnnnnnnnnnnnnnnnnnnnnnnnnnnnnnnnnnnnnnnnnnnnnnngccaactctatttccagttgaggatgtgctgggcacctttgtcatgcacctctctgggaaaatatgtgtgattgaaagtccagttgtgcctaaggctgtcattgacagagagctatttcttgggaatatcaagccctgcaatccttgtgtctatcaccagcccagaatgccagagaaagccctcaagtgcttgtttttggaagccacagctagtacgggattggtgggactttgggagtacgtgtcctgacaccagcttgtgtatggctcgcaataagtgtcggagctgtgagaagctttcttcaagctggttccttgactcctccacacactgcgatttgccctcgcgaaagctcgtcaaccttcacggaagttttgggaggtgagtcctttttcggtgctgcacagactctgaaggtgaacaagctccggctggctggccccacggacccttctgaattaccttgaacatgtcgctggcaactgcagctccggcaggctcaccccagcctcgtccacgcccacaacagagaggtggccccggtagggccttgatttctccaaccgtaagcgagccgcggtgtgggtgactgcagtagggcaaactcggtgcggtgaaggcttggttcaatcacccctgcctgtgctcttgatggaaccttcaattcaggtatcctgccctcctctctggcacacagtgttaattgttgccacaagctaagtccaccagtctctccctacagggaaatgaagtcctgagcgaagtgacacaaatatggaaaaggtttagaactgatttattctggtagtcatccccaaagcactatccatttgtccggtta

SEQ ID NO: 143874 - DNA, 453 bp, Homo Sapiens
gttttactactaagtttatttgataaagaattagagaactaaaatgtattgagcacctaacatgtaccaaggactgcacttggaattttacaattattcacaaatgttgtcattaaagttgcttcaaaaaaggaatgcgaatttgtctttgctcatgtgttatgtagatccatgctgttataactatgatatagtgcattcagtctttccatctctataaattttagtctcttcatttccagttgaggatgtgctgggcacctttgtcatgcacctctctgggaaaatatgtgtgattgaaagtccagttgtgcctaaggctgtcattgacagagagctatttcttgggaatatcaagccctgcaatccttgtgtctatcaccagcccagaatgccagagaaagccctcaagtgcttgtttttggaagccacagctagtacgggattggtggg

SEQ ID NO: 143875 - DNA, 349 bp, Homo Sapiens
  misc_feature (40)..(40): n is a, c, g, or t
  misc_feature (141)..(141): n is a, c, g, or t
ggcaacgcacccccgccacacccaccactcacggtgctcnaagcagcaattccgcagcgtccccaccaccccgcccctgcgtacagaggagtcggggtactgggtaaggggcagcagccgctggaccacgcacctgttggnaggtgtcacttagggccgtcccccctaacttccgtcccctccccgcccgcgcgggcgccctgggcttcacctgtcggggtccagtaggaaggcccgcgccgcagggcgttggctgaggttggagagcagcggcgctaggtagtgcaggggcgcgcgggcgttgtagccgggcgtgcacagcgcgcgcaccagccgctccaggcccgag

SEQ ID NO: 143876 - DNA, 359 bp, Homo Sapiens
  misc_feature (155)..(190): n is a, c, g, or t
tttaacgtttgcaaaggtttattaactgtcagtgactgatacaggggaatcggatgaggggagtacatgctgaacaggaaacagagtgaggggggcttgaccaggacgcatggcaatgggaaaagcagatgggagatgcttatactggtacttgnnnnnnnnnnnnnnnnnnnnnnnnnnnnnnnnnnnnaaatgcagaggaaaaagtctgaaattaaacactcagaactgccctcagtagtcacatctggggagagatgaggatagtgctgttctatggagagaatacctgacaatacttgttttctgacgtaggtgcatggatacacaaaccgaaatatgcattcagtatgtcttgc

SEQ ID NO: 143877 - DNA, 694 bp, Homo Sapiens
  misc_feature (15)..(15): n is a, c, g, or t
  misc_feature (183)..(183): n is a, c, g, or t
  misc_feature (196)..(196): n is a, c, g, or t
  misc_feature (218)..(218): n is a, c, g, or t
tgtgccttttttgcnccaagggggagaagacaggcttgcaagcgaccttcggaggtccatggagcagctgcctttcggcccttcgctcataccaggtctgaacttggatcggagaaagaaattgaagtgctttgaacacggaagggcttaaaacactagggagcctcatcgccaagcctaggngccaactttcctntcgatcgtgaggattccgcacnccaaagccgtcttctcgaggctccggggcgcgcctgcgctggcaacgcgaaggaggacaaaaggccggcgtccatgttggcaccatgacgcagcatctccgcccgcagcccggagctgctgtcctcccggccgcgctcgctcctcctcccaaacaccagttttctttacaggcttcgagcccgtcgcggctgggccgggctggtctggcaggcgggcccagcggggcagggctgctttgctaatggcggcggctctctttccttccttcctcctttcctccgtccccccggtcgtggggagcccggagcaggaggcgggcccgcggccaggtcgggccccgagagcccgcggggcgcagcgctggcgaccgggtgtcgggggccgtttcgggggccgtgggcctcgggggcgtcgcgcgccgcgcctcccgcgctcgcctcagccgggcgcggcggcctgatgggcgccatttcgc

SEQ ID NO: 143878 - DNA, 515 bp, Homo Sapiens
  misc_feature (173)..(341): n is a, c, g, or t
tttttatttgcctcagatttattttttaaaattaatgcaatataggaaaaattaacaatttttaaaatttcacttagaattcatagattacagctgttcagactctagtaggccccggtttgctgatctatgagcgatactggtttgtgtgtagccaaaaatccctacagacnnnnnnnnnnnnnnnnnnnnnnnnnnnnnnnnnnnnnnnnnnnnnnnnnnnnnnnnnnnnnnnnnnnnnnnnnnnnnnnnnnnnnnnnnnnnnnnnnnnnnnnnnnnnnnnnnnnnnnnnnnnnnnnnnnnnnnnnnnnnnnnnnnnnnnnnnnnnnnnnnnnnnnnnnccccacatgtcagtagtgcagaggttaatccctgctctagagacaacacagggatcatgggacacaagtcactagccctggaccagccactgctcaagaggccacgtgcaatccacggcattcatctgtccctcttcctccactgttcagcacttgtcgtcaatctggaagctg

SEQ ID NO: 143879 - DNA, 562 bp, Homo Sapiens
  misc_feature (393)..(481): n is a, c, g, or t
agtagtaactatagtactgtttattcttggccagagagttaatcagtttgtacggtgtgtcagtgtaatgggctgtggactgaggacatttttcatcggatgttttcatttcttgcctttggcaaaaattccaccagtggtgataaataattccatacccctaagtggatattattattattttcaagtgtaagctacagctggctcctagcctgtcagctctcccggaatcgcagatgctacgtgcatacctgttgacaattctatgggtggatacagttccccattcccatttccatacttctgctctttcatcctaatggtgtcccctagtaattgggttcctcctcgtctgtctctttattctaaacctcagcaaggaactttgctctnnnnnnnnnnnnnnnnnnnnnnnnnnnnnnnnnnnnnnnnnnnnnnnnnnnnnnnnnnnnnnnnnnnnnnnnnnnnnnnnnnnnnnnnnagaagaattgagacacacatcactggcaactaaacttcaaatgctatacttgcaaaggttacaacgtagaaagaataacat

SEQ ID NO: 143880 - DNA, 542 bp, Homo Sapiens
  misc_feature (444)..(444): n is a, c, g, or t
ggcccgtctctttgtaagtaactttatttttatttacaacagaattggtggctttattcctccatctttagggacacttggcattagcagctagatggaaagtccgcagtgaagtcaaactcattctgccccagccacagctccggaagctcattggctcggtccaaccccagttccaccaccagcgacatcagcacttcctcatccactgggtccgaatcgatgatagcagggctctgggcaccagcagaaggagagagtgattctgcccctcccgcctgggccccaaagtcccagttttgcaggggtcctgcctccccgggttggcctggagtggcagcagccatcccctgatactggctattaagtttctgcagctgcatactagccagcaagtgaggggcggggtgcaggttgaaggatgggggtttagtgggatgggtncacctcaccgagacaacctgcaccacatcgacaccgtggaaaggcctgctgcctttctggacatcctgggctagccctacgacccggacgatggccag

SEQ ID NO: 143881 - DNA, 728 bp, Homo Sapiens
tttctttgtaagtaactttatttttatttacaacagaattggtggctttattcctccatctttagggacacttggcattagcagctagatggaaagtccgcagtgaagtcaaactcattctgccccagccacagctccggaagctcattggctcggtccaaccccagttccaccaccagcgacatcagcacttcctcatccactgggtccgaatcgatgatagcagggctcttggttccatttgaggctaccccagggtagtgcagaatggccactgctttgcatctttcaccgcaaggttggagtaggccacggagctcatctcttggttggcatcctccttcgcaggtgaggtgccacccttgacatcaagtgcaggccctcgacgttgttggcatttcagagccttggcagaagttggataaattggcgggaagtgatgctgccagctggagctgttgtgctcttggtccaaagaatcttgaggaccttaaaaagagtctctaatctttccaaggaggctagaattctccgtgacactctccactccgcagcggtcattaagaatctgctcagacacttctagaaagtgtccacttactacctctctgtatcatctttgcattgcttactctgagaagccgcctgccctggagagagggaagcgcggagcgcggtgagccgcaagagaggcgcggagcccccagcccctggcacgcacgccgccg

SEQ ID NO: 143882 - DNA, 505 bp, Homo Sapiens
  misc_feature (194)..(202): n is a, c, g, or t
gcggccgcaggctgggcctggccacctgggcatccccacgctggtctgggacacctgtgtgagacccaggtcggctcctggactctgccctggggtttctaactttccgtctttggagttgagtctcaacagctaaggttgggagtgtggctgaaacccgtctccacattccacctagaagcctgagctggccnnnnnnnnncgggtgtccagggtctcgggccggggggaatgggccggcagtatgcccagcgctggcattcttgtcctggcacctggggcttgggtgtgaatccaccatgtcgtgctgagcgccaggcacggagtggcaccctgagaaacctgagtgtgtagggtgggccacgctcacctgctggggatgacctttaggcaaggcaagggcccggacagacctcctaacttggggttttacgtctctcttccccaagccaccagccgcacaatggggtggagcggcccctgagtcatggaggcctggggtctc

SEQ ID NO: 143883 - DNA, 569 bp, Homo Sapiens
tttttttgctgttatgctgcatgtttttgaaataataaaactttattttgaaaacaaacactcaactcaaaactcttaactaatttatatgattcatactgtctcttgttaaaaatccacacgggggattttaagtctgtatcaggccatgaaaagtttagatataaagaaggcagttttctttttttcttaatgtttacaccagaccaaagtgaatcattttgagagaaccaccatctctgatttcctgttctctgccgtcttctctcagttctccgtcttctgcattacaggtattagtcatcaaaaatccagaacagatgtctttttcaagttcattccttctgtcaattatttgtctgttagaagagccattcagtattctttgttgtaaaatatgtctgtgggttgggcaagagggagggaggttatctggaaatgagtcttctccttgaggtgctaaagacaggccaataaatgcttcatttagcatatcccctctgtccaagggtcccaggagttctgaaatgtctggcacaaagccagtgctcttccatttcaacatactg

SEQ ID NO: 143884 - DNA, 601 bp, Homo Sapiens
aaattcatactggttagtagatattttaaatgtccccactgatattctctattttgcataaaagcataatgtcagactttctctgtgtggtggttatattcggggtgtctctgaatgccagcataaaaattcacggaattgaatagaaattggcctgtcttaatgacctatggtttcttttttaatgttttgaaataattaaagagagtttagtcacacagggagggtctaggtgacctgatgttgaagtttattactagacttttcagacctaaaaattttatttattgttattacttgaatatgtcaaaagtatattactggacaaccttttacacattcctctttctaaaatcgaattggacaattacagttctctggttcagaaaattacattagctcagaacccagtaacccttgataaccctgttagcgcagcaattcccgagtgtgtgctttgtgcagagcgttggactatgtactgctcttgatgtggggacagcggggacagagagctgtcattgaaatagacatctgtttaagaagcgatacttagatgaacctctgtatttctgaaaaataaatgtgaaatatcttaaaa

SEQ ID NO: 143885 - DNA, 432 bp, Homo Sapiens
cccaaagtcatgcttttccttaattatatttttattttattattttagtgtcttgagaaaaataccaagagatataatgtttcttttaattgtctatgcttaatcatctttaaacactttttaaatttctaaccacaagacctctctataatggtaaatgtaagacatcaccattttatcactcaaagtatgttattgaaagtttctatttggttgataaaaggaacaattttttcccacttttgatgcctgtgatgcaattttttattgcctacaatgagatacacttagtacaaaaaatgaaaatctggtatttcaaaattgcatttcttgtataataggtcagatttattaactactcatactttttctttacactaatcgatacatttagaaaaaattttctaagttagagacaagtttaaaagtaaa

SEQ ID NO: 143886 - DNA, 657 bp, Homo Sapiens
ttcggggaagaggacagacgtgaatactgtttattcatacagaggaggttccaagccacgaggcgcccgtcgaaaagcacatcacctctgtaacaacacacgagacacggccatggcttcacagctgcagcaaatcccaattcgccccacgacacattcgtctgccctctgaccatcattcaatgtccctccaacttcattcaagtcttctccttaaaactgtttcctaatcttcatgctatgaatggtattttcttaacacataattttgtagataaagaaaaacaattaaagtgtcattagttggtgcttttttatatgagtgaaagacctgacattattttcccctcaagccagaaaataatagggaggagaaagcatgaagacgtctcatccttaacccaaaccattcacacccaagtcacacaggccggctggctctcctcgcacctccggtcacttggccttcttgccacctttcagggactccaaggcggccatcctcgcctcctcctctgggatgaacacgctgacggtgaagtcgctggtctccgagccatacttgttcttcacaaccagcccgtatttgcccgagtcagcggtgctcacgccgttgatggtgaagtacgcggtcctcccagcctcgaacttgaagtt

SEQ ID NO: 143887 - DNA, 358 bp, Homo Sapiens
cagctatttggccatttgtccattctggttttaccttcatattgctgaaagaggcactggagtgatttaaaaaacagtcctgaatcgcaggtgccactcctcccccaatccctgtagagggagcatggtacagagagatcgctgggcactgccagatgacatttttagacacatcttgggccagaagagaacccaccacctggaagaaaagtccttcagcattcatcccgacggcattcattacaggctacctgaagagactttgggtcctggaaaaccagaagtgatacccaggtactacattgaaggccttgggtaaggctctgagacttgctggtttcaggtgagactcagcaca

SEQ ID NO: 143888 - DNA, 614 bp, Homo Sapiens
tttcaaatttctcttcactcttacttaagtcacggcttatttatgtatacacactatataatactttcctaaagctctcaaaatgctacaaataaaaacgaaggctttgcattatagctgctggacaaaaatatcaacactgttgatgtgtgaaaacacagtttctttgttctttagcatcagtgcacagggtatggctccaagtggtatgcaatttaggagagaaaaaacatacagcgtcttgtggaatagatcctctgttcatcattggcacaaatcaaaaaggaagtttactgtccttggtacctctgttgggtctcctccctaaagacagataatgtcatacatatatgccttcaggattaaaaccagatgagataggattctgcagaatgcggagattactggggagctgccgagatgaaccaggtcgcttcagggacccagactggaatggtgcctccctttcaatgtctgcatgtgaggcctctatttcaatgggctccgctggcaaaaccgtaacttttgtccctgtctgctggatgaactgctggagattgacttgccgcaactccttagtcaactgctccagttcctgttctttgtcctgtaag

SEQ ID NO: 143889 - DNA, 599 bp, Homo Sapiens
  misc_feature (109)..(109): n is a, c, g, or t
  misc_feature (273)..(302): n is a, c, g, or t
tattactttcaattttatttaaatcaaataatgttgtgatgatatgaagaactttgcatagaaaccacatgaattttaaagacaaaattcgaatacctaattatcctanttctgaaacaattaaaagaatacacatgttaaattgccataaacatgtacgtattacataatacacataacaatcataaaacattttatactgatttattataaataattggaaacaatatttcatttctcaaacccagacaacaaaacagtaaatatcatgcnnnnnnnnnnnnnnnnnnnnnnnnnnnnnngtaatatgagtttggaaatagtattctttatccaaaaactggtttaagaaagtgtctgtaggaacacaaaaggacaaaatactcattttctttcccttaaatgaaaacagttgaagaagtttttagaaggagaggcttacctgctatgaagaagccaccaagaatagaaaaatggtataatacctgcaaatatcacttgtaaggcaaaaaggggtagaatacagacacataaatataaaaaagacttgatggtaaactttaaaaagtatttttcttaacaatgtgaatagctttatt

SEQ ID NO: 143890 - DNA, 521 bp, Homo Sapiens
tttgttagttctgctcaaccagaatttatttagcagaatgtggacacattttgattaggcatctttgatacatttgtcaactcttccttcagttctgggactgttgatccctgcctgtgtattaccatccatcacccctgttcttcaaaatgaacacattttgaagaattatgccacctaagaaaagttactctgcttcttctgtcaagggccaagaagagatcttccaaaaaaatacttccttagccctgttggaaatgcttctgacatcaacctcaaattctttcttatattttatctgtgtgctgaagctgatacctgggattctgagccattctctccagcagttaaatatgtttgaagaattgtggctctctcatgacacgacagcatattgatccttttagcagtttctggaataagctacattttcttttatacttcttcatctttgcacacactattccctttccctaaaatgttctattttcctttcttattttcccaccctctcttgttct

SEQ ID NO: 143891 - DNA, 689 bp, Homo Sapiens
cccagcccaggaagctcggaagatgcctaggagggcctcaaggctcatccacaacatggacctgcgcacaatgacacagtcgctggtgactctggcggaggacaacatagccttcttctcgagccagggtcctggggaaacggcccagcggctgtcaggcgtttttgccggtgtacgggagcaggcgctggggctggagccggccttgggccgcctgctgggtgtggcgcacctctttgacctggacccagagacaccggccaacgggtaccgcagcctagtgcacacagcccgctgctgcctggcgcacctcctgcacaaatcccgctatgtggcctccaaccgccgcagcatcttcttccgcaccagccacaacctggccgagctggaggcctacctggctgccctcacccagctccgcgctctggtctactacgcccagcgcctgctggttaccaatcggccgggggtactcttctttgagggcgacgaggggctcaccgccgacttcctccgggagtatgtcacgctgcataagggatgcttctatggccgctgcctgggcttccagttcacgcctgccatccggccattcctgcagaccatctccattgggctggtgtccttcggggagcactacaaacgcaacgagacaggcctcagtgtggccgccagctctctcttcacca

SEQ ID NO: 143892 - DNA, 770 bp, Homo Sapiens
  misc_feature (427)..(427): n is a, c, g, or t
agatgtcagtttgaaagtacaagtttcatacttgtttgctggcagagtccttgagtgctatcccttatatgttgtctcatacgtaacgggtctcataagttgctaaagctttcattcagggcatgcccctgaaaatagtagaatgcataatatggtattttatggttttcacatgtatatggccttcctttagtagtccttgaaatcagacgttcctattaaatattgagctagaataaagagttaaaagaaaattatgttatattctgtgaatctcaaatgagatttatatatgtgttagtaagtgtgaacacacttgttttgaatacatactatgtgccaggctctctgctagctactagaaaacaaattacaaatacaccatgtcacttttctgttaagccgtaacgttattgaatgctataanttggaagtgagtgtaaaagtgagtgtatatgaaataaaccatatggcagaataaaaatgattataagccagtatattgtaagtgtattcaaaaaatctgcttaacacttccttgttaaccgaacttatttttaaactgacatgtttgctgacggttgatattaccttttgaactgaaccaccctgattttaagcctctaagtggtatattgtgcaaacatttgaaatgacggtgcaaaccatctttgggagatttgtaccctagtttctataggtgccgtcccagccaggaagcccggccgtaatggccgaattcccgggcatatgtccggtaccgtcgactg

SEQ ID NO: 143893 - DNA, 934 bp, Homo Sapiens
tttgagagaacttgaacatttaatatggtcagcaccttgtaaggtgaaggtgtgttttttacacaaattataaataatgaaaaatatgcatttagaaaaagaagcagcagtccccttggcgggccggctcgaggactctttggttgagtggcaggtgaggccctgggtccagggtctgtcagagcccccctaggtcatctgccaggaaggccagcaggtagcggctgacatgtctgtcgatgatgacaggcgagaaaccgaggacgcgccgggtccctggcaggcccttggggtctggcggatagcagtacaggagcagggccagtcccacagcaaggcccaggccagccaggaagctcatgggtcccctgttactcagctcgccgctctggctgcccgagtctagctctgtgcaatctgagttctgcagagcgtggcggctgggcaggcggctgtgcaggggctgggcatggatatacagggctcggtagaactcctggcagtcccgctcaccgctccgctgcaggtggctcaggaggtcacagagccgcacacgcaaggatgccttggggttccggaacttttccgcctccttgttggtaaggatctgtgggtagtaacggttcatgctggaggatgatcctgtccacctgctgctcactcaagcgcccatggcctgtccaggaaaggcgtgtcctgtcaccaggcggtcacaataggtctgatctgtcatggcgacggacacagacgccggccgcattccccaagcggtctgccccgccgtgcgtccgcccctcggtcagccgcccggtccaccagctccagcgaacgccgcccgcggccgtgctcgcccggacgcgtggtcgacgatatcccggaattccggaccggtaccagcctgcttttttgtaccaactgttctatagttcaccta

SEQ ID NO: 143894 - DNA, 443 bp, Homo Sapiens
ttttggagggtggtgaatgtggaggattttattgctgatgaaaatggctctctgtggggaggggagctggaaagcagatggagtgggagggcaatcctcccctggagttcagcagtccttggccagactcctctctgaagccacgttgtcaagttgtctctttgaagtcaagctgcttctcttggatatccagttgcttctcttctctgctctctgctgatggagcatccaggagcttggtgcttaacagatggtacactgatttcacaacatcatctactctggggatgatccacttggccaccacaatgatgctgctgacagtggttgaagtcttcttttcagcctctgagcccattgtcatggcaacaagtttttctctcaaagtgtgacaaatcttcaagatgacaatgcagtgggacatgagacccaaggcatcctag

SEQ ID NO: 143895 - DNA, 437 bp, Homo Sapiens
gcggccgccgccatgtcggtgctgggcgagtacgagcgacactgcgattccatcaactcggactttgggagcgagtccgggggttgcggggactcgagtccggggcctagcgccagtcaggggccgcgagccggcggcggcgcggcggagcaggaggaactgcactacatccccatccgcgtcctgggccgcggcgccttcggggaagccacgctgtaccgccgcaccgaggtagcggccctcggcgccggccgccctgtctggcgctgtcgggtcgccccgagtccctccttctcggccccgctttcccagcgtcgtgagcttagtgctttaggcgcccacggggtatatgtcttagggtcttcaccactttttccactcaccggcactagaaattggctagatcattgggttgactagtcatttttgattgtcct

SEQ ID NO: 143896 - DNA, 434 bp, Homo Sapiens
ccgggccctttccacctccgcctccattacaatattccagctcaatcagcagcgtggtattgtccatgaagtgattgtagtaggcaataatgttgtcgtgctgcagcagtgccagaataactatctcattcaaggcatcacgacgttccttctcagacagccgggtcaaatcgacttccttccacacaaccagtgagtcatcctcggtgcggcggtacagcgtggcttccccgaaggcgccgcggcccaggacgcggatggggatgtagtgcagttcctcctgctccgccgcgccgccgccggctcgcggcccctgactggcgctaggccccggactcgagtccccgcaacccccggactcgctcccaaagtccgagttgatggaatcgcagtgtcgctcgtactcgcccagcaccgacatggcggcggccgca

SEQ ID NO: 143897 - DNA, 489 bp, Homo Sapiens
tcacaaaggtcctgcaaggtaagttttattaatctccattttgcaaataaggaaatttaggctcctaaaggctaaataatttaggacgggactcctaccttgggcttaaacgggggatgccgtacgatatatggaccactgggcaatggctcccttcctggacatattaaaggacttgttctaccagcacaaatgccagtgtgagagaattattggtcctcgtttctggaaacaaatgacatgggcagtttgggtcatcagacaatatcatgcttaataattcagtcctatcccacatatgttaggtgctggctctcccaatctggtcatgacagatcctaattgttctggataactctcattcttcccaccaaaggaagagaaacaggcacattggtttgggaggccatcagagatggtgtgcatctggctcaggtcctcttgcttccagattcaccaaggtctgcctgacttggaggcagtgggctg

SEQ ID NO: 143898 - DNA, 374 bp, Homo Sapiens
gagagggaagaaggccccacttaggtggaggaagcagtcattgtcaggtgcagtttcccttctgcaggaacaagtgcctcatgtagccagcaaacatttggcacctatccagtgccaggtcctggaggccaaagccgaggagccgtcccctcccccagctctccttcagagggatggttggggaggaggtgccaaggctttcggtctgccctctcagggccacccaggctggtttttcagtgggggctagaggtgctgggaggtgccctccccttctcccaggaagttcctgagggacaggggtcatgtgaaccccaattgttttggggggactggccaaggcctggggctctgaggttaaaggacacattctt

SEQ ID NO: 143899 - DNA, 945 bp, Homo Sapiens
ggggggggccttcccaaaggggaagaaaggataagggtgttggggcccccccaccaggggccaaaggccaggcgggccagtattgccccaggcttctctctcccagtctttccctgcgtggcatctcctttgagggtcagagaagccagggagggaggcaagctggggtgggtctcattatagaaaagagaagactggggctaagaggggatgttcctgccagcatgccagcctctgatgccacctgcaaaactggtggcaccacctcaaactcagcaatggccttttcaaacctggctcagtacaaacaactcccaaaccatacactttaggaaaacttcgaaagagattctaaaaattatttctttggggttatacattgctcagtggcttggaggtcctgatcagtctgctgaaagaagtggatgcctcagttaatcaggtgttacgggattctggaaagcaccaaaggtggggcctctaggcaggaagaggaaagtttatgcccctcttcttcttgaggtgcctctggctgcacctgggagctcacagtgactgggtttcacctgcatgaagtgacgtggtgtttagctgatggaggcacaggatgtgggggctgggtgtgctcctgcgtgttggggaagctgagctgccaggcccagggtggcaggtgccctgtggaccaggtcagtccagtgggggttactgaaggtgagtgaggagctgggaggacaggaagctcctgaatgtttccagaacccctgtagctctaggactcacctgggccaggaggcctagaatgagagactttctgggctggaaggaaacttaaaagtcttcaaatccaacccccaatttgaagtcctagtggagccctctgggtttgcttgttcacctccaatgcctcgtgccgaattcgccacccaggcctcgctaccttggacc

SEQ ID NO: 143900 - DNA, 604 bp, Homo Sapiens
aatatgaagtattgctacagtgccaaggctggccccaaactcctgggctagggtgatcttcccacctatgcctcctgagttgctagggctacagacacacaccaccaggtctggcttctcaagacttttaaacaaatacttgcccagtgactaataggagatctggttaacataaagaaggaagctgcttagtaggcacagaaaaaaactggaggcaaagtctggcctgttgattcatacttgctaagatttaatgaaataatgcatgtttgtttaggtcctagactactttaaaacaacctaaaaaagatatttccctgatccagaatttgtagatacgagtagaggttaggtgttcacacaacttcaaatattcattactagggagttgcttacattttcatatttttctagttataatttctacttttagcagattctaacatttagatcttttggtatgaataggtcaaaacaagtcaccattaactgacaggaagcacagaattctcaatttagttttggcaaagacattattttataaatatgagtttttaaatgattcttatgaagaaactagcaccaaagtgaatgcactctgcaa

SEQ ID NO: 143901 - DNA, 562 bp, Homo Sapiens
atacactgatgtgcatcgcagtatttttgtaataatgaaatattgggaacaacctaaatgttcagagactggttatagtacataacattatagaatgtgttatgaatattaaaaagaagaggtaggtatgtactgacatggaaagatgcctatgagaagtgagcaaagcaaggtgcagagcagtatggatctcacctttgtcaaaaccaatttaaataaatgcatgctatatattcacatacctatgtgtataatatacacattgagtctttagagttacattttatgtgcatggtacatgaaaagatttgaaggcatacatgctcactcaggatactcctaggattggggtgggagagggggaggtgataagggaagaatgttcacatctttatataatttgttatctatagttataaaaaggaaatataaatggtaccacaagatctaattacttgaggtgaacgaagattgtcagttcatgacttgcaaactactagatggattcaggagttataaaagaaatctatcaaagtatttgttcttaatttttaaacttaaa

SEQ ID NO: 143902 - DNA, 424 bp, Homo Sapiens
tggctttgtaaaaataactttaatgctataatccaacaaaatcaaggagacaaattgaaaaatcttcgtctctactaacatcttgggaatggaaataacatttttcttagacgtaggaagaacatcaatataagtaattaaatatttatagggttgttcaccaaagggttgcataccataaatacagcattttatgcctttatagtatcattttaaaaatggggataatcacagccatttcatagttcttatgaagatcatgtaaattagtgtgtatagctatacaaatataaggtgcatttattgttattcaattttatattagattatggcagcataaagaaatgagtaacagcatggacttccgaacaataggttcaaatctttgctgtttcaaatctttgctgtttctcactgttcaaat

SEQ ID NO: 143903 - DNA, 1057 bp, Homo Sapiens
ttttcaaaggcaaataaaataatttttattgggatgtaaccccatcataaattgaggagcatccatacaggcaagctataaaatctggaaaatttaaatcaaattaaattctgcttttaaaaaggtgccttaagttaaccaagcattttgataacacattcaaatttaatatataaaaatagatgtatcctggaagatataatgaagaacatgccatgtgtataaattcagaatacgctttttacacaaagaactacaaaaagttacaaagacagccttcaggaaccacacttaggaaaagtgagccgagcagccttcacgcaaagcctccttcaaagaagtctcacaaagactccagaaccagccgagtctgtgaaaaaggaattccaggttttcatcaggccgtcctcggggctccgtgtactttcaacacaccgtggacaggggaggaaatgggttctgcttgctgaccaccagcttctgatgctgatgcgatatgtagcctttgacgtgtcccatgtatatcaagttagccagaatacactgaacttcgtcaatgtccacgtcctccacctgcatgaacttcaaggcaaccagaaaagcatccagagacagctggtgtgttttcagtaacaaatacactttcttaaagaggttcctgtaggtgatgatcttcagcttctccaggatgaggaagattccgcagcgaatgaagaaggcctcgtgcttcgccagcgcctcgtgcagcagcagcaggttgccctcgctcacagctctggttacttccgcaaactgcatcaggtgatactttttcaggagctccacagtgggcatgtgacccaatagcatttttactggaagcaaatagatcagaatcatccttttgttcttctgactagaacggtgacaatgctcaaaggcaaatgacaggtactcctcagcttgcttaaaatcgctgtcaaacatagccttgcgtccaacgtagtatttgtatgttactctctgtgcagtgctgtaatcgtctttcaggtttgagctgtcaattgctctaattacc

SEQ ID NO: 143904 - DNA, 1834 bp, Homo Sapiens
ttttcaaaggcaaataaaataagtttattgggatgtaaccccatcataaattgaggagcatccatacaggcaagctataaaatctggaaaatttaaatcaaattaaattctgcttttaaaaaggtgccttaagttaaccaagcattttgataacacattcaaatttaatatataaaaatagatgtatcctggaagatataatgaagaacatgccatgtgtataaattcagaatacgctttttacacaaagaactacaaaaagttacaaagacagccttcaggaaccacacttaggaaaagtgagccgagcagccttcacgcaaagcctccttcaaagaagtctcacaaagactccagaaccagccgagtctgtgaaaaaggaattccaggttttcatcaggctgaaattagttacaaatgaaggagattaactcgggtgtgctgaaaatctcagcctcagcatccctgggaaaagcgcctccaagagttccggcttcagggagccttgttgcagtaccggaccggtctcatcagcacaaccaaagtggaaagcaaacaactgctccacccgtcctcggggctccgtgtactttcaacacaccgtggacaggggaggaaatgggttctgcttgctgaccaccagcttctgatgctgatgcgatatgtagcctttgacgtgtcccatgtatatcaagttagccagaatacactgaacttcgtcaatgtccacgtcctccacctgcatgaacttcaaggcaaccagaaaagcatccagagacagctggtgtgttttcagtaacaaatacactttcttaaagaggttcctgtaggtgatgatcttcagcttctccaggatgaggaagattccgcagcgaatgaagaaggcctcgtgcttcgccagcgcctcgtgcagcagcagcaggttgccctcgctcacagctctggttacttccgcaaactgcatcaggtgatactttttcaggagctccacagtgggcatgtgacccaatagcatttttactggaagcaaatagatcagaatcatccttttggttcttctgactagaacggtgacaatgctcaaaggcaaatgacaggtactcctcagcttgcttaaaatcgctgtcaaacatagccttgcgtccaacgtagtatttgtatgttactctctgtgcagtgctgtaatcgtctttcaggtttgagctgtcaattgctctaattaggggtttacataaatggagtttgttgatcttgaagtagattttaaacagctggttcaccagaaacagcatgccccacttcttagagtcctctataccagcacgggtgtcgctggcacagacccggaaacagctcatcagtaactctgctgctttttccaacatgtccccaactttgctttttcctttctttaccaactgttgatctgcattattggcaaacactcgaaggtcaagcgctactgcatacatgacaggcagagcccagttttcttctttgtgggcctggaatgctcgcaagaatgattggactatcacggtctggcacttgtatgcctctatgaagtcatgattccccactgcataagtgcaccttaaatgagctgcaaacatttcatcataagggggttccaagacttgttgacacttctcctctggagaggccatttgaagtcgtgggtttgcaacatgaggatgtttaaaagacaccaactctgcacaagatgctccatctctgctgtcgatggcttcgtacacctgctgcaggtactggttaatggtaatgtgcgccatgggagcgccgccgaacggagagcgccaccccctacgcctca

SEQ ID NO: 143905 - DNA, 487 bp, Homo Sapiens
cggagtttatgtgcagggatagtcggggtagtggagagaggccatttagtagtgggggcttcgctcacccccgatagggggcgccaggaagccaagaaggatgtgcagcggcggactggttccaagccccttcagaggcgcggggtcttagggggagggactggcttccgggcccaagtaggaggcagtccggctctcaggagtgctataaatggttaaagccccaggcaggcccagggctgggcctcccaaggccgcctggacatccagcaggagtggggccccgagcgtggggtccttccctaggagaagtgggactgggctcaccaggggaaatgttccccctcctttctttagggaaggagagccctgcccgcctgccttctgctcagttaggataaaacatccattcttaacctccccactctcgcccaatggtgagggcatgggtggctcaaggaacgctctgcagtgcagcctgaactca

SEQ ID NO: 143906 - DNA, 411 bp, Homo Sapiens
ggcatatatttttaaatacactataatgcaaaaatttatatacttgagattcacctttacatttagcaagctttcttccagagactaaaatgatatttgttaagcatactgatgcacacaaccttaagcacattcatcctataatcagcttgagaagtagacacttcatataaaaagatacacaaaggctaaaaatgatactagtattcagaacactaacaatctcacttgggtcacaggcgacttgaggttcacatgtaatttatccaaaatactgcagtttcaaaagaaaaatgtcttttacactaaatactcaccacagtcatcttatgcatgaatatagtttacctgaatatattttaaaaatttattccaggaaaaaacaatgattaacagtaggtatgaagggtt

SEQ ID NO: 143907 - DNA, 440 bp, Homo Sapiens
aggctcttcttcatcagctagactgtctttgccttgacaagccagagcccagtgtttggagcgaagcccaaagtaaatttttaataagtaatgtgaccttggacaaattcatttcatttctctgatccctgagggtggtgaaaacaatcaaaaagtgcttccaaataaggaataacatttggctcagagagctctctgcagagggtccagaaagagccacccactttctggagaattctttcatcttcagaattcccaatgagacaccgaggagaagcctctgcagcccccaatcctctccctggaggtctgttcatcctaatggcttctgtcctttctaagtgacacgtctacacctccagctctgggtttaaagatgcatcccttgaagggtccacagacacttacatccaatataaggacgtcttcctgacagcaaa

SEQ ID NO: 143908 - DNA, 426 bp, Homo Sapiens
tttttaatttacgagaagctttcactttattggatacatcttgaccttgtgaaaaaagacgctggcgttccttgaatgtcaagttttcaggggccccagaacttccaggtgaatctgcatcttggcttttagagcgcttctcttttgcatcccgacaggcgtcatgggctccaacagctgctccagtagatcctgggtaagagtttggtcctttactgagtaagtaggaaggtaaaagacccctcatattgtatcaaagtttcatcagtttgaaattcatccctgttggtggcctgagtaatccaattactactctcaaaaggtgctaaaatgttgacctgacgcccttcactattagggaggaatactgcccactggcccagctctgcctctgactggcacagcaactctgggtgagtgtaacat

SEQ ID NO: 143909 - DNA, 524 bp, Homo Sapiens
cttcacaaattcttctcaagtaacagggttggagcaaacttttactgttttgaattagatgaacaaaattgtatttaattttacttcccaagagaccttccattttctctgagaactttttctcatgatgaaattctttaagcaggtttattatcagatacagaatggaattcatttagtgccaaggatgactaccaggttccagatttttgctgctttagtggttacctttattttatagcacagactgtaaatgagttattttagtaaaagcattttccatgagttttctgggaattaatttgataattagatgccagtttttaaaatgcataatatatgcatctgtatcaaatgtgtatgacaggtgcaaagcaacactttcccttacttggtttttctgcagcagcccccacatttatgaaagtactatggcattttttcttttcaccattgcactcctatctggcctcttagagaatttttcaggatagggaagggagaagattgagaagatttctggc

SEQ ID NO: 143910 - DNA, 509 bp, Homo Sapiens
tttatgttactgaaacacaaatttatttaatatttgataactggattttattataattggtttcttttgtaatctgatgtactttatctgtttaaaaatattccgagaagggttccacaagcttttctagcctgacttctggagggggggtttatcatattcagtaaaggtaataaatatggtttgtgaagcttgttttaattttacattatgtacatgtgtatacacatgtacttgtagagttatctttgtctatggtcactagaccacaatgttaaatgtttttctttctatggatcagtttagaaggtttgataatcactgtcccccagcgtggctggtggtaagtggctcatcagcttcgactctctggcttccattgcagacatcagttatcagcatgctttcccactgagcttggatgtaactttggaatggtgcttgaaacagtactgcaggcggcttcaccaaacaatcggggttgacataccatcaaatttatttcttct

SEQ ID NO: 143911 - DNA, 540 bp, Homo Sapiens
  misc_feature (258)..(308): n is a, c, g, or t
  misc_feature (333)..(349): n is a, c, g, or t
gaactgtgggatattgaggcaatggaatattattcagtgctaaaaagaaataagccattaagtcatgaaaagacacaggttaactttaaatgcatatgactaagcaaaagaagccaataccaaaagactatatgctgaacgattcctgtatgatactacaattaacacaagccattatttatctgtccaaacccatagaatgtccaccataagagtgaactgtaatgttgggaccaggtgtgacagctcatgcctcannnnnnnnnnnnnnnnnnnnnnnnnnnnnnnnnnnnnnnnnnnnnnnnnnntgacacagtgagactctgtctcagnnnnnnnnnnnnnnnnngtgtaccgtaatgtaaactatgggctttgggttattatcatgtgtcaatgtaggttcatcaattgtaacaaatgtaccactccggtggaggatgttgataatgagggaggttatgcatgtgtggaagcaagggagatacggaaaatctctgtcaactcctcttaatatttctgtgaacctataacttcttt

SEQ ID NO: 143912 - DNA, 544 bp, Homo Sapiens
cctaacctggactaccctggtggtccctgctcctaaccactgacccacccagcctcccacaaccacagggggctagagccagtccagtgctccctcccctgctaggctcctcttctgtgctctttctcccacatcaggacccactgggagagctatcctagggtagcctccagctccaggacttccagggtgcccgtcaatagcctggctaatttaatagatgcaggagagagtgatgtggagggtggtgggggcaacgggacttgctttcctgagaggtgggactcaggcctctgaggctctgggtacctgtcaggctgggtattagcccagcccagattccggggcaggcagaagggctccctagagggaagagaggttctgaaaggccggccctggatcctgcaggactcgaggaactcagcagtggccaagggcttcccactcagccctcccttagtgcccatccctgggcacagcctgacaggcaggagtagggcccagtgtccactcgcccaggcttgaccaccttctcttctcaggc

SEQ ID NO: 143913 - DNA, 357 bp, Homo Sapiens
ctctggatacacattagtaccaccaattttatttatataagaaatgcctggtccactggacttttcaatttaactcagtaataattactgctgtttcttgacagaccagtgatatttcccccatagttttaaagtacaaaaaacagaatagttaggggaaaaaaatctcaagtataaataatgcaacctttaacctaccaagggtcactaaattgttaacactgattattataaatgattcaatttatttaaactaaaaagcattaattaaacatttcctcttccatttgggccaagggacatgcttaacaaaacacaaaaaagcaatagaagcacaaagttgtatgattttttcag

SEQ ID NO: 143914 - DNA, 496 bp, Homo Sapiens
tttttttggttttatcttccctttattacaagaaggaacaataaaatagaaacatttgtatggaaaatgcagtgaggagtggtagggaagcaggtgaggaggggacagggcagagaaactcccggttcagggagggaaggggagcaggctgcccccaagccctcccacgcagaggatcatgacccgaggtccagggccctagagctggtggggcagtgtgggggacagttctgtgcccggctccacgcagcagtctcgacagcaacagccagctgccggccccccagccactggtgtcagcagctccccatggctcgccgtctgcccctgcccctcctggctggtgcccagctgcagtttccctcatgtgccgcaccacagccgtggcattgaaggcttgcttccacttgctcttggcaaagttcttcttgatctgctcactcacggactggtggatattcttatctaaaagtgtaatctccgaaatacacgggtg

SEQ ID NO: 143915 - DNA, 205 bp, Homo Sapiens
tttcgtttgacagatgtttattggctcacatagctgaaaagttctgaggtagctctgcttcaggtaaagcttggtctagtggctcaaaagatgtcaccaaggacctagtttctctctgtttagtcactgttttctttggtattggctttatccttaggctccatatggtagcacctggaagcttgagaatctccccttttaacag

SEQ ID NO: 143916 - DNA, 430 bp, Homo Sapiens
  misc_feature (189)..(238): n is a, c, g, or t
agatgagaagttttactcccccactctccagtgaaactggtgaaaagtatttttaaaggaattaagaatgggtcaatgaaatatacagctcctttctggaatgtacctgttctgctacaaccatggatatcctgacctttctgtgcctttcagggacaagggtaatagaggagtttcagactccctctnnnnnnnnnnnnnnnnnnnnnnnnnnnnnnnnnnnnnnnnnnnnnnnnnnagacggtggtactctttcccctttccttgctttctcctgctaccaaaacaaacaacaaaaactacattgtctcattggatgacgaagctaaaattttgtagcaaatctatagaagaaaagaagtggaaatctactcaagagctactgtaaaacactgtatacaaaacaaccactttgattcacattaaaaaa

SEQ ID NO: 143917 - DNA, 488 bp, Homo Sapiens
atggctgcaatatattccatggtgtttatataccacattttctttatccagtcatctcttgatagacacttagatcgattccatgacgttgttattgtgaactttactgtggtaacatacaagtgtgggtgtcttttcaatataatgatttattttcctttgggtactcagtagtgggattcgtgcatcaaatggtaattctacttttagttctttgagaaatctccatactgttttccatagaggttgtactaatttacattcccatcaacagtgtataagcattcgcttttatattttgagagtttttataaacatgtttcaaccagtatttcttggtgtttttgttgccaggatttttatacttaatgtgacctgaggggttaaatgtcctattatttgagtctatttattgagtctatgaagtaaaaatggtgttggtgaatattcaaggtgtaatgatattcattatatgggaccatgatata

SEQ ID NO: 143918 - DNA, 463 bp, Homo Sapiens
gggagacacagggccaatttatagattctgatatgacaaatttgatgcatattctgatacattcaaaagaaaaaaccattatatgagttttttgtaaaatacagaataaaagaagacgtggaagttgtgtggaagatgcaaagctatgtattgcaagatatgtttgaagacctttagttttggcttacgaaaattctaatcatatttaaagaagggaacagacgtggatgagaaatccaaagctgtgcccacccagttgcatgttattatttttaaaccaatttctaacatttatgaataacagacatttaattctgcttatcaaattctccttttgaatgtctgcattaacctaagaaggcaggtctttctggatgttagattaatttataggcattataaaaacataacaaacttacatcaagatgggacaagtctgtgtaagtaagtatattaattaggc

SEQ ID NO: 143919 - DNA, 556 bp, Homo Sapiens
  misc_feature (332)..(332): n is a, c, g, or t
  misc_feature (365)..(365): n is a, c, g, or t
  misc_feature (393)..(393): n is a, c, g, or t
ttttaccaatctattttatttattatcaaaaaagggctttacaaatcatttgttctgtctcttggaaacaattttacaaatgatgagggccacaggccagctatccataaacaaactaaacttataacgtggcttaaatactaaatatgttgcaatggaaaacaaatcaagattgtcacaatactaataactaaaaaattttaaatgatgtataaaaggctctgagaaagaggctggccaacattgggaagatttgaggaggaacttccagaaattttcaaagagtctgggaggttgataatgcttattatgcctaattttataccaaaacnttatgttttctctttgctagaaccaaggtatanttctcaagattacattttgagctcaaangagaagcaaaacagatgagatactggggagacattctatgtcataaacagatagagatggaaaaatagccaaattagaaagaagaggactaaagagcaagcacgcacactggggagaaaaaagtcaaggacaaaatgaactcaaaatccttgggaagacagag

SEQ ID NO: 143920 - DNA, 461 bp, Homo Sapiens
tttttttcgaaaaaatgtctccctgacggactgggaagtcatctttgttgaagacattgggcgtcagcgagaggcattgaggcacttgagaaacaggtgaggcagagcaggagggaggacagggcaaacgccggcggccaggcaggataaatcaccgttccactgccagggtcataagggatggggttccaaaagggtggcttgtccagagaggccagcattccagtgacagggactgttgccatctcccattcccggcttcctcttccagaccgtattgtggtgtggcttcatttctcagagaagagccgtgaaaagatacaagcatcttctctggcgtgggtccgctggtctcctgtgggacaaagagttcctgtggggctcttgttctcgtctgcagtgtgttcatcttgatcccccaccaacaccgtccagagaggcctgagggagggattccatgc

SEQ ID NO: 143921 - DNA, 143 bp, Homo Sapiens
tttgtgtatctgctacagaattttgcttcatggcttccatgagacttgcggaggaatcttctaagcaattattttaaactgacgacagcttaactctgattacaaagaaaattaaagaacaacaagcaggcaaagagaaaatt

SEQ ID NO: 143922 - DNA, 319 bp, Homo Sapiens
gctcacgatagtccaccactgctttccaccatcactacggaatcaagtccatgaggatactcacccttatgtcagttgcctaagttggaaattatagaatcttcaaattggaagggacgttatcatccaagatttcaactttctactcactgcaaaatcccttctggaacttcccagattgatgaattttcatcagctctgcttgagtactcccagtgacttggaaaaaaaacactgtaatatggatatgaaatataaactgttcatggataaattattgcataataaaaacagtgcctaatggctacactcccctaaa

SEQ ID NO: 143923 - DNA, 477 bp, Homo Sapiens
tttttaaagaaataactgactttatatttttcacttggagtattgtcttgatttcttcccctgacacattttaatcaccacagaaagaaatcccaccgatcttcttcatctaattgcaaagtgctactgcattaggttataaaaatggcctggattagcttcagaaggcactggtgtctggttgtatgtaagcaagcagaggagttttagagctaccacaaaatatgcaacaaagttcaatagtgctatccagttcagatagatccactctttggaaaagcccagctttcttctccatctctaagttcatccacatgttagttctgacatctgtaaattgctaccattttacatttggttcagcttgtcttctcacttctgtaagtctgaatgacggtagtttatcttgtatgtgaacaatttaggaaagccaggaaagaagccaagtagagttctcttcaacaagggtcaacaata

SEQ ID NO: 143924 - DNA, 426 bp, Homo Sapiens
ggcgggccgaccaaggaaatattgtaaagttcggcggaggtttccaaatttaaatttttattatgacaattgacatattaagtgaaagaaatgacagaagtattataataaaacattttgaaagaaaaagttacacaattaggccaatagctataaaatggctttaggcctggcttataacaccaagagttctgatcagactgtagtgagacactgaacatttcattaacaaaaatactggcaccagccacaacatattttggttgtcacttacaaggaatattgtatttaaacaactatgcactgcaattctaacacactaggtgttcatacactgaagttaacccctgaagctttaagctaccaagaattcccatacttttaatgcacaatttactttgcgtgttatcagaattacatttcccc

SEQ ID NO: 143925 - DNA, 471 bp, Homo Sapiens
ttttggctcctgtaagtcattttactttgaatatataggaaacaaaatccacaaacaggaagctatgttctatggttatgtcttttaaacaatgttctgtatttacaaattgtttttttccctaagtaaaagcaccagctgaaaagttataggctgctaaaaccgttacaaatattacaaacccattaaaagacattatgccaaacgtacttattaaaaaccttaacaaaacgaagagacaactgacaacgcaaccaaccaattgagccaccatgctgggctgggtggcagttccaatttccttgcctgtgtttctgataaacggggctgggagtgcttatcccagggagaggatcctcgcccaccggcaggtgactacagggacagagctggggagaggcagctgtgtctcaaggaaacatggcagcctcactttctgctgtaggtggcctcctggtcagaccccctcaa

SEQ ID NO: 143926 - DNA, 383 bp, Homo Sapiens
atatattcatttctagcatccagctcaaaatgcatatctatctgctgaagtcccacatcaccatcagctccacccagaggatctcacagtaaaaccacaggaaccagagagcgatatgacatctctgctgacgtgaacacaacaggagggtctcctccccctcctctacctccccaggcagtgaccttgcaagctcatcagcacagactggtccagcgtatgggagaactggagcaaggaggctggcagctggcagggttggggtagaggggagggcagggaaaggtggaagaaggtagatacacgaggatggggaggagagcgattgcagaaagatgaaatggtgttctctctccagcaagtcaattttgaaacatcaagtt

SEQ ID NO: 143927 - DNA, 328 bp, Homo Sapiens
tttccttcatgtagattgctgtgtgtgtctttttcttcataattccccttaattctgtgtgctttgaatgacactgttgttgttactgttgttttatatccattgtcacataaaactcttatcatttattcttccaggccagggactgtccttatgggtagagatacactatctgcaggaatttatttttttacgtatttttactagttgatgggaaagacattgggaaagacctgggctggatttgtgatgagctgtgtttactgagcatgatgaagtaaagctcaacgtgattactctgaagtccagccttactgtcagtctaagg

SEQ ID NO: 143928 - DNA, 626 bp, Homo Sapiens
tttttttgcaaatagatttctgtaatacataatacatccacaaagcactagataatcaaagtttaattgtgaacatcctatgcaaattgctggcatgccatgaggatgctgttgaatgtgctgtccttttgatctaaggaataatagtggtcctgttcaccacagttgcattggtaagagtgacgatggtatcttctgtgaggtccactctgtctcttcaagttgtctttgtgacagagagcttgactagcagagtgttcatgggtcagagagaagcacagtgtcttcccacaggatttagccactggccatgtctggattcatggtcgaattcactagacttcctggacacatacaagcccttctattagagccaggtttctccatcagcaaagacaaatggttttctagagcagtggttctcaatgtgtggtctctgggccaccaccagcagcagcatctcctcctccaggtgattctgatgcctgcaggaataccaagctctttgtcatttatttggaaactggtcttatttcttcaacttataaccggaggcgctgcaggctcggccctggcgcgcggccaggccaatcggggcgcgcggggcggggaggagccgcggccgc

SEQ ID NO: 143929 - DNA, 1062 bp, Homo Sapiens
  misc_feature (170)..(170): n is a, c, g, or t
aaacgtttccaagggggtttggaataaattcccctatccctttcccaggcctggggaccaaggaaggaaaaaagccccaagcttgactcaactatttcatatagaaaagcattgcaggagaaaactttgtttaaaaaaacataaaacctcaggtgaatataaatacattntgggttcatctgtgctatgtccatatagaaatcccgtcagatattcagtctaccgggtatttcagttggatttcgtgtctgactgaatcagtagaagaatatacacttgcatatacttacacagatatgcatttacatatacaattcagaccatgaaaatttgttttaaatacatttacttaaaacatgtacctctaaaaataaatacactagcctccatttagctaattctcagagttctttcacaaaccaattagaacagtttatcaacaatggcagacaatcaattagccgccctttaaatccattatctatcagtaaacattttaaaattcagatgtataacagaaataacatccgcagaatagaatgtagatagaattctcgctttgaaaataaatgtcttgatttccttgatatttagttcctacagatgtctacactttgcctctgcatttatctagcagtgggagagcattttctggtgacagcattctattccatgacattaccttctaatcaaagaagttagctggcattccctttgctgttttgttcgagagaaggaacacaacatcgtttgtatttgatatcactcccatagatcacagtgagttgtgtgttttaacgtaatttacaatgtgctgataccactgaggtaaagcagaagtagccctggcatttaaaaaaagaagtctcccaggagaacaacacataaaggacctggtggtgtatgtccaagttccatgaagtaactcaaaaccactgccagaatggacacactggatatctgatatcatagtcgaaacaatacaaacagatgaaaatactcaaaatacttcctttcggacgcgtgggtcgacgatatcccgggaattccggaccggtccag

SEQ ID NO: 143930 - DNA, 775 bp, Homo Sapiens
cctgggacccccctccacagtttcagaaagttggttctcccctgtcagttttttccattcaggagatgaaccaacagcactggggccaattttcaatgactgatcaaatatggcgattgaaaataaaacacccatcatctacaaagttgctcaagatgaaagtttcttacagtgctataaatgcaatatcaatttgaattgttgtccatacaaaagtatgaatttctattccattagtaatactgaatgattaataccttaacagcgataaaatttttagaacatttaaaaaaatacagaggattccagttttacatcatacttctgacggattatcatactttctatttttgtctgcaaaacttttacagagtacagtgcattgacatgataaaaccaaggcacaaaaatacagttacgataagtgtatataaaccctagcactttgtgccaattttggaaacagatcataaagtctgaaaaattaccacattctatttgattagtgaacaattaattgtgcagtaaatagactgttaaccaccattccattattaaatatatggctatcactatacaggttgtggataattcaaaaatagttttaaatattaaaacctgtaatatctaggtggtcaacgcagatattgagccttacgttatctaaataagtttccatttaatttgcaatccacatggcagttagcaatttttaaactatttccattacataaatggtggggtttattctaaatgttaaatcctttccccttcc

SEQ ID NO: 143931 - DNA, 505 bp, Homo Sapiens
cattatttcatcattaaagattgatgccacccttactagaaaaaatcattctgaacatccgctctgttctgaagaagccctggatccagacattgaattgtctctagtaagtgaagaagataaacagtccacttcaaatagagattttgaaacagaagcagaagatgaatctatctattttacacctgaactttacgatcctgaagatacagatgaagaaaaaaatgacctagctgaaactgatagaggaaatagattggctaacaattcagattgcattttagctaaagacctttttgaaattagaactataaaagaagtagattcagccagagaagtgaaagctgaggattgcatagatacaaagttgaatggaattctgcatattgaagaaagtaaaattgatgacattgatggtaatgtaaaaacaacttggataaatgaactggaactgggaaaaactcatgaaatagaaataaagacctttaacccctccccttccaaa

SEQ ID NO: 143932 - DNA, 404 bp, Homo Sapiens
  misc_feature (277)..(277): n is a, c, g, or t
tttttgacttaaacaacagaaatttactttctctcacagttccggagactggaagtacatcaaggtgccagcataggtgatttctggtataggggaggatctcttcctggcttgaaaacagtggctctcttgccaggttcacacatggaaggagattgtgagggtatagaaaaatatttggtgtctctaaggacactgctcctatcagatcagtgcctgacccttatgacctcatttaacctcaattacttcctgttttaaatacggccacactggnaagttagggcttcaacatacaaatttgagagagggaggaggcacaagcatttcagtccataaaacaccccaacactctttttgtagatttagcactttagacaatgtctattgaacatatacgttaa

SEQ ID NO: 143933 - DNA, 400 bp, Homo Sapiens
  misc_feature (209)..(209): n is a, c, g, or t
  misc_feature (255)..(255): n is a, c, g, or t
tttttgattttgataatatattttatttatccaatgtaccaaaaatattataatttccatgtataattactatgaaaattattaatgaggtattttacattcttacttattttacattatttcaaactaagttttcaaagtccggtgtgtattttgcatctcaattccaactggccccatctcatgtgctctatagccacatgtggccntgttgtgactgccttggacagcattactgtagagcttgatgggctntttgtaaggcctttcaaagtttttttacctgcttatgtgacagctgcagtttagaggagtgaggtaattagcttaggatcatccaaccagtaggtaggtaagatgtggagatgatgcaaaagaagatatcagccgggagtgaccc

SEQ ID NO: 143934 - DNA, 491 bp, Homo Sapiens
  misc_feature (191)..(192): n is a, c, g, or t
  misc_feature (204)..(204): n is a, c, g, or t
  misc_feature (269)..(269): n is a, c, g, or t
taaatagcttttagtggtacacttgagattataacatgcgttcttgacttatcaatgtctaatgtaaattagtattttttcctcttcccagacaatgctaaaacagtttattggatattttagttatttctgtatttaaaacttcacaagacacagtactgttgatgttcattttgatgcgcccacaatanntatgccactatncattgtgttttatccttctgtgactttcatagggtcatttccccttccacctgaaggtacccctnactattatttcctttagaggaggtctgctgatcatctcagttgtgtttgtctgaaaatatttgtatttaatttttattcttaaaaaatattttttctgagtatggaattctaggttgtcagctcgtttctttcaacacattaatgatgtaactccactgttatgtgcatccatattttctgctgttttttgaaataaatattttcctctgcctgcgtttaaa

SEQ ID NO: 143935 - DNA, 308 bp, Homo Sapiens
tttttttccttccttttccttgtgaacttccccccgaagacttctttgatcaggtctgttaataattttctctagcacacttctctctctgctctttagcaccatataactttctattacagaacttaaacagagctaatattatctttgcctgtatgatcatctgatttctgtctgctttcctcaccagaccataatcaccatgagtgtggggaccatgacgattattttacaaatcttcagcttctggctcaatacaggatgtgaagttaatgctcaataaatctgtaacggtagagttaacgaaa

SEQ ID NO: 143936 - DNA, 708 bp, Homo Sapiens
tcaggcaaggggctagagaattagagcattagaaaggctcccacagccaccctgaaatcagtccttttatgttaagcaggccacctggctcagtgcctacatactcaacactagattttactttctctacaaaagctagaatgtacctggtacgtgctgacatgaccctaacccacagacgatgtaacaggtctaccttttctcagaaaggattgtctcacaacttgttcaacgaattagttatgtcatggtacatacatataagtgcgcaatttttgtaacatcttttatttgtatacaattataaattacaaacttgttttattaggttttttaaaatttatttttcgtcaacttagtcccttttatttaccagcagtttgctctgacagaataaattacaaactattgttttgtttaatccctttaaccatcatgtcaggcacacaggttggagaatattagctcccattttatggacagagtggaaacactgtacccatatttagtgtaagacagagctgggatataagccttgggcttccatagtcacaactgcttttttgcataactttgtaatacatcattttaaagtaatctgatttcacaatgttttacagtataggagtaacatctatagcatctcttcttggcaggttacctctggagagaaccaatctaattacctcatacgctggcacttttttt

SEQ ID NO: 143937 - DNA, 1082 bp, Homo Sapiens
  misc_feature (668)..(683): n is a, c, g, or t
  misc_feature (970)..(1004): n is a, c, g, or t
gtttgttgtgtctgctgttctgtgttgtgtggcgtcgtttgcttgtcccgctgctcgctgggtacgttgtgctcgttcggctgggttatgttgtgtggtgtgttgccctggtggcgtggtcttctgtgccgctgttgtgctccgccttgcgttgccggggtagtttactccgtgtggccggtagtcgtgtgttggagatgtgttagttcagctgttgcgtgatagtgtcacatgtgtacacgctgcctaattgtcggtagtgcacacttgtgagcattctggtttgaatgtacttgacctgtgtttgtcttcgacactttgtgaatcgcctgtcttaattgccttctgcttttactagcttcctgtatccttacaatttggagttgggaactcttctgaatagaaattttatcttccattctctatactctgcagatttttatatctagtcgcaacatttctattatgattcatacttcctcacaacaattatgaatgttctacagatttagaggtagaattcccatacatatacaaggaaaaaggcagggtgcactccttttattaaaaggccagaacacatcctggttcactgttgcaagaccactgggatgcattaggtgaatcccacttagcttgtgacacaagttaataaagttgaatctggnnnnnnnnnnnnnnnnaaggttgatggctgaagtgagattaatgttctaaatagtctccactcttgagacttgctatattgcttataatgaagaggaaaaggacactttcattactttacgtatttatgtaattggagggaatggaaagtttttgggaatatgaatcaaatattagactgttttcttattttagtttgtatatgttttaattgttttctctctctacccattaaagattccagtgctgaatacccggccgtaatggccgaattcccgggcatatgtccggtaccgtcgactgnnnnnnnnnnnnnnnnnnnnnnnnnnnnnnnnnnncggccgcttcctcgctcactaactcgctgcgctcgtcgttcgctcaacggctgagcccctatatgagtctatcaagtg

SEQ ID NO: 143938 - DNA, 540 bp, Homo Sapiens
tttttacatcacccctttatttcatagttagaaataatacagttccacagggtaaattgtcaataaataatggtgtttaatcattaaacataaaaatcccactctttggcatctgacaggattctatttcttgtcaaactaatgactgtatagatatagctaatcttagtgatcattcgtcaatacaatatgttacaaaggtgcaatttactttaaaatatacaacagcgaaacatttccagcccaacgagaaatctgatcaacttagtaagatatgggccaacttccccaaggctctttcacgtagtttgccttaatgaaagtgtaataaacgttgattaagagttcctagggttttctaatacttactttgctctaaatagagtttgccattcattctggctaaagaaaaatcacaattgcaccaggaatgacccactcattaattaaaaggtgttcttattttataagcaagattgctaatacctaagaaactcacagaccccaaaataaaaagcagttctgtgctgccagaaatcc

SEQ ID NO: 143939 - DNA, 376 bp, Homo Sapiens
tttattgtttagaaggaagctccctttgttcttactttttaaccaaagagaagcgaaaacatttttttcctgatcacattttcaccgacacctgagccgacaagccagctcctggcccccggctcaggactcctcgctctctcccttctcggggccctgtcgccgttgaaaggcccgctgcaggctggggagggtgatcggggccgcgggccatctcccccgagccgggcgggcagactgcggaggcaggccccacacgcgccgcttttccgagcccggttttcttcaggagcgaaagctgttccagctgacccgcgcgtttgggggggcctaggcccggcttccgattccatttaaaacgacccgcgcatcttat

SEQ ID NO: 143940 - DNA, 431 bp, Homo Sapiens
  misc_feature (371)..(371): n is a, c, g, or t
  misc_feature (379)..(379): n is a, c, g, or t
tttttacagttatgtaggacagcaattttattttttatgtgcagaaaaactccaacagaggacagcaatttgagacaagttcagctagatcgttctgatggtctcacctgaattaactcatgcatttgctattatctggtgactggactggggctggataagtcacatgctgatggggctggatgttgactgggtcactctctccttgggatctatcatcctcgaggatggtgggtagtctcatggcagcaagatggggtgatcagccatgctgctttgcatgggactatccttggttttagcagtggaaagtcccatatcctggggaaactcctcagccttgggcagatcaggatcattggtaaccgtancgtgtggntggagtcagggatttgaaccccaggtagtttgggctccattttgtcttttcc

SEQ ID NO: 143941 - DNA, 419 bp, Homo Sapiens
tttaaaagtaagtatataagtaaacgtttatttagaaagagaaaaggaatcacaataccacaagcatcacaaaatctaaaaaactataaattaaatgcataacacactgctatactactgtcttttgtcttcagaccttttcattgtcacttcaaataacatgaattatacaatatcattttttataaaaaataatttagccttcctatcataagtgatttttttgctattattaatattagaaaaactttacttctgcatcacgactcattatttataatgctgtgtaaatttttgatatattttaaaatggggaaaagctctgtcaactttatttcatgtataagctacaagatttggaagaatttcctagagtccagcctctggctgtatacatttcaaacctctattacccacat

SEQ ID NO: 143942 - DNA, 422 bp, Homo Sapiens
ttttgatgctgtcataggtcagtcattttaattcagggacatgagtcagttatcagtcaagaacatgtgtggaggcaggagttaaaaacaaacccaaaacaaacccataaccagaagctccatgtctctgaattactccctttagcagctgtcccttgggtgaaaggtcaccctagtaccaatgtgactagaccagggagccaaaaagaccgtgcttttctatttcctaatgccttcatttgggaaatgctgtaggacacttgcttttatcagttctatctaacagctagaagagaaacactccctcctaccttgataacatagaaaattacagccagatggcaacgggcagtgacttactgcgcgactctttctggtgatatagaagacccttgccatcgcagaccctccttccaatatgg

SEQ ID NO: 143943 - DNA, 1028 bp, Homo Sapiens
  misc_feature (859)..(959): n is a, c, g, or t
ttttaaagcttgtcctttttttaatttagctcagttgttatctaaaacttgctataggttgtcagcaggcatttcggcttattttctcatgacttcaagtttcataaatgcaaatattttgaagtaggcatatttcaaatatgatggtactttaatacattctcagatggttatttcttgatttgaagtaaagcccttctgaccacttgccaaagtctggcatcaaacatttcttcacccatagatgtggcctcgaacctcaccttcttttatcatccatctctcctggagagagcctggagccagaatatgtggcaaggccgcctcgagctgagtcagcattcttatcagccctaagcatcactgccaggccgttaactaaagactcttcaggacaacaagccaagggcaatcggcatctcctccgggctgctcccaaccaacaccgcggatggtgaataaatcagagaaaggcatgaaacaagctgcatttggcagtgctggcctctgggaggagatcactataatcccaccagcaatgtagctcagcccccaaagaatgatgacttatagactagtagtctcaaaacacttttcttttgaaaacattccagcaatcctggcaaaggtgctttctttggtcccatgatgggtatttccttccatagatcgccatcattttcattctcagctatccaggaatcaacaggtaaacaaaatagctcatatgtggctatattttcaagtctaacttcttccagataccacctgggattctttccagtgttgtcatgtccaatacgtattttatagatttcaccaatatctttgagattaatcattctggatcctggaagtnnnnnnnnnnnnnnnnnnnnnnnnnnnnnnnnnnnnnnnnnnnnnnnnnnnnnnnnnnnnnnnnnnnnnnnnnnnnnnnnnnnnnnnnnnnnnnnnnnnnnatcctttggcttacagctcaccaatctaatctctgcctctgtcactaaatagtgttctctctcgatgct

SEQ ID NO: 143944 - DNA, 481 bp, Homo Sapiens
tttggtgttcagagtttttacttagtttatttgcttcaagtccgaggtttttgtcattttctggtacttcgtagcagacaagtggtagcaggtgctaaaggccttgatgatgccaggtgactctgccttcccagagcaagggttgcctcatctcatcgcttcagacagacagctgtaacaggttccgtcatcagaaggcggacccacaccttcgttgagttctcaccaggtgctgcaagcttcctgtgcattctcctgtttaatcctcacccatcgtgtggttggcatttgttgttttttctcttattttggtcttctctatgacaataaagccattaccgatcactccacacctgcagcaaggcacttcagagacggccaccaagtattaaaaattaggggtttttcttttaacacagtcggtagttgaacttgaacaagttcccaaaatttctatcgggccagaatggggccagtccaa

SEQ ID NO: 143945 - DNA, 432 bp, Homo Sapiens
ttttgtttttaagaaaagtaataggcaaattccactggctattctggtagtattatcccttgggtaatagcaaatagaacacttctttctagttcccagctttccaaagaggaagatatggatccatcagacaacacagactacagaataatcagggcagccattagttcttgaattgggcctacaggtccaaaggagaatctaccacccttaattttgagtgatggcctcagctgctgaggctcccagagggatttagttagcccgggtctcttgacgattccacttttcccagtgaattcaaaccacagtcatcaaggcttcacctggcttcaaacaatagtcttcttccctcttttaagtctgtccttgatattcccttcatctgtgaaacactttaaagaagccagcagccaagatttctccctgcag

SEQ ID NO: 143946 - DNA, 477 bp, Homo Sapiens
tttcaccagcaaaggctaaccccgttttttctccagccttatgagatcaggagttcttccttgaagactgctgtttaacgacttggttgctacttatcttaaaggtggctttccgttgtactttttaataaggtgagcacatttattttgagcaatgatgaatttcaggattactattgcctgaagctgcccttctcaggcctccaccctaccctcaaagtcacttttgaccggtgatgaaacacagaatgcatcagactctattttctgtgagttgagtgtaaagaggtggaaatcgcgggggaggattagaacagaaaccattctgcagccccagcttgggcgatgaaatagcccccagaagtgtgatacgtggtaaacgtcttgctcacttataacccgtagacatgacgagggacatcatgcagacttttagagagaacgtggggacagggacccttgttttaaggcccactt

SEQ ID NO: 143947 - DNA, 436 bp, Homo Sapiens
ttttttttcgcacatcaaaaatttatttcttgctcatattacatgtgcatcgcggtcggcagaggggctctgctcatcacaggctatcaaggatgacagcagacccctcccttctgccgcagttacacttacaggtggactcaaggttgaatgtcaaaggcagaaagttacaacctgggaatacaggataatgcctttgtaccccccaggtagggaaagatttcttaagtgagaaacagcatcccatacagcacaactgggcactgcctactcaacagccaaggcttggccatccccactcctcagtatgggccccagaacccagggcctgggggactctgcacacaggcatgtggagaccacagaagcctgcccaatatagcgctgccaggaacagcaaagacaaaaccagagaagcctatcgcgggcaccgctg

SEQ ID NO: 143948 - DNA, 429 bp, Homo Sapiens
tttttactatgcttaacgtttatttctgtgtctttggttttaagagtaaattctagttaacatgaccttcagaaactcctggaaacatctgaggcgcagtggggtggaacaaggaaaaaggtccttagacttcagcgtcagtttgtggaggtctcagtcctgttggccttgacagacttggtgactcaggaccacgctgactagggctccttcaaggccctgagctgatgtcctgtgtccttggaggctgagaagggctggtgggctctgaaagcacaggaaaggggcaatccggggtggcgtcatggaatgggtgtggtctaagccaggtctccagataagggcattctgcctcttccttctcttgtcgcctctcacatttcttgcagtttatcttgtcagagtgagctgtgccttgctccagccttg

SEQ ID NO: 143949 - DNA, 678 bp, Homo Sapiens
tcatagggctcctgcctgatctttgtagtttgttcattcatccatccacctgttcatttgttcatccatgtattctaacatttctatgtagtgtgcaactctaatgtcatgcttttgaagaagagaatagctgcccatagcagccatccgtctggataatagcaaaacactctagataagttattttgcactttcttatgtataaagttggtagaaacttatttttgctttgtatcatttaaatacattttgttttggtaaatgaactgtgtataaaatatttatgccgttaaaactgtttttagaaagtatttttaatttcagcaagtttggttacttgttgcatgactcttaacacagctgactttttgtgtcagtgcaatgtatattttttgtcctgttattaacttgtaagccctagtaatggccaattatttgtacagcaacagaagtaaattgaagatactggctaagactggattgattgtggacttttatactatattgcagaaaccaatatctgtttcttggtggttatgtaaaagacctgaagaattactatctagtgtgcagtctgtgatatctgaatgttcattgtatatttgtctctgatgcaaaaaggtagagtaacacaattacaatacatgattaaatgcaatagtccaggtacttaagtaa

SEQ ID NO: 143950 - DNA, 387 bp, Homo Sapiens
  misc_feature (120)..(149): n is a, c, g, or t
  misc_feature (231)..(231): n is a, c, g, or t
ttttcccgaggaggaaaggaaggcagagacagagaagggaaaataagataatgggaataaactgataaggaagaaagaaaaactagtttattttttctcctcacactgaatcctaaatannnnnnnnnnnnnnnnnnnnnnnnnnnnnnaaatgtgaacagctgcaaataactgaaggcaaaggtatactaaatttcctccagtcacaacctaatctaaagcaaaaaagtngggggtggggagggtccatctgtaggcttgcatctgtaaattaagtttgtatgctgaattcttcaaacaatcttgaccgtaatacaaagctgctgttaaatattgggtgacatgaacccttggtctaaaggggtggaacaccttaagttctttcaa

SEQ ID NO: 143951 - DNA, 479 bp, Homo Sapiens
tttcctttaaaattatgctatttatttgacatgatatataaactcaaagcattttatcaagttacttcctgctcccccataaatagaataactctggttaatttggtcagcccaaatacagtttaacaagttttgaggggaaatgtttgtcatctgtgtaaggttgtgctggttttcatggtgaaattgtggtgttccttcattgtggctattttccagtaaaaattatgatgttgtatttcagctacctttatatatcagaaagttaaagatatatagggagaaatatacaaaactacactaaaattaggagacctacatttcagtccaacataagacacaggtcaagtggacaaaaaataaggtgcttttgcttttctgccttaggggcttctgaaatccactgaaacttgctattatggattgaatgtctgtgtccccgcaatattcatatgttgaagccctaacccccagcgcga

SEQ ID NO: 143952 - DNA, 685 bp, Homo Sapiens
tttatttttttgaagcaaaaaacatttttattccagtaataagatgtacttgaacaacaatattacttagtactgggtgtcttcaaaacaactagctaaatgttgcttatattataaacagcaagtccttcagataacttttgtcataaactggacctagctgtgagggaaatcattattgtactgatggctgacagcgtacatgcattcgaagtggaagccccagatcctctcgcgtaggcatttgatatctttggaattcgaatttgttcactgctgctgccatctcctccgtcgctgaatggcttaatttctattatataatcttcatcgaaaggcaaagaaagctccaccgatgttttatttgtttcaatgacagatgtgctgctttgtctgttccatctgtacaagactttgtatccttttacttccgactcattatccagggccttcacttgatcccaattcaggataattttggagtctgatgaattccatatgatgttcccgggggtgacttgtggtggctttcggttgcacattgactgttgcctaaaaggccttgtccacagaatatatgccttgacagcaagtgatcaacacactggctttaaagtcgtgaatttggtgatgtctgattcccaatgttcgattttctagcatttctttttggcctctggctcca

SEQ ID NO: 143953 - DNA, 753 bp, Homo Sapiens
  misc_feature (675)..(694): n is a, c, g, or t
aagccatttacccaactcaagtataggcgatagaaagtagaaaactggacgcaagtacatatagtaccgcaagggaaagatagacaaatactaagcaagcataatatagcaaggactaccccctataccttctgcatcatgaattcactcagcaaatacaccttgcaaggcagagccaaagctaagacccccgcaaacccgacgcagctactacagcaccagctccaaagagcacacctgatctatgtagcaaaatagtgagaagattaataggtagaggcgcaaagcctaccgagcctggtgatagctggttgtccaagcataaatcttaattcaaattagaatttgaccacagaaccctctaaatccccttgtaaatttaactgttcgtccaaagaggaacagctctttggacactaggaaaaaaccttgtagaaaagttgtaaaatatgtagagttcccatatactcttcccagaatctccccagtgttgacatcttactttatgtaaccacccaaaaacatttttaaaaccaagaaattaacactggtataatactaagtaacgtacagtcttctatttttgccagttttctctctcctgtcctgctggtccaggggtccatgacccaattcaggaccctacataatgttcccgggtttttctcttttccnnnnnnnnnnnnnnnnnnnnggaattttgctcttatcacccaggctggagtgcaaaggggtagggggagtggggggatt

SEQ ID NO: 143954 - DNA, 626 bp, Homo Sapiens
  misc_feature (568)..(568): n is a, c, g, or t
ttccaaaccaaaaccttctggaagtcaggaactctgcttccttgaatcctgctggtattatatgtgtgaaagatggagccggctgacagaaggcaggtccatttttgaaagcctgcacactctccacttaaaatagggcctttcaagttgcctgaatcagaaaggctaggatttgttacagctgtgaaagaatcctaataatgatgataactctgtgaacaggacaggaaactgttttaatcaagatgcctggatacagctgtttggcttgctccttcaggccttgctaaatccctggattcttcccagctctctgagacctgtcctcctgtagcatcctccttgacttctgattcccaaattctttttctaatttatgatccatgacttgccctatgagtacagggaaacattggagaaagtgcttatcctttggttctttaatatgctccagttgccctttagccaaaaatggttccgatgtgaattaaaaagagtgaagttttctgccaacatgttatgatggaactagctgcaatcatgttcaatgtctactctcgattaaatntcactctttggaaacctaccttgctgtactttttagttgttatgatgaatgccatggt

SEQ ID NO: 143955 - DNA, 472 bp, Homo Sapiens
  misc_feature (78)..(87): n is a, c, g, or t
gcttaaaaacctcatttaatttctttattgcaaactatagctattagtctcacatattatcttctgagatgtaccaannnnnnnnnnacctattcttactagtcttaatgtattttttgagaatatgaaagaaaggaaacattcaagaattacatacaaatctgtttaaatgaaaatatgagaaatctatggggaagacctaaaaggaaaagccctttagggggcccatgtgggatcagcaaagtcatgactctgggggcgatgtgacactcatttgcctttcttgtggagttggcgggagacagcatggggcatcatgacttgatggccacaggtgtcctatccttcccaaggaaggcggtacaaacacggaaagccggcttcctgtccccttcctgtccctggaggggccctctgccaaaaccctgggatgcttatctgggctctgcagatctttggaatgaggtcatcc

SEQ ID NO: 143956 - DNA, 532 bp, Homo Sapiens
  misc_feature (383)..(383): n is a, c, g, or t
ttttaaggactgctagttttttattttgaaggaaggaaaactgcttaacatgaacgggaccccgtcttgaagcactgtggagctttcatctatcagtttagttctatcctgccatgaaccaatccttggcaattctcactagcaagctggagagcctgaacatgaacgaagtcagccataggaggaggccattgttgactctttcccaaagggcacagtcagtgacaggggtcttcggcaggcacctggcacacagtcacatccactacaggaagtcagcggggagaccttacaggaaggttctgggagggggtcttctctactctctcaggcggactgcgaggatttttcttccattgcttcagcagcacctttccccaaancctcggagttggcggagggcgacccgaggccacctgcccctctggggccgaggataaaggggtcttgaccgccactccctcccgcgaagggcaacatccaactccacggagagccgcttcagagagggtccaccgttccgccccgggct

SEQ ID NO: 143957 - DNA, 605 bp, Homo Sapiens
tttttttcccagagtaaatcaactttattaagcaatagaaccgatgtcttagcatgttctaaactaagatttcgttgcatttcataacttacaaattggcttttgccatctatatttgtcatttctaatatttttgaagtcttgattccatcacgcaaaagaacccagaaatttgtgtccattggtaaaacaatgtgcagttttgttgtgtttaagatgggcaggctaccttcttcataatgaggaagagttctgaatcctaagaagacagtatttagatgcagatgagcaattttctggaaatctgatttttgtatttttgccccactcaaacctaggatttccaggtgtgacatgttgccagcttcctcacagataggcatggtgtcaaagtcattaaaagaaagatctaaatacctgagacctgccagtaaataccaagttacactcttcagtctgttattagacaaatctaaatatcttaactccttgttgaattcaaaggttttgagatccagctgttgaattctgttatggcatagaatcaaaactctcagtttggagacagaatgaaaatctgaactctggagttgaaaaacgaggtt

SEQ ID NO: 143958 - DNA, 466 bp, Homo Sapiens
ttttgcaagttgcaagatttaatagagtgaaaacagagctcccatacaaagggaggtgacccaaagagggtagcccacagttggcatttctatgtagttttaacatgagtacatttggagtattcattaggattttgaatttttgaaaacagcacatcattctcctttgctaacttggtgggatctgggattggaactcactaaagtatcttcaagacccctttataattcaataagctatagtccagtggttctatgatactaagaaatggtaagtactctgataactagttaattatatttttataaataaaatgtcatcaagatttggaaattcaggcaagaagtataatcacaaaccacacagagcacagctgaagagagttttaagtgtccagtgctggtattcaaagcaattgtttcaggaatcacaaaatagcttagcagctactgacagagtaagcca

SEQ ID NO: 143959 - DNA, 380 bp, Homo Sapiens
gcccaattctttctacaaacagcatcaaggaaaaggcagaactgtactcctgaggcttctggaacagtcgacccataaattctctagagtagagtttcttaccgggtgtgcaggcatctgaagagttcccgaaaaatactcatgtctggaagctactcccatagattttagatgtattatgcagctaggtattggaataaagcaaaaataaccacagaaagtctgagacatgtatttctaatatgagcaacagctcttagtcatgcattcccaccatccacccccccaaaaggagagcagccaatctggggtcccaagtttaatggaggaagagaatttacccagaatagtttgttcatattcacacagtggttttaaaa

SEQ ID NO: 143960 - DNA, 482 bp, Homo Sapiens
aggggatttgcctaaggtctttaataagttgcagagctgagtcacatccaggcaggctggctctgtgtcatctcccacagtctggagtcgggaagctggatatgatgtacattaagtatcctataatttccagaggaagggaccactttggcttggttcgtaaaaagaggcagcatgaatgctgatgtcaaaaggtggactggatcttggtaagcagagggtctacccaggtcaggtgtttgttgatgaggagggagtgccttttctcccttcttagctcacagtcctcttctcacagcacgctaggaaatgtggtgtttgagaagcccctcccaggtcagtgtggactgagagagggagaagaatcaaaacgcagagcagctgggcctctttgagtcttgttcgatggaattctttggagcagtcaggagggctgtagagaggaaaagtgcatcggcaccttctacggcttcctccgtgcc

SEQ ID NO: 143961 - DNA, 505 bp, Homo Sapiens
tttgacagataacttgcctttattatgaagtacacctttggacttgtggggtttttttcccaaagcttgtgcatcattgtctgggataactgcataaaatggaaggacgattcctggtgagaggcagtgtgttctaggtaagagcaaagctggaatccgctgtctcactgtgtccctgctctgtccacaccggcaactcatgcaaaggcagggtgatcatgcaggtgaaatgggtggattggtgtcaagtgcgtggaacagtacttttctacttgagtcaccagtttatgaagtgcttcttgtggtttgctaaaacctaaatcggagggacaggtttttgttctgctttgatggtttgtagggagataaggctgcagaggtaggctggggccgggtcattgaggactttgaatgtcagtgtaaggagcctctctccctggtctgtatggcctcatcctctcgcttgtcccactatgatggatctcgctcgctccgtagagcagtg

SEQ ID NO: 143962 - DNA, 644 bp, Homo Sapiens
cagggtgctgtccatgcccatcaagaagtcctcaagccatcctgtgcagtctcccattgagatgtaatggaaggacatggtcatatccttgtcattctcccacttttctttcatctttctggctccaggatgaaccgttgtccacattctgttttctgagtcaaagaggaggaagatctgtccatcgaaactgagctgccaagatccactgccgtgtccttcggctttctgctcacaagacatcctggcctgcagggtgaggggttccttgggtatgtaattctccagctgaatgtcaagcagttgctctgtaagtatgtccaccacctctctcagtactgggttctgtgctttccaggccgttgtgacattttagtttcttccccaaggggactgacgggtgtgactgtcttgttgccacagtcatagtgaagaaaagtcttttcatccacctggccttgaaccgcacaccaccgtggtccaggtctgaacttagggatgacggtgatgtcatagcaaagagagtgagggtcggctcgcccggtcctggaccagctggacagcaggagcagaagcgggaggcacagaaggatcttggtagcggcggctgctgccattaaggacccagagcgctagggaggaga

SEQ ID NO: 143963 - DNA, 382 bp, Homo Sapiens
  misc_feature (119)..(144): n is a, c, g, or t
tttttagaccctaccaaactttttaataattataataagcaagtattttctgtttaatctgctgagtgttctgttacagttaccttggagatgagctattctggtatcggtgacagttnnnnnnnnnnnnnnnnnnnnnnnnnngaagactgagccaacagttttctagtactatgtgcacaaaaagttaatataacaggcctgagactgcaaatcttagaaaggactgcttataagactggcctttagctggtgttaggaaacacggagtttgagagggttgccaccattccataactggtaggcatggttcaagttattctgaacacttgctccccttctgtcgtcttctcgcagccgtatagtagtagtaggcggccgc

SEQ ID NO: 143964 - DNA, 414 bp, Homo Sapiens
tgcggccgcccgggccagtgctcccctcggtccccgcaggccgagcccgcggccggccccgaaggcgcgagggacagcgcggccggcggtggagcctcactcaggcacggagcccacagagcgaggctgaggaggactccatgctgttgtccgtcgggaaaccggactactctggggcgcgctggagccaccattctgccagcagccggggaggggccgcgagggctcccaagtggacggaagtaggcgaccaacttcgccgcgactcctgcttcctagagaagggccttggctgaggaggcggcgggaggggactgttgcaaacagctgttcctcatacatatttcattacacaatcagataatgcgtcccaccaccttctcaattattcacagataaacattttccagaacg

SEQ ID NO: 143965 - DNA, 1106 bp, Homo Sapiens
  misc_feature (155)..(185): n is a, c, g, or t
ttcaagtagctcatacttttatcataaaatacaaactttctaaaattaagtgtgttacttctattttaccaacaaaaacgaaaacaaaaatcactcatgttagctaaatacagatgcataagtggttgagcaagcaagtatgaatatgagggtcnnnnnnnnnnnnnnnnnnnnnnnnnnnnnnnaggagggctatttttgtgtcagtgttggccaatagatgaatctggtcttgctgttttgtctgtgacctggtcagaactttgcttttccaaacttcataccaagcttttgcagaatccaaaaatcagagcccctagtcctgatccaagggctaagggaggagaagggagaagaggagatctaaaagtttatgccattcccactggaagaaaaataggggctgtgcatcaagggccctccggatgtcgagccgaacccatatccttggggaaagaggtactgcggtccatctcctgccattaggggagggtctcgggggttggcagacatctttggaggtgtcctctgagggtagggataattgggctggacaaaagggatgtagctcagcagaggggtgtaggaagagcggaagatctgctgtcccatctgctgtgggttgtatggcatcacctgttgggagtaacatcccagctgcgggtgcaaagcctgctgatagggcatcctcgctgcctgctgtgggtacaggccctgatactgcaagaaggtagagtgattcgtgaacactggtggaggtggatagttcaggttgagccagagtggctggttcagggttgctgaggtcatggctgtaggaaagtgtggagtgaaaacattccctgtgtacttcgggttgttcttgtcagcaaccgtcacaggtgcgttaaatttcagctccggcccatccacttccactttgtttcgaagtctcggctgcccgcttgggttcttggtggccccaaggaactcatagagcaagttcttctcggctggacatgtaggtttcttgggcggcagggtcagtgatgcggtgcccactgcgtcacagcaaccctcctcaccacaggcgtccttctggctctggggccacggctgagaaagag

SEQ ID NO: 143966 - DNA, 564 bp, Homo Sapiens
ttttatcagagtaatgaaattatattaaatgaaactgaagagcagaagtaggcagcattctacatgctttggtacgacatatgcatgctagaaggtgcaagatgaaccttgaaaaacttccaggacttgccacaggtttctaggggtccaatggccagaaatatgttaggatatccataacatccatacttttttctcttccattaactggtcagagggaactcattatgatgacagtttatgtgggttgagggagaagtgctgaaggagtagaggcaggtactataggagtctgagtcacctgctcattcatggttccagtcccatatgtagtgcactgctcctgtgttcatccagttgtacagtttgatgagtcaaataacaacaattcatgatgggcagtttgattcacacagtcacttgatgtcccatggtcaggtgttacatctcttccaggtaccagtagcaagtcaagaggtacagtttggggaattccatttcctttacccaccacccgcataagcaatcaggggcgttgctttcctggcgtggcccgcccccagt

SEQ ID NO: 143967 - DNA, 495 bp, Homo Sapiens
tttgtcaatcatacagggaaacttttattactgtgcaagacctttgctgggtattgggggacagacataaaggtatctaagaaatagtctctgattccttccctccaagaacgtagtttagttcatgaaaggctaaccctaatagtaaagcaggaggcgggagatgggtccacagaggcagtgcttgtaagcgagacgcaggggggcaaggagatcaccaggtagatggggattcaaaaaggcagtggatttgagctgattctggaagaaaggataagagttggacaattagaatcgggtagaaaatagggtataagccatatgtaagcttggaaccacataatgtattcaagcagcaactagatgtctcatgtaattggtgactaggatgggtgaggggactggcggaagataggagcaaagggtgaaggcccttgactttcctgccgaggagatccagattatatactggtctcagcactagctaactttatg

SEQ ID NO: 143968 - DNA, 761 bp, Homo Sapiens
ctttctgttcctcttgctgcctttcccgaagttctttttcttgtttgtttttttccattagaagagcagtttctgcatgaatacgagccttttcttcatctgttaacatgagagttggagaaaaaactactggcttggtggaacgatcaggaataacttttccactctgaggagattgttgctcatggtttgtactttcagattttattctatgctcttcaggcaatttgactgctggttttttagtacgatcaatctgtggaacattctttatactaggcactggctgaattatgggtgaaacatcagatttagaagcagcaactggttcaactggagttgatatattcagtggtcccattctctcattttgaccacttatcaattctatattttcatctacttctatagatgcaggtggcgtctgggcagcaggtttagaaggaattgattcttccaatgagggataagtaaaatccaatgagatagacacctcttcattctggcgtcgtgggggtggagtgaccttagcatttgttgtatactggggataacaaaggagccagtgttcatagcctccctctaaaaccaaaggctcattgcgcaggacagttttactttcccacttgaacagtgcatctttcagactccggagagttgttccattctgtcaatcttttgcagaacttaaccagtcaagaagtacccggacgcgtgggtcgacgatatcccgggaatatccggaccggtaccagcctgct

SEQ ID NO: 143969 - DNA, 462 bp, Homo Sapiens
tttgcactaaccactaattctttgagccagaaacaggcattcctcttattaatctaacatttagcattctattggagtgggtagaagttatttcaacaatacaaatcacagcagaggtggttaaaagtaaagaagcaatcaagaaggcagtttacatcagggagactgaaactgaaacaaaaggccagtgtggccagctaaagtgtgaaagagagtggagaagaaattggggagtgggggttgaattcaaatcctcttctggatttgtgatagctacttcctggtgcttcaagaaaatgactctcccagagagtgagattactatgaacaatgtgatatgaagcaacaaggctttttattttccaaagaaatcccagttgaaagtccggccaatgtaagcctcaatcccttccaagcgtcccatcactgtcaactccaaatgcgccagtgcaggccacagcc

SEQ ID NO: 143970 - DNA, 467 bp, Homo Sapiens
gcttttattaatataaatttgtggatttgaaattttttcaaaattctctttgtgctactgtctaacctaaacaatataggaaaattataatagagcagaaacatcgcatataagcctaattttgacattggatatagaaatagaaggaagagaattgtgagtcattttattggccttatattaatattcagtgagccagatgcaatagaaacatggagaaaatatataaaaaagagaattccagccaggtgtgagccaccatacccggccacaaatttatattttaaaagtttgtataacataaaatgtgtaaaaccgttaaataaaggaaatattaaaatcttttttgaagaaaacaaaattaatttttatacgtggaatatgtgtcccttcacgaagaatggtattttatataagtttaaggtaactttcaatgcaattttgttacaaagttacagaaagatgca

SEQ ID NO: 143971 - DNA, 1282 bp, Homo Sapiens
  misc_feature (511)..(533): n is a, c, g, or t
  misc_feature (631)..(659): n is a, c, g, or t
taatgccaccacccaaggccagaggtggtgggtgtggaagcagcgtgggcgcgccccaaggggaccccagttttcacctacccccgccactagatcagcccaagccctagacacagatgtagccaaggctcagtggaggggggcatgacagaaccccatgtctcacctcctacggaccaggagctggtggtgggcacagattccttgagctctgacgcagcaggcgccacttggcaccccagcccaggtccagcaagccagcagaagcaaaagcacaactaaacccaaaaaacgaacacgggaataacagacacaagaagtgacacccacaggtcataaggtcaccagaagcatccagcactttaccgctgcactaaacctcaccaggcacggacgacaccacggcaccggcaagagacggaagcaggaagggcagaggagtaagtcactttcggtacaattgcaaaagatatcaaagaggacggccttctggtcggctcacggcttggcnnnnnnnnnnnnnnnnnnnnnnnaaactaagttttataaataatgtctgataactctgtgtatataaaaactaaactccaacagccacaaagaggtgtccgtaagtttacaagaaagggannnnnnnnnnnnnnnnnnnnnnnnnnnnnaactagcaaagtttctattatactttcttcccttttccattcatatggtcaaatggtcttcttgcttgttttttttctaaaagacagttttataaatactctgcagctcttttttctttaacttttaaacatataattaatttaataactttgtaaaaggaacttctctcttttaaataaagggctatataaccacacaaataggtcatgtaaacagtgacacgggacccatcgcagggcacactggacccaccctcacgttaagcgcacaaccagcgatttggtcttgttcagtgcaacgggtcaggcctgagtgcacagcccctgggcccagctgcacgcccccagcaccactgcgcccaggctggtggtccacccatcagggccttcaagcccgccctactctcagagcagagcccatctcttcatgctgggctaagctgagctgctcccctggggctaaagagagtgaatccttcccagcccgcgagcctgtggccactcgggagtggagggaacactgggaccctcactgctcggggacacgcgaggcccagcgtgcctgctccttctctctcccgcaactctctctagtccgttcccacagcaccaactctggactc

SEQ ID NO: 143972 - DNA, 454 bp, Homo Sapiens
  misc_feature (200)..(224): n is a, c, g, or t
gaacagcgaaagtgagatttttaatatattgtcagtcttgcaaaatcgggtgtctgacggacatgcacacccagcagtttcaacaagcaatttgtccgctagtgtgcaggggtcctcccccagtttcccacaggctgagtactatggggtcacaaccttcctggacgtcacctattgattgttaggcaggggctttaggnnnnnnnnnnnnnnnnnnnnnnnnnagggttgtcttgctgcattttgtcacagcccacaatgcattgcagtcctagtcagctcaggggctcttcaagtatttcacttacgacctaagtagctgggctggctgataagaacagacaaagggagctattttgcaggctagtagtaagctttcattttagactaaacttctttcggtctgggtgaaagcaactaatggggggtaagcggggaaaggggaggcctacaa

SEQ ID NO: 143973 - DNA, 735 bp, Homo Sapiens
  misc_feature (574)..(574): n is a, c, g, or t
tttgtccttaaacaccaaaggcaagttttatttccttaattctaaacatcttgatcaaacctactctaagcttaatgtgcttttcttgaataatgggatttacaaaatgaggaattaagaagttccttaaaggtagatatttgttgattcaaggtctgctcagaactgtatttttcttcctatttcattggtttctgtaacactgggttttcgaaattcagttaaaacctgtgatttgttgcctgcactaagacttcctgagggtttatttgttgttccaaatccaaatgtggaggcccctgtggtgctgcatccaaaaccagagctagttccaaatcctccaaggtttgaagaacctaagccacttgattgcaagccagtgccaatacctgagccgaatggggttcccaaaactaactcccaaagatgctgtggccctgttccaggcttgtgctgctgtgtaagtgttgcagccatggcaacggctgctgcgtttggcatggtgctgaaaggagtgggtccagtagtaactctgggtgtgttctgccacttcttggcttctgctcgccttgtntcaaacacatcaacagcatctcccaagaacattttcctgtagcccaggtactgttctttcagaacctttacattttcatgaatagactgaagttgtgcggctaagctaccaaatgttgattaatttctgcataccattgccaatcttgaggggtatatgtg

SEQ ID NO: 143974 - DNA, 657 bp, Homo Sapiens
  misc_feature (197)..(205): n is a, c, g, or t
gccctgtcagctggtctgacagatttaagaactctcattcttaaaagactttggacttaaattctagcattttagactaggactgttctactgtgaagaaagttctgtctcctttagcccggtttgtttctccctgctcaggtctagaatcccaagcagtgttcttctggtgagcactgtgagccgcagatatgacnnnnnnnnnaaagtcatctcttcagcaatccagaggttccttgacctcattatttgtcctatctctcccttatagtcctaagccaagacctttgacctttgacaatttgacttttgcagtgtcatgtgagggcgtcagtatagaggcctttgcatctgggcctggcacccgctctctgcctctggaggctaaaccctgtctggatttctcttgggatctaacgtgggatcttctggacagacaaccgtgacatcagcagtgctggtgctgctgtgtgtggactgaacacctgcactttgcagaggacacgctgcatgggccccgcttgcggttcattcaggcctgctgcaggagctctgagaacaagaaagaggtggacacccggttcccctgcatcatctgtcttgggtgctatttcagagtggggaagtcatttcccaccgccttcccgggggttcccg

SEQ ID NO: 143975 - DNA, 473 bp, Homo Sapiens
  misc_feature (385)..(385): n is a, c, g, or t
  misc_feature (408)..(408): n is a, c, g, or t
ttttgcgtgactattttttaataaaagtactgaagacccgttggcttttgtcgtagaggcagggcagtcacagcagcgtgggaacccgtgggaaggtggggcccccgggccagcgggaggggaacaaaatgctgtggggggctccgagacagcggctttcagccaggtcagccaggtgcatgtggaccccaagggtccccaaatccccaggacctcagaggtcccggcaccaccgccccgccctcggccctcttcccagggcgctgggctcaccagttcgctcctggcatcacagaggtgcccaataggggttcatttggcttccgccccccagacggtctcaggttctgggaagggcaggatggtgggcgggtcgccttccaanccccagctttcggggttgggcancaaaaggagatacgggtctgggacgctcgagttctttattgagatcctcccggggccggcgccga

SEQ ID NO: 143976 - DNA, 466 bp, Homo Sapiens
gtttgtgatgagtttatttcaccattgcataatgtcctcaaggttcatccatgttgtagcatgtgtcagaattgccttcctctctagggctgaaactcggctatgtggatatagtacattctgttcatccatttagtctgttgatggacacttgtgttgtttcctaacttgcctctttggtgctgagagctgatgtgagggggaaagtggaggttcgtgaaactctaccttggtttcccctactcctttccctcagtagtaaaggcagaagaatacaaagagcctgacttttaggatgcaagtcctggcatcctggatcaatcttcaggccgctttcctttaagcagcctgctagaggctactatacagcttatgtggttggcagactggtgctttatgacttaaataacctttcaatatggatttattcacaatgtaatctgatgctttttaaatgccaaaaagg

SEQ ID NO: 143977 - DNA, 572 bp, Homo Sapiens
cctcccagccatcacggccgagatgagagcttccgtgctgctgctggacgaggcgccgatctcgaactccgcaagctcatctgaggcgtcggacttgatgctgatgtccagcgccgccttgatgaagtcgtggcaggcttgcacgatgtccgtcatctgcaggaagctggcggctgacatcacctcgatgacgttcctgctggtgagcgccaggtgcgctgagtacatgaagtcgatgatggccttgaagccctgggccgtgacgatgtccaggtgcgtgaccgtggcctgctccgacgtcttctgcacctggcagtagagcgtcttgaagtagcggctgctgcccagcaggacgttcttgtgcgccttgaagaccttgccctccacgaccacgcagacgtcgcacaggacgccgtgctgcctctgctcgttgagctcccgcagcaggtgccggtagtgggacgtgatttccatatcttcctttcggttgttcatttggaagccctggtgtcgcctcttctacagactctgtgaccccatggggcgcgggcgagggcgggcgccgcggccgc

SEQ ID NO: 143978 - DNA, 524 bp, Homo Sapiens
gttgttgaaatatggttttggtttctataaaaatgcaaataatactgataagtataatgttttaagctcttatcattcatttggatcttaaagtgaatgtgtccttcttgttttttctttgaagcagattttaatgggggatgggaataagaaattcagggtactggaaacataaaaggaaaaaggaggccctaagaagaatcccgaagaagagaagctggaggctgagggttcattactttgttgagggtgtttcttatgacaccaaataagacccatggtgcctgagatactaatgagaggcaattgccgtcctagtgtgaggtggggcctctggcccacttttcttgacaatctaaacatccattcacaatgacccaactacacttcttcactctttcctttggtcttcaatgtgcctatgcctatcctccccagaacatatatagttttggctaaaattgctatgcagaaatttttggaaattcaccctggtagacagagcatgacagcaggcattaaaa

SEQ ID NO: 143979 - DNA, 479 bp, Homo Sapiens
gcggccgcgtcagggggctcctggaaaatggaaaagcctgcgtctactattaaggcgtcaaattagggcactgagcttgagtggaagagatccagccatgaaatccccttccaagattttcctcgtgagccccgccctggattcccagcaagactcaaaacttacaaggtgtcagagctggcaaagaccaacttccaacccgtccgcttggcacgtgaggaaactgaagctctcggaagagaaatgacttgtacagggtcgtcactcagcagatcgaggagcgggcccaggcgctctgcctcccacttgggttcccgcctccaggaagggccctggctcccttttagccctgagccttgaagcaggttagatgcccgcgagctgtgcggaccacccagtgatttctactgctcttggcccagagccagttcctggaaggtcctggttgacagcgagccctgaatatcaatgacaatcag

SEQ ID NO: 143980 - DNA, 1076 bp, Homo Sapiens
  misc_feature (416)..(416): n is a, c, g, or t
cggctgaagagttgctgtattctgggaatgggcaggtcactcgtccgaacagagtcctatcctacgcggcggaagagtgtgccctttgacttgcatcgtctacctacctctgccatcctctaccagccgcaactgcgagggctggagccaacttcaggactgatgatcatgacttctataaaggagcaggcagcaattagcaggctcttaagttttttacaggagtgggacaacgctggcaaagtcgcaaggagtcacatcctcgacaagttcattgaaaccaaccaaggcaagactgcccctgaactggagcaggagttttcccagggagccagtttgttcctggtacgcttgaccacctcgcttagaatcacctatatgactgactcatgtttagaaaagcttctcaggtccantggcatcttcttatcagctgtaagcagtaatcggtaccttatagaatttcttgaggttggaggtgtcctaaccctcttggaaatacttgggctagagaagatcaaggaggaggccaagaaggaatctgtcacactacttcaggttattgcgaactctggcaggacatacaaggaactcatttgtgaaagctatggtgtacgatccatagcagaatttttggcaaagtctaagtcagaagagacccaggaggaagtgcaggttctgttggattctttggtccacggcaatcccaagtaccaaaatcaagtgtataaaggtctaatagctttgctgccctgcgagtccccaaaagcccagcagctgtccctgcagactctcaggactggccagccaatcattgggaccacacaccccagcatcgtggactgcgtgctgaaggtgctgggcacgatgcacctggaagtccagtatgaagccatcgagttgatcaaagacctggtcggttacgatgtgcgccaggcgctgctcaagggcctcgtggcgctgctgataccgtcggtcaaggagatctccaaactgcaggccaagatcctcagtgacccctcggttctccagatcacccccagcctgccgatgtttttgcagcaggccgcggccgc

SEQ ID NO: 143981 - DNA, 285 bp, Homo Sapiens
gcggccgcggcgggctcgagtcccgtctgggaggagaatgagctgggtgtcaggaagccggggactgacagcgccacccatctggggagccgggaggacacaggttttattttggtagtgctgcaagtccccttgtgtgctggggggagcggggcggcgtggtaggattggaagaggcttagagttggcctcgacccctgcccttgcccctggaaaggcagaaagtgggggttggggtgcggagaagcaggaagagagggagagtgaaggaggggaggaaaggga

SEQ ID NO: 143982 - DNA, 518 bp, Homo Sapiens
tttgcttcatataacatgttcattttaatctatgtttttaaaaatacagaagaggacaaagaatactataacaaacaggtgtgtattcactacccagaattaacaaacgccttcaaaggaatagcctgttggggccagggagaaaaccgtggtcttcactgattcatccctaggtgttctcaaatagggaggaaatccagccaggttttccttaagcacatgtggaccaagaataagaggaagttaacagaagagacagatcatcttgaaagattccggaccctttcagctaactccaaatgtacaaacaattagtacagcaaatgttgacagctatggagttcacttctttgaaaggcagacaattagaagttattccatgggtgttggggtggtggaagtcaaggtgtcttgggctgctggcagaaaagctttgtaagggggagtctgagagaggagaattgaaatgtcactgaataactacagctggtaatcaccttcatcctaagtcctgctga

SEQ ID NO: 143983 - DNA, 546 bp, Homo Sapiens
gcaagtgcctcatgaccacgtccagggcctggatcgtctcaaaagggacgctagcagccgccctgaaagtgcatcgtgtaacgcctgcaacgtcacgcaggacacccacttgatggacaccttgaagatgcgatccttgccttctcctggcagcgtgacctccagctccaccttgtccctcccaatcggaaggggcatggctgtgtatagattcttcctgccgtcaaacacgggcttccgatccccaaagatctgtgttttaaagtgctggaccatgtgttccacgatttccctgttaactctcctcgggcacttctctggcttgatatccaattcataatgatagatgtcaattttggggatgtccatttcgaagaaattggcctgtaatttgattgttctcccggaggtcccaaagtcgggtctaggtggaggcttgaaggcatatccttggatggggggcggcggcgcaggaggtgcaagtgcggggccggctcccgagtacatggtgcgccgccgaggggctccgggccgaggggcggcccc

SEQ ID NO: 143984 - DNA, 463 bp, Homo Sapiens
tttacttttacaaactttattatgaaaaatatcaaacatacagaaaagtggagaaaacagtataacgaatccggccacccatcacccagcctcagcgatgaccaacccgcgcctgacctctccagtcatctataccccacccctcgaggcaaatctccgacgtcctctccttacacgcgcagacctcggtagcgacgggaatccgttccggactcctctggggccctggccggctccctcggccctgctcagcgcggcgcgggcgggttctcagcccacgtccgtgaagctgaaggccggatcgtgcggcgccgccccgccccccacggcgcttcctcctcggtccgcaccgcgagggtcaccgcggccccggagcgcctgggacactcgaccggcagccgcgggtgatgcgcgagtgagtccctcagcgaagcgcggaagagagaacgaagaggcgccttcc

SEQ ID NO: 143985 - DNA, 1109 bp, Homo Sapiens
cgcccgcgcccatcacgcccttgcgctggttgtttctaggtggcaggcaccagtgaccgggtcgcacgtgtcttcgtggcagctgcaggcttgagcacagtccgcgccgtggagtccgggcgggcacgtcacgttacagtggggcccgtggacgccagggctgcacaggcagcgccccgactggaagtcgcagtgtccgctgccgcagtcggcgcacacgaaggcgcagtcctcgccgtaagtgccattgctacacttggtctcgcaccggtcgccgatccagcccgcgttgcagcgcgtacacttgccggtgacatggttacaggcatgcccgtcgcggcatggcggacagcggtggctgcagccctcgccatagaaaccggtggcgcaaggctggtcgcacttggttccgttccagccgggctcgcacgtcaagcagcggccctcggccaccgtgcacggctgctggcccttgcactggccacaccggcggcgacagcccaagccgtagaagccggcggggcacggctcgcgacagtacttgccgcggtagcccggctcgcaggcacacgtgccgtccacagggtggcagcggccgcggaagcactggcagtagcgatcgcagcgcgcgccgaacgtacgctcgcggcactgacagcggccgctctggtgctcgcagggagacgagttgcaggcgcactggttgttgcagctgcggccccaccagcctgcgtggcacaggcaggcgccggtctgtgggtcgcagcgcgacgtggcgctgcagtagcacgcgctggcgcactgcgcgccccaccagccgggctcacagcggcacgcgccgctccgcgggtggcacgtgccgtgctggcactggcacgcatgctcgcagcgcgcgccccagcgccgcgcgtgacaagtacactggcctgtcacgtcctcgcactgcccgtgtgggtggcagctacacagctccttgcagtcggggccccagaactggcgcgggcacttggtgtcgcagttggcaccgaagtagccgtggcggcagcggcactcgccaggcctcacgcacacgatcgttctctgagcacgtggagttgccttcgcacacc

SEQ ID NO: 143986 - DNA, 592 bp, Homo Sapiens
gtgtcatccccctcgtcaactagggaagaatctaaaaaaatcagaaccaatgcagaaaactcatctttaagattctatttttctagaaccacttttggaccaaaatctggatcaggcagattcaactagagaagcagaacccggaggggatatattgggatttattgcgaggaattggcttcagtgattgtaggagctggctagtcatgtctaaactctgtgaggcaggctatcaagaagggcagacatgtcaggaacctctcgccaagcactgggctgctgtcctcaggcagaatttcttcctcagggaaacccttagctctgttctttaggccttctgactaatcaggtcaggctgacccagattatctgagataatctcacttacttagtcaattgggaatggacttctgtcacatctacaaaataccttcacagaaatacctagattagtgtctgattgaattactggtgactgtgtgctagctaagctgacacatcccaagagcatccgagccaccacaggcttgctgtagggtcagggtctctggatcagccctctacctcttcccacgaaaggggatggacacgg

SEQ ID NO: 143987 - DNA, 686 bp, Homo Sapiens
tttttggcaggtgactagtatctttaaactagagatatctttaatagaaatccatctcaactcaaggtcaatcaactcattacttcccaaagtccctgtagggtgaatccatccttcaatttctctattgcaagccccagttcttctgaaaatacaggttcacgatcttgttgcttattgccatcagcaaaataagccacaaaagcatccgtgtgaccatcagagtctatttctacatcatcttgaatttgttcgactgtcagagcttcgagcggctggggcttttcttccatctcataatcaactccaaatatgggactggcagaatagactttgtgaagtgaattgatttccttaactgattcttgtagtttttccacaggatctattttaaagccaagaacatatccaccactctgctgagagctttctatgacaagagctaaaccaaattttgaatctctaatctttattgaacgaatttgcagatatggtatactgacattaaaactatcattcatatttgcatgccacacaattctcacattggtaataaataaggttcctaaattgccctgatcactggataaattcccaactccatttattttatcatatacatgttcttgtgggcacagtcctagttgcttgttcctgattagtgcacttcttaatttaaaatcccg

SEQ ID NO: 143988 - DNA, 831 bp, Homo Sapiens
tttgacatatgaattgattattttattatggatgaagtcatctttttttccattctcaaaaatccttacccagttgttttttttcccagcataaatttccatgttctctccatactgtggctcctccagtaatgtctggtattcaaacatgaggcgggagctctcccggaggcggctacattggaattggtgatattgttgcacaagttccttcaccacaagtaagagacattcaggatttgaaggattccaggaggcaagattctgcaaagctgaggggtctggcaggaattcagcatcttctccaaagataaaatcgggaggcagttctgggtattgggcattgaaaatgatatcccactttaatgtctctccagcatatggtatgtgcagtttaaatcggtcacagttgggcccaggagtcaatgatgtgcagccagattttaagtcagttatcctcaaacagtttgtagcatccagtcccacttttccattccggaccacgctagatatgaaaggggagagcattggagatattcggtttaaggccacttctggggacattttaacttgacttgtaaatcaccactatattaccgaattgttcttctgtgtttttccccacagtacccattattactttatctcttgcttctggaacttagtccgatcggtaacccggcagactacggatggggtacaggtacccgagcgcgcccccgacagacgcaccgacctgcgcgcgcgccgcgggcaggatgcgtgcgcactccccggacgtcccgcccggacgcgtggtcgacgatatcccgggaatccggaccggtccag

SEQ ID NO: 143989 - DNA, 720 bp, Homo Sapiens
  misc_feature (131)..(140): n is a, c, g, or t
gccagggggttttttcaattttaccattcccttggagtaagggttatgttgggggaatatttgggggaaatttttccgggcgagctttcaaaagggaaacggaggtgaaaaattcactcagttccagttgnnnnnnnnnncccagcataaatttccatgttctctccatactgtggctcctccagtaatgtctggtattcaaacatgaggcgggagctctcccggaggcggctacattggaattggtgatattgttgcacaagttccttcaccacaagtaagagacattcaggatttgaaggattccaggaggcaagattctgcaaagctgaggggtctggcaggaattcagcatcttctccaaagataaaatcgggaggcagttctgggtattgggcattgaaaatgatatcccactttaatgtctctccagcatatggtatgtgcagtttaaatcggtcacagttgggcccaggagtcaatgatgtgcagccagattttaagtcagttatcctcaaacagtttgtagcatccagtcccacttttccattccggaccacgctagatatgaaaggggagagcattggagatattcggttcaaggccacttctggggacattttaacttgacttgtaaatcaccactggaacttagtccgatcggtaaccggcgactacgtggggtacaggtacccgagcgcgcccccgacagacgcaccg

SEQ ID NO: 143990 - DNA, 520 bp, Homo Sapiens
tttagactcatagctctttaatttttccatttaacactttaattttccataggcctagattttcaagaagtccaatatctctcacttgaagtgtcttttccctggagtagattgggagatttgagggatatctgtccaaagatgagacagtctgtttctagtttcccatccagcctgatggggcgtctacagtttttaccacaaggtgtcgctgttgaacagattctggtgcagtctagtgcatagctgtccacttctagagtgatcacttgctgggccaagttcctctccttaagtggtgtctcacattaaggttcccaaattacagactcattaattcaccctaataagctcatccaggcagtttaggtcttcaggggcttccagcctccaacacacattgggccaaaaccagcctgtaccaccagctccaagccctgtgttgaatctaggtcattggtccagatgccccttcattctgggcctgtggtgtcctttccagacagcagacctcagttaa

SEQ ID NO: 143991 - DNA, 549 bp, Homo Sapiens
agtggttgctcaatggcattactggatccaggttaggattatctgagaatacatttatctgcattttacggaaggcaaccgaggttcatagagatagtgatttggccagcgtcacaggcccagtaaaagggattgaaaatccaggtccgtccgaccctaaagcagggaactctgcctagtgtctcgctgtggaatgttagggatcctggggtacccttcagggtcttggctcggaaggaaaacattcccctccgaggggatggactatattaccaagggggtggagccagatgcctgagggggtgtggccagagcctggggcgtgtcacagccgaaggggcagggcggcagcagcaggcgtctaagtaacttcagcgcctgcgcagaggctccccagcgtcgccctaggctgggactctagtaggtcttcggctcagttttggctgcagcgcccgcgtagatcgcttcggccgggttctacgcccggctcaactatgagccggtgcgcccaggcggcggaagtggcggccacagtgccaggtgccggcg

SEQ ID NO: 143992 - DNA, 562 bp, Homo Sapiens; identical to SEQ ID NO: 60294

SEQ ID NO: 143993 - DNA, 571 bp, Homo Sapiens
aatccccaaatgcaaatttaattttatttgcaggtttaaatcttttcaaagggcactactttgaaactctggaatattggcgcactctgcagagctttcggaacatgcagtgggctggctgacactcacaggaaatgatttgcaagagtccagcagcggggaaaggcaggtgtgtgcagggacctccttgtatctcagcgcacatcccatgaggattcagggctcccatcctgggggtggcctggacagcagggctggaccctctgtcatgacgtcttcacttttcaccaggtacatgcgttattttcagtatgtttagaaaaacaatgctgtctgaatttttcttatttggccaattatctgatccataatttctgctatgaagaaaaaatcaatgtcttcaaaattcaataaatgaaagctgtgaaatgtcagcagcaaacatgacaataataaaaagcacacagacagttatatttcctctgtgaaacagcaggtcctcatcagatgacgtctcaagaccccaaattcactaacaggggatggcgatgtctataaagacaccaaatcg

SEQ ID NO: 143994 - DNA, 559 bp, Homo Sapiens
  misc_feature (543)..(543): n is a, c, g, or t
caaattttttcattaaaatatacttagaactctatagttggaaaaaagaaatggttaaatgtggaagccacttatttaatatgttcttttaagagagaaacaaggttttataaaaagcatgagaaatatataaatttaagcaaatcacttatgatctaaagatagcacaagtgaaggcctcacttctaggatgttgcaagcaaggtaccaatgctgccagacccaagaagagttttagcaggaaaggttacacttggtttgatttttaaagccaaagcaagaattatgagtcttaaaccaaatatactaacttgggccatggggcagagtaacttggataaagacggtgtcattgcctgtgaaaggaaacaagaaaaagtagatttttttctttcattgatatattcaactcatctgcgaaaatttgtattatgatgaaaatgttattgtcattgtcgttttaaagaatgctgtaacagtttatagtaaaacctcattactacttacttttgagaagaaaaaaatgatatcatattgggaatntaagattccttttagc

SEQ ID NO: 143995 - DNA, 518 bp, Homo Sapiens
  misc_feature (387)..(387): n is a, c, g, or t
tgacagcatagactttctcagatttattgtatgtcctcagacagtagataaaaatgcatggggtttacttccagggatttacagaccaatataagtaaacagctggggtttctttttaggctgtttctcttggaggtggtgcaggaggttgaggaaagcacctctgatgagcagatagctggaggctgttcccacagtcatgtctcagcgaagaagtcggagttcagcagccatcagaaccaaggtatgtgtggtgatcttcggaatgccactccaaatcctttgcactttcttttgcacacagcaggagttgtaaaagaatgcttccttttattattaacactgagaatccatgcagagagtttacactaaacacatgaatacatntgtgttttagaaggctgggtgccctcagtccccagatctttgaattctaccattaagttcaggtaggtttttggagacagagattggccgcatcatatctgtgacactgactcttctggtgtaggtttgct

SEQ ID NO: 143996 - DNA, 448 bp, Homo Sapiens
  misc_feature (42)..(121): n is a, c, g, or t
atgacattaaatatttttataaaatataattttttgttctgnnnnnnnnnnnnnnnnnnnnnnnnnnnnnnnnnnnnnnnnnnnnnnnnnnnnnnnnnnnnnnnnnnnnnnnnnnnnnnnnttttaatggcttaattgtatacagacattatattatttgacctgaatgaaaagatagaaataaataaacctcttatttgacatataaattgttttcagcctttcacataaatgtttacataaaaagaggtcatagaacaagaattaaaaattagaaggggatcagacttctcacttgcaacaaataaaattagaaaacagtggaacagtgcttttacacttctgatggaaaaagaccttcaattcataatccagtactcagcctgccaatttaataataatgcaatgcctttaaaaatttactatttccaggtacaatagctcacac

SEQ ID NO: 143997 - DNA, 563 bp, Homo Sapiens
ctccattactgccttctttgtattaaaatggtgttgtctagtgtaccattttaattcctttgctgtttattttactgtattttttgagttattttcttcgtggtttcccttagaattacaattatattttattttaaaacaatctagttgggattagcattaagttaatttcaatagtgtacaaacttttgttcccatatgctctgttccctactccctgccattgtcctagtatggtcatacaaattatttcttaatatatcaacagaggtaaactttttgtgttctagattgtatgaaaaatgtatttataatactgtcaaacttgagtgtagtttgccttggtatacaggcaaatacctgtatgttgggaatattttttattggcattttggagatattgcttgctgaaccttttagcttctagagttgctcttgagaagcctgatttcattttgacttcttattctttgcatgtaactttgtgtcctttgccagtcccactctcttgtgtagtgaactttcatggcgatgtctgcaccttttttcacttttttgggttg

SEQ ID NO: 143998 - DNA, 477 bp, Homo Sapiens
cccccatgttttactgcaggtggattaaccactatcaaggtggaaacaagtcctatggaaaaccttctcattgaacatcccagcatgtctgtctatgctgtgcataactcctgccctggtctcagtgaggccacccgtgggactgatgaattacatagcccaagtagtcccagggccaggaaaagctgcttataagactcacgggcacagaagtggaagctcaaaatgaaatggggcagcatattcattgttatgttgcagctcttgctgctcatacaacttttctggaacaacccaagagctttcgcccttcccagtggataaaagaacacagtgaaagacagcctcttaacagaaatagccttcgtcgccaaaatcttaccagggattgccaccctcggcaagtcaagcacaatggctgggttgttcatcagccctgcccgcgtcagtacaattactaatagtttcaagtttaaa

SEQ ID NO: 143999 - DNA, 422 bp, Homo Sapiens
tttttatatttcaacaccaattgtattttattggtagatcagcttattgtataaactagatatttcctgactctcaaagaaatggctggtttgtgtcattcatccctgcagtcctcatgacagattttgtttattctctttccaagtaatgtcagcttcactttttattcttcttgaagataagagaagactctccttgctttaagtggaagagacagctagttatttaggtaggtgtcctgaaatagctctgttggtagtagtgtcttgacatgtggatgaaactcattctgtttgtgatttccattgagtagctgctccaagtgtcataagacttcctgccctacaacttcatcctttatatctgcagcatggacataaactgttagtagatcctgatgtgagggctcacaaatccaaag

SEQ ID NO: 144000 - DNA, 465 bp, Homo Sapiens
tttgtttttcagttttagaagtttctagtgacatagcctcaagctgattctttactcagcagggtctagcctagtaatgagcccatcaaagcattcttcatgtcacaatgttcttgatttctagcatttatgcttgatttttttctcagaactttcatctctttgtacgttatctgttggttcttgcatattgtttatttttccattagaacctttagcataattattttaaattcccaacctgataattccaacatccctgtcatatctgagcctgttctcatgcttgctctgtttcttcaaactgtgttttttgtcttttggtaagccttgtaatttttttgttggaaactagtcatgatgtacagggaacaaaagaacttggtactggttcttgcagaaatttcttcttgtgggttcctgctctgttaaattgtgattctctgtgtctacctgttatgtctc

SEQ ID NO: 144001 - DNA, 415 bp, Homo Sapiens
  misc_feature (369)..(369): n is a, c, g, or t
  misc_feature (382)..(382): n is a, c, g, or t
gtgagccaccatgcctggccttgatgactagattttaaaggaagacctgatgcttttgagttgcaagagatacatatgtacaatggcaagccattttgagccaaatgttctaagaaagtgaggtcaggggcctatcatcaggtgttggctggaacaaataataaatttttctggcagcactgagctttctcaagacagcactttaagaggggctggggccatcctagggatacagccttgtgctgctaaaagccaatctagagttggtcaagtctcttagttcagaggtttggacagagttgtcatgtgctgagagttctgcagttctcagtgggatgctgctgcccactgccctctgctccaagcctnccggggaactcancagtgggccagctgagtggggcgaatagtttcc

SEQ ID NO: 144002 - DNA, 410 bp, Homo Sapiens
gtttgtttttaatagtttttatttttcagagcagttttaggttcaaagcaaaattgagcagaaagtacagggagttcccttctaccccttgcccctacacatcacagccttccccaccttcaacatcctgcaccagggtggcacatttgttacagctgaacctacacttacacatcatctcctaaagtcatggtttaccttggagttcactgcacgtaatgacatgtacccaccattgcagtatcatacagaagagtttcactgccttacaaatcccctgcactccacctatttatccctctctccccacaacccctgatctttttactgttgccatcactttgtcttttccagaatgtatcattggaatgatccggtatggagccttctcaccttggcttagtaatgtg

SEQ ID NO: 144003 - DNA, 311 bp, Homo Sapiens
atgctaacatgaatcaaatgaaagcaggaatggaaatattgatgccagatgcagtcaacttcagagcaaggaaagttatcaggtttctaaacgggtattacctattatcaggtttctaaacgggtattacctaatcataatggggtcatttctcaaggaaaatatagtgatctttaacatgtatatgtttaacaacaaagcataaaaatatgtgaggcaaaaattaatacaacttaatgagaaatacaggtgtccacctttatagctggagactttaacgctgccctataaggaactcattcagcaagcag

SEQ ID NO: 144004 - DNA, 503 bp, Homo Sapiens
agactccctagctgggtagagaattggagcagcccaggaatttcaacatcccagggccaactgggggctccggcagggagggcaggagaggaggacatggagaaacgagaggtgccagtgacactcttccctctggtcctgttctagaactaattgtgtgtgattcagccagtcaggttttccttcagataaaggaagagctgtggaatgcacctttgagtctgcacccaagggccttgctaatacttcacctgcctgagttcggacccatttataccactggtttcgactcacctgaacctctctttgcaaagaacaaaccctagtgctcccttaccccccagcaagccagctgaccaagtaccccagcatgcccagcagagcatgctggcccctctcccagattcaccatgggagaaggcgattgcatgagcgcaggaggaacttgacctgctcctccatgaaggaggctccttccccaccccggagactcggaacaggca

SEQ ID NO: 144005 - DNA, 422 bp, Homo Sapiens
agaatttcaaagccgggggctctatgactggctggacgctggagctctcctttaaaggatggaggcaacttggccaactgcatattattttctatggcagtggcccccactgttctcaggccatgaaactcgggaacggattgtggctgtcacgcagaatcaaagagatggattggccgtgttgcttcaggactcaatcttctcaaagcttctgactccagacagacagtgcctccccattctgctggctgagacaggaggggtataagaccaaaaatcgaagtgtgtaagatcctgaattccactgcctgccaagcaactgaaagtgcagttatcatcagctgcttctccctgatctattttcccattaaaaaataaagacttggatcctgcaagagctctgggatcccttcgatggcaaa

SEQ ID NO: 144006 - DNA, 644 bp, Homo Sapiens
  misc_feature (80)..(80): n is a, c, g, or t
tcggtactgtaggttatctagctcacgaactgcatcttttgtcctctgtatgaggtcaatgaggacacgtagtgcgggtnctcgtcgaacaaagtcatgccttaatagttctgctgatgttggcctttcctgaggtattttctgcaagcagtaatcaacaaatctcctaaaggagtctgtccattcattagactgtaacgttggggagtcattctgggcaatgtgatataaggcactcattgcattcatgttgaaaaggggcggcttccgttccgccaattcaatacaagtgatgccaagtgaccaaatatcaactttcccatcatactgtccttcatccatagctaagatcacctctggagccatccagtaaggtgtgcccacgaaggagttggcaggagaagccattgaagcagatccaaaatcagctagttttacctgacctggctctgttagaagaatatttcctgctttaatatccctatgaatcaatgcatgagaatgtaggtaggctagtccatgcaaggctccatgagtaatggcagcgatctccacttcctgaagtggttttttatgaacttctaataaatcagaggctgagctaagcaatattccatcaacaaccagcagtgtgttctttcaag

SEQ ID NO: 144007 - DNA, 540 bp, Homo Sapiens
ttttactatatgtgggcattttttattttagagggaattaagttccacttgctgtgaaatccacatagcagtggtcttttttccccagatctttcattctgcagcacatgacggctgagtctgggctgcctttgcctccgcaccagcgctcaggccttggtggccttgcctgccgcccctcccctcctgagaatgagcagctgtggtggcaactcgggcctgtcttcatctgcgccttctgcacccactccctgcagaggccccctgtggccgggaccaggaagctgccctgagcttgggggtgcagcgctggggtggcaggtgcttccctagttacccaggtgggagagggactggcgtatgactgcggagggaccagctgggtcgtgttggagctgctgccttgaaaaggaacaaggcatgttctgaaggcgtttcagtacaagctgaagcagaactccatgatgctgtgcctgagctgaaatgcaagcagcattccctgtgtgcccctcgtcctgagggaccgtagcccagctttgg

SEQ ID NO: 144008 - DNA, 459 bp, Homo Sapiens
gcatttcctctgcgcttcagacacctggaaagtcttggcttttgttctctcttcctgttgctgacggagtagaaggaatacgtcagtgttggccaggccgccgtgcggtcatggccggatggccgacgcctgcagggacgaggccgtggcggaccgaggcacggctgtgctcggacggcgagggagcgtggctcggaccgctagcgccgtggcgggaggcacgcgggccggcagggaaggccaggccgttggcgcgggaccagggaaccgcaggcgtcccggagcctggcctcccggcggggaggtgtgtaggacctggagtcggcaggggctgcccttcgtcggggaggaaagagagagtgatgatttctgccccttttgtcagcagaggaggccgtggcgaggcggttgtcagtcccggggggatttatggtgcaggagggggcccgcttggatgcg

SEQ ID NO: 144009 - DNA, 506 bp, Homo Sapiens
  misc_feature (19)..(19): n is a, c, g, or t
ctctcactttcttagagtntacagaacacatatttatatacgactctttaaatagatctattcttgaaaatagagaagaacacaggtctggccagggacgtgctgcaaatggtgcagttttgaatgcaacattgtcccctactgggaataacagaactgcaggacctgggagcatcctaaagtgtcaacgtttttctatgacttttaggcaggatgagagcagaaggtagatcctaaaaagcatggtgagaggatcaaatgtttttatatcaacatcctttattatttgattcatttgagttaacagtggtgttagtgatagatttttctattcttttcccttgacgtttactttcaagtaacacaaactcttccatcaggccatgatctataggacctcctaatgagagtatctgggtgattgtgaccccaaaccatctctccaaagcattaatagcaatcatgcgctgtatgttttaatcagcagaagcatgtttttatgtttg

SEQ ID NO: 144010 - DNA, 1017 bp, Homo Sapiens
  misc_feature (372)..(373): n is a, c, g, or t
  misc_feature (391)..(391): n is a, c, g, or t
  misc_feature (893)..(901): n is a, c, g, or t
catattccctattgtaagaaggtttccactgggtctttttgaactcgaccttttctagccatttcgcgcgagaccatctgactttgtcacagtagtgagtgaggacgttgtaaactggattgcgatagccgcttggaagttaggtttcagggtaacatgctgcaagtcagagacggtaactagtggattccgtgctttcggcgatggtataagcttcctcttttcatctaaactctgtgtcttctttaattttacagtcagcagatctttaactgttatctgcatgggtccatctttttttaatggtccagcctgaagtgctttagcgagactgggttttctgagcaacacaggtgctagtggtggtgagannggtgccagaggtgaaggngtgaggaggaggaggaaaatggctggttggctgtgggagtgtgggaggaagcacaggtttggagtctgcaggggtgatcagaacgcaggcaggcacatttgtaagtttaccactcatgtgacatgtttgaccacagcttggacaggaagaactttctgagatggtcttcagtgcttcctggagcttgcataatttactttccaaaatgcaaaactgttgttttacactgtaaagttctcggtggcagatacgagatggaaagatggtgtctttcaatacttctaaactctgggttatgcagttctggcaccagctgtatatagaccatactctatttgtccaaagttttattgcatctctgatgttaggaaaattgaagttccaggatgatgttagccagcttctgctttgagatatatctattgaagaaataccgactctttctggtgagggtggtggaggaggaggtgtaattagcttggactgaaagtgagaggcttcnnnnnnnnngaataatctttcggctttggcttttagctttcgtcttcgttgtttgaacttgggcatgattttagtctaagagccgggggagtcgatggagtccgggctgtggcccggacgcgtgg

SEQ ID NO: 144011 - DNA, 893 bp, Homo Sapiens
ttggattttttcttccccagaagcaattcctttcaagcgggtatttcccattttcaaggaaatatttatttaatggatgaagtggaagcagtttgggagcccccagtctgtgataaaccggagtgtattggttttgctttcaaagttcagcaattcgtgaggtgcagccagacaactgttggtttcaatacgtctttctcttcagataaggcttttcaacacctgctccctcctttctccttctctcgttgtctcttccagctgttcaagcaatgcggtagtactatatctggccttcagttggtctctcagtcgctgtatttctttgtccttctctgtgagttgataagcattcttctccttctcagcctcaaggactcgaattttctccaaaagtctgtgtctctctttatcagtcagctttcctttcccacttgtgatttcatccactgatgtctttaagtgtgcaatttctccctttaatttttctaatgtagtttcggatttggagttactaggcttcgatccccacttacttttaattaaatctttggtacttctggaagacatctctgaaatggtcgccaagtccaaagaagcgatcgaagagacaacggtcttgaggcgcccagccgggtgccaggcacgaagtgagcgccagggaaaaggactgttatcagagcgggcagagattgaatcccgcggacgcgatctgcccactgacctgccctccctggcggtccggaccggcccggccccggggctgcgggtcctggccgcccctcgccaccctccgcggtcgcctcccttgggccagctagcagctgaagcgaagcgcggcgctcgcgtcggccgagtccctcgtgccgaattcttggcctcgagggccaaat

SEQ ID NO: 144012 - DNA, 434 bp, Homo Sapiens
ttttttttgtggctgtaacttgctttatgtgtccagcatctccgtgagcatctggtgtctcagctcaagtcaaccctggccagactccaataacagacacaagaactgagaaggtggccctggttaccaaaaaccagaggaccctcattaacatccccaaatttcaagccagactgaaatctgtcagaagaaatgacggtcccagcctacccccgacacgggtggaacagagtaggctgggccagctagagcctcggcctgggctgctgcacctgcggggcccacagactgaggaggcggtcggctccttccatcccgacagcagagcccgtgcgtcgtggagtaaaacgtgcgatgtgtggcttcccccgcaaacaggatctggagctgggcgccggcggtctgcagggaggggctgagcagcaggtccaggt

SEQ ID NO: 144013 - DNA, 465 bp, Homo Sapiens
ttgggagaagaaagctgagacattgcatgaaagatgatgagagataaatgttgatcttttggccccatttgttaattgtattcagtatttgaacgtcgtcctgtttattgttagttttcttcatcatttattgtatagacaatttttaaatctctgtaatatgatacattttcctatcttttaagttattgttacctaaagttaatccagattatatggtccttatatgtgtacaacattaaaatgaaaggctttgtcttgcattgtgaggtacaggcggaagttggaatcaggttttaggattctgtctctcattagctgaataatgtgaggattaacttctgccagctcagaccatttcctaatcagttgaaagggaaacaagtatttcagtctcaaaattgaataatgcacaagtcttaagtgattaaaataaaactgttcttatgtcagtttcttgattgg

SEQ ID NO: 144014 - DNA, 186 bp, Homo Sapiens
ttttttttgatcagtaattccttattgtttattctcctcttacaaaaagacacttgggacaaataaatacaaaatggcatatatcatatttagcaatgggcaaatacacattttcttggtattctccacaagaataaactaataaaattttcagaggcatactcttctacccatctcttaccctct

SEQ ID NO: 144015 - DNA, 464 bp, Homo Sapiens
ctgtccagttttaaacctccgatccgtgttcccaaatgaaaacatgactttcattacgaattacacgtcaagggagcaaaccaaggcgctcggggcggcgagaaccgcgacacagcgcttcgcctggactggtaaacaaaccgccgcgcaggcgcaatggcaacaggacggtaacctgggtagccgccaatgggctttttcgtagagtgaaaagcggaaaagccaaacaaaacgctggttccaaggtgataaactggctgacttcctctatttttacttttttaaaaaattttgtttctgaagaagtagttgtgcggccttctgggcctcgcagagatcttcttcgtggaattcctcggccccagagaaatgccgctagcctgtcggctagttatattagcctaattttttgtcttgatctttttcatttgactgcagcactaatcctaatccactggggcagc

SEQ ID NO: 144016 - DNA, 467 bp, Homo Sapiens
aggaatcatcttttagaaaacatgaaatacagggaatgatacaatattatgtctacgatttgcttcaaaatgatgtgtggataggggaatagatgaaacaagatgagccaagataatggtttaagattagtgatgggttacttttgtgttgatttaaattttctgtaataaaaaattaagattttaatgttaattacaaagtaatccatattcacatttcattgctattatagtcagattctgaaaatatctttaaataataattaatcatattaagatttacatctagaagacttcaataatttttctcacatgatggtcaacccaatacgcgtacttccaaagaagatgctatcatacagttttggcttgaattttaatgtttgcatttttttctcatcttgccttccctgtacaatgaaactctcgtattgtgggaaactgcggagaagtcagctgtcagtgtc

SEQ ID NO: 144017 - DNA, 611 bp, Homo Sapiens
acaatattgaaaactaataagatgatcgtttattggaagaacagcaacacaaaccaaaataaacctataagaaaacaatggacataatgaaacagaaaacaaagctcagtggggaggacacatatttactcaaacatcctggcaattcatatctagggcactccctctgtgtgtcagacgcccttgcatgtgtcaaatgtcatctgataacattgatgaaaaatatcattcacttcttcttggtgcagaaggcatagaccggattatgcaatcactgagaagtagcttctggatgtgttttctggtggcgtcttaacaatttcagccgactgaaggctcttggacacttggaacatttgtagggtttctctccggagtggatgcgctggtgctccttcaggctccccctgtaggtgaaaactttcttgcagtctttacattcgaagggcttctcccctgtgtggcttctcttgtgacacttcaagtaggacttctgggtgaactgcttctggcagacgtcacacgtgtagggcctctcgccagtgtgggttcgctggtgaaattggaggctaataagctgcatgaagcgcttcccacagagattacattga

SEQ ID NO: 144018 - DNA, 500 bp, Homo Sapiens
gatataaaaagaatgttttattttaaataatttatacattgttttctggtcatttttaagttttgtgtcagtatctgtgactattaagagagggcacaaaaacaatttttcaaagagcaaaccactataaaatagcatgcctcagaggttggaaagatggcagaagttggggacaaaaaagaacatgttggctgcacagtacttacagatataaaggagtagtttaactacatgatcatactgtttcaggaataaggagattctggaaaccaacccaagtaaatacacaagtccaaagcaggttgagtttatttttcctacctctgaggaactagaggcattttaagagagcatttacctctttaataatacacaagaaagtacagaatcagaggctacaagaaaatgatgagttgatatgagtgtctgacatcagtcaccctaattgttatttttattaccctgttttatttattttgatgatacaattcagttaaatt

SEQ ID NO: 144019 - DNA, 375 bp, Homo Sapiens
tactcatcctccctatgcatccttaaaatgtcagcacctcactggtctgtgctttttgcccaatgggttcaatgcctaatcagaaaaatatctgtatacaatgtacagtagtttggggttaagagcatgcattctggggacagacccatgcctggttctgaaccccaactctcacttgggcacattatttagcatctctgtactaaagtttcttcatctgtgaagtagaataataatagcacctacctatgctattattggagttgtcatgagggttgaagaaaggaatatacatactgcacctagcacagtgtttggcacacaggaagtatatgtaaaattcaagctggtatcagccaggcgcagtggctcaca

SEQ ID NO: 144020 - DNA, 459 bp, Homo Sapiens
tttctatttaagcaccagcccagggtgaggtggaggcgtccgaaaccctaaagggacttctcaatggggttcaaggtttcagtgagggacgcagggagggggaaactgcctcagatctgcaatctgactttgggaaggccacccccaggcctgtctgtgatgttgaaggccggagacccccaacaaatgccgctggtttgctctgaattccccaaaggcccagaacgtggcagttggggattgccgggtcctccattccccgcccggacacaatggccgccggcgccctgcacaaagactgggtgagggtgaggcgctgggcctctcctcaggtcaggaagaggggtcgaggcctgctcgacggccccacagctgagaccacgttttcctggggacaggcccaaagtggctttctggcgcccccgggagggctccgcggccgggggctgcacctctccg

SEQ ID NO: 144021 - DNA, 525 bp, Homo Sapiens
ttttgtgagttcaagtggtttatttggaggcaatcccaggaaacattagtaggagagcagcaggaagacagagcaaggaggaaaggcaatcttttgtgtattaataggcagcttatcacatgagcagctagagctccatccaactggggacctttggaagagagtgtagaacacatcttattcagagttgtctcacttgcggggtgaaggttgaagactgctccttggacaatgccttctccatttcctcatacttttcacctgcctgtgattgggccaagcctggttcccattgcccaagaaagctctcaggaagatgctcaagtgcttgcagtaagaagcaatcagcttgcaggggatggtgagggccactagctttgcctctgtcctctttgtttttcagtgtagatgataattgcaggagactgatgtagtcctcagcacaggccacgaagagactgtttgccatagaggtctaggcattcatagtaatccacttggatgttgttgtatgctaaaaatgct

SEQ ID NO: 144022 - DNA, 823 bp, Homo Sapiens
tttgtatgttattgacactggggtgtgcccgtttatgcatgtgcaggggtgagagtgtgcactcatgtccaggtgaactgggtacgcacactcagtcctgctggcagggaagaagccacagacagaatcggcagggagtgtgactatccacacggggtcgagttcacagcagccggctccggggaatgtctgtatgggcacacctgtggggtagtgtgcaccccctgggtcatgtaaacagcaggtgggggagtgtgtgccggggatctgggcagccctcactgccagctggcacagttctcgggcaggctgtgcagaatggcctccaggttctgtttgtcggcgcggatctcggcgaggtcactctcgaagccctggatctgcagctcctgctgctgggattcctgctccagcagactgagtttcctctgcaaggaccccggggagcccagctgcagcctcaggcgttctagtgcccactgagtctcgttcagggcctgggctggggcttgatgggtgtccagcgaccccagcctggcaagcagctctgacaaggtctcgatgtccttctccagtgagatacgcgattcccggatctgctgctccatctcgctcagcccagcacccacccgctcagcttcctccagctcctgtctgcgtgcttcagacgccagcacctgctgggacgcctgttggagcgtggcttgcatctggctggtgagcctgctggcacggcggtgcgcctgtttccgctccctcagcaaggccttggcaagccccgtgaagtctctgagctaattgcctgggtccactgagcagtgag

SEQ ID NO: 144023 - DNA, 469 bp, Homo Sapiens
tttgctttattaaagtttaattttgaactcccaattagcgaaagtgcattacaaatcgattgcaatttcctagaaggtgcagcaagttctctgcctgcctgccacgtgcgagacgctccacagcgagcttccccagctccgggcagcagaaaggggatggttcagagccgatctccgcatcccaggaagtccctaaaatccgcgccagcccctcctcccgcagggcgggggcgtccacggcgcgaacccgccagaggtgtagggggaagtgtggggggctggtccgcagccttcgaggggtggggcgacaggagcgagcggccgggggaggagaaaaaggcgggcggcgggagagggggcctctattatctcggcttctcgggaggagcctcatctagtcagtcacgcagaagtttctctttcgctcttcgcgctacacacccagattggcttccagcgcgcaggcaag

SEQ ID NO: 144024 - DNA, 713 bp, Homo Sapiens
tttcttctttcttgctctttttagtggaagacttggactgtgttgtggcttgtccagaactggcagccacaggggctgaggaggtagaagcactggaggatcccgaagaggctgccagtgcagcgagcaccttgctgccgcacagagcacaggagagcagttgcagcagcactggggacacgccctcatccacaaggaaactgatttggaggaggaagtacaggacggagtcatctttgatgcagaatttctgccagttgatggttcgctgggcggcaatctctgcacaggctttcaggtgctccatcaggctgatgagtgtgtcatattgcaaggcggagcctgagctggctgtaaccacacttgcccggaggaatatcccctgctcttctagcagcttcttgatcccacgcacgtgagagtccagggtgtgcaaatcccggagctggcggtacttctctttggatccacagatgaagagcagaagtttgcggacttgacggcgcacaaatggagtctgctggatcatgaggtactcggagagaaagtttaaccacgagtggtcaaagacaggaggtcgggattcgagaattggtgtcagtaatctttttgatttggctaaggaagcctcagtaccatttcctgttagaagcctgagtatgcctcatacacatcaaccgcatcacccgttcggtaccgagctcgatcgtatc

SEQ ID NO: 144025 - DNA, 466 bp, Homo Sapiens
tatgaattattctttttaactcactttggcaaataattgtcgagcatttactatgccttacacggtgctaggcttgtcccttctgtcaagctgtttatatttcactaaggataagagatacagataattagtttaagtgaaaagagttataacaaatgtgtatgtggcagaagataatggtggctgtggtgggagtggtccaggagggtgccacagagatagccgtggggctgggcattgcttctgaggagaatctcaaaggagggtatgtaagaattaattggataatggatatgaatgtgctttattagttgccacataaatgcagctttttacaactgtcaattcttacagaaggtgcctcttttctagaaaccttggctgaccgagtagaacaccatagttggagtccaaacttaattaaagtgagaagaaagattttagtagattgagattttatattaaa

SEQ ID NO: 144026 - DNA, 364 bp, Homo Sapiens
tttagtgcaatggtcatactgttccatgtcatacacagcaaggggagaatgcattattctctcaatggatgcctttcgaaagatatgcttaaagcaagtgccctcctgctgctacaaagtgcaaggctgcctgtgtcaggactaaaggaagaataccgagaaccccaagttatatccttgttgcccctgctgggtggaacagggcagagcgatgtgggtgtggattagcgccctctggttgctgaaagtgaattcacagtttgttctagtccccagttagatgacgttggaaatgataaaattacagtagttaagatagtcaatggcatattttcaaacatcccgatgttctttctctccaact

SEQ ID NO: 144027 - DNA, 501 bp, Homo Sapiens
tttggattttctattctgtttattgtgtcaaggatcataaactgggtccctgtaccccatttcagggctccagatgtgtttttgatcttgttttggtttttgtcagaagtgtgtttgaatattgtgaattttcatgcctttaggcagctcacaaagtcagggctatcttagagcaaggtacttgcccaagcccttagagcacttgaggattttgcctggagtggcactagcaacatgctgttttaacactttcaccttagaacacattttggtgtctggcagtggacattccctctcattcttcttttgtgatagttccttaagtactcagttctctagatgaacttttacattgttctgtcaacatctctatggaccaacctggccctggaccacctgatttcacggacaatcaaggatatgtctcatatacgtggcggggagggtgattccagaaacagatggcttcctcctcaagggctggcgttgcacagctcctag

SEQ ID NO: 144028 - DNA, 997 bp, Homo Sapiens
  misc_feature (798)..(806): n is a, c, g, or t
tttttttaacattgcaaatgacaaacaattcatttttaattaaatactaacaaggaaaaaaggcaccatggcccattcaagtattttgcatagatgtacaaatattgtaaacaattaataggtggacaagagagaagaagatctgttttccgtgaacaatctcccaaataaaaagaaaattcacattgccctggatcccagacacatacaaacgcacagtggacggtgtgagaggacgcgttgggggtgactttggaaatgtgggcttggattctacagaacctctccttcgcaggctcccctggggaaggggacctttccagttggcgttcccatggctttcttgggtgtccagcagagctgttatacacgtggttaacacaattactgactttggaactggtccccagttttcaaattgcaagtcttccataccctctgtcaaataagaataaattaggaagtaggcagggagagacttccaataaagattggaaaggcgtattgcaggaggtggggaggggctattgcttcagggggaagggactatggcaatacaaaaaaacactccaaccagaaaatcagcaagtctcagaccttaagatctgcaagtgtctcagagctggggcagaaaaaggctttacttttatagggagaagtcagcaaggctgaaaggaatctatggctagcaggcagttacaagattgagccaggtgcccaggctaaggcttctagagacagggagacagggcactaaatcccttgaggtttgttttagagatggctccaaggcccttnnnnnnnnnttcttgggttgtaaaattggcaggaggttaatttcacttttaaaaagatttacctacatccccatctgcacaaagagcttgctaactcactaacccaaacttgagttaagcttccctcctccccaccagaccctggactttgggccatcctcagcctgagccagcaaacagcccctccacaaggagacaaa

SEQ ID NO: 144029 - DNA, 487 bp, Homo Sapiens
  misc_feature (262)..(302): n is a, c, g, or t
tttttgactttgcttttggtttattaccttaaggaaaagacttgcacagagaaattgagcaatgaaaacccttcacattgagcaaacacattccacgctacacaaatcatgagaaaaatgagaactgttgtgaaacatgacagattgcccaagtgttatttttcctctattggaaaattctaagacgtttcctcatgtgtagtttttcagtcacaaaaatggcagtaggaatatttaaatattaaatcacagtttgaaaatnnnnnnnnnnnnnnnnnnnnnnnnnnnnnnnnnnnnnnnnngttgacttatgattcccagatatgcagggttatcattgtgactgctttggatcaagacaagtttgtaaaaagcagcgacatagttcaacataatagtcaggagctagattacttccctgtaattgctatgcacacacagtacaaggctagcgagattatagacaatcatgtcattcgaatctact

SEQ ID NO: 144030 - DNA, 550 bp, Homo Sapiens
tttcttttcttttctctgcagcatagcctctcctatcctaaccatgggcaagggcagaatctccaaccttacaaacggcagaagattgaaggccctaaagagacctgaggttggaatgagtaggatttggagtgtatgaacttcacgaccaaggaccacagagaaagcatagactcagcagtaataccggcctcatgatggcaataaaaagtcttgctgtgatcagcaacactatagctaaggcagagacccttcttctgattgcagcataatatgtaagttctctggaaatttaagtttactttaagaaaagggaggaaaagtaaagatacaaaggaaaatcttgagtgattgaatttaaatactaagttgattgctttaaaatcagaaaagatgatatgctgtgtcatcgtcatgttctgctacagagactgttgtttgtctgcccctatatctttctctttccttatgccttgatcttattcagcaccatcaatgaagtggaagtggaagtgtgtaacttctgagaaattttcataaaagacagctg

SEQ ID NO: 144031 - DNA, 392 bp, Homo Sapiens
atcttaaaagcagtttattgggcagcttaatgtggagtggccttccttgggccacaaaccaaccaggggtgggcagtgcaggaagacctgctgtgggacccctgtgccaccccatggggcagggcagtgcttaagaagtggggccagtcagacagaggcacagttccttcccagctgatattgagcttcctccgaggggctcctgcccagggcggaggtgggctctttggggaacagggaagggaatgtgtcttcccagggctgagggagccctcaggccccggagcgctgtgtggcaggtgggaggagacctggttggggctgccctgggagggcctggcagtctctacatgcctataaggcaggcaatggcaagcagctgtgctcacaga

SEQ ID NO: 144032 - DNA, 912 bp, Homo Sapiens
tttttatcttaaaagcagtttattgggcagcttaatgtggagtggccttccttgggccacagaccagccaggggtgggcagtgcaggaagacctgctgtgggacccctgtgccaccccatggggcagggcagtgcttaggaagtggggccagtcagacagaggcacagttccttcccagctgatattgagcttcctcccacgtggcagctgctgccctctccatcagggctggtgaaggccgtgaagcaggtctcaggctttgaggcaaagaccaacactggtgggcatgggtgtgggctctgtggcaggtgagcagacggaaacactgatgtggtatgaacagctggagcaggcctctctaaggaggactatacagcctccgaggggctcctgcccagggcggaggtgggctctctggggaacagggaagggaatgtgtcttcccagggctgagggagccctcaggccccggagcgctgtgtggcaggtgggaggagacctggttggggctgccctgggagggcctggcagtctctacatgcctataaggcaggcaatggcaagcagctgtgctcacagaggctcactgccaaagttgcttttgcttttcttacgcttggccttggtgaaagggatgtcgagggactcgaggcggaagggccggggctggggcatttcaggggcctgggtgggtgggatggcagagttgttgctgagtgggcagctgaggcctggtggcgagttgtgatgtgtgaggctcttcctggcgtctgtgctgaggatctggctggcccgcttagatcggaagtagttgctggcaatgttttcactgttgctccgactgagcatgagcctgtagcggtcctcctccatgttcggctcgccattgtctgctgcagaggttttgcggg

SEQ ID NO: 144033 - DNA, 512 bp, Homo Sapiens
gggcatccaaattggaaaaggaggaagtgaaattgtttgcagatgatgtgatcttatacttggaaaaaccaaaatgttccactgaaagaactattaggactgataaataaattcagtaaagttgcagtatacaaaaatcaacagagaaaaatcagtagcatctctatattgccaacagtaaacaatctgaaatagaaatcaagaaagtaattccacttataatagttacaaataaaatacctaggcattaccttaaacagagaagcaaaaagctctataataggaatcataaaacatcgattcaagaaattgaagaggacacacaaaaaatggaaagatattccatgtttgtggattggaagaataaatattgttaaaatgttcgtatcatccaaagcaatctacagatttaatgcaatccctatgaaaataccaatgtcattcttcacagaaatagaaaatcttaaagtttatatgggaccacagaagaccagagtagccatagcaatcgt

SEQ ID NO: 144034 - DNA, 497 bp, Homo Sapiens
agttttagtgtttatcactataaaatgccctcttaggagtactgctttttctacatcccaaagattttggtatgtgcttttgttttcatttgtctcaagtctaattttctttatttcttcattgacctatttgttgttcaggagtctgttgtttaattctcacatatttgtgaatatttccgttttccttctgctatacatttctagttttattccattatggtaggaaaaagataattagtatgatttcaataatcttaaatttgttactctttgttttgtgacctaatgtgtggtctatcctgaagaatgttctatgtgcatttaagaaagatgtatattctactgcagttgggcagaatgttctgtgttaggtccatttactctctagtgccattcaagcctgctgtttccttattgattttctgtctaaatgtcctatccattattgaacatgaaatactacagtctcttattattttattgctgtctatgtc

SEQ ID NO: 144035 - DNA, 453 bp, Homo Sapiens
tttttagtggcttaatacaactgttttatttatttttccacaattctgctatttgggcactggggagaaaagctcatctctgttccatgtggtgtcagctgcggcagcttgagtagggctggaaaatccacttccaagactgtctcagtcacatgcctggcaggctggtgctgactggccagtaggagcacagctagggctgttggccaggggccttagttttcttccgtttggtctctccaggtggcttggttagactcttcacagtgtggtagtttcagagtagttggatatcttacatggtgctgtgacaaggaaatgtaaattccttggcaggagagccaggatctcaggagagtccctgggaccctctgctccccttctcagtccaaccctgggaagatagttggtggatgtgaacctctgactaagacccaggagctggttcccagc

SEQ ID NO: 144036 - DNA, 352 bp, Homo Sapiens
tttagaaataaagggcaagttatgtaaatcatgagcaacaatctgcaaaagaggctgtgtgtatataatggaaagtacttcattgctaattagtagtgtagtaaatgtcaagatctgtgttcactctgggatttagccatgtctgggcatgtctgcaggactgtagggtgggtccacgagggatccatttacaagagatgaggtcaagagccaggaggtggaaatggaagaacatacatcctgacctaaagggaaagagagatgtttactagtttagttcggggtcaatgagcaagcatatctggtatgtgtgtaagtgtgtgtgtaggaggaatactggggtttgtaatgg

SEQ ID NO: 144037 - DNA, 957 bp, Homo Sapiens
  misc_feature (147)..(159): n is a, c, g, or t
gatgcaaacataatggccctgactagaagtaactttaaacttaggtttgagaacatctctagttcaaaatttaagcaaatgttttgaactccagacacaataacactccaggtactctgatcaaaattgtattatttgggaagggcnnnnnnnnnnnnncccagggggaggggacttcaagctccttttccatcaagataacagcacttacatctacataaaactaataactgaaatgaaaaggaagaattgtagtcaaaccctttctcaaggaaaccaaaagctaacaataaactgactggaaaagtcctgaatactagagcaagtgctacagcatccacagcacttttgagaaaggactacttctcagatgttaatataaaacgaaaaatctgtctcctcaaatgtacatataaagtcctcttctaggagaatgcctttagatgttctccacaattgctttacagagcttaggctacaaattaacagtctgctcaaatttagaaagcatttaattcacttagttataaattacaactcaatcaattcaaactttatttttttaatggccattcctaccttcttgaaatattgacaaactattactacttcaacattattaactttacctgtattttgaaatccaaaaatctaagcagtctacttcatttataataaaattaaaattcaatttctggcacaattcattctgccaatacaacacttacatctataaagagggtaccattaaaatgagatatatttatcatttctacttttgatacaccgtggttatattctcaataatattaagctcaacagcactaagggctgaagtcattgccttagttccttttttataagttcaaaaaatgagctttcatatatgaaaaattttatcgcatcatgactctaaatcaaagggttttagattcagcaaagatggcagcgcattat

SEQ ID NO: 144038 - DNA, 474 bp, Homo Sapiens
tttattaaagaaaagtttattaacgtgaatatcaggtagaaatctagttgttcattgcaaaactaaaccagtttatagcagaaataagcacttggagggaaatgttacattttcactgcaggccttgaatccttagccaccagctccgtgtccttcagtgttctgtggttcctggttccagagagatcacctgctccaatgtaacgagtgaagagttctttaggtgatggctgctgggcccagctttgctgttgtctttgctgtcttgtaagctttgtgtcgctcaagttcagttgtgtatgagtgtactaaccactgtgagcttctccaagcatgtgcaagcaatttgagaggagcctaatatttgcaaggaatttgagaggagccttttaaggatgttttattggcgggggtcacgtgagggagataacacgggggcaagaaggaaagttattaattcatgggaaactacca

SEQ ID NO: 144039 - DNA, 1525 bp, Homo Sapiens
  misc_feature (334)..(345): n is a, c, g, or t
  misc_feature (1338)..(1338): n is a, c, g, or t
  misc_feature (1371)..(1371): n is a, c, g, or t
cagtcgacggtaccggacatatgcccgggaattcggccattacggccgggggaagaaatagcttaagaagaagtgaaacatggatcttggaagaaattttgaaatcttcaatttgatcctaatatggatacatgttaatcttccaaaatctttcatattgcactaaatttattaaaacaactgtgtattggattttgtaatttaactaaggcacaatggacttgtttaaaatattttacttgattgtatacatagaccctttccagaattcacatgtaatctccagtgaacttttaagtggttaaaacttgtattcatgtgaacctttgcacannnnnnnnnnnnaacttctttatctacacctacagattttctcagtaaggttttggtaagctttgggtcccatttcttcatgggtgcatgcagaagtgtccatgtgatgcctggtgaccttaggttcatctacaaggctagggtacattgggggcagtattagaaacaaaatcatggatcaagagatactcttgataatttgaatagggccaaaacaaagttggtgacctaaaggcttgttagtgatgtggagttcctacatgcagtgagtggaaaatgaagttcgttttctcttaggaaaatgggcagctgtcttctgcctaatgtgtatttttcatgttaattctgacagttcaccaaatagctagtcatggagaatgcaggcagttaacttaatatccctccaggaatggttcctacgttgtgtattatttggtttcttttacttacctgcttgaatacttgaataaaccattcaccaattttaatccttttattttaatccttttacataaaataatctgaactctttgacaaattgcacagagctctttggcattaatctaattttaatgtactgataaaaacaaacatggttgtcctttactttgacaaagtaatgtaatttttaccttatttatctgtatgaaattccagtagttaatttgaacatttatttatatgacgtttgtatttttaggtctttaatacagtgtttctacctctcatttgtaactgcatgcattattcttgaaactaggtaaaactcactgaattgttgtgtaatagcctttttattattgcctgtacaaatgtatattaaggtaaaataaaactgacaaagtgtttctagggtgtagctgggtacatattaagtggcttgttgagccaggtacttccttagtgagtttagagacttggccatgaatatcctttgtcctgccccaggatttagatcttggctactgtcatgcaggcttccaggaacatagactgttttacctncacaaccctatttgtattagtgatactttattntatataatattttttattcacagtgaaatttcattcatgttctttcagttatcacctgtgttatctcagttgtaggtttattctatcctctcctcttcctctcccatttcttttttaacacaggatgaaacaggttcagagaggggaagtgatt

SEQ ID NO: 144040 - DNA, 577 bp, Homo Sapiens
aacaaatctgctgtgacttttttatagtttccaattctatatggaaattttccatcttttatctccttgaatacagtaaacatacttaaagtctacctcacaatgcaattatttggtgcccctttgggtctactgtttctgccagttttcattccgcctttctcctcctgtatccagggtatgtggagatactgtatttgaaaaagtacccaaataatttgaggcctaggaaaatattcttcctccaggtttctatctttcaggttcctaggggcattagaaacctaaggtcaccttagtccacttccaaaatctcacaatttactaatccaccttgatgatttaatgctaaactacactctatgtgaatggtctacttctgtttcaccattatccctaggatgctgtccttcaggatctctaaccaaagaattctaccagagtcacaaccttggaggtcgtatacttttaacgttcgtccttctagtctcccaaagtacactactcatgttttcagcctcttcttggctaacaaatcccccctccagagcaaaagcagactgaatagcaagttcaa

SEQ ID NO: 144041 - DNA, 494 bp, Homo Sapiens
  misc_feature (384)..(384): n is a, c, g, or t
tttaatttggaacacaaatgctttatttaagggtgcatcacaattcccgtgtggtgagcaaaaaataaaataaaggagcagatcgtagcacaccattcccactggccaagtggttgaaccctgcatccaagacccagtgagcagccaagtgaggtgcaacctctgggcctctcactcatgactccaacagaattagcacattgcccttgtgcatggggccttttacattgcagattttggagcagcaagacaatgtatatctgttcgtaactcttgttcttccctcctgatttttaaaactgcgtaattataaaactatgttgatggacatataattattataaagatgtagtttgtgacaataacagcatgggcagaatgaangcatatagagcaaatttttcattactgaaattaagttgagattaatctgaaacagataaaacagactagttttacaacctcctgtaataaaaacgctgtcttttaaaaca

SEQ ID NO: 144042 - DNA, 521 bp, Homo Sapiens
ttttgttttcctgttgtttttaattaaagtcgcagctctctagaggagcactgtccacctagggaggaaagtaggaggccagtggcaaacccctcccagagctggggacatgtattcccctggggaacccggtggcacccgccctgaggagcgcaccaccccgcccagatccaggtcccgtcagggtgccacctgctgcatgggcctgaggttcggggacacagcaaaggcacaccccgtgctctttttgatgtcgtccaccgtcaggccctcccagagctccctcagcgtcagctctttcttcctgtgcacgtcaaacacggccttctcggtgatgatgcggtccacgcaccgcttcccggtcagcggcatggtgcatttctccatgatcttgggggtgttgtcctttgtgcagtgctgcatggtgacccccacttctggtcttctgactggacaccaagttcattgcaaccgccatgccttttaaccttttggcaaggatcaatcagtttcccaaggtc

SEQ ID NO: 144043 - DNA, 887 bp, Homo Sapiens
gtcaatggtcctcttcaccagaaaggaatgtacgtagaaagagcctcttatccgcgcttccgtcgcatgcaccccgcttgttatcgccaggccgaggagggaaacaatggttctttctagggacacttcggcccaaagggtatcccaagaagctttccccctcaaaagtcctctgaatattaaagccattttgagtttttcagtgccattaaaagatttctggactcaggaaaaaggttcaaccccttattttcaaattcccggggtagtccactaagagaattccattatctgttgctgttcatccaaccaccgttgttccctttgtaagtcttcctttaacttttcattctttgactccttagtggacagtaccatttcaagatcttgtctcagcttttggaactcttcttttcctaatgttatgagaacgtcttcagtcaagggaattgtttcaggtgtttttttctgccattgactgagttcagcggttaaacattttacttgcataattaacaatgatagctgagcatttgaatcggtgagtgtttcagttccaataagtgataatttattgtgacattcttccatatctttccacatttcttcacattctctaataagttcttcttcagtatttgtaacatctcccacatctgtagtactatccggatctagatcctcctgattcattgatatatgctttgtgaatttttagccttataagaaaaacgcttgaggatgcaagatgtaagctgtatgtaacctggaagagggtcatcaacagaaccagaaaatgatggcacccagatcttgattctccagcctcttagaccatcacagcgtcacaaactccagtcgcctaggcgctgcgcaggaagcgcttg

SEQ ID NO: 144044 - DNA, 503 bp, Homo Sapiens
  misc_feature (492)..(492): n is a, c, g, or t
tttgtctttgagttttattaggaaggggagtccgtcgtggtgtgagacgttagaccggaaggtctgggcttgctaaataaaatccgcggtctggcacctctggagagggcagagcctcctcagaagagctggcctgaggaagaagccctttgccccctccccttctataagttagtgtcatttggctctgggaacgctggggcccgggtgggcaaaacccctggcatcggcggtgcccccccttagtggctggcacctggtcctgcaggacccggtgaactgccctgcaccgcggggctccagtctcaagccggcatgcacagtggggacaaagctgcaggtccacatgtcaggtgagcggcccgcggggaccggagtccagcctcatctctcagccaggctggccaggatgccaatgagattgccagccccagcaaatagccgtcctcgcgttgcctcctcccagggccgccgtgttcagatctgccatcnggaagggcgtg

SEQ ID NO: 144045 - DNA, 611 bp, Homo Sapiens
ttttttaaaactctactttattattatgacttgagatgtttgtttctaaaattacaacccagtggactggctgtacatttttctatgtcatttgtatacaatctaaaaggtctaaataacttgattgtgaatactgtgtttgctattttgaagtaccctgaatggctggcagacattgctccatgtgcagttttaacctgcgagctctctgggctgtgtgtgctgtgtccttcacgaatgacttctgttcttcaatcaaaagaccacactcctctctcacaaatactctagtcccgcgggctacgagtgtgctggcaaaccctcaggtcggtgagtcccactctttgtgagttcgccagtgatggctttgaacccgggggtgcctgattccacacccaggctgctctccacgaagacagagtgtcattgattcattctttcgacaagctgatcatactccacagctcgtgtctatgctcattggtctgttgagtcttccttttggtgactgcattgccacagtggtggataatttttcattgcgagctcatctatattaggggttgcattttctgtgagtcccatgtacgagattatgcaagtgttcatgt

SEQ ID NO: 144046 - DNA, 472 bp, Homo Sapiens
accttttgcatttatagaaagacagttttagtttgggtgatttccttggaactttaagtcctggacaagagttaaaagtaatcgtttgctcaaactcttgagattttgctatggcaaactgtgataagaaggacgaatgaatgcaaacgtcgtcctgtaatttttttcctccaagctaaaccacctaaccagcaatgtcagagtgctgttctcaccacttcagctgcccgagtctttgggacatttgtgcaggaccaaaagaacagccgcatccatgagaaaatcctaactcaagctgattcacgttaagataatttctgctttaagatgctgattactaaaataggctctgcttaagaaatagagccaaatttctacacctccaaggcctctcggttgccagattcaactacgcagtcagtccacttgtcctccccctggggtgtccatttccagagatgatagaactgaa

SEQ ID NO: 144047 - DNA, 480 bp, Homo Sapiens
ttttttttaaaaaaaacaaggcaaatggtttttttcccatttcaagagattgatgatttacccaaggtatatagtttgcaggtacacgtggctgataaatgttggaaactggctttcccaactcttcttttccttgcctgaagctctgtcctggacttaggaatcccagtggtgatttggagtggacaatacttgagtcttgaaggacaggactgcagggagggctggtcctacgtacatcctggagtgaaactccttctcctttctgcttccaccattactctaatcctcaaagggttaaccagctttcacacgattttcccatctcccaggtaacttgggcagctgctccgtgctggaaataactggcgccttgtggaatgagagcttaattaattattaaactgagttcccgcgggagggcgcagggccgtgacaggcagggcgggaatggctaggtgggggctggggctggggcag

SEQ ID NO: 144048 - DNA, 420 bp, Homo Sapiens
gggggggagacaaggcagatggttttattcccatttcaagagattgatgatttacccaaggtatatagtttgcaggtacacgtggctgataaatgttggaaactggctttcccaactcttcttttccttgcctgaagctctgtcctggacttaggaatcccagtggtgatttggagtggacaagacttgagtcttgaaggacaggactgcagggagggctggtcctacgtacatcctggagtgaaactccttctcctttctgcttccaccattactctaatcctcaaagggttaaccagctttcacacgattttcccatctcccaggtaacttgggcagctgctccggttgctggaaataacccgctgctaggaaggggagtgggcaactcggcccccacttctggggaggggaggggga

SEQ ID NO: 144049 - DNA, 787 bp, Homo Sapiens
tactgtatttttactgtaccttttctatgtttagatatgtttggatatacaaattcttaccattgtgttacaattgcctacagtattcagtacagtaacctgctatacaggtttgtagcctaggagcaataggctacactatatagaccaggtgtccggtaggctataccatctaggtttgtagaagtatactccatgacgtttgcacaacaactaaaccacctaatgacacatttcttggaacatatccccatcattaagtaacacatgactgtattttctgtctcggtccttctgacgtttgatatttcttagctttctatttatttacttttttaactgccagtattttttagattctgttttctggcttctagtccccaaattcctatccttccaccatatttctgaaagcttttatggtcactatttctcgagccccataagattactagaggagtgctgagaaatgagatccttttgatccgatgacctggtaggtaacagaaaataatgaaactctgatgacttgactagggattcaaccccttactggcctctaattccagtatcaatgcttcccatgttcaacaccttttggctttgaagagccccaggcaagtgacaagtagtcatagaataaacaccaagatggagaaatggaaatgatggcagggtttcttctagtcccaattggtcttagttaatgataggttcatctggcatttggaaagcaagaatgttattttagactgaaacgtcccagctttcttcaagttgaccaact

SEQ ID NO: 144050 - DNA, 805 bp, Homo Sapiens
gtgtgagccaccgtgcccagcaccaccattattaactgtagttaccatgttgtgcagtgttatctcaaaaaatgtattcctcctaacactgtacactttgaccaacatcctaatgatttgcttaggataaactcttacatatggaattgcttgatcaaaagtgtccatgattttaaggattttgcatactgtcaagactgctttgattcaatgaccaatagtacaacagagtgtccattttactacacgggtattataattaatttctcattttttgccaattctataggtgcaaattgagcttacatttgactactaataagtttgaacatatttcctatcttcaatggcaatctgcattttggggggtgaatttttcattgttagcccatttttctattggtatctgtggctgcttctgattaactcatatgcaagaggttcctgtatactaaggatgttaacccatttttctgccatccatctcaggttatatgacttttcattttatttctggcatttgatgtggtattaagtttttatgcagtgaaatcattaatattttcatttatggcttttatctttatgacatttagaaattccttctctccccaagattacaaaactgaatacatggaatttctgaagtgatttgttagtaaagccatttattttttgctttaggaaaaactgtcctccagaaagttttcttgctttcttttgcctcctgatactacattttaaaagactatatatgggccgggcgcggtggctcatgcctgtaatcctagcactttgggaggat

SEQ ID NO: 144051 - DNA, 889 bp, Homo Sapiens
ttttagtatggtattctttattttgaaaatttatgtgtaaaactatagaactgtcaagaaatagctatttttctccttcacagtaataaaggttcccacaaagtactttctatagtagtttattcttcataaataaatcactattataactgactacttactgagaaatgaaaatattttaacttaaaaaaatacagagcccttgttgattaacagaatttgtcttaaataggattttatctatagtatcatatatataaaatccttatacaagtaaccattgaaacaagtcagtaacaaaatattcacataactgtatcacagatcttaggaaacagacattcagaaaagatttaaggccactaagtaacagcctctcataaaacccaacaaatcttaaaattgcaattagacttaaaagggacctaaataccacttcatgctgaaccaagattagaaaaatcttccactcttgacattttcatgttcttagtttttcaatcaagtgatcagctgtgataaaccaataggaattgactctataaaccaacttggataagaagccaagctgatccactggtgccagaacatgaaggtgcaagtgggaaatggaacagaatggtggcatatgaaaacccatcctcacattcgtgaagtcagtgaaattatttctttcaagaatggtttttccaacagttaccatgttctcaaccagttctacttgatctttccttagagttctgcagtttccaatatgcttctttggcaccacaagataatgatgagttgctgctggtttgatatctttgaagcaaattaggtcctcattctcgcagtgcaggagttcggtgcccgggtcctgccgccccgcgatccggcagaacacgca

SEQ ID NO: 144052 - DNA, 373 bp, Homo Sapiens
cctttcacagtattttttaatttcacggagatctgggtcagcctgtgggcgtgggtagcttgtgaaccaccatcagtgggtatgctccaaagaggctcagtattgaggacgactgtcctatccatccagagtgtgatctaaggccgtggagagagggtcggccaggcccagccacaaacaaaacacccataagatctcaagtcagtatcacctccctcctgggaggaaggctcggcacaggcaggacccggggaggagggctggggaagccaccctggcctggagaggagaatgggagacagaggaaaagggagcttggtgaggctccaagtcacagccaaaacccgacaaagtgaggcacaaactcgtttgg

SEQ ID NO: 144053 - DNA, 595 bp, Homo Sapiens
caaaactaagttttaattataataggaaaactaatgcgaggccagaaattgttgactttgttcacagaatgctaattttccccagacaaaatatgcagagctatgtttcattaatatgcagatctatgttttattaccaaaacacactattgccaaatgctcaaaaggaaaaaagatatttgtactctgtgctaaaacagattcatttgtggtatttatatgacaaaactggaattgtttcaacctggaaatcattgtttcaaatttccatggttaaagttttgctcaagcaaatcttaaaacacaggtatgtatttcagaagatcaaccaaattcaagagtttggatcccattttgggtaccttataagtagaaatttcaaaatcttcctcaaaaacatctgcatctgttttccagattcttgcaacccaaaacaaaacttcatagaaactctccacaagagttggtagacagctaaaccttctccaaattgagttatggacaataaggtcttgattatagcagaactggaaggtctatttacaagcctgcacacagtactatgtaagttggctgctggggcacatagattggc

SEQ ID NO: 144054 - DNA, 543 bp, Homo Sapiens
gatacaaaaacagcagcattgtcgttttgccaggttcatcaccattttgatgtgctacccatccttccaccctccctttcctgcccccaagcctcccagccaggccagatgtgaagattctattaatcactgtttcagagaacattaattcttgtatagaataattatctactaaattgcttattatctgtgactaccttgcagagaacatctcaacagtgcagtaaaatagctctcctagacttgagcttccagccaggcatttagatcactcttaagcctttgtggaattctgaggaaaaaaagcaagatgcctcaatgccaatgctgggccataagattctactcccctccctgtagggtggggcgcgtggctcagctttggaaaatcattttgccagtaatattgcctgtgaatccctttaagaagtcgtcctgatctgagcctgtctttctgagcactttggtgctgaattgaaaatggtaagctaaagcagtgacagatccacgtagcctctttaacctctttattatcttgccaaa

SEQ ID NO: 144055 - DNA, 539 bp, Homo Sapiens
actctgtgcacctgaacacacttttgttctcttgcaagcagttgctttgcactggaggcaatgaagacacggcggagtcccagctcgcagggagctcaggttctgacggcgtcagaggacaacacgctctggaccagcgcagcgcccaagggtcagcggcagcagcgagcagggggcacgggatgcggggaggctcttcgggaggcatgaaaggcagacgtgttccgaaacgtgagccgcgctgaggggcacggcgcacgaccggggacagaaggaagacactgcggtcgcaaagccctggccgtgcaaaggccccgtggtcagccaggagcccaggcgtcccctgctctagcgaggtttccttccgaacgtcccgtagcaccgcttaccatggaacggcgggcgctgcctcgcagccccgaccccgcggcggcccccacgggcccacgaggaactcgaggccgagggaaggagtgagagcggccggaaaggggcagggccgagccggaccggtacctggctgggtcccagcggccgca

SEQ ID NO: 144056 - DNA, 620 bp, Homo Sapiens
ctgaacaagttttttctttttattgtgattaaaactagaagctctctttcccaacatacttcatcaaactatttacaacctctgtaaaatttgtgagtttgaaaatactttttccactatcacatatgttacgaatacagtaaaatatcttcactctattttttaaagatgcagtatccttctatttcattttcttatgaaaatctggatttctattgcaattgctcagtaattagcatatttaaagtatcagtggacatgggttactaaacagacattataatgaaactgtgaaaatatagcaatttttatgtacatttcttaactataaaatgcaggcagagtcatatatagtattataagccggtttcctaataaggtaagtaactcacatttctagacagcacggattattacaaattctttttaaaaaagttctttgctgatatttgttagcccactggctgctgcatatacagttgtgtacacacatgtgcatgtgttggggctgtctgtacaggttaagtggaaggcagtgtggggatgagtagaaatgtcatatggaagacatgacttaccaaacccctttctaaactaaagccaaatctaattgaagagac

SEQ ID NO: 144057 - DNA, 425 bp, Homo Sapiens
ttttattttataagaaaagaagtttaattggctcacagttctgcagactgtataggaagcataatgctgacatctgcttctagggaagcctcaggaagcttacaatcatggcggaaggcaaagggggagcaggcacatcacatggtaaaagcaggagcgagcaagcgagcgagagagagaggtggtggggaggtgccacacacttttaaatgaccagatctcatgagaactgggatccaccatgagggatccaccaccatgatccaaacacttcccaccaggcccaactgccagcgctggggattacaattcaacatgagacttgggcagggacaaaaatccaaactatatcaaacctcatcacctccaaagtcccatcaagcactgtcccattgaactgcttccagtttaccaccctctaagcc

SEQ ID NO: 144058 - DNA, 521 bp, Homo Sapiens
caggcacacaggtctcattgcttctgactagattattatttgggggaactggacacaataggtctttctctcagtgaaggtggggagaagttgaaccggtttccctgccctgcctccccagccccctgcccaacccccaagaatttggtggccatgggccccgaagcagtctggcggacaggcttggagtcaaggggccccatgcctgcttctctcccagccccagctcccccgcccgcccccaaggacacagatgggaaggggtttccagggactcagccccactgttgatgcaggtttgcaaggaaagaaattcaaacaccacaacagcagtaagaagaaaagcagtcaatggattcaagcattctaagctttgttgacattttctctgttcctaggacttcttcatgggtcttacagttctatgttagaccatgaaacatttgcatacacatcgtctttaatgtcacttttataacttttttacggttcagatattcatctatacgtctgtacagaaa

SEQ ID NO: 144059 - DNA, 471 bp, Homo Sapiens
ttttgaatggaagagtgagtagagattattttcgaaagttgatgggattgaaaatacccagcaagggaactgcaagggagactgttcaggaaatgggctggagtgcaagctgggtgggaagaccgctgaaagtggttactggggtggaatttgcacgggaattagcggggtggtgggggcggaggtaggcaccgaccgtaggggagctccaggaagattgcgctgggagcaggagctcgggagcacgcagcagccactatgaggtgctaagcagtccccgcgctgtggctccgccaggctggtccgcgcggcacgtgatgcccagtcttggtgcccagtaatggtggggaggagtgtgtgagtgggcggggtgccagggggggagagtccatccaatcgttctccctctgtcccaaactggagatctatctgcatcgctgccctgacccccaatcccggagagctctgtgc

SEQ ID NO: 144060 - DNA, 776 bp, Homo Sapiens
ccgttgctcgactcttaacaactaatttattttaaaatagacaaactattaattgtagaaaatagtaacatagcaattttaaatgtacagttttaaccaatacaaaaaagcaataaagcaataatatctgaagcattatttaagaaatctcaatacacgatctctgaagttcctaaaattctggcactaattctaatgtgaacttagtagcaaaagacccagaaatagtaagcccttgacctaaaaactaactgatttgtatgatattcatgcagaaacaatgatgaaatggagtcaagttttctagtgtcattgttatcaaaataactgtcaaaatagtaagtttgaaacttaaatgagcacaaaataaaattttgttttctaacaagaccagatttctttttaaaaataattctgagttagacaaagtgattttcctaaaagctagctgaagctaccttaaatatcccctattttaagttacagcatctctaaataagttaatcacacaagatagtttaaatacacctttaggtgtaggggaggggaagaagcgcctctttttctaatgcagctgttttaatttgaagcttttgcacaaaatcagatagaaacattaatgcctaaccccatatgaccctgattacttgtaattttgactagaaatatgtgctttgacatgccagtggtagaccatactgacttaaataataaaagataatagacatttgcagttcaaaagactttgggagactgtaccattccagagaaacaca

SEQ ID NO: 144061 - DNA, 1002 bp, Homo Sapiens
  misc_feature (112)..(112): n is a, c, g, or t
  misc_feature (124)..(141): n is a, c, g, or t
  misc_feature (305)..(305): n is a, c, g, or t
  misc_feature (979)..(979): n is a, c, g, or t
  misc_feature (986)..(986): n is a, c, g, or t
gcgggggcttaaggaaggagagggttgacggccccggagggcgggagggtttcaggggaagccggggataatgcacccggcccctatatcccaaccctggggcaaaaggagngagaactttatnnnnnnnnnnnnnnnnnntggaaggaaggggggggtttgcccatggttcctggacacccattttggtcttggtgcaatggtggccagggtttcaaaatgccgctgaaagacggggggttttgaggcaagtgttcccctggtattggtatccagccaagccaaaccaccctggtaggcagctnaccccctgggccagtggttgttcccttcattgtgtttttctttttctcttcatacttgtagtaggggctccgcaacatgaaaattaaaagtatgaatgggatgagtaagtagggggcatagacagacacaagggttaaccgttcatgcaaagtctcaggtctttgtcccttgaaaccactggctttggagaaatcctcaaacagaaatgtggagagtatcggaattaaggttgtcatggtgtgaacagagtagatgattgcaggagttcgaatccacttgcagcttcctttgaggaaggcatacgttgcaatgggaaagaaaggcagctgaaacacaagctcgcaaaacagaaaggacttaaaccaggctgggggctcctgtagcagtgggtctttgaactccttagcataccacttcagcaggtttctaaactcgactgggtagagctcgcgcggcagcaccgcctgcaggtccatgaacagggtgatggggatgtggctgaggaagtagaggcccagcagccactccacgcagcgcctggttgccggagcccccatagtctgtcggttgggcctggacccgctgatgtgagaagaggggccaaatccgcgcgccttcaccagacccacgcgcctcgtgccgagttgtaaaacacacgccgcaggggcctccngctagcnctaggccgctatagtt

SEQ ID NO: 144062 - DNA, 481 bp, Homo Sapiens
cccttgtttggaccacatttattcaatatggttggaaattagcaagaatcagaagaagcacatatcaatcaaatacagccacaaaaacatcctggagataaataaagctgcactatgagaaatactcactactgaaggaaccagtactctcttacatttactacctcttagcaacaaacaactcaaatgtaaatttaatttactcacaatatagaacccttgactttttaaagaaaaatatagattcaaatcaatcagaatttgcctcgctaggccttttcgttacgtatgtttttgaggcctagttcgacgactgttacgaaaatgacaaaaacaaactcgaaagaatgtttccacaaagttcaacaaaacagtgcagaaataagttacttacccatgcacagaataaggcaaaggctaatttcattcgggttaggaatagtaaatttaactagtttcttttccacaaaacgaacatttc

SEQ ID NO: 144063 - DNA, 628 bp, Homo Sapiens
tgggaatggttaatctacgaaatctcttaaaatatttccgtctaacctttccttgttttccttctatttctatagccacccttctggttcacaaaccttgtactacgaaactggaagtttttccttcaccacaaggccacttgtcacctacttttttgtacactcacttccagcaaactagttccaacccaggccacagccttcagcttccttcttcctgcatatgacaccagcttagctttccagacttccttctgtcatttcacccttcagccctcaatggttcacacacatgatcaaatctggatgcctaagtcttcctaggaccttcttgctgcctcatttgacaagcttcagtgctgcctttgagcctccctgcctccatggacctcccttcttcccttcagtcttgtccatcatcccactgggaagccaagcacctagacattctctgcactagcagtgaagaaatgaggtactgaatgcagaggtgtacaaaccctgttgtgccctcaatgtgatgcaatgtgatgaaatccttcctggaccttctttgtacatgtctaaattatctccttgacttccattttattttaattattttgattaaaaacaaaaacttggcaaa

SEQ ID NO: 144064 - DNA, 886 bp, Homo Sapiens
  misc_feature (873)..(873): n is a, c, g, or t
gccaagagctattcctatattttatttcgatttattttactttctttgtcttaatttatctcgttctaaattgatacagacgacccaaataaaactttaaaatagggggtggggaagggaatgagtccgggagcaagatcctaagaggtgcgagtttaccaggccggtgtggccgcatcccggccgctctcggagcctgaccacgccacgcccggggcttcctccgagcctctcttcccgctctctgcgccgccgccggcagcctggaaccttctccgctggtgcggatatcgctgggttcccggcagcactggcatgtgaggcggtggcgctaagggacgtcctggtttctatagggcctggaatctccgccgaggccggcgagggagaggaaacggcgggtctgtgttctcctggttggttagtgggttttgccagctccttggttggtgggtccgtggtgaaggaattgaaccgaattttctggaaactgttgatgtctgcaagtgagtgccgatcccctcctccattctcggatcttttcaagcgaagtctacctctgggcttagataagagcgatgaggcgctattttctttcatgcccgactccaggcgcccaggcccgcctgtagtggctccatctccagacaagcaacccggtcaatcccttccagcttggcccaacttcttactggacttggagggagggggagctggtgaggaggaagccgagggtcgtggaggctctacttggccctcctttcccttcaccccttgactttgtctccctttgtcgatagcaaactatcccaaaagtcgctatgacatttagatgtcaaatggataggggttttatctcgaagttagatcgtnaaaatcgccgaga

SEQ ID NO: 144065 - DNA, 454 bp, Homo Sapiens
ttttttactccaacgacagtggaggtttatttcaacggaaggaaacaaaaggatactagttattttacaatagtgtttttcctacaaactaaacttcttacaaactaaattaaaaagggcttgcatttggcactaagaagacagtttacgtcttatgtttggaccacctaggacattccttggggtgaagccagaaacccatgctgactacagctatccaagactgtgagcgtctccagggctgccctcctgaccccgggatccgggtccagctgtagttcctggagggaattccgtaatgctgggaagtccagctttttcagataatgtgtagacatctgcttcataataattcctgccaagttgcaagcagcgattctgattcttgacaagttatttttaacataggccattgtttctagcaagaagcggtagagaacagccggctttttcc

SEQ ID NO: 144066 - DNA, 472 bp, Homo Sapiens
tttcagtttgtttctttagagcacctgataccacaattaagcttgggtttgattcccaagaggaaacaacagcaaatgtgagctctctgacacctccactcttgtgtttcctcaactcggctcagcctgctgtgccacacagaacttttgattctgggcccagcagcccatgttaggtgcaaaacaagcaggactgtgtccaagggggcttcccctgctggtgacctcaacccatacccccggggaagtatttgcaggttgattgcttctgactttgagttttcctaatggttcccaagctcatctgataaatagcagggtctttcctagcctggaggaaagagacatgaggaagtggtttgaaataaagcaagtgcattgcaaacagctcccaacctcacttgagtgagaggaacacaactcactggagcaactttgggcactttgagagagaaagtggctcgtggttgca

SEQ ID NO: 144067 - DNA, 554 bp, Homo Sapiens
ttttcagattgcagttatgtattcagtttcctacgtacttcaacaacaggggccatgggaaggagaggagaaacattgggagagctgcctggctggagtaactgacttctattaagtaatgggttcctatgcgcactttacaaaatcatcttcctacaggaaaatcggcttccacagggataacacgggttgcaaggatcatatgggctgcacgggttgcaggggctgcaggggttgcaggggttgcacgggctgcacgggctgcaaggagaagtgcaagggtagcaaggagactcgatcttgacacagctgccgagcccataggagtatgttacatccttctcatccacacagggcggcaagctgaactctttgcagatgttcatgtagctgtactttttcgatccaaggcagtcgtacctgttctcccgctcagccgacacacatacctttccatccttcactcgaactttgacttgatcgggttcaaaaccgcatacattcaccgatcctcaaatgttactgcttcagcaagagggagcccagaatctatt

SEQ ID NO: 144068 - DNA, 478 bp, Homo Sapiens
ttttttttttggatgcaaaataaactttattgtcagaggtttctaaaggctcatccttcaaggaaaatggacatatgctgaagagctgataaactgtctacagcagtgttattctaacctaatcttgattccaagttcttgccattttcctccagctgctgttgactccagttatatataggatgggggaaaggggattatctatgaatgtaggcatcactttctcttgggcagttatcacattggcagactgaagggatgtgatttctacaatcaaactatccatttggagtacaaatctggagtggctgtaaaattcggttctcagagatgaacttgcagattcggactttcaattgttctgttgttttagtttttcttatcaactggggaactgtttgtgactaagctttgttaaaagtagagaagagcttttcatagttccaacattagttgttacctctagaaacttgattca

SEQ ID NO: 144069 - DNA, 470 bp, Homo Sapiens
cagactcagacaaactgtcagacatgttaaccctgctcgttaaatacctggaggggaaaaaaggtagaagtaatttatactttctaagtcatatataatttggcaatgataacccgattattctgttatcttctaccacctattacctaataaaaggggagaggggctcaagagtataattctacatgttataatgagaaacaataagttctcatgaaataaaacatgaaccatctacccagagcataggttgaaatcagagagtatgcagtaagcactctaaggagccaatacatataataaagtctctcatgatattgacaggcaaaatgatgagtgaaatcttcactcgagaatacatttattctattttactcaacaagcctggttaattagtttcaaaaccacagtagattaaaaatactttaatttggaaatgaagcttttaaagcaggccgactgacagttaa

SEQ ID NO: 144070 - DNA, 961 bp, Homo Sapiens
gcgtcagctaagcctgttgtcgccacagccctcacctctcctggccaacccgcccggtaaaaccctatacctttctcgccctcatgacgacggtccggcccccctcctggagggtacctgccacgttgtgaatcggactgacgacaatccgcctatcagtctgcggccagaagccggagacgggccccctgcagcgtctgggggcctctgcactggggtcaggtagatctcctcagtggcctctagtcgcacatcggcctggtagtggattcggtctcgatgcgagtggccccgacccccaggcggggcagcagggggaccacccggaggtgccatctgggtggctgtgctgcggcggcaagggctgtcggtggaggtgcctcgatctgtggtgggggcggggccgctctgggggggcagctcatcgctcaggcagatgtgttcatgcggtggtgtctgctcccctgtcttcaggggtgaggatgatcgagacacccgatcctgccaactgtgctttttgcccagagaattattattcagtgtgtcctgagaccgcggcacctgcggaaagaggttgagcgtggtgggccgcttgggccggtacgtgtccccgctgcccgggcctggctctggccttggctctggccctggccgcgggacgccggctcctggccggactcggccttgggcggccccgctcccggccgccgggccgcgcgctcctcgtcgtcgtcctcctcgtcgtcctcggccccgggagtgtcccccgtcgcgtcgatcaggtccatctgcagcatctcggcctgcaaccggctccccgcgccgccgccgcccgcagagagcagcccggcgcgcgggggccgtaaggacagggtgtctttgcactgtaagctgatgccacactaatcagtgatctcccctcgtgccgattaacacccagcctcgtacctagcctacgttc

SEQ ID NO: 144071 - DNA, 509 bp, Homo Sapiens
  misc_feature (289)..(289): n is a, c, g, or t
  misc_feature (311)..(311): n is a, c, g, or t
  misc_feature (497)..(497): n is a, c, g, or t
tttaagttttaacataaggaactttattttatctacattttaaaggacatttttgtagattacaaaacttcgctcacagatattattatttagcactttgaagatactcctttgaagatttcttttcaagcatccattattatagtcaagaggttttatagtcagcgtgatggttaattttatttcacaaattgactaggccacaggatgcccagacagtaggtagaacattattcggagtgtgtctgtgagggtgttttgggataagattaccatttaaattggaagnctcaataaagctttggccttcntaatgtgggtgggctttatccaatcgagtgaaagctgaacagaaagggtggccctcccccaagtaaaagacaattcttcatgcttgcactgtttccaaactagaacattagcttttttctgcctttggactcaaactgaaacttggactcttgctgggtctcaagcctgctgactatgagctggancttacaccattg

SEQ ID NO: 144072 - DNA, 1758 bp, Homo Sapiens
tttttaaccttttctacacctttatttatgaaatgcttattgaacggatacaaagttagtgtctgtcagcaggctggtggagggagttaatgtgccctccttccttcccctggtgggggctgaagccagaagtggctttatccttccctccaccttggcagcaatgggctgggagggccctgggacagggagggggttcaagggcaggaagaggaagggaacaatgggtagtagggcctggggcagagcccccttctcctggaataagaggcttgaccctgctcaccctggcaggagctgtgcttctcctttgcagcatggagaagtggtttgcactgggcagcaggggggatgagctctgggactctctcctcctccccagcccagggttgggagtgcccttttcagctatttctcacgtaagggtcctctgtaacacctctagttccccttcaggaatgcctgcctccccagatctcaaagggcactgccctcagtccttggggttaaggggcagggagccagacgtggtggggcacagcagctggtgacctctccctgacgggggcctcaactatgtccacacttctagggggatcatgccctccttgctacccagcgggggcagcaaagactcatcctctaggaacttgagggggaagtggaccaggtggcctggacctgggtgagctcagaccgagccaaggggggactgaccgtggccaagggctccacggccacgtactcccggagagtccgcagggaacgcgtggcattggatggcaggcagcggaagatctgctcatagatattggcgttgctctcagccatgtcttgccacaactggaagaagtcatcacagatggggtctcggagatccaagtctggccgggtatttgctccaaagaatccacaccgaaggcagtgcttccgcagactcaaggcaaaacctgcccgccctgatactctgccccattcatgagggatggttccgtctctgtgtcctcgatcagcacggccagctcactgtcccgcttccccagcaagctccggtcattgatgtttgcagaaccaatgatgactgtccggtcatctgcgatgagcaccttgctgtggatgtagatgagctccgagacggggtgcccgcccagctctccgtgtgtacgaagcccgcagatggaaatatagtcccgccatgctgtccccatggctgctttaaggcgatgcaggattgaatactccccacgacacagggtcctgtaagtaaagtgcagaatggcctggatggagttgccaccgcccgtggagatgtcaccctcgaagccagggagtaagggcaaaagcacgtagactcggtaacaccacccctgtttgtgggccttcaggattctgtccacaatctcatcgcccaccttgttcagaaccgtccgcccatctgagcagctaatgaagaactgattctcaatgtagaggaagtgctggctctccctgatggtgtgcaggtaggcattgaggatggagttctccagagtccctgctgaccagcggtccactgatcgcaagacctgtacggtggtgcactgccctcctggaagtgtgaaggggagctgattggccgtgctggtagacttgggaagcaggtaggggtatatgggagtcttgtacttggccttggtggtcttggtgaagttccagcgctggatgaagtgccgggcaaggtcccgggccggtaggccatggacgaccaccccaacgtcc

SEQ ID NO: 144073 - DNA, 1133 bp, Homo Sapiens
caggaaaaaaatttccccagattttttaaaacagggccggttcatccaggggcctgtaggcaaaatttttttattccggggggggaagaaaacgttttccttgaaggccccccccagccgggggaaaagaaggtcagccttttaaccagataattctggggcttttcaggacaggggaaaaaataaaaaccccgttgctgccttataaccaggagagggaaagaatccagtgaagaagcccttaaaagtgaaatgtcgtcagctaaacataggcatctcatcaaaaagaagacttcaacagaggcagttgtttgagttttcaatcatcagtattctgagaacttcaagtgtgtattattagtgctaatgctatccatgttccttctctattttctatgatacgaggaaatcacatgaagctgccttaagtggtgaaaataaatggattctatttttgcagtattcctgcagtcttttaaatcacacacgaatactgctcccaaaattatcatcagcttctgcctcagacacttcatgaaataagctgaaacaatgtgggctgtctattaaaagactgattgctaaacatccctacatacaatgtttctcatccatttcaaaggtctgtagaaaagtttcacatcttcctggcaagctattccatgaatgttgcacctttgaggaaaactttaaaataaggacattcagacttgtgtgtaaagccaaagaatctgctgcaagaaggagtcagtttttcccagcagtgaaagatcatcaagtttctcaactaactctaaaaactcccttgaactttggaatcctatgaaggaccagctgtgtaaactcaatgtatgggcatgacactaaggcaaaatctacaaagcagaagcatgttcatccaacaatttctgttaagattctgaaagtatgaacaaatgactacagtggatgatgtttccataaagatgtcaacctcctcccacacatgggtggcacaaccttaaagaatgctgcttagctttattctgaggctgcagcaattcttcaggcttgtatttggaactttttcccccaagttttactatacatacctcactgatgtgtaaaaatatacaactcactgaaaataaaaa

SEQ ID NO: 144074 - DNA, 520 bp, Homo Sapiens
ttttcagtaacttcataatttattagacatcccatttattagaactctaagttcttttgcttttatataaatgaaacatttattctataaatagaaatgtatttttcagaattttctttgggttggtttcttggtagcatctcccagtaatacatgaataacatactgaaaccatgatacaatgtttaggtagatatacatatacatatgtggtcatgtgtttttaaaaaacaagtaatggtaattttaaacaaaaccatgtaaaatatctaagtggaaatattttttcccaactctatagctagatttaaaagtcccagtaaaattttgtaaacaaaatcatataaaaaaaggcaaggctggctcttccctatggtcctttagtggagctatatttgcatagatcctagacaaatgatgccaaacaaattccctccaatttccactagccatctccctaattcgctcaacccttacataagcatcagatttagatttttagagttttgcccaccaactc

SEQ ID NO: 144075 - DNA, 524 bp, Homo Sapiens
actcacctcacccgcactgtggttgcgttgctttgtcaggtgttgccgatgaacccagcgcacttgtgggtctactgctctgaagtgggagccggggatctatgacagtggtggtgcgggagttgtggtccacaaagaatgcctaggatacaatacattgagtcaaatacatgccgctcacatgtcttagctgacttataacatcagacggtcaggaaaagactcacttctgagtcacaatcttagctctattttctcataattttcaatctttggggaaatttctccttacccacacaggacagatcagattagagaaagccaagcttagatgagatccagaacgaagagagcaggaaggaacattatgcctggttttaggaaatactccacgagatagtcaccaaagacatgatccaagaaggaagccagaagaatggacatttaggcttctcttaactgatggtctttgagctcttactgtcatatgtggttattataaagttcttaccaccttgaaactt

SEQ ID NO: 144076 - DNA, 352 bp, Homo Sapiens
tttgttccagtaacatgtttttctggggtcttttgggaagttgacagtcaatagtaataggggttgaaacatgagaacttcatcttctcttttaagagtatcttggtatcttccaactagcgcaatctcatgtcagcttaagagccagttgaagaaaagttcaactcctatcagggcggtgtggtttctaatccttctactgctgcccatcatggtgctgtgagtgatttggtgcaggagaggaaggggcttccatactctggtttcctactcctctctgctgtgtggtggctccaggcttgcatctgctgacaaagtcccacacccgtgtctttcattaagccagctgagt

SEQ ID NO: 144077 - DNA, 409 bp, Homo Sapiens
acaagtttattgagcacccggatatggaagatggcaccgggcacagagccgtgggactggcctgcaggccccgcaccctcaccgtgtgctgtcctgggggtgcctcacaagcacagcaccttggctccatcggctgcttgagagaggtagaaggtggcagtcccgccgtagtgctcctggatgtgccgcatggcgtggggagcagcggaggcctccagcagtgtcaccgtgcagccaccgaagccaccgcccgtcatgcggctgccataaaccccaggcacagcaagcgcagcctccaccagctggtccagctctgggcagctcacctcatagtcgtctctgagtgagcggtggctctccaccatgaggcggccaaaggctctgtagtcgccacgtctcagggcggccc

SEQ ID NO: 144078 - DNA, 455 bp, Homo Sapiens
  misc_feature (96)..(147): n is a, c, g, or t
gagtttcatctgcatctttttaatgtggccactagacaatgaaaagcacatcttcggctcatgctgtgtttctattggacggccctggcccagggnnnnnnnnnnnnnnnnnnnnnnnnnnnnnnnnnnnnnnnnnnnnnnnnnnnngcacagaggcaccaggctcagccaaaccagcacggcctgcatccccggggtgaggccagggggtctgtagtttccaccatctttccagggggctggcagggctgaggcggtggaggaggggacggctcagccatggggcctctcaggtgcacaggaatcggtggcatcaggttgaatgcggtgctggtgctggagggctgggcccggcttgccgctgggcgtttctaacaagctccccaaaccagatgatgcagacgctgagggtccttggacctcactttgagaagcaaggctcccacgcacttttt

SEQ ID NO: 144079 - DNA, 551 bp, Homo Sapiens
ttttttctcattatgattggctttttattccccacttgtcaggagtcataactgtatgaaacattctccacctcgatcaattggaaaatcaataccttggtatttgtggaaagcatctcttataggaagaaatgaaaagaaatatttgggaaacattcaggaaattagcccatctgaccgtccctgttttaaagcagtcactcttctttgtaggagttggtgctgaaacatgctctttcttttggaagggggcaggctggctgggatggtaaatggttttgatcatccaaaccacagttttcttgaagtgttgatgatggtgagtccaggtgaatatttcattcgcttgcctcatgggtggccctggcgaaatgaggcttccatcctgggtagcgatggtttgggcttgcttggcttggtggaaccagtttgccatcttggccctcaggactctttaaaagaaaatgtgttcaattcaggatccaaatccagtctatgttttgtaagtggttacttggttgatatatcttctaagtcttaatctacagata

SEQ ID NO: 144080 - DNA, 643 bp, Homo Sapiens
ttaaaaagtttttttgctttattaaattcctcttcaagacttaacagaacaatggaagctcatcataatcagggaaacaagaagaaaagagaatcactcaggctcctttctggcgggggagtggagaggctgggaaacacaatgacagtgaaccatgggaagcagggggcatggccacttgatcttaaagggaccggctaacagtcactaaatgtccaaggcctgggcttgagcaatagcctcaggtatctccatcacttacacagcactcattcgttcagtgagatgtcatttattaagcagttacaatgctgcaggtgctgtgcaggagactgggcatacaaaagaagaatttgacccagaccttccccctctggggtctcataattttgtatggtggagggaatgcaaatacaaattagcgaagaatgatagcagtatcttaggacactgtaactgtgtgctacggggcccaaggactggagagccatcccttcgtgaaggtcaaggaagagctgggtggtggagagagctgagcctgtgtggacccctgatgcatgctctgatgctgagggagtacagtagagatggacactggtagtgactgatgagtttggctcccatacatgagctgcatactgca

SEQ ID NO: 144081 - DNA, 443 bp, Homo Sapiens
agaccgcgaatggatcgcagcgtattctgggaagtgttgttttatcgaccggccccacgtggagacagatttaggcatccaagcgaaatgcgtgaggccagcccgacctgcactgaggtaggtaagtcttgagggaaagttctggatgcctgggtttacccagatggaggtgtccaataggcaattagatacacaagtctcaggctctcccctggtgctagatttccagcagcaccaccattatgttgacttctcgtcccccccccttgggcttcagaaataatggtgattggctttcccttggtgacgcccctgcttggtgggctggcctctccttcgccccccgacctggcacgagcctctcgagcttccgggccgtctgctcggtgattggccgaaacagtgagtggacggccgcggattggctgtgctcagcggcgggc

SEQ ID NO: 144082 - DNA, 492 bp, Homo Sapiens
tttcccctgtaatttccctccttcctaagaagataaataagaaactctgctcttttgtcctgggagtggtttgtactacaggactgaaaacaaaatctacccagaaacaatgaatctatatcccctgtgaaagtctaaatccattctaggatcaggctaacaattttagagaggtaagaaaaagaggccaatacctttcaaatcagaaaggagagagatgtaagagagactagcctaaggctgcgggatgggagaggaaatgtgtgggttctgtgttatcagaaagaaaatcccatcttagaaagcacagtacctttgcagcagagtgggcagattcccatttttccagttgacacaaatcttgaccagctaagagcagaggaccaacttaatttcttaaccaactaagagagagtgagaggagtaagctaagcacccatcctactgattctttttatgtgtcttggcttagatgtacagcatgcacatgta

SEQ ID NO: 144083 - DNA, 723 bp, Homo Sapiens
cagaacaattttaggtgcacagaaaaacgagcagaaagtacacagttcctttcatcccctcccccatatatgcacagcctccatatcaacatcgtgcaccagcatgttctacttgttagaactgatgaacatacattgacacatcataatcatccaaagtgcatacattaggcttcattctcagtgatgtacattcaatgggttttgacaaatgtgtaatagcatgcatccaccattatagtatcatgcagaatagtttcactgcccaaaaaatcctgtgcactccccttggtcattctaaattttcatttctctgaagctagaaatcccaaagttagagttggcctttttcattctaaagtagtcttcaattctggggaaattctcagcaataattctttcacatgttctttgtttccgcttctggaatttccattagaaaaatatttatgcttctaccttccacatttcttaactctcctttcatgctttccatttcttagttccttccttgctctaatcttccgggtcatgagtgaactgtccagctatattcaacccatccattgagttatttgattaatatttgtcaacatccaattcacaaatgctaggttgtgctttgtggtttcaacaattctcccttcttctctgaagctctattaagcttatgttcaattctaatggctgatccatgcacctgactttctttggtatagcttg

SEQ ID NO: 144084 - DNA, 471 bp, Homo Sapiens
agctactgcaataaatttgtttattcatcaaataaaataaatagcaaggattttcttctattggaaaaaatagatagcaaggattttcttctagtggaaaaagtttctcctgtttaacctggcattaaaagctttagtcaagaaattgcagtctggccaaacccatcaaggataaaactttggctataaaatttgtttaaactgttttttatgcaataaaataacaaactaaccacagatctgtcagtattttcaggactattctacaaaaaggaagtctcccttattgcaggggtactttatagttggtcattggtagttggtaccagtatcatccacaacatgtgcctagtcatctgaaaatcctgaaatagtggaaatatgtgcatcctgactcttttcaactcaaatcccagttttaaaagacctcaaactttgtctacataaagcatatcataaacaaaccccata

SEQ ID NO: 144085 - DNA, 441 bp, Homo Sapiens
  misc_feature (418)..(418): n is a, c, g, or t
ttttttgaagggtgatgaatgtagaagactttattgagcagcgagcagctctcagtggaaagggaggctggaaaggggatgggaaggtggtctgtccctggaacccagccgtctctggccaggcccctctctaaaaccacagtatctgaagttagctgcatctatctccaacctccgatgctcagttgcttctctgctcgctgttcagccacttctatcctcgacgctcagccatttgcgttgctttgccagctgaagtctttctagggatgggagagctggagcttgtcagccatcttgtgaccatgaggatgtggatgtgaagctgaaaggttaacatgctgaggaaggcagggaagaaacatggaacgaccccatatccatggggggcatcgcactgttgccatatcagccctgngatctccaggctccagatgtctt

SEQ ID NO: 144086 - DNA, 624 bp, Homo Sapiens
tttttttgcctttctcttcttccagtttctagaaaccaataaaagcacttttagagttaactctgtagctccagtattcagatttttcccggcgcaaagcccagtactgggaacaaaaacaccaaaccactgatacattaatattaaatacttgtggttttatgtgacaaattaaactgaagcaatcacaagactagaaagatttcgtgcaaaaccatatactctacacagaccaggaatctccaatcttggatgctgggagattgtgtcaggtgtggctggccactcaatgactatgtactaactaaaatgaccatgaagaatgtggtggttcgaaatattttctatgaatacgatcattggttaaaactcaactctgtgcattatagatttctgtaaatccacaagattattaatactaattaaaaccccagactgcacattacctcaagttgagggtttcaaagggcaagtggtatagaagaatacctataatgcaactaaataatctctgccctctgatttgcccaccctccaaaagaaacacaagctgaattcagccaagaactgccttatcatctatggaaacatttactcccaccattacaagatggacagccaacc

SEQ ID NO: 144087 - DNA, 1222 bp, Homo Sapiens
  misc_feature (623)..(623): n is a, c, g, or t
  misc_feature (647)..(647): n is a, c, g, or t
  misc_feature (716)..(716): n is a, c, g, or t
  misc_feature (730)..(730): n is a, c, g, or t
  misc_feature (750)..(750): n is a, c, g, or t
gcggccgctccaaaaagctctccaggtaggcctggctgcagtcactgaacatcctggggaaactggagccaatgctgcccgccatgatgcagcggccggcctcgaagcgttcctggcagcggcagccctggacgttctcatcatggtccatgcccaggttgtggcccatctcatgggccatggtacaggccacgcccacggggttcttgctgtggtcctggttcacagcccctgagctgtgggagcacatggcggacaccctggcaaaccccacggtagtcccggtgaagtcgacacccgtgatgagctgtacgttgtcatgcaggtgccgccgtgtccgttgccgtgcctgccaggtcaggaggttctccagtgtgacactggggtcggggctgacgtggaacctgtcctgactattccaaatctccaggcccaccaggaccacacggaagttgagtttctgatatagcttgtccacgtgattcaccacctccagcacccgatgacgcacggctgcttcgctccccagcatctggaactctgcattgtccacgaccacatacaagctcacgtagcgggtctctcgggatggcagagagtccccgggccgaggcctgaagacnggctgccgtccggggtcccagganggctgcccaggctgtcgtcgctgaccccggaggtccccggccgtctgcagcaggtgctcagcctggtancacggcgtgcggtnccgccctcgccaccttcatnccaggggctcgatcaggtgcaggtctgaaccccacctggaagaaacccctgaaggccggcacaggtgctgaggctggcggctgagtccgggtacccctctacgtggccatggtagaagcagtggtcctgcccgcgaggctgctccgtcacctcggagccattggcagccgtataggtctctgtgtagccggaacccagcaggtccctgttcttccgcaggtggagggtgaagttgtgccctgtggccccaaggacgtagctcaccctctctgggtgcaggcccaagtgggagggcagagctcggcggactcgggggcctggcagacgccgcggcaacacgacctcatactgctccatgagggcccagggccggctgggggcaatcgcaggcagcatcatcgcgcccagcagccagagcccgaggccgcgcatggccgggtcggggagcagaggcggaggtgacagccccgcg

SEQ ID NO: 144088 - DNA, 379 bp, Homo Sapiens
aacatagatttacactttattttaaatttgcatcctgagataataaaattttatctgacaagtgaacaatgacagaagcagcagtgaaagtttcggagaggcaggtatccttcattttggcacagctgtatatagattgagtttttccagggaagtcattcctggactcaagggagaaaaaatgaattcattccacaggctatgtaacaatgcaagatgcatgaaagttcttagtttggatgaacatatccgctattattcttttctggtaaagctgtcccaacaggaatcctctgacaaaaagttgaaatcctaggcttctccaccagatatttttatcaatgcccactctctagttacctggatatcctgttcttgc

SEQ ID NO: 144089 - DNA, 455 bp, Homo Sapiens
aaaatgtaaatccgatgttttctggttatctacgactgcataacaaatcatgccaaaatgcagtggctttaaacagcagtctttcattacttcttgcagttcctgtaggtcagaaattcgagaggagcagggctgggcggctgtggctcaggatctctcatgcgctcagtcctcatggagggctaggttggggtcagttgtgccaaactgggtaaaccactcaccctctctggtcttcagtttctcacttggtttttcagatgtaaatcccatctacatgtatttcacttggtatcttcggaagacacgggcagagctggttttgacagtgatgcaattgctggcaaatccgtttgcatccaacattgtcttgaatttgggtcacctcttacaaatctgggtctgtgcgcgccgcgatgcgccggggctctgcgctgtcctgcgctccgctctcg

SEQ ID NO: 144090 - DNA, 413 bp, Homo Sapiens
cctatgtcattgtatattattttatttaacaaacacccacacagcacttattatgtgccagaccctgtaagtgatttacaaatattaattgttgatttttcataacaatcctacacagcaggtgatatcatcttcattatcattatcttcatttgaacagatggagcaactgaggcacagagaggttaagttcttagcttaaggcccacagctaacaagcaacagatcccaggatttctggctgccgagtccacactcctaaccaccacgctgtactcctctaagagcaggtcatatgtaaggagggattgggggttaggaaatgtctagatgccaggttcctttagcatgtcacttctccattgtggagacattgcttttaacttctgccaacttctacctcttcagcctgg

SEQ ID NO: 144091 - DNA, 491 bp, Homo Sapiens
  misc_feature (461)..(461): n is a, c, g, or t
ttttctttttctgattttcattctttggagggatagaggacagagtgttcgttgatttttcgtttcggtttcagtttggttgtcattggtttttgttttttgctaattttgccccaccctataaaaagcagtgccacccagaggcaggggagggccctgaggagcacggggtcgccgtgcactcattcctacttccttctccacctgtcccagctgcttcctttggttaccatctccaaatctgagggtaaaggagggggtgagggagaagtttcttgttgcaccaagaggcactgcttccaggcctggagctctgaatgacctgtgtccccattctcaggtctgtgccagcacagccccctgggacggagggaaactggcaggatacaggcctttccacgtctggccttttgcagctgcaccccaggatgtagaagccttgagttgggctctgaaggctnaatttctaccctgacttctccagtgagggt

SEQ ID NO: 144092 - DNA, 374 bp, Homo Sapiens
tttttgcatttgtaatttaattttttataacaacttgagataaaatctacataccacacagttcaaacattcaaagtatacaattcagtggtttttagtatattcagagttgtgccaccattaccacaatcaactttacaacgtttacatcaccccaaaaaagaaaccccatactaattagcagtcacccctttgtcctccccaacccttcagcctaagcaaccactaatctgccttctctctatatatattcgcctgttctggacatttcatataaatgaaatcatataatatgtggcctttcatttctggcattcttcacttgatatgttttcaaggtttttccatgttgtggtgcatatcagtacttcatc

SEQ ID NO: 144093 - DNA, 1665 bp, Homo Sapiens
  misc_feature (293)..(356): n is a, c, g, or t
  misc_feature (913)..(913): n is a, c, g, or t
ttttgaacttgaatccaaatgatttatttcagttttggctcttaagccacttccattgggaagaagaaactcccaggagtgacctttgagagctgagggttctcggggtggggcagtgtgaggggctgggccagtgtgaggggcaaagtccaacgggcatcccactcctgcggcctgggctttcccagctgatggggtgggggacacccatttctttagtcccagcccccagggaacggagcagagggcagagggagtgggctgcacccaccaggaagcctgggagtgccctnnnnnnnnnnnnnnnnnnnnnnnnnnnnnnnnnnnnnnnnnnnnnnnnnnnnnnnnnnnnnnnntacgcgttgtgcccgggtacccttaatgtttgagctgatgggggagtacagttgtccttgacagtcagggaaaggggccaaagggggctctagactttcccagcctggaatgacagaaagtgctggaaggcggggttagtgggagacaggccttcaggaccagcctcgggcaggcagcttggcattctcccaggcctggtctatggactcagaggtgcctgggcccagatctgcccgggagggcagtggctgggcttggcctggcaggggctgaatggacgaggtcagctggggccggtgagaggctggggaccctcagggtgagagcagcagctggatgagcttctggaactcctcgcggtgctcatagatgtagacctcggtctcccagagggcgttgaccagcactgtgtcactgacctcatccagccatgatgtccgtccccagctgggggttcaatctgaagtactggatgccgaccatctcgcaccaggcccgtgcccggtccacagcccgcccgtctggatccggtgcaacagtccaccaccatcttgcnccagttccttggccccaaaaacagtcttggccagctcccaggggttgctgggacggaagacatccacacaggtcacaggcacttgtggggacctccctgtgccccagggagacaacgatggagagtttcttcaccttgttggcctgacccttgcggatcaggtcctgattgtactcatggatctcggtcatggcatccagcgtggggttgttggccagcagcccaccgtccaggaagcgcccattgggtcggaagtaagtaggagctgccccgctgcttcgggccgcccgccacaccagctggtctgagggctgagctggaggcctgaggttaacgttctggttgaaacgaggctcccggacagtttctggagcatcgtagttccggaagaggtggagttcagccggctgccggtcagacagtgtccctgtcagcatcaccttgggtttcctgacgtccgtcatcttggtgtgctccccaaactcccgcttcaggaactcctccaggggccccgactcgtagggcctggagccccggaacacctcatccttcatgcgaaagtacatgccgcgcatgtaggccatggacttactgtgcagaatggccagggccaggatgcctccagtgctggtgcccgccacccagtcaaacaggtccttggtggccacacccgaggccttctcgatggcgatgaggagctggatgatgatgaggcctttcactcctcctccatccaggcacagcaggtgtcg

SEQ ID NO: 144094 - DNA, 699 bp, Homo Sapiens
  misc_feature (91)..(91): n is a, c, g, or t
  misc_feature (103)..(104): n is a, c, g, or t
  misc_feature (108)..(111): n is a, c, g, or t
  misc_feature (113)..(117): n is a, c, g, or t
  misc_feature (119)..(119): n is a, c, g, or t
  misc_feature (123)..(124): n is a, c, g, or t
  misc_feature (129)..(198): n is a, c, g, or t
  misc_feature (200)..(200): n is a, c, g, or t
aacccggtttttgccccggtttgccctttccccttccgggggccccgggggccccaaagagatgggtgtaagaaagatttttttgagggtntatagttttttnnaaannnntnnnnntntttnnttttnnnnnnnnnnnnnnnnnnnnnnnnnnnnnnnnnnnnnnnnnnnnnnnnnnnnnnnnnnnnnnnnnnnnnncnggtaccagttttatttataattaaccacatacaaatcacttttctacaaaataatggttaacatctattccttaattcacagaaatatcacaaaaccaaaatccttcccacgatatattactatttagtctaagctttaattcaaaggttgagaatgacgaattcaagaatttctttcatacataaattgctttccttagttctgcagatgggtaatctgtttgagataagcactgtcatgtttcaaccttagagaacaaaaagctatcaacaagatagtggtaaagaaaatgctagccaaaaaataacactattgagaaataggtgcgtattaagtgcaatacttacaacatctctgatgtcaaatgaccaaaatttagccttagggcactaaagcacatttgcccttttgaagcacatactagtatggcacattttatttcactaaaagtgatgttaaacgtgaatgtcttgtagactatttaaagagccagtcaaa

SEQ ID NO: 144095 - DNA, 506 bp, Homo Sapiens
  misc_feature (56)..(89): n is a, c, g, or t
ggagacacggcctcactctcttgcccaggctggtcaacagagcaaaactccatctnnnnnnnnnnnnnnnnnnnnnnnnnnnnnnnnnntccagtttggagattcccagcagccaaagcaaaatgggaaacacagccatttatataatttatatgagagggcgaagaaacatacgcccaaacaatcttcctggacacacgaggctgagagaaacatctcctgcggggttcttgtccctgggtgaggagagggtctaatttctatgtctctggcttagtttatgtctcttggcttggtacgctgggaaaagaaacatcctctcctccgctgactcttctccttggcacagaggccgccgggccctgcccagccctcctaccccttgcctggaatgtgaacaaacctgctggagaaacaaaaacatgaccgagtgcttggccaaggccccgggctgggcaggagaggctggcaggccatgggcactcaccatgcatgtccatcatccc

SEQ ID NO: 144096 - DNA, 522 bp, Homo Sapiens
  misc_feature (233)..(241): n is a, c, g, or t
tttgcagtgaacgaaaatgtttattaagcaaggaagccataattattttagctctgaagtgcctccattgagttgatttcaggttcccttagttggagtcccattctctctgggcttctccaacaagactatggaggggaggcaggttgatcatcagggtcaagacctcggaattcttgtggctaagacaaaacaaccctctagatttactagattgaaaagcactttggcannnnnnnnnctttattctttatgttgaaaactttgagcagactcttggcaggccaccttcctgtggtagaacatggatatgcaaagctgggcggggcagacaagacatcagatccagctgtggctggctgctgtcacaccctagcatactacggatcacaggctgcctctacagcataacttccaagaaacaggctgtgcttaacaaacaattacaaacataacctatcaggaaacaaataagtctctacccactaaaccctaccccaagggactttacgcaccttgaag

SEQ ID NO: 144097 - DNA, 726 bp, Homo Sapiens
  misc_feature (1)..(1): n is a, c, g, or t
  misc_feature (224)..(232): n is a, c, g, or t
nttttttattaagtgtgaaagcaaaacaggtacatctatttaaatattttttacatatttatagatacaacaaagacaaataacttagcaaaaattacaagtttaaagaatagtactattttgaaacagccaatatagtatctgaaaatattccattttatccataatcagtgagtattatttccaaaaaaagtaacttgcattttcttgtgaaaaatatgggnnnnnnnnnagatgtctgccaagatttatcagaaaagtccatctttctaaacctaaaaaattgtaatgcctttattgagaactttttttacctaatggctttaaaaaccacgtgttttcctttggacttaggtgaattctaaatctttacttcactttcaaactacagggcatcgacataaacaaaaacaaatcagattgagagttttgggttgcttttcttcatactgagcgaagaaccttctccctggctgggtgaaagaccatggtgtactgtgatgtccaatctaccacacagggcttcaccaagccaaagcagccacactgaaagaaatctgccaggttctgcatgaatccaagattgtatggtgtcttcctgagggacaacgtctgtttcatatgcttgctctgcttctgcaggctgattctctatgggaggtcaggcccagaaaggcaatctgaaagagtttgatttaataataaaaaatgttgaccatgagaaat

SEQ ID NO: 144098 - DNA, 347 bp, Homo Sapiens
gttgacatgtaagaagtggttttattccaggtgtgtgtttcataaagacgaggtcctcaaggacagctagtggcacatgctttggtcaagaagaggaaaagcaaaaacagaacagggctgcgttgccacaaaggaccggctgataagtgcagagcctgatctgaccacagcaaaggacagagagaccctcttgaaggccctctggtcagcagtcctcttacattcaacaggcgcagcccctgctccccagccccaaaggtccatgcccgagtgtggcccaggccttctagtccatcctctggggagaggcctttgccctgggcccagttctgtcctaagctgtggca

SEQ ID NO: 144099 - DNA, 353 bp, Homo Sapiens
tttctgaaatcaagatttaatttagggatgacactcactgtctcatgtcaaatgggtcccaatcaaaggtgtctgggtcctgacccacctccccagctccccaagctccccagaaccaggtctggagactgcagggctgagggctgctggtcctgaatgctctgcgggagaggggacagtcctggtgcgaggcttccagaggggctgagagacgcccactccttcaaggcctgacttcacaggacccctctctgtgtccaggcagggcagttgggagacctggggaaggtggtatcaggggctaagggaagcaggcacagcagagacagcagacgaggcttggggtgtgcagg

SEQ ID NO: 144100 - DNA, 496 bp, Homo Sapiens
tttgatcatttaaaaattttgaattatatttattgaaacatgacatactgtgctcttatacctcaattacattttgttctgttttccaagttcatgtcttataaatctcttgtataaactgtaggttaaattcaaaatacaaaatcacagtgtaaaaaaaatccattctttgctgcggagaatggcatgagtaaatttaggaaggccagttaggagactaccgaagaatcctagggaggaggacatgatggcttgagctaaggttgtgttaacaattcacacacaggaaatgaaacacacatgtaaaatcagagaattgaaatctttaaatttcaaattagaattggatatatcagtgggaactcatgagtttttccctctctttaaaaacgtattattttacagctttattaaaaatgcctcaaaataaggaaggcctaaaagcaattgtccttcccagtgcccagaatgttccgtgttctggatttagtcaatt

SEQ ID NO: 144101 - DNA, 443 bp, Homo Sapiens
ttttaatgcctgtcaggtctgatgtagaacgcatgctatttaactcactgggtaagttttttctgtcataatttcagtgcaggtaagaaagttgcttgaggatgccgtggtttcttgctatcaattcacatccaggacttggaagtttcaacaaagggtctttagagttcacttttttggacgaatagctggatcataaggagttaacctagtttaagacttgaaagagaaaaatgttcctagcaaaaaaggcttacagctaaataatgagtgccaaggttgaggctgctctttcttgctttagtgctggagctgcattattcacaactgccaatcagctaatctgaaaagaatttgttctttactgcatttcttctttattgctcccatcccactggtctggtgtacattgcctccagctaggagggtttagaaatagttcc

SEQ ID NO: 144102 - DNA, 609 bp, Homo Sapiens
tttttgagattaatgcatttattccaagtaattaacacattaaaaataaagttaaacttgtccaagccaactcataaattctttaatctttttaacaaaatatacaaccccaaacatcgtactatggttgaaattaattgggaaaggaggaggtagaggaaaggatacatatgggtttgtggaacagggaatgagttcaatctcaagacaagtttcagagatcttctaccccttcacaacacaaatggctgctaaacaatttaatacaaagtgttattggatcacaatacaatgaacaaaggccatttcaaaaataaaagtgatctcaaaagcatatctgctcctggcaatgaaccatgaataagccttaccgatttgtcgtcttctaaaagtaagcctgccagatattcttccatgtttatttccaaacaggtttgtgggttagcaggacaatgcatctcaagaaaggcaacagagtaagggaagtacaggagttgacatgccaataaggggtgtaaacagtaaacaaaagagctactcacgctgcatttcaaacaatgttaaggcaggcccatccaaatggaagcctaagagatgaacaattcttcc

SEQ ID NO: 144103 - DNA, 437 bp, Homo Sapiens
tttagatttaatggcaagctttaattttttttaacatatccaactttttcgctataaacttatggggtacaggagcagttttgttgcatggacatacttcgtggtggcaaagtctgggctttcagtgcagccgttatgggaataatgtaatcacacccactgagcatctaccctcccctcaccctgtacccttccaagtttccagtgtctctcattccacacatctgtgtggacgtgtgagttagctcccgcttacgggtgagaatgtgcggtgtttgtctttctgtgtccgagttgtttcgcttaggatgatggcctctgtttgcatccatgttgctgcaaaggacagtttcattcttttttatggctggacagtattccattgtgtatatatgcaccacatcttcttatccaactgtctgttgatgggcacttag

SEQ ID NO: 144104 - DNA, 915 bp, Homo Sapiens
cgaacattttactatgacctcctgttccatctgagaatgcaccctctagccaacatggccaggcaacacctatcaacccctggagctcacaacaattccccaacaccccacttctactcctgcctatctgttctcaacgcgggcttttcgcatcctagctaacctgtcaaggagcttgacactaagaatcgtctggcaggatccccttttaccagttacaaagcttttcaggaccctctaactttctcaacggtaactttgcttacatatcggcgactctgggatggacctttcctgttgcccgtttctggtaatctgtcttgagcttacaatatagagcccgttgcagtaaaattgggctgttagggatcaatcttttaaagaataaatgctatatattaggaaaatctcaatattctagagctcatagttaacaagtacttcgagcgaagacatgctagttgttatgcaggggattctgtattccaaatggatactatccgacatatataaaagttgacagattcttaatctattgactcttatttagcaaatgcaacagacaagaatatccaacttgagtatttataaaaggtagactttttgccaaaagtgtataagctctaaagagcatatatgcaacctgttgcaagttaatatagtactatgtaatatatattattgtgtatttatgattagccatcattaatgccctatgtgcttggcctttaagagataatcacaaaatatttatattaatttatacatatttgttgcagaagtgcctgtgagagaaatcttcaaaagacaaagcctggtcaaataataataattttaatgtcaatgattttttttgtctgactcatctgagttatatttagttttcaagtggcaataaatttatctacattctta

SEQ ID NO: 144105 - DNA, 441 bp, Homo Sapiens
ttaaaaatacatacatttattcctcacaattctgttggctgggaagttcaagatccaggtgtcagcagatttggttcctggtgagggctctcttcctagttggtagacatctatcttcggcagccctgggcccctccttgctcttctccatgacactaggactcccttggtcttgaagctgggtgagattatcagggtttgtttctcaatgactttgaggtttgacagcagagcacactctttggcagatgagggggcttgaggcttagtcttattccgtgattaaaagcatttcttgtatgtttgtcctttcccagcctggagtggtgggaataaggccactatgttgacttagcggaaggaagggctgactcactgttcaccttccctgtacgttaccagctcgaggtctcaggatgcgttggaccctattttggtctc

SEQ ID NO: 144106 - DNA, 147 bp, Homo Sapiens
gcaccattcttatctatctattgctcatctgacatctttatatgttatttaaacagtacttatctggagaaatataacagaggtcaagaaagtacatacatacagatacctaaaactcaaaagtccatctcttgttctcccccaatc

SEQ ID NO: 144107 - DNA, 457 bp, Homo Sapiens
tttaataaagccacaaatatagaacttttaaacggatgtctcagactgtaagcgaaggacaaatttgtgagatttggggtctatgaactcttcagagagtatgatgaatggaattttcttcacattgactacgaggctgaagtccaagcacttaaggacgaacacaattccatcccgtaatccattagtcacagcctcatcactgacaagcctccactgtgtagagagccagcggtccttgtcatattgcagggtggggcccgcactgaggtaccgttctaggaaggccttgggggtcatgccgttggtgatgcagaaggccaggtgctgcaggatgctctccatgctgtggtagttctgctgccgggtgatgcgcaggtacttctggagagccctggccatggaggggaaaatggcctgagcggcctccctagggtccatcacctcccctggggct

SEQ ID NO: 144108 - DNA, 435 bp, Homo Sapiens
  misc_feature (72)..(81): n is a, c, g, or t
  misc_feature (88)..(88): n is a, c, g, or t
aattgggtttcacaagcaataatttctccacaaaaaaaccacaacttgaagtagaaagggggtttcttgggnnnnnnnnnnggcaagnatcccaacaattaaaggggtttttggggggaacacagttcgcctcagtactttttctttctggatttcatctctagaaatttgaagtgtttgagacagagtccaccctttgtgcaaggcgagaaccaatgaatggactccttgtgtgaattattgcatcttcttccaaagcaggttcatcaagactttcacagagattcatttttgttgagaagtaagggttaataggaggatagaatttggatccaaatctagtgataaaagtgtccaagcaatcaaaaagtaagatattttagggacataccaacatcttccctttctgctaatttcatgctccaaagatatggc

SEQ ID NO: 144109 - DNA, 529 bp, Homo Sapiens
ttttaatttctaagtcatgttctggtttttgcatgcaaaaacaaaacaaaaccatgattcaaaacactggtggctaggtctaaaggaaaagccagcgagaggcaggtgtctaaagggagcctctcagcatgcaggctctctacgatgagaagggagcatgtgtctctctagcacattactaagaccccctctggcccagcaagctgatccgtgagcccaggaggccacacccaagctgggagcctcactcatataaggaaagccaagcttttaacaggtatttctgctttaaatttgtggtctccaattgctcctgaggaaggatcaggtctgagcctgtcacaacactcaccagttgcccaacaccaagtacaacaaagttcacaggatggtgggaatgtgggctgcacaaaggaaagatgacctagagcaggaattagtgacatgagaacagagggtactttgccaagccaactgaacagagaaggagattcaaaaattgaaagggaaatgaccagaccccaaacca

SEQ ID NO: 144110 - DNA, 490 bp, Homo Sapiens
tttttgctggatgacctgcagttctttaatgagggacctagacccagcccagatttggaggaggagggagtctagcagctgtgggcagtggctgagcctggcatggcctggcctgagatgcctccaggtgaatggggcccctatgtagccttggccccagcccaggggtggggtgcccataccactctgccagaccccgggcccgcagggtgctggtggtatggtaggtctcatggctctggtttctgagggcctggggttgaagctgaaagtaggtgaggggtgtcctggggccctcccccttaacagggaaataggtattccagatcctccagcctccgcatctcctccggcccgatggacacgatcttttgccggggttccttgcgccgcacggtgatctggatggggtagttctcaggaaagctgctgaagtcagtggccagggttgcaaatttgtagggcttgcaccacttccccaccccagctg

SEQ ID NO: 144111 - DNA, 449 bp, Homo Sapiens
tttttttgacttcaacagcagacatttattttccctcagttctggaggcctcagatccaagatcagcatgctggcgcgatcggtttctgatgagggctctcttccttgcttatagacggcccccttctccctatgtgtgcacgtggccaacagtagggtggagctctctgctatctcttggtattagggctaatctcaaccacaggggccatgtccatctgacctcatctaacttaattacctcccaaaggccccagctccaaatatcctcatattgggggttagggcttcaacatacaaattttatggggacacattcagtccatacagatacaccctggccgacccacacatttgaacataatgacacatcgcaccaatgtctcatgtcatagaagagatgcagtgatgatggacagtcatagaaactctgattgctaaacaattta

SEQ ID NO: 144112 - DNA, 413 bp, Homo Sapiens
  misc_feature (116)..(217): n is a, c, g, or t
tctatttcttccagggcttcacctctaaaatttgtttaggtgtttcttttgtacatccatgggctcgtgcattcgctatcaggcactttttaccatgttgtggtttcccatcgacnnnnnnnnnnnnnnnnnnnnnnnnnnnnnnnnnnnnnnnnnnnnnnnnnnnnnnnnnnnnnnnnnnnnnnnnnnnnnnnnnnnnnnnnnnnnnnnnnnnnnntacagaaaaagagtgaatcccgttaaattagagcagcagtggaaatctgtgatcttcctgggaagattatgccacagaagacccctcaaagtatcaaacagagggtcttttgctcccctattttccagaattgctttcatcgagacatgttctcagtagtaacagtggtgatagcagacatagtcattgcatttct

SEQ ID NO: 144113 - DNA, 466 bp, Homo Sapiens
tgcattgggcgaaagaaactgctctgctaaacaaagaaacacaaaatgtaagaactagtgggcagaatcatcagcagagagccccctcactgtcacatcgcccttgtgaggcactcagaatagctacagcagtcacttacatgacaacaccaactttcaatgtattggttcacatattttaattacatcttggtccctaaagaagcctgcagccagcaaacagacccaggcacgaaaagtaaatgagtctcaaactgattagcccaataggaattggacaaccccttaaggggctctagatggtgaaggacacgctgtttgccctgccattctgcagcacaaaaatccaggcaggtcgaagagggcggacaccctcgcgtggccaccagcccggagccgcagcttcacacagcggcctccaaggcgtttcgcaggcagtccccacagtggttcttaaagcggccgc

SEQ ID NO: 144114 - DNA, 671 bp, Homo Sapiens
ttggtggggggggcattttattttaaagttttattatgaaaacacacagaatcaaatgtgttatccatgtatttgcaacagcagagaaacagtgacagtggaccatccccataggggacacttatcctttggctaaactaatataaataatggaaatgacacctaatacaataacacggcacataaaaaagattaaattaagagaagggacaggaactgcggagaggagtcctgagtatggaggagatgtgtctcatggagaagcatccgggctcaggtgaccttccctgaagacttcctgtctctgagcagctcagttcagttccaggtcatacacgtactcctggacccaggattcactgggatcagcacagacttgcttgcttcttttggtttggaataccacagctggctgggagcagaggctgctggtctcatagtaatctaccacaaagttgcgaggaagcttcctcgcggtgtaagaaaagcagcaggcggtgggagggtctgagcccattggtgctgagagcgctggagagcagaaggcagctactagcatgaggagagacaggacagtcacgcagagcttcatggtattggtggaaaagaggttttctcagaggtgaggctgcagaactcagaagcttcagaacctagctgtgtcctgtccc

SEQ ID NO: 144115 - DNA, 490 bp, Homo Sapiens
  misc_feature (87)..(87): n is a, c, g, or t
  misc_feature (96)..(96): n is a, c, g, or t
  misc_feature (102)..(102): n is a, c, g, or t
  misc_feature (104)..(104): n is a, c, g, or t
  misc_feature (108)..(109): n is a, c, g, or t
  misc_feature (111)..(111): n is a, c, g, or t
  misc_feature (113)..(113): n is a, c, g, or t
tttggtaatatatctgcaagaaactgaaaagtttctgattgctgtgcagtgtttgctaatcctgtaagtcagactttctttttttgnccccccttntttttncnccanncntngcccggtttgggttgcccctttggggttttaggaattaggtggctaggcattgaacaaagagctccgtggccttggccgtgagcaccaacgcctcctggttgatgctggacacctcgggggagctcttcatgatgacccggatgcgggatagaggcagcgagatgagccgttgctccccgcccttgtctttacccacgaccacgtccgccatcttcccgcccgtcgcgcgggtgcccgcagccggcgggcccgaccgcgaagtggctgccctgcccggccagctggtgggtacggggagccgcgcccgctgccccgtgggagttgtagtgtggggaggcgaggccgcgaggccgggagcggcccgtccggcggccgc

SEQ ID NO: 144116 - DNA, 1006 bp, Homo Sapiens
  misc_feature (931)..(965): n is a, c, g, or t
ttggccttgcctctgcagtttggagctgcaatggctgcccagtatcggctgttttcttggtgcctgagctgcagggtgggcctgtcgaggagggctgctgtctggtcgctttccctctggctgtctgtggcgtaggtacatgaggtgctcaatctcggcctggaaagaatacctcgaaagaataccacgcactggaactctgtgaagaagtgaagacgctaaaagcgggcagtgctgtgtttacttagagacagtggagtgggtccagggctgtcctcgccaggctggtttttaaagcacttttggtttaggagtcagcttcatcatggtcactttcattatcattgtcattctcctcatcttcttccctcttgttcctctttaagcattttcaggtatttactagctaaaatcttctttggtaatatatctgcaagaaactgaaaagtttctgattgctgtgcagtgtttgctaaatcactgtaagtcagtactttcttttcctttccactgccgtgtctgtaggaataggtggctaggcattgaacaaagagctccgtggccttggccgtgagcaccaacgcctcctggttgatgctggacacctcgggggagctcttcatgatgacccggatgcgggatagaggcagcgagatgagccgctgctccccgcccttgtctttacccacgaccacgtccgccatcttcccgcccgtcgcgcgggtgcccgcagccggcgggcccgaccgcgaagtggctgccctgcccggccagctggtgggtacggggagccgcgcccgctgccccgtgggagttgtagtgtggggaggcgaggccgcgaggccgggagcggcccgtccgggaaactacgagctccgtccccggccgtaatggccgaattcccgggcatatgtccggtaccgtcgactgnnnnnnnnnnnnnnnnnnnnnnnnnnnnnnnnnnncggccgcttcctcgctcaaatactcctgcgctcggttagta

SEQ ID NO: 144117 - DNA, 445 bp, Homo Sapiens
  misc_feature (330)..(340): n is a, c, g, or t
  misc_feature (362)..(362): n is a, c, g, or t
  misc_feature (375)..(383): n is a, c, g, or t
aggtactggagatggagagcatggagacggccgccgccggctcggcaggactggccgccgaggtccgaggcagcggcacggtggacttcgggcctgggcgggggatctctgcaatggaggcgagcgggggcgatccgggcccagaagccgaggatttcgagtgcagctctcactgctcagagctgtcctggcggcagaacgagcagcggcgccagggcctcttctgcgacattaccctgtgcttcggcggggctggaggccgcgagttccgggcccaccgctcggtactggctgccgccaccgagtacttcacgcccctggctccttcgnnnnnnnnnnncccccccaggggttttttttcnccggaaggttttnnnnnnnnnggggccccttttcggacgggtggagatgcgcaagtggagctccgagccggggccccgaaccc

SEQ ID NO: 144118 - DNA, 532 bp, Homo Sapiens
gaacaataatctttattagtgtatttttaaaggtacatataatcctgagctacagcatttatacatttgtcatttactctttgaagtgtacatgtattttgcttcaaattctgtgatgagtacgtttttatactaatcagtatcataaataatttaaaatattagtcttatctctggaatcaccaatcaatttactcagatgatctcactgtctaattctactacatttaaagactgtagaacatttgtgattaagcaatttctttttcaaaactgcaaagatgggcagtgcgagagctgattccataaatttcaatgaattcttagaaaattatgttgttctttatttctgatctattttcttgaataatttgggtaattatctgatcagttacctttgagaagaatagtaaaagtacctctaatctcaacattttagctactgtaaaatgtcataagcttccttcaaatataagtagtacataattacctcaataagaaaaatttaccatgatctaagggaaaggggcac

SEQ ID NO: 144119 - DNA, 1422 bp, Homo Sapiens
  misc_feature (46)..(46): n is a, c, g, or t
  misc_feature (337)..(337): n is a, c, g, or t
  misc_feature (568)..(568): n is a, c, g, or t
  misc_feature (616)..(616): n is a, c, g, or t
gagagacttgtgtgtatatagattgtaggtgttgcgatagagcgcncgaggcatctatggggagggtgggggtcgtactaggctctatgagagtcaatggtatgtaaacttagtggatgttgatcggggtaacacgaagcgcatgagtggggattttgtccacacggcgtacgcaataggatggtcgcgagctggtggggagtgtgggtactatcgttcaactgagtagactacgagtgcgagccttacccgagcggttccttgacaggggtctgctttttcggcgtgtgcagtctctgagggggcactcctgcgtggggtggggtttgtggagaangtggttagatgttgtcggtggctttctctggtgggcgtccccgccgccaaaataggcgctccctgtggggagggtcgactaaaagagggtgtgattatgagagggtggggcaggcgatcaaagtagcccacgtttgggtagttgtgataggatttcgcgaagaagagaccgtcgagatatgttccccacgacagccgagggggggaaagggttgaagaggcgggtgtcatnggcgcgagacggtgtggacgcatagtgcgtgggggacgagaacggggntggggaaaggagtggtgtttttatgagaatcggcttgggccgaatccgcaggtcacagggaggttcgcgcgcgaggccgccgggggcgcgaagggggtgatagtggtttggctgagcgcgaggagtggttaatgtccaatgggacttgagggtcgcagaggcccgggaggcgggggccgcgagaggacggggcctcgaaggaccccaggaaggggagggcctgcccgccggcctcatgcaagggaaggcggggcttaggggcagggctggggcccaggccggcggggcgctgctgcagcggcagcggccgcggcagctgcagtcaggcggctgcaccctcatgcacccgtttgtgcttggtgaggctggaggcctggccgaaggccttcccgcagagctgacagcgatagggacgctcgcccgaatgcacgtgcaggtgctggagcagcgctgagctctggccgaaggccttggagcagtgcgggcaggcgtagggccgctcgcccgtgtggatgcgcaggtggtgttgcaagttggagctctgcccgaaggctttgccgcagtgggggcagcggtaggggcgctcggccgtgtgtgtgcgctggtgctgcagcagcgccgagctctgcccgaaggccttgccgcactgcggacacgggtagggccgctcgcccgtgtgcgtgcgcaggtgtttgagcagcgcagagccctggccgaagcccttggcgcacaccgggcacttgtggggcccctcgtgctgaaaacgccacccaggcctcgctacctaggacgtatgttgagtgttg

SEQ ID NO: 144120 - DNA, 589 bp, Homo Sapiens
ttttaaaaaggtgtctttaatccatgaaggttagatttccttttgccacagaattccactgctttttgaaacaaccttccaccttcaatagtcaataataaggactaccacagaaggagaatggggtcccaatctgcaattggaatgggtttgaaatttccaattccatactttgaacagtatcccaatatggagtaggtggcagtattattggggccttcactaagtattgaattctagtaatacctggactgccaagtccccattctcatagggcttaaattccattgggagtaggtggggagccagcatcaatagtagcaatttgatatttgtacagccaattaccatcttcctggtaccttctcatacagtgttagatttaatactcaagccatacctataatatttctatgctcagccattgtcttgcacaaggatgagctcatcaatggcacagccagcctgatggccctggccacacactcccttctcagtccactgctggtgaggaaggaagacggagagtaaggtccaatgttctgtctgttctcatcaatgcctgtttctgggtcctaagtgcagctat

SEQ ID NO: 144121 - DNA, 640 bp, Homo Sapiens
  misc_feature (601)..(601): n is a, c, g, or t
tttgatgtgaaggggtgttgcttttattgcgggcctactgtgtgtgtgtcctgaactgtccccaggcatcctgccccccaggtaagcccaggcgtcctctcaggagatgctggtccttgcatgtgggcagcagggctcctggcatctggagtcctgggatgggcgggtcttcccggagctccgggaaccctaaaggggactctggtctcccaggtttcacaggagagacagacagaggaccaggggagcgagggaggccagcaggagcccccagtggcgatggaggctggaagccccagaggagtagccgtaatgggtcctgcaggagccacccagctggtccagcgggatgggctcctcctcgggagcctgtgtgaggttgctggcctgttccacagcctcgaagaccctcagcaggttgtcagccagtgcgcccttgacctccgcctccgtccagttcctcctgagcagctcagcgatcaggtctggatacttggagacgtcctccagcccctcaaggacccttggaacaccatcaaagtccccaccaaaacccacggctctggctcctgccacctccttgatgtgatccagatggtcngccacttgggacaggttggccttgttggtgcaggaaatg

SEQ ID NO: 144122 - DNA, 582 bp, Homo Sapiens
tttttcatgaatacatatatatttatttaattcataatatagcattttggatgggctggaatattgtaaagagggatgaggctgtgtaatccacagatgctcatatttctgtcactaggagagacactattggtccagagctcccaatacaaacaggcgtggggtaaagcatttgataaaaaatagtccaacaatagtctaataaatagtctagccaataacaacaatacagcatatgtctgaagctggcagactacaccataaaaggcagttttgtctgacctgatggcaatcagtttggccaacctgtaacacacagccaaatacagccattggctccaaggctgcagttggcttcaggagctagaaataagtgtaggagtggttcttacctacctgcctgacactctccattccttggaggaagcagtatcaaatatttgagtttattcaaaagtccatccgtggattgctccatcttggtagtcatatataaatatgtaaaccatggaagtttagaaaattcacctagagtgttttagccgaaaagaacagataagtgattttgctgcaatctgaatt

SEQ ID NO: 144123 - DNA, 429 bp, Homo Sapiens
  misc_feature (26)..(26): n is a, c, g, or t
gccactgtctgcccaggatttgtgantgaccccttttgcccccttggggttgactttccctccatttgggtaacggggcttttgacacggtccggcctatgcatcctgctctggctgggactggaaggaccagacctggtatttccctgggttcttggccttcgccttttcgacattcagtagggatgaccatgctgggccccagacatctgtgaggtttcctttgcagatccaatgagacatctgtggacagaagaatgctttggtgagacaggcctcagggtgaccccaagggggatccgaacctaaggattttggaagcttccagcctttggctccacgtttcctcaggagaggttcagtttgcctaggactgggcctcccttcccctgaataaagagtgagcaagagctcaggttgtgaactttg

SEQ ID NO: 144124 - DNA, 527 bp, Homo Sapiens
ttttaggtgatactgatgttttttaatgattacattgccagtaagctcttaacttataattgccggggacctgaggctccctcaaggtggtaacatatttataacgtgctttaatgctcttttcgtcctgaatccatgactgaatgtgtaatttccttgtccgaagactcatcttgcccacttaccatcctagagcataagggcaactctccctcaggaagaaaataagtctgcgtgccagtggtgccgatgaccagcacatttttcttcaaatcgatggaacattgatgtctccggagcatatctaggcctagaagcatatccatgggttgatcctcaagtatggagaaagagcactgtaagaaatcaccttcaatttgaatctgagctagatgaacacggccaataattctctgtgtgcccactcctttagcaaccccagcccaccgtcggtccaccagcctcatgatgttacatcgctcggcacaagcctggctcataatggtcatctgggcgcccgagtcaac

SEQ ID NO: 144125 - DNA, 682 bp, Homo Sapiens
aggactgactggtctctctttattggagtttaacagaaaacagactggaccatgactggcagctatatattggtcattttcaaatactccaatgacactcttcaataactttattatctccagttttatgatgccataccatgttttttcacactgtttaaaaatttccatttccataatccaatgccaaaaaaattactacacattctcttacacagtcaaaaatatatttactggaatgtttttagttatacctgagggcaacaacatttacaacatttagcttttgttacacctataaatgtggaaattgcttgcaaaacaactgtaatatgaaaggaactatatttctgcaaatattgacagaatggttatgcatctctttcagcatataatttggtactctacacaggcttcctgacccccagcatgacccgctccctaatgcaataatgcaagtccttatgccattaaaatattaatatgaaatattataatcagtgtttatatacacaaataatgaactggcaagtatctagtttcaaattagatccttgaaatatggaaaaatagaggctagttctctttgccttaaacataattattaaaagaacattttgttagaaagggagaagataattggacattctcaacgttccaatttgaagtgatacttgcctct

SEQ ID NO: 144126 - DNA, 524 bp, Homo Sapiens
ttttggctcttttaaacaaattttactctattaaaattggagacaaacatgtctgccatctctcactttggtagtagggagtaaggggtgccgtactcaaccagggttcctaatccacagtttgtggttctcaaattttgcactgatatgccgctaggacactgcagcaagctcacagaactgccaaagaatatttaaaaaatttcaaagtggcaacagtggcatctgtcagataccaggtgttgagttgtttggacctaactatgtattaacagaactactagttatttcttttagtttaggggcactgcaaagcattactgagatcccaaaggcatcctgaatgggaaatgtttggcaggctctctggggctcagtgcaccatcaccatgtccacaattggatggccacgcggaagcacacctgtgcacggacatctcttctacacacccgcaccttggtcttatctttggccagctcctttggacttggcagttgctgatttgcttcttttaaaaatgtgt

SEQ ID NO: 144127 - DNA, 869 bp, Homo Sapiens
cagtcgacggtaccggacatatgcccgggaattcggccattacggccgggaatgcagccagcgttctgggcagcagaacatattcattcttactgtaaattctatttgctgcttccaaaggtgatgattttcaagcagacatgttctatatggtctgtgttttaggatctggtgcccagcctctatcagagcttgcctacctggcaaagctgcctacccttcaagtgggaaaatataatccactgtttaacaaggctcaccctctccaccctgtcctaacgaccttttgtgaatgtgctgtgatattttcttgctcaatagcaaggtggtagctctgctttcattttaagaaagtggaggctgagggcattgtatcaatactgttgcaactccaagaagttttccttgtaaaattaaaggaaagatcttgttattgattaaccattttcttatgccttgctattgacatattcatgctctttctacgtctagtggctgaaaatgtttgcatttgttcatttgactaatggtgtgatttttgtttctatattattagacctgtaatgttttaaaatgtattttattaaatttggactggatgtatgtctctagcaatacgaggtactttctaaactatttaagggcaggggttgtatcctcatgttgagataagatgatggtcgtttaacttttgcaattttttttgggcctgcagggataatttgtgtttatgtgtcccaaacaaggcaataatttgccattcttgtgccaaaagtttgttttccctgtccatgtctatcaagtatgcagtacactggtaatggcaacttacatggttgcttttaaaaacaggttcctcagtattgaaa

SEQ ID NO: 144128 - DNA, 589 bp, Homo Sapiens
tttttaggtgaatcgttcttgttgagcaatgaactgttgagaaatgagataaggcagaggcacacttatggatgccagtcaacaggttagcttttgatggccatggtccaaaggagtgggtggtcagtttccacagtcacaacaccagacccgtcgtaggtattggaagtactgaccaatgttccaaaagcaagcacatcatttgtgaggttccacttgaggcctgtggttgtaacctgcatacaaggctgtccaacaggaataaggccacaccaatcaccctccattccagtgtctacatgcaacctgtgctttcctggttggagcaggtagatcagcgattcctcttggattattataattggaaaaggagtgatgtgagtcgcttggaacaaggtattcacagatgccataatctggtcaaaacgcccagcaaggcctcccagtgtcacgatcacatcaacctttaagtctttttcttctatcttcttttggagcattttaaggcacttagtaaagtcagtgtggtcttgatcaggagttgaaatgagctcacatccctttttctcttccctccttcctgagaaag

SEQ ID NO: 144129 - DNA, 481 bp, Homo Sapiens
tttattcctcaaagatttaatacgatgtactatgtgccacggactctactgggcactggactcacacacgaatatgtcccatcactttcacatgtgcacatacccacttcacagtcacccaggaaggcatcagctcagccacccacgcaaggtcatacagacaccgaagggtgaagagagtgggttaagaggctgttgtgattatttaaatgcatgtaaaacagaacaggcctgcagtggccacccaataaatgtccgccgccgctgttgctgtggttgtggttataactggctctgacacacctgcttcccaccacccctggcgctcgcctggttggtgggtggtcaggctgcaagcatggctctgggagctgtaccctccttctcaccctggttcctggcagaagccagcctagtgctcaagacggagcgccttcctgcctcaccctatttgaatcactcctcagttcatgacctcagt

SEQ ID NO: 144130 - DNA, 716 bp, Homo Sapiens
  misc_feature (625)..(652): n is a, c, g, or t
cgtttccgccaaagctgtgaacacaggcgaatgcagtgctggtccccggcctggcgcaggaaggagcgcaaggccggctttgcaaggaagccctcgcgcccaggcctttctatggttgcgttcccccaagtctcctgcctttcggaacctcgccctttggcaccccagacccccaacctcgcagctggggaagatgcggattttagaaagctgtttcagaaaaataaaagtcccacttcgactttattagattaaagcaaaattaaaccttgactattcacacgtatgttacagaggaagaggaggcgtccggaagaagctcccttggcgtttcgtggagtcacagagcacgacggcattgacaagcatcagaacatcaagcagccttagatttcacgatcactccgaatagaacatagaaatacggaaacacagccagtttccactgggaagagttcttcgtgtacaaatgatatatatttatatttgtgaaaccagtcaccactaaggtgagtcctttctctgctaacaagcagccgaggatactaagtatcttcagctaattaatttgagcagtgttttaagaagagcaacacttgccaaattaaaactaccttccccatcnnnnnnnnnnnnnnnnnnnnnnnnnnnntttacccctttccagactgaaaaaagaaggttgggggtgtgtaatatatcagattccgtaggca

SEQ ID NO: 144131 - DNA, 303 bp, Homo Sapiens
  misc_feature (116)..(116): n is a, c, g, or t
tgatgttttccggaaaggtggacagctgtatttcagtcccgcccacctttagccagctattattccctgctcatttgccaggaacctagctgcatataggctgtcctgctgggggnaacagttttactggaaaaaaagtgcccgtcacattttttactggaaaagttgaaagggtgggaggcaaaactggctggtttcaggttcccatccatgcactcaaggcaagctgggctcacaaaagcaccgctccctcaaacccagggcaggttttagaccaacaacagccgagtttggttaaaaacg

SEQ ID NO: 144132 - DNA, 469 bp, Homo Sapiens
tttaagagacagggtctcgctctgttgcccaggcttgagtgtactggccttttttcaatttaactttgatactaatgacatctcctctctatccagaatgaaaaagaagtttgttctttcctgcttctgaactctccattagggcagttgcagggacaaggagttagaaaggcacctaactccctaccagaaagcctaagccatccgctatttggtatacttttttgtttaattataaatgactacgaattactcagtaagaaacctcaggctaaaattcttctgcttaaatataattacttctctgcagtttcttccagtgacagatacaaagctacagtccaagatggctccacacaccatgacacagcatattcaggaagctaatctgcccctccctaccaccatcgaaaataacatataaagaatcacagaactcctccaggttgggttatacaaatgatgccta

SEQ ID NO: 144133 - DNA, 482 bp, Homo Sapiens
ttgaattttttttctatatttcatacttgaataaactggctcagaaggtaaatgtcttcttttttataaaacccagttgaggatggaaatggcctcttttactattagtttttaaaatgtcatcattcatctgattaatatgaaaacatgcccttattactgaacattgtgatatatccttgaagaagcagctacttggagatattccatactcaaccagagcctaaagtgtacattatgcttattgagtgacttaccaaagcacacgcttacagacatttatatttgtttgaaaataaccacgaaagcagtcttgttttcttcaacttcagtacttcagtatgtgtataccaagggaatgggaaaggagagacacctttcctcacactccctgcttccttcacagtcatacaagatttgatcagaaggtaagaatttccttgtctgtcagatacagtgtctgacatagagtcagacagttg

SEQ ID NO: 144134 - DNA, 471 bp, Homo Sapiens
  misc_feature (249)..(287): n is a, c, g, or t
aatgaatgaatggattaggtaaccaaaatatcaagtttcttttttctgtctaaaattgtatcaactctgtgcagtaacattgttttcatcatgttgttggcagttaaaaattccttgactaacaattcagaagcaaacgaatgcacaagatgatagggattgtgtgatttaacaggttttggagcaacactgatctggattcaaatcctaactttaagaactgtatccttgggcaaattacattactannnnnnnnnnnnnnnnnnnnnnnnnnnnnnnnnnnnnnnaagtgccaggggtttatttccctcacatgtgggatggctcacatacacaacacacaaaggcgttggcaccgtgggagagggcagcacccctggcttctgcttggccttacagtgtaagaaggagagaggatgggttctctctcctcccctcactagggcctaggggacccaggagcaaattcca

SEQ ID NO: 144135 - DNA, 451 bp, Homo Sapiens
tttccatttatcatggagacattttattgcagaaatgctttttaaacattaattatgctgcacacaatacgacccagataaaatatgggcatattatgacttgtctgtggctttggggtatgctgtttaatctttgacaagggcttaagggaagaaggtgggctggaccttttgttttgaattttcattgctggggcattctgcatctgcctttcaaaggtggctacaaaaaggcttgggttcttattactcacccttaattagccttgtcctcctcccacacttccatgtctgctagaggattcaaaggccctcagattgttgggaggctgtgagattgacatggggacccattgtttaatgaccctctgcttatgccaggacagtcatcctctgtctcctttagtgttgacatcatgtgttctgattggtgcctataacttaccaagtt

SEQ ID NO: 144136 - DNA, 530 bp, Homo Sapiens
tgatgtgtttttataaattgtagactgtgaatttttgtgctgtttgaaatctaagagagagttgcctttctttgtattcttggagcaaagtagaaagtgaacccatgactagaaagataatatcaagtaggatattgtaaacacacctcagggagataacatggggtggaggcagacaaacaggccaatccgggggaggaatggagttaaggaaagctctacaatgaggcagattttttaatacccactccttccaagtccttcagctcaagctgcagccaaatatttgcataaagagctggtaaaggattccagcttcctggttcatgacattacagcatggatcgttttcaaaattaatactgcctcctgtttcagcagtggctgcctgcacagctctccctgtggctcagagtatgggagtgagtatgccctgtaacccaaaagaggtgtggtgagctcggcttcccagcacagaatcacagagcaatacgggtacctttaaactttaaagccacacctgaaattta

SEQ ID NO: 144137 - DNA, 820 bp, Homo Sapiens
  misc_feature (41)..(51): n is a, c, g, or t
  misc_feature (53)..(65): n is a, c, g, or t
ttagaaaggttttgggagggccgagggcggccgccaatttnnnnnnnnnnntnnnnnnnnnnnnntctacatccagggaccacataaagcttttatatatcttatgctaattaatctaagttgtaacataaatagtacagtagcgaactctgacaagatatcagtttggctctgcctttaattttctcaaagaatcagaaataaaaaaacactttcaaccatattacagaattcagaagggcttctttgaagtagttttctctgactttggaagaaatctgtgcatatctgtttggcgccttcttttccagattcctctgtattggcaaagatggagacggttgttctacccttaaaacctctttctgcttttttattgagctgccatctccttagctccagcagtatctcgtatagactaaatgtcagagagcacagatctgctatccgttgggttcctcattggataagattgagtataattgttcacacaatgtattaattgtggactaatagaggcgcaataattttccactgcttttatctgagatggaccaggagaagagtctgttcgaaaaatggcttgacagtattctcggcagtttgtgtgatgacctgcataactgcaacaaaccgagcccatttcatttctgctaatgcaactgaaaagagcattctttcctgtcttgtccttcatcaacacatactggcagacttcctagggcaatgcagaaatccagacaagagaaggaagcacactaaaataacggaggacaggctcatattcttttctgcaaactttggaaatatcattctttga

SEQ ID NO: 144138 - DNA, 157 bp, Homo Sapiens
cagcttttgaagcatctgcctctctttttaaggtggatgccgatactttctttgactctaaagtctttttcttcacctctttggtctgggcttttttctttcctggaacacatattttcacactttttccttttatcagaagaggtgtgtggtcaat

SEQ ID NO: 144139 - DNA, 429 bp, Homo Sapiens
ttttttgatgatagtttttctgaaaattttaatgatgatacagaatgcaacctgataccaatagagtagaactgagtttccaactcaggtaattcctactccagagtcttcatgtaaatcgaaaatattaattgttcaccaccttggactgttttgaaacaatggcttttaaagggctgttaaagaacattttggaggaagtttttttagtgaagactgatttccaaaatgcgttaagggccactccaggcctacgtcctggtgcagtaggcttccggcagagggcgcacatctggactctgcatctcctccaggtgcttcctccaaactaagtgctggtgtgaacacgggtcccaatatgccccactcaaaggccctcccaggcttgtgggaacagaaagatttcttgaaatggaaaggagggttgtg

SEQ ID NO: 144140 - DNA, 437 bp, Homo Sapiens
tttttttaaaggtgcgagagattttaattaacacaaatggctgtgcctagtctttaaatctgtccaaagcaaatggagcgaaagcctgctaattcttcagtgcttcatctggcaatgacctcagaaaaaagagtctccctcctgtattatcaagctgacttcctttagttccttgttgttctgtgtagatctttgttcccagaattctcacatggtgttcatttctgccagtagtcactctgtccatagttgtaatgcccatagtacatccaacgttcaggtttttctcagaagagctcaaggaaatgctttgtcagatgtctgtctccttggccttctgctttgaagtagcagagtctattccagcaagattaataagattaaacaattctaattccttgggacccaggaagatttaaaaatgcttgcattggctc

SEQ ID NO: 144141 - DNA, 1000 bp, Homo Sapiens
  misc_feature (189)..(205): n is a, c, g, or t
  misc_feature (222)..(259): n is a, c, g, or t
  misc_feature (400)..(414): n is a, c, g, or t
ctggaccggtccggaattcccgggatatcgtcgacccacgcgtccgcacgtgggaaattgttacagggcaaccacgcacgcacgtgcacgcacacacacacttctgataaatctaagtgtccccaacttcaggggacaatagtttagttaggcagacaaaatatgtatagaaaaaaccctatatgcatnnnnnnnnnnnnnnnnnatatatatatatgcatnnnnnnnnnnnnnnnnnnnnnnnnnnnnnnnnnnnnnncgcgcgcgtgtatattatctgttaacccagagtagtatcatcagtcttactatggtaaagtttcatgaataaaaatcattaaaagattttacttttcttaaagattctctcacaaattctttggagacattcaagcacagnnnnnnnnnnnnnnnctgactcaaatcacaaaaccacttaagagtccctgtgctttcatccttcccgcgctgggacacagctgctcctgggaagccccccagttgtctgcacagccgcatggggcctgttgaccagaaacattccttttgtacaaaactttagtacttgagaaataccagttaggtaaacaaacaaaaactatttaatgagggtgtttagctcttcacacactttaattaatggaaaacaaaatggaagtgtgtgaggctcacacaggaggatgaaactggaaaaaggaagcttggaatcttaggctccagctctgggcctcgtccctaggaaacagcccaggagctctctagctcaccctcgtatgctaaacacctgaggacgaagctcgaattcttctttacagatggggcatggttgcacggagtccccttgcaggagagagcgctgtttcaccttctcccattcatctgatgacagtggaggtggtggaggcccaatgaggcccaacttctgtgccaaagtcaacggcggcggtttgggatcaagaacatattctttttctgagtcttctagtttggggcactgtgt

SEQ ID NO: 144142 - DNA, 422 bp, Homo Sapiens
tgccttatggtacaaaggctttttccccacaattcagttatcttaaacttaaggtatgagattgatgtataacaattttctgatgcaagctatattatgcattttagaaataatttatacctacattcaactgctgatcatatgggaaaaatttataaaagtacattctatttgaactacttgtctaatatatcagaatattgtttatctgggaagtatccaaacaacagaggtgttctaagagcactttaaaaaaaggtcgttcgaaaacatcactttattcttataatcgaacatgatttgctctaaatcataatgtgaggtaatgaggtgatatgctgggctgtgagtgtctgttgggattgtcacagaggcacagtccccagcttggagatgtggtggtacaaatggtattggataat

SEQ ID NO: 144143 - DNA, 508 bp, Homo Sapiens
ttagaatttatttttactttattaacaatgtggcttacaatttttttgaagtaaaaagggtttttttcatttagaataaaaattaaaatataactctgatatagattttcatttatttacatgaaaacatatatacagaatacaatcttacagcaaaccaaaagcatgcccttcgtcctgcaaatttcaaaagtaatgacaccaatttttcccttttacgcaccaaaaacatacacaagataggaatccaatttcaatacaaactattcaaactagaatgcaaaacagtgaaagagctttcaacaatcacgacgagggatagttgatgcttccagagatcatgctggctcctgtttcaagcaagtgagatgattatctttttctgtcatttaaaaaaatttgcctcaaatttttcatcctaaggtgatttttagccaacgattgtcctagaattttccttttttcgtcagcacatcgcttcagccacacaaaaagcactgctctgcgt

SEQ ID NO: 144144 - DNA, 536 bp, Homo Sapiens
ttggaattaacaatgccagttttgtttgtttttttacaaagttaccgagatgacaatatccataattagctgactcttacgtacacactgtgacctgatcatcctgaaaaactttatgggggagaaaggtcagcagcttctctttctttttcttgaaaataataaaactgcgtattctactttatatttaaatgtaaggaagaaaatatacaagcccatatttatattgtatttctattaagagcaacaatagttcatatgttcatgtttgctactatcacaattcaacatatgaacacagatcagctctataccatgaatactgctggaagtgatggtttaggattaccaactcactgctgccatgaccaaaacaagcaaatgcatcctggaaataaacctccaaacacatatctttcagtacgtgatgatgcaactgcattaggtaagtacatactgtacacaaattttatcagcagtttacctacccaagatgtaagattcttcatttaaatacaaagcagagagccaataag

SEQ ID NO: 144145 - DNA, 466 bp, Homo Sapiens
ttttttacataacttaaattttattttgaaatcatagcctttacagtagaatctgctatagagcctatcataagggatacattttttaatcattgcctcttctactttaaaccatggaaaaagaacctaatgaatgatgctgtgcccttctagaagagtgaaggcctcctggcaatgttctctttaacccataatgtgggttaagaggaatgaatcaatgttctgtttcttactgactatcaggcaacatatgtaccaccaaagtttcttacctccattgggtctttgtcttttatctcttaaactataaggtcatccatatataaggctggctgaaaaatccttcacacataaaagtgtgccccataagtgcacacaacagactcccttttcacgtctattgttcacagaagcataaccaagggaaaatattcaaagataagagtctcgtgagtgtagagaagtt

SEQ ID NO: 144146 - DNA, 1036 bp, Homo Sapiens
gagaaaccggtcttctagtgtgtgggccgcgacccgcaaaacggaggttaaaattgggtcggacgccacaggccttgtccatccacgaaggccttcccacattttcgtaataacggcccccattttacgtgtcatcagaagcagtcgctgacatccttatggcagtttcttctcggttttcttatcgttaccgttggtgaatgtgctgtggacactgcttgtcctgtggcctcctggtgtactacttttgcctttagttactgtgaaagaagcagaccatctagaaagcatttgagactggatgccattggcatctactgaggaatagttttctcgaccaggtaggctatagactcgtacaaggtccccctgagttgctgattactcccctgtggacagcagccccacatatgctcgatacagaagcatatactatgttcccatacacagagaattcctcaagagggcagccccttgggcagaggacatctgctttctctttcctgatgtccaagcctctggtaaaacatgtgatagcaatgggagcggctccctcgctgcccgcgggccccggcagcagcagcagacacacaccgaggccgagagccgggatccaggctgcggacatggtgactgataggctgctcacacctgggagagagggagaatgcgggcaaggccagggtgcgggaggccccgcgcgtcacctcctcagagccccgcacccttcggatccccgggcgcggcgcagaggagagaggacacagacgacccgctgctccaggccagcgcccctctaggtctgggaggcgcctcggcggcaaatcgagcgaagcccaggatcggtgtgcaaccccgcaccgcggggaggcgggggcgccaaaacgacgacagacaggctgggagcgacaaagaaacagggacagaggcgtcagggatccctcgcacccgcgcccgccgcccggggctccgcacctgctcgagatccacccggccctcgtgccgaatttaaaccgaggcctcgtacctagcctaa

SEQ ID NO: 144147 - DNA, 476 bp, Homo Sapiens
tttttttggtaaggaatgactttattcacaggaacactgcagtaagggaggaggtgttgtaattgggagaatactccagccataagatctgcaagcatagcaaaggtcaggcataaaggaattttcttttatagggaagagtaaacaggcaagaaagaactagattcaggggagtgggatgagactgttttggatctgttgaccctgatatgtctgtcaaaatgtctgtgagtctagctgatgttcatgacgtctgaaagaaggccacattttggtctctgaagccccttcctaagattgggagcaaagtacctgacttagtgtttgggtccaggaggatggtggggggctccctgggcatgcctctgttctactgtggaagaggagatgccatgggaaagtaacagcacctagggtcctgttcaacatggacattaaggaaaggtctgcctgaaccccttctgcagtagctggct

SEQ ID NO: 144148 - DNA, 371 bp, Homo Sapiens
aaatatttaagccatacttttataggcagtttaatttctgttatgctgttctcttctaaaataaatctaacatgacttggcttccatttcatttcagagtcatggaaattcaagaattcagttctgtggcagaaatgctttggctatgccggtgttttattcttctatgagtactgcaattgtcattttcaaatctaatttccctgacagctacagtaagtttgaggcatcgtcaacatcctctaaagacaagtgttgccttgaaaaagtgctcccttgttgcaggaagtgtggtctgtcctttttccaccacaactccagagctctcatttggacacagaagtgactttgctgtttgcccattctccacc

SEQ ID NO: 144149 - DNA, 138 bp, Homo Sapiens
atttggagaacaatctgtgggatagtacgcacatcagggagcccagagagtgaactccagggctgtgggtaatctttcccagtgaaaatcagccatctcttctacaccatgtaccctgcctgctgcattctttactct

SEQ ID NO: 144150 - DNA, 521 bp, Homo Sapiens
ttttttttaataaatgataaaaatactttatttctttaacacagaatatacaatattgcactccagttgcaaatagtgtatagaaaaagctctgtttagaaactgccatagcaattgtctaagtctactaatgttttctggcatcaccaatgataaccacagtgctgaactttgaaccaactgaaaaaggggaatgttcaataaagcctcctttttcttccagtttcagtgcccagtagtttaaaacattctattatgtttaattacattttgaaaaattgtcgttctttcatgaacaaataaaagtaccttgcagccgtcactattgcccattcttgtgggaagcaatcgcaagcttttcatcccgactgaactaaacagtctgatttttctcaaagtcactcagcaaattgcggtaattcaggtttaggcaagaagttctttagttgtactttttatatatatttttagagacagggtcttgctctgtcactcaggctggagtgcagtggtgcaatcat

SEQ ID NO: 144151 - DNA, 896 bp, Homo Sapiens
  misc_feature (95)..(105): n is a, c, g, or t
  misc_feature (161)..(161): n is a, c, g, or t
  misc_feature (163)..(165): n is a, c, g, or t
  misc_feature (176)..(176): n is a, c, g, or t
  misc_feature (178)..(178): n is a, c, g, or t
  misc_feature (182)..(182): n is a, c, g, or t
  misc_feature (186)..(189): n is a, c, g, or t
  misc_feature (810)..(844): n is a, c, g, or t
attgggggaggaaacccaaaccccttagtcaatggccccaggatctccctaggaaaacaggctatgggcccatgtccactttacctaacgggggnnnnnnnnnnnaaacggaaatggtcttagaaaagtttctcgaagggccgagggcggcccgacagggntnnntttttcttttntnttgngctnnnntagaaagttgaatattttattatttacacatataaagtgagaatgaaaattgggcatggggcaagggcaggaagatgactccagctcagtcggtgatgatgagctcgtccaccccccagtcttcatagctcccatctggcaggtaacggcgaatgatgatggggatctttcgggccttgagttccttcatggcaatgagcagaggatctgtctccccctccagctccaccatcacaggggcacacatcgcaatctggagcgctcgggtgcccagcacgcgggctcgctcgtacttggtcatgtatggtgtggtgattcgcttctggttggcctgcggtcgctccccagaggggaggatctcgacattctcctggccttcctcttcggcattctccaagtcatctagcccttcatcctcctccacatcatcaaagtcgtcgccatcaaaattgtcctcgttgtctgacatgacaccctcgcctcagcgaccccgctgcgccccggtcccgcgcggagacccgcaaacagcgacactacgactcgcgcggctcctagcttatcttgcgcctccccggccgtaatggccgaattcccgggcatatgtccggtaccgtcgactgnnnnnnnnnnnnnnnnnnnnnnnnnnnnnnnnnnncggccgcttcctcgcataaaacactcgctgcgctcggtgcggctctcccgga

SEQ ID NO: 144152 - DNA, 548 bp, Homo Sapiens
ttttgtatggaggcatggccactgcttttatttatgacttttcttttgtaaatatattaatacaatgggaaattttttttcctttaattctaacacttgggccctcagtgcttggctgaaggacaggcttaatacctcaatgtccacttccttgcctcggcagagggatgttttaacgcagatgaaattttaaaaggccagctcactgattgctttaaaaatgtgtggaaacgtgtgtattattgacctggtaaattttccttcaaattgaatgcatacaccaccaccgacaacaacaacaagcagctctacatttagaacttagtttcttgaaaacagaccatctcagacttccggctttatcaacacatggcatgagagaaatccgatcaaaagaagaataacaaaataaaagacccaacacctagcacagtgaatgaatccggcctaggagccagacaacttgaattctactacggtatctgtcacaagacagccacgtggctttgggtaagatatcccaccaaactggaatacagattctatgt

SEQ ID NO: 144153 - DNA, 464 bp, Homo Sapiens
aacttgctttatagaggtggtagctatcagcaggtgtgtttttctaccaaattaaataaaagcctatttcaacaaaacagtatgaatattccaagtactgttattataaaatttgaatagatctcttaacatttcctaatcatgccctctgtgttcattgggatatgccattttccagtaacataccacacaacttgaaggtactcaatgcatatttgatcaatttagagcaataataaattacataataatatttttatattgaatagccaaacaatctgaactttctttatacaatatttcctaaatgcatatgttggcatttcaatcatattcgaacactccgtctcgccaagtacaagatacaatgacaagagttgacagaaaataaagtaatatcttggtatactttttaattttagtatttgtaacactcaccatcaactgtcactagttccaatgca

SEQ ID NO: 144154 - DNA, 521 bp, Homo Sapiens
  misc_feature (243)..(251): n is a, c, g, or t
agttttatggaatataaatagcctttttttaactgatattttaaaagaaatatataaaaggtatctgcttgccattccacagcctgctggcctgcagccacacactcatcacctggactgatagattctcttaagcggtctaatgcctgggtccaaaagtagattttctcctttcccaattccagactgcttaccaggttctagattcccaggtctcctgggtctggcctacttgagtggtcnnnnnnnnnaacctgcggtcatagatttctaccagcattcctagtatttttgccttgttatttaatctgctgttgcccgctgtctgagcacaaacatctaaaaaccaccctgttctttccaagggtgttggaagacagatttctgatgcacttagtgataaattgggaacaagactcaagacatcttccccctccctctttgcagctgtagagctagaatgaaaatgtctaatggctaattcactcaatcacataaatgtctcatctacaaataaaagc

SEQ ID NO: 144155 - DNA, 562 bp, Homo Sapiens
tagaatgagaatttatttttcatgatacaccgataatgcaagggacaatgatcaggaagtactgcacttagtctttctttctcatacctaaaatgtttttcattttatgctttttttagaatagaggtgtacttacttcccctctcttcctcacatagacttgaagactcggcgactttaggatgcaactccaggttgacacattttcattagtttagaaaacccacgtgtcccactctcagaatcattattatagtagaggagatattcagggcaaggattccttgggaaacaacatccagattcaagggaagacatctgagtcacgacaacttaaaatccatcctggcctgccacaaagtgtttctgtaacattaagtacctcatatgcaattcttgaaaaggaaaattatgtcaatataacgtgaaatttgtgaaactcaaacatgatcatctaggcaaggagagctgaaatagaagaaataaaattatagcctctaatatgaaaggaaatacttttagtgtggttgctgctaagcagtagtttttttcaactatattt

SEQ ID NO: 144156 - DNA, 557 bp, Homo Sapiens
tacttaaaaattacatttattcattgaattcctttacgaggacatgatcaattgtttgatgtacaaaaagtatctatgacactagtattaaattaaaattaattttaaattttaccacaataaatgtatacatagtataaggaaaactacagatgctttcagaccaccagtctagaacatattctgcaaagtggctaattcacattatatttttcttttaatactgagttccataaaaatgcaagttcttccattgtttgagttctgaagtcagtattcattcttgcaaccaatgaacagtgttttgagaaaacagttttctttgtaaatattccaccaattcacgtcttgattttagcatcccaatctcatgataggggatctgaacaacttgataaccgagtaactgtaggtgtctttgtttaatagcttctttccccagtaagtgtttgctattggagcaaaacctttttggaccatcaatacacagtgctatccttttatggatatcttcattagctgtggatggcaatacaaatccttcttcatctaattta

SEQ ID NO: 144157 - DNA, 551 bp, Homo Sapiens
ttttgtggaagaaatacatttattttcttttaaccaaaatagatgagaatgagtctctatcctgctacctggtttgttgttattatggtttgttcccctctccagaatcacgaaaaggtcctggggtctcacacagtgcaaaacattgaggtgagccctctaagccttggtctgcacaggttctgctcatacatgctcttaagcttgcaaattcagaagtgttggtctgtgtgccccaggtacaagagaccttcccagggagccttggtgaccagggcccagcatccctggggactccatgcagccttttccctaggaagttctatcatctccaggtgctttgccacaatcagggcaggagtctcaccgctcataggccccgtggacttttttgtcccctacttatcttttggaaaactacccccctttttctctccccttcttcctccgggaccctgggcctaattgcagttcactagagctttcaccatagggtccagaagcacagctattctcatgcagtcctgctgtccaccctacaaaagcaacta

SEQ ID NO: 144158 - DNA, 671 bp, Homo Sapiens
cagaacctccagagcccaagcgcaagaagcagtttgatgccggcactgtgtatgtgatgtgcacattttccagttcgtaagctggggccctggctgttttaagtaactgtgtgtttgccactggcaggaattacgagcaacccaccaaagatggcattgaccacagtaacattggcaacaagatgctgcaggccatgggctggcgggaaggctctggcttgggacgaaagtgtcaaggcattacggctcccattgaggtaagcagtggggtcaggtcttgatgtttgccaggcttacaggccggttccagagatgagatcagagcactcatatagcctgggagccaggagcagctttaccttagcatgaaggggcagattacaggcatgagtcactgtgcctgacctaaacatactgtttttaatctgatttcaattataaccaaatagttgcatttcctatgtagttgttcagcttctgaattctcaggactaccctctgttgctcacttcactattgttcaggtattaatgaattctatttcatagattatgatgaaaagaactttttttcttctttgtagtatgtgtaaaataatgaagaacactggtgaattagcatgcaattggatataatgtgctaacaaagatttttagtttctcaggtttaaa

SEQ ID NO: 144159 - DNA, 523 bp, Homo Sapiens
ttttagatttactgtaacagtttatttaactatgctgtattcaccaataacggcattaccaataatggcattagtgcacatcaaaagatctgaaaatgctaatgggacatttcccacaaaaggaaagaaatccaatggctcctataaagggagaatatagcaatggcaagcagaatgaaaatttctgtcaaaagaaagtacttctcaaagcaatcaggaaaaactgttcccaaattaggcctggggagccacattagccactatctcagatactgattattttgtttagccttaggggcctcaatattccccctcatctgctaaacttcaacttgtttactcacaagtctgataaattccagccaagtaaccttaacattccctatggcagtgcaaaattccagacatttgtaaacactgtaaatttcacgtttggtacatgagacagcttaccggttcatctttgattctaaaaacatagctagttcctaatctatggccatttttagcaaaggtagcatca

SEQ ID NO: 144160 - DNA, 1068 bp, Homo Sapiens
accttgttctcacatcctacactgtctcctctttctttctcatgcttttcttctcgtcttccgccctcgcgaaaaatttgttccctagataaaattcccttgagcctcaaattgttccatgccacccaggcatatgtcccgctgtgtttaccccccgtatatccccttttcaaattctcgtataatttacccctatgacccttgaaattttcctgtgacgtaagattggtccacatatggcacaccccccggttttcgttccttgtcccagggttccagcgttcgcgttgtgccacgttcggccttgttaacgcctggtcacatgcctagcctgttaataggctctaccatatatggggccaccgtgtgcccaagactctggggtaccccttaacctttggcccccctaggggaaactctttgtgccgccccccccgtttctgtttctttttttgctgggagacccagtttaatgtggacactgcaaggcctgggcagagtggggagcgcccaggagttgggtgggcaggcaagtgggtgggttgcaggcccactcttggccccaggagggcatgccacggtgttgcggggctggcccaggtaggccaaggggaggcccaggcaggaagggtggcccaggcaggcagacccaccaggggtccctgaaggccagcccttgagaaggtgtctaagccagggggtgagtgcccaggccagagcctagcccagggaggcagggttgggtcccggttgggggctcttggagcctaggggctggcatcactgggggcctccccgagctgtctgctggaactccaggcgtgtctgccggttggactccagcagctcctggaggcgggcgtggacggtggtcattcttctcctaccaggtggtccagacatggagttgatctggtccagcatggagttgatggcagcgtattctttctgcttccccgaagccgtcctcctcgccttcgaacgcgtgggtcgacgatatcccgggaatatccggaccggtaccagcctgctttttgtaacacctggttcatagttacaatgccttcg

SEQ ID NO: 144161 - DNA, 844 bp, Homo Sapiens
  misc_feature (158)..(158): n is a, c, g, or t
tggggaacacggttttagcccttgtcccgttccctatgggggcccgcggcccaaaaagagggtttttgaaaattttttaagggccgaaggcgcccaacaggggttggatggtaagcgtatttggaaaggccaaaagggcgcaagtgggagtggtgtantggtgggagacccatttaatgtggacactcaaggcctgggcagagtggggagcgcccaggagttgggtgggcaggcaagtgggtgggttgcaggcccactcttggccccaggagggcatgccaggtggtgggggctggcccaggtaggccaaggggaggcccaggcaggaagggtggcccaggcaggcagacccaccaggggtccctgaaggccagcccttgagaaggtgtctaagccagggggtgagtgcccaggccagagcctagcccagggaggcagggttgggtcccggttgggggctcttggagcctaggggctggcatcactgggggcctccccgagctgctgctggaactccaggcgtgtctgccggttggactccagcagctcctggaggcgggcgtggaggtggtcattcttctcctccaggtggtccagacaggagttgatctggtccagcatggagttgatggcagcgtattctgcttccccgaagccgtcctcctcgccttccgctcccgcctccaccggcatccccaggtctccgttggggcccgacattgcgggctcgggcgcccgaagggccgcgcgacgatggaacgcggcgaccgtcgcgccgaaagccggcgccggatggaaggtggaggcggcggatagaacacgggccggaagggtagaacgcgca

SEQ ID NO: 144162 - DNA, 636 bp, Homo Sapiens
  misc_feature (120)..(159): n is a, c, g, or t
ttttttgagaggatgacatcatttatgtaaagagctagtggggtccgacaacaagcagtcattcaatgttactggtcccttccccttggcaactcctcttctgaaaaaggacaagagacnnnnnnnnnnnnnnnnnnnnnnnnnnnnnnnnnnnnnnnnaatgaaaggaagactccaatgattcctcaaatgccagctgtttatcaagtttgatggttacgatggattttccagaaataaaagctaccttgctccaataggtctacctgtgagcaactgagatggggaggaatggggaggagcgctgagcatagactcgagaagggtatgattcaggtctcgatagacaatgttctttggagtagcaccaaggttgtgtactgggcaggcactctgccagctcgccagcctgttctgtccaatcctggcgtcttggagctggggtggaagaatttttcctgaaggaaagcagccaacaccctgtcccacccttctccttgggcaactctttgccaggcaggaatctctcatcagggttttcttttggctgtcagatcaccagcagttataggcttaagcccctgtcaccatgcccctcccggaacctggcagagagcagcagctgggactctgcag

SEQ ID NO: 144163 - DNA, 505 bp, Homo Sapiens
ttttccaatacaaagtagatagcattttacttaaattgacatttaacacccagggaaaccaagacttgcagaggtgacatgattttcccaagctcatacaaagtccaggccctttactgtggtgctatcatactaaaacaggtagaggtcccaggcaccagttcacgtgctcttacatactaattgcacagacaagagagaccattcatactgcctggcatatgccttttgtccaaagaccatagttgtattcatgtcctcaaatgaacaaagggaacacggtgatccctctggaacacggtgagcacaagcctctctttgttcttctctgcattgctaagttcatctcagtcctcaaagagcagccaggcttcccagcatggtctctggtcctggtctttcagagacgtgaatttgctcaaagtcacaaagtagtaagtaacagagctaggatccaaatctagacctgcagaccagcctgtgttcttcccacatagctgtgctg

SEQ ID NO: 144164 - DNA, 582 bp, Homo Sapiens
gctttattagaagcaatgtccacagaattaaaggatgtcaaacagggctgacttttggttaaaggttttctattagtagagtctttagtgtgaaaagaagctgcagtaaccactgtatatgacagaggtctggtgttagtaatttgccgtgctttcattgcttgctgttgtttttccagagcagctaacatgtcccctaaatctagctgcacaggtgttttattcttttttccagctgcttttgataaagcttcctgtaattttttttgctccatacttatttctgaatactcttgagctgtggcaagggctgctgctaaagctttcttcttctgactttttgcacgtttgggaactgaggtggtaataggaattggagtctgaactatattgattggtgagttttcaggtaaatcatccaatactttagaagaaagtttttgttgaatattctcatccttagcatttccattctcatttagttcttgaaacccatcttcatcctcaaaatataaagactcagaatttggatcgcttctatgggattgactagagcttaaatgcttattatctggtctcttt

SEQ ID NO: 144165 - DNA, 270 bp, Homo Sapiens
tttaattttataggtattcttgtctgattgttctatgcttttataaatagcatcagatactgaatgatgtggccaaggaatatttaagatctttagtctcattctctcccaagagacaagtattaagatctcaccaatttgtcttattctactaaaaacacacactcaggaaagctctccacttcaccttcgtcaaaccgtcaagaacagaacaccttcgtaaatcatacaactactgtccttatctaataactttaatatgcagtgtgc

SEQ ID NO: 144166 - DNA, 382 bp, Homo Sapiens
tcagcattttcaaatttcagggtctggcctttcaccgaatgcacttcccaccagtcctgtttacactgccaggttccgctaggagctttcccacctctgcaggtgcaggcctcgctgcttcttaaggcctttctctggggtgggaggaaacggaaactgtatgattgtctttcatattcacttttatagacctataatgtctacaatgtctgagagtggcgtttgcggcatgacttttaaaaaaatgtcctgctggtattggaccctttctgtgtttgtgaaattgctattttgtattaacacagtatttgataaacatttatattaagaagaataatccctctgctgaatattattgtttccaatggagtagaaagaactt

SEQ ID NO: 144167 - DNA, 398 bp, Homo Sapiens
aaatagaaaaccctaaaatgcaaatcaagaaattcagttacaggctgcaagtgacctaaaattcccctactctagctcagcagccatcagtcagtatagcatcagccacaggtcactgctctgcatacagttccttttcaacccttacaagacctgcttcattgctttaaaaatgtagtgttgatacttgaactgaatttagtcattggtaacttaaatattcacaaaattgtcataaagcttctgaaacatctggcaatgccagatctgtaatcatcacttttaaattgaatttgcagaattaactctaaagttgcagcaaccatatttattagagaaatctttaagcatatacatatggttccctataagcattcattcagagatcatctgtgcct

SEQ ID NO: 144168 - DNA, 114 bp, Homo Sapiens
ttttctgggacaccttgattcctatttattgatcccttgaagtcagtggatagcatattaagaaacaatagttacaatgacaccacagaaagactagaatgtagtacttgtgtt

SEQ ID NO: 144169 - DNA, 1882 bp, Homo Sapiens
cgtatagctctggctctgtgagcccggtgcctcggaccttgggatgtcgcagcggggtcgccgcggtttttaaggggggaccggcgccgtgtgtgcgcggtctccttgggcccgcttggcccggggccacgtaccacggggcccccggccccacggaggggttaaaactttttcgggtcccagccggccaacaaagtttttgtgtgtgtgtttggtggtttgtaatttgcacagtttttaacgaaagagcccaaataaatttttgaaagtttatttatgcttcttggtctttatgagtcgcagctgttcctagagaatggcctagcagccagggtcgccgcaggcaggctttgccctatactaactgcccagcaagcaggcacatggggctgagacccagcacacatcctgcccactgagctgtccgcccaggccctgggcagcatgttcctttaatgtacccatgggcacaagtcacctatacaagcaggagactcaaacctgtcaactggacggtaaatggatgctttcagaatacttccagacttctgagttgcatcttttaaccaatggttttttgatttcttatcaaaatataagccacagcattttaggccatttgccttgcttgcctgcaataaaacaagcaaggacagtattgaacccagtaaacataatgtggaaatctcacataattctccaatctcaaagatgttcaatttattatatacttaaccattttttataaacacatgtcacagaaggccactgtgcctgattccgtgtgaaagacgcatctgcccatcactgcaatggtcctacctgcaggctattttccacaccagtaagtacaggcagcaagacagccgctggctcaagttctcccaaggactaaagtcacatggctcagtcttccgattgtttagctccttctctggctaatctgtcagcttcttcattgcctataaatcccgaatgaccaggaacatgcatccactgaatgtccatcccctgggtaagcctctccagtgccacaaagtcctctttgttgatcacctctttccctgcacttgtcttccacccatttttcttccaaccttgaacccagttagttataccatttatcgtaaacatactgtctgtatacagaaccagtttattgatgttttgagtctttgcttgttcaatggctttgcaggctgcatgaatttccgctctttggtttgtctgccgcccaggaagtctaatgcctacatttaaaggatggcccggcccccagtaaacgccgattcctgctcgcggccttctacgcccattactggagcagcagccatcagtgtagacgacgacgaagtctcccatgtaggaaaacgtgtctctgctaactggaggcgccggctccacgctcggcttcatgtgctttgcatacggctctgcgctttcatgtccatctccatccagtggctcacggagtcgcttgctggctttcgcctccgattcttgtccatgttgattttcatgcccttctgaaacttccgggcttgcagatttcctgacaaaggcccaggcctcatcctctgtggcaaacttcttaaatctggcagcaggaaaccggtccacctgtgctctgcactcattccaggtcagaaagaccccggtcttgcggcccctcctcacggcatagaacatcccgaacccgcgagagccgcggcggcagggcaaggcggccaaggcgactctgtgggccaggaacagaagccagctcatcgctcactcccggcaccgggaagcatttcgactcccggcccagcgtgggcgcgagccgccggcgctcaaccctcgtgccgaattcgacacccagcctcgcacctagccgagggtg

SEQ ID NO: 144170 - DNA, 420 bp, Homo Sapiens
aggtgtctggagacagagaaaggtttattccatttggccaaagcaagaagacaagacagcaagatttctcaaatccccttgacaaagagataaggagagggtttttatgcagctgacgagtcagggaaggggagttttggggaatggagggaaagtccgtgtgtcttccgtgtcagctaacactttgagcagccagacctccgggtgtcagcacctggtcgcagcactttcaaggcattcactccgtctgcaaacatttctcatgaccctcatgttatctcctcccgtttgacaaagaaacagtagatcagcagtttataatgatgctccttctctggctaatctgtcagcttcttcattgcctataaatcccgaatgaccaggaacatgcatccactgaatgtccatcccctgggtaag

SEQ ID NO: 144171 - DNA, 383 bp, Homo Sapiens
tttaatttgtaaggaacagaaatgtatttctcacagttctggaggatgggaagtctaagatcaaggagctggcacttgttgactagggctttcttgctgtgttctcacatacagaaggcaagctagcaggatgctccccgaaacctcttttattatgggccttcatcccagtcctaagagaatccctcatggcctagtgatctcttaaagaccccacctcttgatgctgtcacattggcaacacttgaatttgaggggacacatacaagccatagcaaactgaacatttctcccatgccagatagcaccatgttctttgtcagtaggtggtggtagaggggcactgcaggataaaggggcttctttcacttctaagatgatac

SEQ ID NO: 144172 - DNA, 566 bp, Homo Sapiens
  misc_feature (54)..(164): n is a, c, g, or t
  misc_feature (373)..(390): n is a, c, g, or t
cttgttgactagggctttcttgctgtgttctcacatacagaaggcaagctagcnnnnnnnnnnnnnnnnnnnnnnnnnnnnnnnnnnnnnnnnnnnnnnnnnnnnnnnnnnnnnnnnnnnnnnnnnnnnnnnnnnnnnnnnnnnnnnnnnnnnnnnnnnnnnnncaacacttgaatttgaggggacacatacaagccatagcaaactgaacatttctcccatgccagatagcaccatgttctttgtcagtaggtggtggtagaggggcactgcaggataaaggggcttctttcacttctaagatgatactgtgacagttaattttatgtgtcaacttggcggggccacaggtgcctagctactgggtcatacnnnnnnnnnnnnnnnnnnagagatttaacttttgctctgattttccaattataaggtcaaacattattctaggtgtttctgtgagggtgttttatatgagattgacatttaaatcaatcagtgaactctgagtaatgcagactgtcctcctcgatgttagtgggcttgatccagtcaggtgaaggtctgaagag

SEQ ID NO: 144173 - DNA, 324 bp, Homo Sapiens
aaatggttaaatctttggtttgtttcttttttctcttggaggcctttatctctcgcacttgcctttcccactcagagaccagtgggggcccgcgtgtctcaatcttgctgtctgtctcactctctctctcactcaggtccccctaccctgggctagaggaagagagaggcaccctggtgttcatgtgggttagaaaaactagtcaggtcaagaggtcaccctgacttggctagtccctcgccagatctccccagggcctggagagcccgtcatggccttctccagggagatggatggaaaactcatatccttcccctcctcccc

SEQ ID NO: 144174 - DNA, 508 bp, Homo Sapiens
cattcatgccctactcctagcatgtgtttggtgcacagcgagcactatagtaactattgatgttgttaacacattatttccttcctattatccttaagagggagttcttaccttctcatcccatctctttagttttcttaatataactctaaattcaaataaaactcttcactttgttaggaagaggaccatgacttgcttaggcccgactaacatttgcactcaccattttgttacacagatggcaaaccaggaaaacagagctcagtacagaagggagttgggcagcctctgttcctgtttggctctgtccttgaagaaagtgataagaagtgcacagattttggaattaaacagaccatggtttgaagtctggatcttccagttgtaaccaggtggcattgggaggcgaggagagaatggatgccggtctgagctccccgcttccgtccccagtctccagataccggtcctcgcctctccgcgccgcgcgctgcctcctctcccc

SEQ ID NO: 144175 - DNA, 495 bp, Homo Sapiens
gcggccgcacagccccggtgcccttaaaagagggaagatggcgtcgtgcccggtgccgccgggaccggctcccggaggcgctgcgcacctgaggaagggccgaggaaaggcttcgtaacgggacgcccagaaagtccggaacaggaacgtgcacacggagcggcgcgcagccgcccgccctcgcttgcccacgcgccctgcacaggtgcgccccagactgggcggggactagagcccggctggggcatgcgaccttgtttggtaaattggaggtgcgcccctgcgggtgacccgcgagggggccccccgcctgcggggcgcggtcacgacaaggcttgtggggttcggagctggtcgtcgtctgggctctggcctcctaaatgcgaatcgctttcaagcccttcattgtcaattttgctagaatgagccactcgtggggtaggacgtggttgttgatgttactgttgtagctcttactattgtaacatttttgtt

SEQ ID NO: 144176 - DNA, 534 bp, Homo Sapiens
tttttttcataaaggaagctgctgttggctacacgggtaataaggctggtataaattaaaattatatcttccacaaattacagttcaagtacacataagaggtaaagccccccaaaaggtaaagtacaacatagggataaggatcaactggctatttgttaaagttggctaagtctacattgagtggcggcagcatggttagaatggtgagagtatggactttgactcctatctctgaatgtactagctttgtgaacctgagggtgatatttaagcccactgagtgtagtttactcatctataaaactgcaataatatttattttataaaattcttgaaaggatgaatacaatatataaataattggcatcttgtaaatgttagatccttctccccatcttctttgacttagagaattttcagttgaacttctacatttgtctgatttatgacaaataaatgaaagtgtaaaaaaattaactgcgatctcacattgcctattttaatgaaaaagtaaaagcaaaactaaaccat

SEQ ID NO: 144177 - DNA, 456 bp, Homo Sapiens
tttaagagttcaaagtaggaagataatttttctgacctggaaattaaaaaaacagctgtgtacagagaagggagttgggtcccagtgaccactgccataaaatgccacctgtgtatctggcactctggagaagccgagtcgtggaggctgcacatcgcaggaaggatcccccgtgggtctcacatgacagggcctgaaaactcccacccgcagcagacaaggcatcatggtggtgcgatgctgcccacccctccatgggaacttggaggcgtccactggagacgagctgctgtcttcagcccgtcctcgtctggcagcaaggccccacatggctctgcaggctgcgaggcacacccagaacctcatgccttgagatccaagcagagcggcgagtcgccgctcctctcccgccagaatttcctccacacgggcatctgcatttccagaggactgtgc

SEQ ID NO: 144178 - DNA, 467 bp, Homo Sapiens
  misc_feature (59)..(110): n is a, c, g, or t
catttacttttgccctctttattttattaaccatggtatccctgaagcctgtattatannnnnnnnnnnnnnnnnnnnnnnnnnnnnnnnnnnnnnnnnnnnnnnnnnnnggattaggtagtgtattagttcatttttactgcaataatgctgcataacaaatcaacctaaaacttgagatcttaaaacagcaggcatttctttccttgcccatggatctacaggtcaacttgagtttgggtgatcttggaagagcttggctggcttaggttgggtttagctccaggctgtgggttgtgttcagttccaccaccacgtgtttccttgtgcttctcaaagaagaggctacctggggtatgttcttctcacaggagaccacaaagcaagagtcctgctagcaggtttcccgcctcacagattgaagcccaggtcgccacacaggaacaggctcctccccgctgcaaatg

SEQ ID NO: 144179 - DNA, 497 bp, Homo Sapiens
tgatcattcattcatttatttataaccatttattcaacaagtacattcatgtatttgtaaccattgattcaacatgttgagtgcccacgatgtgccaggcattgactgttccagctctgggaatactgtgatgacttggacagaaggggtcaggtgcagggtagctcattgagtggtccgcgaagggtggaaaggggaagggtcctctctggagggtgcggcttcatggagcaggtggagcagggtgacacggaggttgctcggtgcaggacaagacaaggtcttggtggtggtctaagagcatgggccttttttttccgatcctgaatgctaatttgagggatttggttttctcctgtaattccattctaatcccatacatagatgatgtcctgtctggtcagttcattccagcagctcactcactcacactccacacgtgccccaagtttccaaggtgacacagccaggctccaaacatgcccttctctgggccc

SEQ ID NO: 144180 - DNA, 882 bp, Homo Sapiens
ctgcctgcccttcgggcacctcaggaaggcaccttcctctgtcagaatggccaccatggtaccatccgtgttgtggcccaggcctgctggactctgctggtctgctgtctgctgaccccaggtgtccaggggcaggagttccttttgcgggtggagccccagaaccctgtgctctctgctggagggtccctgtttgtgaactgcagtactgattgtcccagctctgagaaaatcgccttggagacgtccctatcaaaggagctggtggccagtggcatgggctgggcagccttcaatctcagcaacgtgactggcaacagtcggatcctctgctcagtgtactgcaatggctcccagataacaggctcctctaacatcaccgtgtacaggctcccggagcgtgtggagctggcacccctgcctccttggcagccggtgggccagaacttcaccctgcgctgccaagtggaggatgggtcgccccggaccagcctcacggtggtgctgcttcgctgggaggaggagctgagccggcagcccgcagtggaggagccagcggaggtcactgccactgtgctggccagcagagacgaccacggagcccctttctcatgccgcacagaactggacatgcagccccaggggctgggactgttcgtgaacacctcagccccccgccagctccgaacctttggtgagagaaggggcttcagacggtgggtgacgagctgagccagggtagacggtgccctgaccttggggttcctgagagtggggtacccggacctcaacaggcttctgggaaggaaagccccggcactgggccaggttggcccggaagggaggccagccgtgggatctttgacgaaggccgttcatggc

SEQ ID NO: 144181 - DNA, 554 bp, Homo Sapiens
attgtgccatctttgagaacagaaagttttgtttagcgccttgcaaggtatctgacaacacaggaaatgataatcactgcgctaatgataatagcaaacgcttcgactggcccagctctaagccctctaagtttattaactcaaagctcacagttctcggcaggactaccctgtctcctccccagtccctggggtgagtgggtgggtttgcaggacccgctaagtgccatcctcccctcctctctcagggctcccggagcgtgtggagctggcacccctgcctccttggcagccggtgggccagaacttcaccctgcgctgccaagtggaggatgggtcgccccggaccagcctcacggtggtgctgcttcgctgggaggaggagctgagccggcagcccgcagtggaggagccagcggaggtcactgccactgtgctggccagcagagacgaccacggagcccctttctcatgccgcacagaactggacatgcagccccaggggctgggactgtcgtgaacacctcagccccccgccagctccgaaacccttg

SEQ ID NO: 144182 - DNA, 384 bp, Homo Sapiens
tttaaactacagactttattttgatttcgctggatttcccactgcatttttattcaccaggatccaattcaagatgccacattgcatttggtcatcttgtctccttagtatcttctgaactgtgacactttctcagtcttttcttaaatttcatgaccttgagaactttgaagagtactggttagtgttttgtagaacttccctgaatttcggtttgcctgatgtcttctcgtgactggactgggcctttgggttttgggaaagaatccagctcctgggtgacgctgatgctgttgatttggggccacgcctggaagatcgctgtttgagatcaaaaggtttgcaggtcagagtggatgacggcatccttccaggtcaatgaga

SEQ ID NO: 144183 - DNA, 693 bp, Homo Sapiens
cgaagactcatgcagtatgataatcgtggccttgagcaaggtatccagcataacaagattacagctaatctatctcgaatactactagacaaagaagtgctgttcatacggaagaagaaaagaagtcggtcagttatccttctctctttagccacataacttcttctctcatgaatcatccagtcattccaatggcaaataagttctcacctacccttgagctgcaaggtgaattctctccattacagtcatctttgccttgtgacattcatctggttaatttgagaacaatacagtcaaaggtgggcaatgggcactccaatgaggcagccttgatcctccacagaaaagggtttgattgtcggttctctagcaaaggcacagggctgttttgttctactactcagggaaagatattggtacagaaacttttaaacaagtttattgtcgaaagtctcacaccttcatcactatccttgatgcattcacctcccggcactcagaatataagtgagatcaacttgagtccaatggaaatcagcacattccgaatccagttgaggtgaacctgactttcacatttggattgagaatcattggcttttatacctttcttggtttgacgtgcaataaagaagcacattattttagcttctggctactgtgagaacatgaattctgtgattctgtggg

SEQ ID NO: 144184 - DNA, 491 bp, Homo Sapiens
gtgactcattcacttgggagggacaatttcttcactggtacctccttttgagtgaatttattgaagacactcttttctgctggggtagcatgagatgaatttgaacataatccaaggccggcacagaaggcaggcgtggcccaaagctgaccctggctccacttcataattccatgttagaccgatcctgatctgtctacagagagtcaggctgcagggctacccccgtgctgagcaccccagcatgctcaagggcaggccgtggtgtacaccagagacccagagacaccttgcaagtacaaagtaggtaagatacaaattaacatgtactgagtgcatttgcttcccaaggctgccataacaaagtccgtaaactgggtggctgaaaataaccgaaatgtatcctctcacagctctggagagtagaagtccaaaattaaggtatcacgggcttggatccttcgaagggctatgagggagaatctgttctc

SEQ ID NO: 144185 - DNA, 459 bp, Homo Sapiens
  misc_feature (377)..(377): n is a, c, g, or t
tttgtttaaaacagattttaagaaagaaaccatgactgttttacaaaagtcttgtgtaatggacagagatagccatgttagtttccattttctgcagaaagggggcatctcatttaattcaaatcaacccaacagtcctcggggtttggagacctctgtcattctccagatttagccaggccaaagtataacatatacatgccttagatgtcttacaaaagtcacgtcactccagagaaaatgtgaatacctcacagaagctctggggacagtccactgacttcaattattttggaaagaaagtgaaagctcaggagtggcctttgagttgtgacacccccccttgcattgcagggactggcctcaaatcaatctangctctctggataggctggcttcagagcatttggttctgaagtgatctaaacaaagacatattttttatggctattctaaaaa

SEQ ID NO: 144186 - DNA, 654 bp, Homo Sapiens
ttttaagtaggcaaaaggcacatatatttaaaaaagtcctttacatatgtacatcagaacttgctataaatacatagaaaccgcaggcgccaccctgccagctccgcggcctggggcctgggagaggtgagcgggcaataacttaggggtcagggaagggctgggggagggagaattgcatatattagcaggggtctgccccacggagcccccgagacgcggggccctgagcacctggggtttcctgagtttctagctcttgggaccacccggtttcacggatttcaagggtttgggcccactgagcccttgtgggtgcccagtcccagagcagccacccggagccccttcctacttgggaggagaggcacagagagggccctgccacgccccggcccccagctgtcctgagtgggccccgccagggctgaccaggtgggggcccgggtcgggcgctgaaggcactgcggccagggcctagggctcctctgagcagtggtcaggggaccttggccctgctccccaccgctgctcctaggggagaaacggtccctgtgtcttggggcatgtttcgcctaaaggcgtgtcagagaggagcctgggcgccggggaagggtgggctgaactggatcacgctctgccgctcgggaccac

SEQ ID NO: 144187 - DNA, 545 bp, Homo Sapiens
  misc_feature (501)..(501): n is a, c, g, or t
tttaattttcacaatggctttattgttgctgctgctgttctctcttttataaggaaaccacgttccccaggccgctctcctagcaggtggtcaagctgggcttgaacaggacagtcttcctgcagtgtctgtgctcccaaccagtgacaccttgctccaagggccgcagcagccctgagaggggcctgtccaggggcctgttagagtagagcattcgtccctgactgttgtcctgcagaagcagccagcccgtgcctccttctcagtgggcagatcttgggagcccctgtgtgaccagccaggaagggccaggctgggcaaactctcctcctcagagcggtagtaagggaagaacccactgagcagttctgagtcctcctggagcggtgtcttgggctgcaggaccaacccctcctcttccaggaggcacccataggtgcagaagaaaggcaggtactccaaggccacctgggccctatgtgaaaggtggagggagcttangggcttcttgtcccttgaactggtggcctgctgttgggaggaca

SEQ ID NO: 144188 - DNA, 518 bp, Homo Sapiens
ttttcttagtattattctgattttattttgcccttaactgattgttatatgctacaagggatttcagtggactgcagagtgcgaacgtcttgctgttgtgtttttatgtcccaacctaaaaaccttagctgtcttttctggagttgtctttcatgcttttccagtgggatcaagcccttttccccaagagtcccatctcttctgccatgcacgacatgaaaatccacttctcttccttctccttcttctctctctactttacagtgatacacacacgtatttaaggactatccctgagaccatccctctcattttggaaactgctagggagggaaccaaccacttaaacaagcgtggttttccaagatccaggcaattgtgtgctgttggttgtggtggaggatgtggcacatatatacgtacctacacggttctctaacagagctttctgtatctatagatagatgccatctgtccatttctatgtatctttctataaatatacactctcaggtaaa

SEQ ID NO: 144189 - DNA, 275 bp, Homo Sapiens
ttttttagaggatgtaatttttaattaagatcccaacataaaaggcaaagatacaaaggttttgtgctgcataggacaaacatatttatggctttttattatgtctaggatgttgagacaatgcattgtagttagctggtgtcattcacagcaattcaggacaggtgtggtgcttatggcgtcagggacacagctccttgttgctccactttgcatggcctcgacctcatgatctaagatagcagcatatgtttcaagcagcaggacagaggaag

SEQ ID NO: 144190 - DNA, 587 bp, Homo Sapiens
tttatactcacataagtctttattaaaagaaaagggtatggtacgacaggagaaggacagtacaggcaaacagtgatggtttccagcccctaggatcccatctcagtcacacagaatctgctttgttttcagattatgaaccacaaagatacacacgaactgtcttgatttgaagggagcctaaaacttgatacttctctcgttgttgaacagagaaaaaatataccagcctcctctggaagcagcgagggaaaatttaagaagttggtatttactgtatatcttaaaaaaatccaaaacatccacccacgatttttaaaaaatatgaatgacaaagttatagccatcaaataaagatgaagaaaaggtgagaacatgggagtgaacatccttctctggggctgggaaatgcaatggtagtgttcccattcttcatgtctttagcagataaaaacaaaaaactgtggctcagaaacaataatgtataattcatgtgcttccaatttgattgatgccaacctgaatcatgaacggcagctcaggatagttgttcctggatcagaagagaggtttcaagtcagaatggt

SEQ ID NO: 144191 - DNA, 796 bp, Homo Sapiens
  misc_feature (625)..(626): n is a, c, g, or t
  misc_feature (716)..(716): n is a, c, g, or t
tttggtatcacaggtttttaatgactattcacaattcaatagcaagtgggaagtgaggttaagaaaggggattaaactccacaactgcaatgagtatctgaaatccttggttttagatgcggggatgggggtgaacaaaaaggatgacagagcaaagtgctaccaggaggagaagtccagtctgcatgaagatttgtctttaataaataacttcataaactgtggccttcttatccccagagccagtgacaatgtatttgtcgtccacggagatgtcacagctaagcaccgatgaggattctttggactggaatatactggccccataaggtgttctccaggcattcagaaggttgtcctttccagtgcttacaaaccatttgccacaatgggcaaacttgagcgacagcacacagctctcatgaagatgtagttggtatttgtctggcttggtgacatgcaaaacttccaccattgctgttctccatccccactgcaagccactcttcagttggggcagtagcccagagaaaagactggggaggtgaaaagtcgtgctgctgcagctgccgcccctcgcgcaggtccaggacctgaccgggggttgtcaaacacactgtcaagnntttggtgcctcattatgaaaggtcatacaagtgctccattttgtgtggcctggaattgctaccagggtggggtggggcaaaatccccaanggatgtttgccgtcgctgcacatgaaagcagaccttggatccgggcctgatggccaggcataacagcggggccaagagat

SEQ ID NO: 144192 - DNA, 578 bp, Homo Sapiens
  misc_feature (476)..(476): n is a, c, g, or t
  misc_feature (483)..(483): n is a, c, g, or t
  misc_feature (491)..(491): n is a, c, g, or t
tttgagaatgcagagggtttttttgagaatcattagcagggaggccaagtctggggagcccgagaggagctgtgtaccaagaggagggtgtttttgagaatccagaggccgttattgtctgcttcctttctcagctgaatcccacccctggagcccccagcagggggcgcagccctcatgtgaagcggcacttctgaggggacctgtgagccagagccctgctttgatggctgtggatgagaggggatgatttttctaatctgcctccatctttcccagtgccgtgggaggcagacaccaagttctggggtctgcagctgcagcagcagctacaggcagaggctgagcacctgtgggaggagctggaaagtctagcaggacagctccagtgggcccacatgcaagacaatgaggacttgaaatgcctgaactgggagcaggaggagaggctgctggagctggggcgggtggctganctctgangggagcangcggaggtatgcaggcaaaccctggggaccgtgcaaaatgaccttaccaccatcagccccacactctcccagaaccctgagctcaag

SEQ ID NO: 144193 - DNA, 569 bp, Homo Sapiens
agtctacaagtctgtacaggctggcaagtttacagcgagtaagtttttctcccttcacatatgaggatgtatctgcaccaggaaggtcattgataggtgtgaccatgccaagactgagaggaggtgaagaaaaacccgagaaagaattggccatgatgtaatctgcaatctgctgtaatgctagtaatccagttgggttgtggcctttcttcatctgttcttgaataaggcattccaagtcttcccgaaaggcaggactttgcaggatctgagtaactcgtttcctctgctccatcatgttgaagtcttgtcgtagatcaggagacatgttcctctccctaatgtattctgggtcattttcattgatgcggtcaaaatatctctctttgtgaggcatgctgggaggaggaggagtggtaatcacgccttggctggcatctgagctcatgttttaagtctgtggattactcttgttatctcgcagcgcgtagccggctttgtgtttcccctccctccttctcggcagccgcccgggctgcagcagccgccggatccgccgctgcggccgc

SEQ ID NO: 144194 - DNA, 704 bp, Homo Sapiens
tcgatattccagagtttgataattgtttcgagactctcctctagcgtgcctgtgttccgtgtgtccccgtgtgcaagcgtgtgccatgccaatctgcctcgagggggcctcacccgtgtccgcggcgcccgccgaggcccccgagggcctgcttgggagtgtgtgccggtgtgcagttgtacgtgtctttctggtccatgtttactggctgtaaataccatttttatactccacatcgcagacctgcgtgatttgtacaatgtactttatttctgctacgagtaatttcatgaagtttcaacttgcaaactgacttttgggacaaaccaacacacacacagaagagaaagcaaagaacttggaactttgggttgactcggtttgagttttgtgtcaaagaagatttcccgcggctgaagaggttggtgttcctgttacgtgtttcaggtgagaagcagcaaagcgtcttaatgttcaaaacgcctctctttggtctcatttctgttgatcaggagtccaggactgatttagctgggtggttctggctcagggtctcatgagattgcaaactgtcagcagccaagtctgtcacatctgaaggttcgactggggctggaggagccactcctactctggctccctcatgtggctgttggtgggaggcctcagctctttgccacgtgtgaatctccatagtgctactt

SEQ ID NO: 144195 - DNA, 461 bp, Homo Sapiens
ttttatttggtcacagttatcctttatagcaacacaaaacagtaatacaatgttcctgaggggacgcccttcaggccctcagcatgttgtagccacctgtcctggggcagcgagtaggccagactggggccagattgaggccggttcagtgggccctcctaaggtcggctcccccacccgtctcccaccctgagcctcacagtcctcacacaagtttggatcattattctaaaagacataatcccaaacactggtccccaacattgaaatactgaaagacgcaaatctctaaagtttcaaatccctaacatctgaagtcttaaaaatcacaatcccgggatagttgcatcatgttaggtggagctactgccttgcttggggctttatttggagactgaaaatggtttaaggggatgcggatggatgccaagttgacaaggggtggacctgtggacttcatt

SEQ ID NO: 144196 - DNA, 487 bp, Homo Sapiens
attatcagcagaatatattcattctttagaatagatcagtggtggtgtattcatacaatggactattccacagagatgaaaaatatatatgcaaaaacataaattgcataaaccatattgagcaaaagacagacgccaatactctatttacataaagtgttacatacacagagatagattaatacatgtaaatgatacagatatgatagctaggtcagtccacggggatctgtggacttctgaagagtcgtgatccgtgtgacttctgaagagatgagggggcatgggaggctttagcggagcttccgctattctggcaaggtttcatttttgcccggggagctatcagccagcggagagatactgcagttgggacattttgccggtttcgtgggcgcgcactggtggaaccagcaggtgaggtcagccggcagctgcccccgaggagcccttcgggatctacagtcccgacgttcagccggcctgc

SEQ ID NO: 144197 - DNA, 391 bp, Homo Sapiens
  misc_feature (360)..(360): n is a, c, g, or t
  misc_feature (373)..(373): n is a, c, g, or t
tttttgaaaattgaatactttttcaaatgccaagaagagaccaatagttgagggaactcagctgaggtcaagtgaatcatcacccactggttcatctattcggtatagccagatttcagcaatgtagtttcttcaaagctagtcgcaggtctagtctttgtggtgtcagagagctcttctgttattctcttaaagaaacttcctcgcttgtccagaccgcgggcgcccatggtccaagctgtcatttcccccagcgaggctccactgcacgccggggactccatttctcggcttccagggggtcctggtcttttagccataaatctgcagatacctgggtaaagaatgggatcgggttantagcccaatttantggcgttagagtgtctcc

SEQ ID NO: 144198 - DNA, 598 bp, Homo Sapiens
gcggccgcccacgaagctgtcggtgcgcagcagcgccgcagagaggcccgccaggcgcccagcgtagcagcggagctgggccgggccgggcgcaggcccggaggcagggaccaggccgccggcgcgggggcggaggcggcagcctggaaacgtcgacccgaggcgccgggccccacagctccgcagccaaatgcaggtcgccatggcccgggcaacgacggcgacaggaaacaggttgtggcctggcctgctgatcatgttgggttctgtctgccatagaggttcaccgtgtggcctttcaacacacgtagaaataggacacagagctctggagtttcttcagcttcacaatgggcgtgttaactacagagagctgttactagaacaccaggatgcgtatcaggctggaatcgtgtttcctgattgtttttaccctagcatctgcaagggaggaaaattccatgatgtgtctgagagcactcactggactccggttcttaatgcaagcgttcattatatgcgagagaactatcctcttttctgggagaaggacacatagaaactggtagctttcttgtttggaattacttctcacatg

SEQ ID NO: 144199 - DNA, 466 bp, Homo Sapiens
  misc_feature (218)..(265): n is a, c, g, or t
tttttaacatttcattttatatttattgtaaaagcaatatacagtaaaaatacagaatagcataaggttacattaagatggaaagtaaaaattttcctccccccaccccaacagtctttcaatgtcacaactataaagtttctttaaaatactacttaatacattctaacaagtcaaaaggctttgtttcttcttggttttattgttgagatacattnnnnnnnnnnnnnnnnnnnnnnnnnnnnnnnnnnnnnnnnnnnnnnnnatgtttgagatgagggccctgattttcattttgcacaggaccctgtaaattatggggccaagatccccagtatttgactctttgctccctgctacaccccaattgtcctaggccatacctgagcagcctgtgaacttccacttcataagcttctttcttcagactgaagaggagggagaaatgggtcaggggagtgggcag

SEQ ID NO: 144200 - DNA, 240 bp, Homo Sapiens
ttttttcacatttcattctatttatttggccactgactcattcattcaaccaatagagcacatgccatccattcattgttgagcaccaactatgggccagacactgaggagagacagagtctcctgcctcaagttctgggggctaactgctcctggttggggtgggtgggggacaagacacaaggcctgagggcaggggccctgtacttcttggtcattgcggtagcccagcctagcagt

SEQ ID NO: 144201 - DNA, 620 bp, Homo Sapiens
ggcccgcacgtggcgacgccggcgttgggcagaagcacagcaccctccgtcaggcaccgggagagcccgggagtgcgttccggggctttcggagcagcggtgtgaggaccagcagagagaagagattccatcttccagagtaccctgatgggaggatgaaaacagcagaaaggagcagcaccagatgatcttttcatgggcacgtactctttcaaggaatcccatggagctcagtgaaattacactttggcttagagataattaagttgtggaaggaggtttaagagaggagcttaggtgaaatttgagctgtaaatgagtatgctaaattaaagaaatgattagtaataaatgagatttgctattaagaaattcactttggatctgagacaacattttacatacaatgtagaaaactttatggtcagaacagaacacagtctgaacctaaattaacagtagtgttaaagaattcagggcgggatattatccaagaaggcctagccagctgctccacttaatgttacatcacaagtggtttctgtgttgctattgtttttattagcatttcaatgactgtgtcatattacattaaatcaattggctctaacttacctaaa

SEQ ID NO: 144202 - DNA, 738 bp, Homo Sapiens
catttttaaccttttgcctggatagttaattcatttcaagaaacaataagctgcaacaaggggcttatttattacctttaccattaatttccccccaattaataagacctaaattctcatgcataaccaggaaaacaaattcactgcaaattttaaaggaaaactcattgagagaagaatgttaaacgatacttcaaaatacggtaacttccaaactccatcaaacattaattattgaaattctacttaaaaaagttctccactaaaaagtactgtaaatattccattattataggcatgtggccaaaatgtgaaaaaataatcaaagatactttttcaattaaggccctacacagctcagaaatggtgataaatctgttaatttaaaacagtcaatatcactgggataagagtttatcaaactcaaaggcaattttcagtgagaataacactaaggtgtaaatttcatggcaaaagaaaagatgtcagacttaaaccacattaactatgaagaactagacaactaatgtgtcattatatatataaaaaagatgactgtggatggggacaagtggggaggcagacagtggcaacctctggaagatggaatctcttctctctgctggtcctcacaccgctgctccgaaagccccggaacgcactcccgggctctcccggtgcccttacggagggtgctgtgcttctgcccaacgccggcgctcggccaaggcggccgca

SEQ ID NO: 144203 - DNA, 933 bp, Homo Sapiens
  misc_feature (823)..(857): n is a, c, g, or t
tttgaaacaggatcctttcctccagtcctcgttggtagccttctcaactgggtggcttttctggagaaggacaccttgttcccaagatataggtccctccgttaagttctgtggctatatttgaaacaagatcttgtgtcggtcacttgtagccttctccagctcgttgtttctgagggagacacttgctgcattgcttcaaatatgttgtaccatgtgaaagaagtgttttctatcatggatgtatcttcattatacacagcgtacttccagagcagtccttccaaaagacatccggtaataatttggatcggcgccattttgcagcagaagaattgcacaagcctcctgcctcagttgtacagccttgatcagaggtgtcctgtcttcacggtcgcagaggttaagctcacatcttctggacaccaggagatgtaccatttccggttggccagtggcacaggccaaatgtagggcatcctttccttcttgtctctcttattggtgtcatgatacgtgagcagaaggtacttcagtttctccagattaccatgtaagacagctctgtggatcctcttcagatgatacggtttaatgtggtattggggaaatgcgaagccctccgagcacaagcgctccctgagggtgggccacctctccggctcgtcgtcttccttaatcgtcggctgcaaattgtagcctgcagccgtatttcagctcgccttcggggatcgccgcctccgaagagcaacaacaggcaaagcagtctgtccccggccgtaatggccgaattcccgggcatatgtccggtaccgtcgactgnnnnnnnnnnnnnnnnnnnnnnnnnnnnnnnnnnncggccgcttcctcgcttcactactcgctgcgctcggtcttcggctcggcgagctagcccctatagtgataatcatt

SEQ ID NO: 144204 - DNA, 1183 bp, Homo Sapiens
ccttttgattttcctttatttcttctctcatatgttgatttacagcaattctggttagagatctggcttttatggggaagttctgtgaaatgtctttcattaatttaatggcatcataaactggagcggacattatttgagaagctgcttgaaaactaagatcttgtagttcccagactttcaaaggcatcatttgtttgttactctcaatcaggtatttttggaatgctgtcagattatctctaagatctgaatatatttcttttagtttcccaaagagaaatccttgaacttcatttgtttcagtctcatcctctacagtagtattagtcacagttttaacttgggtatcatccagtgctttgtattctgtactcttaattgctagctccacaccatacccagataagtacattttccgtgagcttggtttctgaatataatggcgaagaacatacagaatttcctcattttgagctttttcagacaatactttgtgaaatgcactaaatgttctagtacccatttcggcatagagaatcaccactggtgagttctctttgtttgtaggaaatttgtgatctcctttaaatagataaggtctagtctttgaagtagctttcttcagttgctttttaatcttattaattttataggtgtgtttcttatgaataattataaatgtattataattatttggtggtggcttattagctgtaatctgctgaaatatctgaatagctggggagtatgcctttatagagaaagcaaactttaaaaggttgatgtgtaaattgtttagaaactgtctagctttctttaggattaagttgtaataagaataatctgattctgtttgcttataaattgctaatttttgcacagtttccaaaaattgccaaaatttttcattacttttttctgccataaattcacttgcctccagcagcagtggggtcttgggccacttcgcggccaagtgggcagtcaccgacttggacgcggcgaccgtcccggagccgagctgcgaaagccacagcgctgtggagcctagtagcagccgcaccacgttcgtggctttcgctggcgccatggcacggagagaaaagcgcgagtccctccggacccggtacccacaagtctgtggccgccacgcttcggccggctcttcccgctgcgcggc

SEQ ID NO: 144205 - DNA, 791 bp, Homo Sapiens
  misc_feature (150)..(157): n is a, c, g, or t
  misc_feature (159)..(175): n is a, c, g, or t
gtccaatgggcccccagggattcttccctagggaaaaaccagctttatggacccatggttccactttaccctacctggggcccccgcgcggcccaaaccgaatgggttttagaaaagcttcctcgaggggccgaggcgggcccgacaagnnnnnnnntnnnnnnnnnnnnnnnnntttttggcaaatttttcatttatttagcaaatatttcatttcaacaaacatttacagattgtctaccaagtggttttagagatatgctcaagcctacaatttagccattaagcaatgttagcatattttataattttttcttaattacagattaacagcagagttttgcatcagaacctctgaacagttatactgacttagcatcaatagagctaatcaactgtctgatcaagactaaagttattttactttatttgtatttgatctaataatttttataacggccattaattaaaatattatggctaaacagatatgacatttatacacacccatatatatttcatgttttattatataaatgacgacttctcaaattcttgacatttaaagttgactgaaagaggcatatcaatatattcattcttaatctggcttttatggggaagttctgtgaaatgtctttcattaatttaatggcatcataaactggagcggacattatttgagaagctgcttgaaaactaagatcttgtagttcccagactttcaaaggcatcatttgtttgttactctcaatcaggtatttttggaatgctgtcagattatctctacc

SEQ ID NO: 144206 - DNA, 1259 bp, Homo Sapiens
cgccgggaaaccccgtatccctcgttgaaatcaattcttatggaccggtccggaattcccgggattttctgtactctgggtgactcagagagggaagagattcagccagcacactcctcgcgagcaagcattactctactgactggcagagacaggagaggtagatgtccacgcccacagaccctggtgcgatgccccacccagggccttcgccggggcctgggccttcccctgggccaattcttgggcctagtccaggaccaggaccatccccaggttccgtccacagcatgatggggccaagtcctggacctccaagtgtctcccatcctatgccgacgatggggtccacagacttcccacaggaaggcatgcatcaaatgcataagcccatcgatggtatacatgacaaggggattgtagaagacatccattgtggatccatgaagggcactggtatgcgaccacctcacccaggcatgggccctccccagagtccaatggatcaacacagccaaggttatatgtcaccacacccatctccattaggagccccagagcacgtctccagccctatgtctggaggaggcccaactccacctcatatgccaccaagccagccgggggccctcatcccagggtgatccgcagggccatggagccagccccaacagaggttcccttcaccttttcagtcctggtccagcctggcatcacctttccgagctcaaaattttaagccttaataaaatggcagggccccgaggccaagccccctcccccgaaaacgcttgccagccttggcagtcccagggggaaaaaagggacgtttgcccctggctttgtcagccaacaaaccagcaggccgagcaaccaggcaggcaggcaagtcaggctgaccagtcgagccacgccgcacagcagagcaagtaaacccgcgcaagccgccaacgcagcatggccggcccgcccaaccccccggtgagggtgagctgaccaacaccggtggttcccggagccccttgggtttaacctatcacacgggaatccttccctgggcgcccgggtggcccctggaaccttgaaatccgggtcccctaaaagcaaccccccggtccaaaatagttttggccgggtgggttccccggcgcccgccgggggcggggtcccgggcccccttttttctccccgcggggcccacccgggctaacctccggggcaaaaacaccccgcccccctccgtggaagcactttctttt

SEQ ID NO: 144207 - DNA, 537 bp, Homo Sapiens
tactggtctgtgaaatctgtctaggaaccaccaaattacaggatttccaagactaggttagagatatgttgtacataaaacataggttgtatctatggaaacaagtttattaaacttatgagtaatatttaaactaacaaaattttatcagtatttttgctttaattcagatttttaaaagacatcctaaaactaggatggaaaccatatcaaaatcacgactgtacattgtgaaaaactgaaaacatctaaatgtccaataatatagattggttaaattacagtgtatttatataatggttatctatttaaaatcatgctttatagtagtattatacagacatggaaaaatgttcagctacaggtcaacttgtcacgttcggtgactactacctcctctaaccctttgggtgtgttgcagcttcccaaggtggtttaccgtacctattggctttctttaatcctacttttttggtaaatattcccttcattaaatgctgttcagtcaccccactttagtgaatcatctatttccgg

SEQ ID NO: 144208 - DNA, 768 bp, Homo Sapiens
  misc_feature (522)..(522): n is a, c, g, or t
  misc_feature (721)..(721): n is a, c, g, or t
  misc_feature (738)..(738): n is a, c, g, or t
  misc_feature (741)..(742): n is a, c, g, or t
agaaagaataaaacatctgttttaattggccagtaaaatacattgcaaatcattagtattttataaacagaaacattaagttataaatccatgttaaaaattgcagctcagtgcagccccaacagctgtgtgtccaaaagtctatttttacaacattttcctccagtatttttgtgacaagaaagttcctatctgccatctagatcaagagcctgaactacagtattttcaaacaagaaccgggagaagtcggtacaaggatacgtcgtgctgtgtatttaaacggcgcttcccacacacctgccgtctgcatcccgggaggacgccctttgggaaaggcctcctcggcagtgtgaggtctggaggggtctgcctggaccccatttttaggatgctcccctccgcaataaaacagcagcccccgcccctgccctgcacagcatctgggggttcataacacaggtgcaatactgaccatgggccctggagggacgtctgcaccccgaagcccctgtacctcanactcagagtttcttctcgatggcgggcttcagggtgacatgcaggtaatgcatccccgccagcttcatggtctcgtcgatgcacttgtacgccagtgagtttcctcggaagatggttgtggggtctgggtccgcttcaccttcgcgcttgcgatggcactgatgaatgcaccaccctgccatagtgtaggaagagccgnaccagcgggactggcgnctnnctgctctccgggcaacctttgcccag

SEQ ID NO: 144209 - DNA, 1440 bp, Homo Sapiens
ggctgggaggtgcagaattacacagaagtcccagtctgaggatgtccttggtgcttgggggatacgggttctgtccacagagtcccttggagggaaaggtgtgggctccagcttctccatgcgtctgcggagcccacagttgaagcccacatcgtttttgctgttgaatggggtttaaaatcagaattaacatttgccaccccccgtggaagtttgaagattttaaaaatagaaatgtacatttttcaagctgtttttctttatgtttttgaaggaccatttttaattagctctttgatacaaagtaactcagaacgtcaaaacctatacccactaaagggaaggctgccgggaaggcaaatggaacaggaatggagcctgtctcaggaaggccagctgcaggtcctccagaaaatcaaagaagggaagaaactctgagtttgaggtacaggggcttcggggtgcagacgtccctccagggcccatggtcagtattgcacctgtgttatgaacccccagatgctgtgcagggcaggggcgggggctgctgttttattggggaggggagcatcctaaaaatggggtccaggcagacccctccagacctcacactgccgaggaggcctttcccaaagggcgtcctcccgggatgcagacggcaggtgtgtgggaagcgccgtttaaatacacagcacgacgtatccttgtaccgacttctcccggttcttgtttgaaaatactgtagttcaggctcttgatctagatggcagataggaactttcttgtcacaaaaatactggaggaaaatgttgtaaaaatagacttttggacacacagctgttggggctgcactgagctgcaatttttaacatggatttataacttaatgtttctgtttataaaatactaatgatttgcaatgtacttttactggccaattaaaccagatgttttattccgagatggtacagtggacaaaaaaaatagacatgtcgcgtcgccctcggccctccaaaacgcttttctaaaacaattccttttggcgcccgcgtccccattaggccaacggcacattggcccataagctgtgttccctaaagaaaaatcctggcccatggaattaagcggtttgggatctccccccttataaacaaaccgccccgccggccaaacccgagcgctccctgaacctaatccccaaaaggggagcttcctggagggccattcaacgtggaatctatatccaccgggacaccccaaacccgcaggtttcgcaaacataagatttacccaccgccgtgcctttggccaccttcattccgcgaggaaagtgtttggtccaatttcccttacaggccctctcttggacctgaacctggtgaaagcccactctcaaaataagcgggacttgctaggcaacacaccgtcaaaatccttgac

SEQ ID NO: 144210 - DNA, 1211 bp, Homo Sapiens
  misc_feature (155)..(155): n is a, c, g, or t
  misc_feature (211)..(221): n is a, c, g, or t
acccttttagacagatctggctctggcgggtccaatttttaacattggcgggccaacgccaagtagtattttggtcgggaggagagagaattttgccatggtgttttgcggaggaccgagcgctaaaaattggtgttctccccattttcacttcnagtaccactttctcttcgtaataagttcccccccaccccaagagagttgatttgannnnnnnnnnnaatgtattgccccccctttgtttttgagtaaaaatttgtattttcccggggtccgaaagagaatgttctagtgggtcttccctatctggtgctcaccccaggttctcccgcgcccgcggaaggagagggtttatctgaaacacccaggccatcacgcggggggtgagatctacagattgcttcccagcgcgggttcccagtggcggaacggttccttgggtggggttcctcgatggtgcgctggcgtgctgtggacgccggggaaaagagggtttgggggggagaagaaatgttgcggggcgccaaaaggacccctcagttaagattgaaggctggctccacctgcaagtgtccctgacggtccggggtcatcctggaaagcgcttggccgccgccctcccggagggagaggaagatgtcacacatgacggtcgggcagctcaccccagactcggtgatggcgtggaagacgcggtccacatactgccgtaggttctccatgttgttttcaaggttttctccgtctttcaacttcacagggtcgatttcacagggtttgtggctctggcatatctcctcgatggcgggcttcagggtgacatgcaggtaatgcatccccgccagcttcatggtctcgtcgatgcacttggacgccagtgagtttcctcggaagatggtgttggggtcctgggtccgcttcacctccgcgctggcgatggcactgatgaatggcaccaccctgccatagtgtaggaagagccgcaccagcgggacggccgcctcctgcttctcccggcaaacctcgcccaggatgtgggccgcagacgctgacacgggctccacatccgcagacttcaacagcaggtcccgcagagggctgtaatagtcagaagaaaacacgtggtcttccgtgtataccacgttcagccgcagggagcccaggcctcgtgccgaattcgccacccaggcctcgctacttagaacttttaa

SEQ ID NO: 144211 - DNA, 385 bp, Homo Sapiens
tttggcaggaagattcaggaacctttattgagtgtcctcagggaaggtgtctggggccgtggagcctagtgctggactctccggatggactgcagctgcccagtgtgggcctgtgtgccgagctcaccgtaagtacagaactctccgctgtgccggtcccgctccaacacatactggtagcctcggtagcctgggtactggtaggccacccacgctccggagctgactttgagggaacccacatccttgctggcccagcccatggagggcagggatgggtagtcattaactaggtcaaacttgcagccttggaagttgtccccctcaaacagtgtcacacgggtgtcattgtggttcgcgcagagcactggccggaaggacagca

SEQ ID NO: 144212 - DNA, 519 bp, Homo Sapiens
tttttggagcaggagtttaataggcaaaaggaaagaacaggtctctgttagagagggatcctgagaagattgccaagttgtagttaagaatgtcagagtttttataaatgggctcttgaggagggggctcttgaggaggggcttgtgaggaggggatgtcttatctttctagggccccagggtttagttgggaccaggtgtgccatctgtacagagcagatttttttatcatctcttaacccactccgtgaccacacaggccaactcttagtctgtgtttctttgtcctgcttatctggtagggaaagtttctgtgtctgttcccatacatcttcttgaagctgcaggcatcttggtgcgcccggacaagcgctcctagctggaggagggtcgcgttcctgccggatgtggaaaggaagtccaggaatccccttcctgtctttctggtttctctctgggcttcctgctcgggtcacaagcgccagaagcgccggcggctgcggggaaacggtaggcggg

SEQ ID NO: 144213 - DNA, 448 bp, Homo Sapiens; identical to SEQ ID NO: 119728

SEQ ID NO: 144214 - DNA, 695 bp, Homo Sapiens
tttaagacaaaggtgaaaggaagatattaactaggcaggtaagtcatcagttggttaattctttctctagaacttgagaagttagaaaaagctcattgaaaattttcagaaacaactgtgtacacgaagaggacagatccgagggacaccttacccacagagatggccgggagtgtcaagagctatgcgcacgtagcctttgaggtcagagggcaagaaaggctgtcaccagatgctcctacgtttccattacattcacagtttctttcacaaaacagcattcaaaggagaagggaaagttcgcacattactcccagccattgtctttgatcatatgagcaagctcaatgatgaattttccttccttatatttctgactgctctcaaaggcatgctcgtatttccacccgagcgtggtcttgcagttctcgcagtagatgtcggcaaccgcatgcagcccggtgagaaggaccctctcctctgcagggccgcagcccacgttcaccacggaattgaagaggtaggcgcgtccctggctcccctgaaaggacttggagatgagctcgtcatgattggccaggtgtgctctgcagtggatacagctgtacgttcggtgacagttcggcagatacgcttggaaagttttggactttgtcattttcaccatctctcctgggcactcctcactcagctca

SEQ ID NO: 144215 - DNA, 514 bp, Homo Sapiens
aaggtgatattaaagtatatgtattccttcagcattaccttaaaggctagaaaaacgggataaatcttcagaaaagtgtcaaaagtgtcacagtacatgttcaaatttaaacttgaatcctggttcatctttgacttttgttgtgcatttttaatgcttctttatttttgatacacagaatgcagttgaacttgatcttttaaaattgagacatgtaagctaatcagcaaaagacagaaacaaaactgcacatctgtaataatcagatagcaattctactgcacaattcattgattgtaaggtatccctgtaacacagcaatgtttgtctcctattttttgatacctcattgaacttatgtcttttagaaagactgtgcctctgtatgctttttcgtattgtttactgagtgtaaatatttgttatatttttggttaagagaatgtaaaaataccatttattattatcatatctactaatacattggtggaatcaataaagaatctacattaaa

SEQ ID NO: 144216 - DNA, 510 bp, Homo Sapiens
tttagataaactatcttgcatttaatcaatcattacaaaaagtattcatgccacatacaactttgtaacacccaggtgcgtgaccatctataaaaggggggaaacccaacctctatcccttttccacgtgggcaagccaagggttctgagggctcatccacagggctcgccggcctggcctcctgctgcgtcccgggatgtggaccactgacccagaggcttctgagtcctgagcacagataagggctcctttcaggcctttccttgagctgcacgtgaacctgtgtgggcaggcagcgtttgcaggcgtgtttacgggcaggcagcgtttgcaggcgtgtttaccggcaggcagcgtttgcaggcgtgtttacatgcaggcgtagcaccatgtgagaccactggtccagggtttcagaggtcctgctcaggtgaatcggctgtgttctcacaagttcacggagctgagtgggtgtgcaacatgaaatactagtgctgtgagggacagaa

SEQ ID NO: 144217 - DNA, 588 bp, Homo Sapiens
ggcaaggtaaacttagcattttcaactttagaaccgggtcagcttcagggggactgctttcaaatcagccaaagagcctgtcagatcttcttagaaggaagaggttggtagttccctgctctgttttgaacatgctctagtttattaacctggggacattcccattgctgtcttaagtaagtctcatagccagctcctgtcacgtgactctcatatggattcattttcgggccagctctgaacaaagcatcatgaacatatgtgcttttggtcgtttgcaatgtgatggtggtggaggtaggtattggtttccttggaaggcatgataagaaagattcacaatggccaacagtgtgtatgaacaaaaaactgattggagcatcagctagtactgaaggtccttgctttgtgtcagaggcaaaggaacccaaggcgccaagtcctcagccttgagtgtactgctgacaactaaactcacaggctgcaaagcagacctctgatgaagatgcctgttatttcacatcactgtctttttgtgtatcatagtctgcaccttacaaatattaataaatgttccaataataggta

SEQ ID NO: 144218 - DNA, 290 bp, Homo Sapiens
tgagatatcggaggtccagaaggccatggacaggtgcccccagggatcccgcttgttgtctgcaggccaaacaaccagccagggagcagggaaggctttggagcaccaatcaccacgtgcatttacttcctttccacatgtgccctcgacaactatgaattaggcacccacaaggcactggaggagggtggttaacaagacagatgcaaccccggcccccatgaacttacagccaggcgcggaagaaaagtaagtatcccattcagatcattaaagctgtgatgagagat

SEQ ID NO: 144219 - DNA, 521 bp, Homo Sapiens
ttttgatcaggatgttatacctttatatttagccagattggtttggtcagtctcatttcattcattcagagactgaggttcggagagattgtaggggtgaaaggcacaaaatgagtcatagagccaaggtgagaacccatgtcctctgaattgtgatcctgagcaatttacacttcactgtgtggctcctctctgccagcccactgcacaagacggtctctagttcttcatcgtggaaagagcatggctcctcagcagggaagcccctttctgaacctgagaacattcttttctctgctacaagctcaccgtggcaggaggtgggctgatgtgtgatatatttggcaccagtgagttgcagtttatttcagttgtctacgaacatactcccagaaaagagtattttcagacagtccaagcttctttatgctttcaagggtagaaaaccagctagccaaattctgttcgttcagaaagcttaaaagaagataagaaataaactgtttacccaattaagtgca

SEQ ID NO: 144220 - DNA, 637 bp, Homo Sapiens
tttaacagacaaactgcttgtcagtattaggacctgatttcacatacaggtttaatacacttcctcaaaagtcatgccatcaaggtgaaggatgaacatcttccactactgaatgaggctggatgtcattattctgagaagtagggttctcctccacatggattactttatctgaggttcctgcaggagaaacttcattatttgtctcctcttcactaggtgataaggtttcaggcagttcatttgacattagaacttgcaaaggttctgttccattttcaacaaccacttgaatccccaaaactttaagaatatcacatttgcaaatggggcatgtcccatggggtaaaatccaggggtcaatgcaattcttgtggaaaaaatgtttacaagtcagaatacgaactatgtcattaggcttatagcgttcaaagcaaattacgcagctatccccatttggatttatttcttcatccccctcttttactactcgaagttggagttgtccaaatgtgttctgaagatctgttgttaatcgctgccatctccggttctgaatccttgctaaacagaggctatgaatgtgataagagatgaagtatgctagggtagcaggtgtgacaatcccagaagagac

SEQ ID NO: 144221 - DNA, 1048 bp, Homo Sapiens
ggagggaaatactccctacccctaattttgttactacttatatagaatttgtattcatgtcttatatttttcagattctagatattgagctgagttttcattttgattttgttagctttttacttagctgtaaggtaccaaactatttatattgaaagctatatgcactttatttcttaactgaattgcatcaacaatgttcctgtttctttcatgtactcatttactttcaaaaataagctagaatatattaaagaaaatagaaaaaattaccttaaatatataaataagagaatttggcccttctgtgtctgagaaaattaattatatagcaaggaatgaaatttgataaagcaaatataaatgagaaatatgaggattgtgaattattgaaatttgccagtctccctggtgtaaaatgtttttttaaagccttttttcctcctttcggagtcaaggaaagcctttctataagcaaattaaggaagaaaaggtaggattataagatttctcaatggggatgattaaatgtctcatggaaaacttcagttaatgtcatgcatcagttttaacatatgaagtaaagtgttctatccaggattaaagtcaagtttacttaggcaacacaagaatatttcacttagatatgaagaaaggaaacactagtctccattcacttgaaatactctcatggcaaatatttatcctctcattaagtgctttttcaccctataggtaaagcattttttgtgccaacatgttgtcagaaattaatgtatgttcatctcctctgttcctgcttatttttacttatatatttcagcagaaggtccgtggccattcacttcaattttgacctctgtcccatagtgaaagaccatttacaagtaaatactactgggtcgaatatgaattgaacttttcaggaaactaacttttgtgtcctaacctgaaaaagttccacatttggaagacaattaactgaatggcgaagaacataataaacctccatcttaattgttacaaggggatacaactccaagtcata

SEQ ID NO: 144222 - DNA, 527 bp, Homo Sapiens
  misc_feature (474)..(474): n is a, c, g, or t
tttttgattttttaaaattgtgtttaatgaattttgttggtaatagtagtcagcactctcttggcctcagttttgtgtttgttttctagaagttgcaagtctcagctccaggctctcttctctgggcatgccggtgcagaggaaggtcatttccacctctcccgaggctcaggggttgggatagtacccagggaagcccagtcctagggcccaacactcagtctactccctctctactgaaaactcttacttgggcttcagtacctgagggtagcaggaaaagcagtctcctttgcagtccttccacccagcttcctgtcctccttgcactgccccatggtccagggagagaaagttttgtgggagactgccctggctgaatgggtaggtgtgggaagaagggttaagcactgggcagagagccagtggaggaaccaggggacattccctagggagccctgcagccttccccanaggtgaggaaggaacagaggccggaagtgggggtgtgggtgagggcactggta

SEQ ID NO: 144223 - DNA, 416 bp, Homo Sapiens
ttttttttaagagagactggcactttattagagacatatgctttgaaacaaatatcagctagtttaccaggaataacccaggaaaaagacagctaagaagagcccctctggtgtcaggaagaagtttcaaatgctgaacaaatgaaaagaccttttgaggttgcttgtagtcttcatatctggtgtgtagctgcgacagtggaacacgatggaaagactctccagccgcgatgctatctctccatcactgccaacaactgcaatgaggcgagccgcgctcccgcggctccagcctccagcatatagccaccgaatcctgattcctagtcctctacgttgggcaatgagcaactcgacatgaagatacaggaacctgaaaaaaagtgatcgcacttcagcatcatttatgtactgcg

SEQ ID NO: 144224 - DNA, 659 bp, Homo Sapiens
agtttaatttctagtaggataaataatagactgaacccacttcatcaatccgtctaattttcctgccagagtaataatgtattcctatctttgttcatttcttgcttttaaaatgtagaccttgaaaagactaaatacatagaaatgtagacgttgcctggagtttttattttcaatatcaggttacatttcattttgtatttaagtatacaaaatgaatatcaaataatgcattttcaagcaaatgtatagatgagtgaattttgtctggggccagagggctatgacgcagagctctgtaactgaccacctgcagtgacctcgcctgctcctgggcgggcttcagtcttgtgtgaccctcacgcccacggtgaaaatccccgaaatggggttctatttgctggaagatttcttctttaattgcattatgttatttttacatctagctgctcttaccctgagaaattgttcatattctgtgttccatttcagtttttcataaagtaacctaaaaaactgaccacttggaaaatgaaacacatagttgtaagattaatagatccttctgccctcgagtcccctcccgaggacccagtcaatcctgagccctgaatcacaaacaaacaaaaagggcggtgtatcttgtgcattttctgtct

SEQ ID NO: 144225 - DNA, 794 bp, Homo Sapiens
  misc_feature (662)..(672): n is a, c, g, or t
cccaaaggaaaggagggcgtttaggggctttcacacgcctgatcttaaacacagcgccctgacccctccccaccaaaaacggcaaaatgtcatttttgggggcaaatctaaggttttccctacaattgttcaagctttcacactaaaacatttacctaaaaacgggcagaaattcagccttaaacccacaaatctcacgatggtatagaccctgggcccactcaggtttcctgaaaactaaacagttctggagttaggggtttggagaacgggctattgttaaagaaaaaagtatttagtgacacttgttaaagcacaaaaagagggctttattcaggaccatcgcaacaggtatagggaccactgactgcaatggagacttgcagtagggaaagagatattgggctcaactcctcatacagcatgggcaagtggagatttatagccaaggagcggtgacaggccaagataatgaggcatcacctgggggatggtggagactgaagaacctgatcagatattgaggatgatcagctatcaaggatgggggtttattgctaatctgacttagcaaagttctttgcttaaactggattttacaaagaaagtgtacagaagagcctagcagaagattcagaaacctgactaaagttggccaagcnnnnnnnnnnntctttgtatctgaagggatatgttatcctctggacaaattgagggggactgtgcgttaacaatcttagcagtcctcttcagttgtaccaccatctccactttaataaaaataaattttcttt

SEQ ID NO: 144226 - DNA, 443 bp, Homo Sapiens
tttctttcttcacaactttatttacaaagtacgaagctgatattattgcaaaatgatacagctgcttttgcgttttaataataatattgtatatgagagcatcaagatatttgttgtctttcgatgagccttgcgttccacaggaagattcagggaactgtcacagtcaaccggcaacacagacaggctcaaagacacgtgctctttttgagaatagatttgcacgagtgcagaatcttcattttaggtctctattccccatgcttgtaaatactctcgggtttgaagtgtggactggaaagcaacaagttctgcaggctgtttaggaagcatggctggggaggcctcaggaaacttacaatcatggcagagcagaaggcgaatggggacgcaggcacatcttcatataaaggagcaggagagagagacttagtaggcacaca

SEQ ID NO: 144227 - DNA, 264 bp, Homo Sapiens
ttttttgttgtgtttgaaaattagttttagttttaatttttgcaaagcacagacttagcagggttacgatgatttcatgtgtttttcagaagacactggttctcttaaccctattgtggagatatgcttatgttccagatttagtctcttccttcctctgtggcctttggcaagactcttagcctctctgtgcctgtttaacttcatagacttgtcttcgctgacattaatacattcactgccattaagcttatatttattaaa

SEQ ID NO: 144228 - DNA, 406 bp, Homo Sapiens
cagctttccttctcaaagcttttaaacatcattgggaaaacttagagcaacatccaaccaatgtttttcaatacatggaaggaaagatgtgtgtgcttggttttgttttttgctgagacccaaacattgttagtgcaagcccccgccaggggtgcaggtggagtcaaagctgaatgaagagctcgtcttcaatgtagctctccaagctttcagagcaagacaaccatggaccatcctcttcttcagactggcctgtcttcttcttgaacaatgtcactttgctcctcactgctgtcatcttgaagatcctggaatccatttcccatctgttctatgttcccattcaccaaggcggtcactctgtgaatgtggtcctgcttaggtatttcttttggcaactcctccc

SEQ ID NO: 144229 - DNA, 234 bp, Homo Sapiens
gttttatctcaaatttattatgacaaatttcaaaaaatacgttattaaaggttgttcttgtgtagtggaatttggaactgcagtatacacaatagccagcagatgtcagaatggaatctcttaagactcaagtatgaaaacacaataaataacaggagtttctggaaggactgaggctttcttgctcttctgtgcacaacacacttcagtcacactggtctttcttcctcaaat

SEQ ID NO: 144230 - DNA, 471 bp, Homo Sapiens
tttaaacatagaaaaacagcctttggtttgaatctcaaggaagcagagagtgggatggctgtggccttgggcagaaaactcttgtagaaagaaacctccacttgcagttgagttgtatctccttctgccccttctcactaatcctaggttactcaaatagccaagggtctctgcagtagccagcagtcccccctcctaccctgtgtctgggagctgagtgtagaagggggtagtaaaggaagaccccagttcagttgtacccatcccagtcttgctggaacaagggtggaatggggtgaagggcacgtgcccgtgctcatgctgggataatttttggttatactgaaaattagaagagagaaaagagatacccgtttctccctgccactgatcctaagaacagggcccaggagcccgggaatgagagggtgaatcctgctgggagggagcagcagaaggcagcatgactga

SEQ ID NO: 144231 - DNA, 662 bp, Homo Sapiens
  misc_feature (529)..(586): n is a, c, g, or t
gtccacatcatgggattatttttaaaagttcactggtttttagtctatgttctatctactctaatcacctgaacatgtttcctagcttaatttcatgtttttcgtctgtgatggagtgataaaatgaacattttctgtttataactttttgcaagcttaaaaaatgccatataaaattgctattgacatctgattcaacatggtgggatgagggaaggagttaaggatgagattttgagcctgagttctgcagtgtcttttgcacctgtctcgcctttccttcaccattgtcattccccagaattcaggcctaccttatctttcacatttgtgatgcatttacagaaaaattggctcagtcagggaagtaatagttggtagtgtgtatccagcattgctcacgagttttaaaaataaccatgaaatatataatatacatactgaaagtacatttttctccaaaaaacctacttctcattaagtcatagagtgctaacactcatgtaatcccagtgtcttagaatgttcnnnnnnnnnnnnnnnnnnnnnnnnnnnnnnnnnnnnnnnnnnnnnnnnnnnnnnnnnntccagtgagggcttcaggctgctcacggtggaaggcagacaggagatgacatatgcagagatcacatggcggccgc

SEQ ID NO: 144232 - DNA, 436 bp, Homo Sapiens
attttctatgatgaatacttgtggagaaactgtgacaaatccattgatcctgatatttttattgttggagtcttgttgattctctatgaataatttctatttgattgtactgtgtagagttaatacccactagggatatgttaataaagctacaaatgcatagtgtaatatagaatagcaagatttttttgtgaacaatttatatagaagagtaagttgttttttaagtgttaggctcatttcttttagaaacttaaaatgttataaaagttttttaaacattcaatatttttaattataagagacatttgttactagagccaattatttcaggtgttctaattggagtgttgattttattacctcatatacctctagaatgccacgtgttctgttggggataaaattgcacaataaatgtcaagtctctgttaaa

SEQ ID NO: 144233 - DNA, 436 bp, Homo Sapiens
aactttatattgcagtcagcttggtgctttccgaaatgccattagccatcaggaaacccttgtagttggtgccttgccagccagaacctctgggacccacggacctgcaaagaggccgagtggaaaggtgggggccggcgcagggatttcaggatgaggtgaaagcgattcagtgcgcgtctgcccttggccactagggggcagctggcggccttccctgctgttgtcttcctgcagggtgagaggagcaggagccgagctccacccccacgccagccttgggcccggcctgggatcactgctgggaacgtgagagtgaagggaggacgcctaccccagcttaacttgtagaaatggccccagatcactgatggctgttccctgccccttcccttcaaaacacaacgcataaagcagtaatactaattaatactga

SEQ ID NO: 144234 - DNA, 580 bp, Homo Sapiens
  misc_feature (556)..(556): n is a, c, g, or t
ttttaagtttccacagcaggacctttccattttattgtctgtaaactcttctttggtaaacaagaaacccaaagagaaaaggagcacgccgagtaaagaaggcaaggaaagggcgggtgccttccacacacaggagttctgagaggacagctacaccattggcaaggtggtggatggaacctggaagtttggggtgggtggtggcatgggggaccggcagaggggagcgagagggaagagtccactctgttggacatagaagcctaaatcatacagcgagggagctcatgcatcacagcgaagagaattagggaccctccacccatgcccccatcaccttccatgtgtgtgatccactgagcaaagactgcctgtgcaggggtgggtgcaggggctcaggacagccccccagctgcccatcctctatctctcgtttcctgctctgcatgcaggtgtgtgcatgctgttaggtgtgggtggtgtgcgctcacggtctttgagtcttggtagactcatcatggcagcagaagcaaggtttgggggaagtggaaaacanccccgtcctcactttacatggggg

SEQ ID NO: 144235 - DNA, 638 bp, Homo Sapiens
  misc_feature (588)..(597): n is a, c, g, or t
gcggccgccttgggggttccgcttcctgttccatttcacctaaaggctgattgtgcaggcccagcactgtggctggactgccgcgccacgggcaccaggacccctaagaccaagtgacaactgggagagcctcagcatatactcttctcctccgatctcacagcctgtcatgctgctcagtgtggttctcacccctgcaagctcaaattcagttccctgaatggagtcaggtgctggaggccgtggcagcggagggtggttggggttggggctgggggtggactggtgtgagggcagaccagggccaggtagacggggctgtttggtgcctgaaggatggcagacgcctggtgtcaggaggggccgccaccaaggagcagcagctggggcagaggagctggggtcaggggccacccctctctgccgatctccctgcctgggctggctgtgaggccacctttgtcccaggcccagcctcaaggcaaggagggcgcttcactgaggtgtgaattgtacgtacaggctttttatataccaaaagtattttttgactagaccattcaaagctacccgaactatgttggaaannnnnnnnnnctcattaaaatacaggcccttaggctctatttttcatgtaa

SEQ ID NO: 144236 - DNA, 554 bp, Homo Sapiens
  misc_feature (319)..(319): n is a, c, g, or t
acacttctcacaacggattgtataggtttttgttctgatcaggacacgctagaagtgaataatggtctttagaaaacatattgcttatattccctcagctggtggcagcagaaaatcattcaagaggtaaagatagcctgggagtctgttctttaaggcttgctcgggcttctttgatcggtcatctacctacctgttttttatatatagtgacacatgcacgcacctaccctttgtcaatggcactatccttaaatggcagttaccagttacctcttggccttgtcctgataaccatcacgcctcagcagtactgcgnggggtgggggttctcctggggagacgctgaaagttaaaatcagctgtttcactcctctcaggaacgtatcctgacatttttgatagacagcagcagccagagacttgctttatttctcttcagataataaaaccacttgaaacaaagaaactcctccaggacattcccatcaccgttgagatgatgacacactccttggctcagttacagtcattgaaatggggagaaaatttct

SEQ ID NO: 144237 - DNA, 1134 bp, Homo Sapiens
  misc_feature (607)..(607): n is a, c, g, or t
ttttttaggttgaatgaatgatttatatgttccatgtttatgtaagcacttaacttctttaaaaagaaactagttctttcaaaaagagctctgaattctgtctctggttagaaagtgtgaacaattctcagaacttgggacatgatttttcttctctctcacttcttataagcagatgccccttttcagggcattttcaggttgcacaggcagaactaagtgagaaatacggctccagaggccattcagtttgtctgggtccatatgattgtaggagttgggtgtgttagaattggtgaacttgactttaagaaaatctcttactttttcttcaacttcctttaggcctagacttgttccaagtgtctcttcctccaataagacagtcaggactaaggctacatctttgaaggctgcgttttcatggtcacaatatttgtagaagatcaaagtagagcctgcgggaaatgactcaaagcggtgtaccacagctgcattctggccattcttaaatccattgctcagttcttggtctacctctagtttgacagtatcactgtcttgagtagctttatctgtcccatcaatccggatggcacggacactnacgaaaagaagaataggcatcagcaatttgttcactcagacacctaagtgcttcttcagcatctcgggcagcagtgagcagtaagatagcaggctgagaccgaggatgggagctatttagatgtttttccaggaatgtttggctccttttccaccgcttctcatcttgaaccttggtacttattcttaagttgattcaatctggttttggaactcttgaacagcagtggtttctaccctcaggagtactaaagtaccaaaaacttcccagagggcagagcagcttttagaggaggtagccaccacgggttccttttgacaaaagatgctttttggggttgtccagtcacttctactcagacaaaaaagaaatgacagatataaataccactttcttagattcaggggcaagtgacttttaaaatcaatatcagtctttataaacattaggtaaaagaggaaggactttaaagaagaaagctgataattttcttaataaaataatttatcacattctcaagaaaaaaa

SEQ ID NO: 144238 - DNA, 468 bp, Homo Sapiens
tttatttcgactctgtaatatgagctttccattttagcgtcggtgtcagctatttaagcagctgaattggaggtttaggtcacatggggaggaagaaagtataactctctatagcactctcagacatatttttaaagccttcaaatgtaaagctaaaaagtagaacttcttttgcaatgagtattaacgtattttggtcataagcctcttatgtgtatgtcatttctcattacatcccagaatttgttctgttttcctaactaactaaataaataaacaccttgctgccttgcatctctaatgcaggtctatgccagggccagtccagaagcagtttggacagaagtcagcatggttagaggacagatggggactgatgaggggagcaggaggcactggaagaaggcacaagatttaccctggtcaaaagttccagtggcagttacaatagaaataggtcatgtgggc

SEQ ID NO: 144239 - DNA, 501 bp, Homo Sapiens
tatttagacaggctttatttacagtacacatgttttcggctcgttattctggaggcgggaatggaaactgggcagagcaggagttctccccgtcagcctcacgtttggaaggagttgagagtcagccgagtcgaaggatcccgctcctgcttgctgtgttctctagggagataatgtcgaagaaaacagtgaaggggtgggagtggagggcgctggggaacacagagcgtcaggctctcccatagtgcccacgcttcaaaatgcataacacccagaggaaggtgagacatcctcatgcccattttagagggttcagagagggcaagggccgcagaaggtcacacagacaacaatcggttgtgcgaaaagggtctttaactccatttcttgggcttcctcacgggtttagacctccaggattacccaggtcttggtctctcgggattccgggaagggtctttcctggcgcctcgagtggaggtcaaggccagccaggcgact

SEQ ID NO: 144240 - DNA, 355 bp, Homo Sapiens
aagatagcaccaatttattctcttacatttctggaagtcagaagtccaaaataggacttacagggttaaaatcaaggtgttggcagagctgggttccttctcacagctccagggaaaaatgcatttccttgtctttactagctcctagaggctgcctgcatttcttagctcctggccccttcgtctgtcttcaaaatgcatcacttcaagctctgctttcatcgttccatcttctactgactttgaccttcttgcctcccttggacttgtttacatgggacccatgggaataatccatggtcaatgggaataatcttcccaccacaagatccatactttaatcacaccagcaatg

SEQ ID NO: 144241 - DNA, 670 bp, Homo Sapiens
agtggccggccctctcttgacacattttccacacatctgcttatgcagtacagatgtaggcctgaatttcccgctactccatccccaccctagaagccaccccaatttggacccgtaataccggctcaggtatttatgcccagcaggtggctacccaggctactgttaagactcgtacttcccagtttggtgtgggcagctttcagactccatcctccttcagctccatgtccctccgtggtgccccaactgcatcgcctggtgctgctgcctaccctagtctcaccaatcgtggatctaactttgctcctgagactggacagactgcaggacaattccagacacggacagcagagggtgtgggtgtctggccacagtggcagggccagcagcctcatcatcgttcaagttctagtgagcaacatgttcaacaaccgccagcacagcaacctggccagcctgaggtcttccaggagatgctgtccatgctgggagatcagagcaacagctacaacaatgaagaattccctgatctaactatgtttccccccttttcagaatagaactattggggtgaggataaggggtgggggagaaaaaatcactgtttgtttttaaaaagcaaatctttctgtaaacagaataaaagttcctctcccttccaaaaaaa

SEQ ID NO: 144242 - DNA, 456 bp, Homo Sapiens
catcttagacaagcagcccctcagatgttacaacaacagcctccttgattgatcagtgtgcaaacaatgcaaagaggcaacatgaactgtggagcttttcaagcccatcagatgagactggctcagaatgctgccagaataccagggatacccaggcacagcggccctcaatattccatgatgcagccacacctccaaagacaacactctaacccagggcatgctggaccctttcccgtagtatcggtacacaacaccacaatcaacccaacgagccctactacagcaactatggcaaatgcaaaccgaggtcccaccagcccatctgttacagcaatagagctaatcccctcagttaccaatccagaaaaccttccatcgctgccagatattccacccatacaggtttgtatttgagttgaatgaggcttcattaaacttaatgttaattacaaa

SEQ ID NO: 144243 - DNA, 399 bp, Homo Sapiens
tttatcttacggaattggctcacacgactgtggaggctgagaaacccagtccgtcaggtgggcccggggaagagttgccgtcatagctcaagtccgaaggccgtctgctgaaagaattctctctttggcagaggtcagtcttggttctattgaggcctttgactgatcggatgaggccacctggctggctgtgcatcgtgggtcttctgccctgggacatgggctccgtggggcagtgctgtgtcagagtacccctgccatgcccctggcacctctgtcacctgctacatgaagggacagataaaccggcaggtgtctactctcaggctctggtcgagatgcaggctgaacttctgggatgcctagggaagcaggacccttgggcaggaccccggtcac

SEQ ID NO: 144244 - DNA, 315 bp, Homo Sapiens
tttgagtgaggaaaaaattagatttaattccaattacggtctgttgcttccgtgccatgtgggctcctgaacaggtcacaaataaagaagcaatagtggtagagatatcattcagagtaccactatttcccaagatgtcaggtggatgaatacgataagtgtctttgcttcattaaggcaacacctgtaacaagcaatccagggttcctgtgtagccagaacatctgccatctcgaagcactctctgattcatcatacgtgtcctcacaacatcaacagggtttgaggccagggcccctgccagaccacaggtga

SEQ ID NO: 144245 - DNA, 942 bp, Homo Sapiens
  misc_feature (413)..(425): n is a, c, g, or t
ttttatcaagtgagcattttaattatgaaggaaacagaaaacaagttagaagactgaaggcaaaactgacttgttaataacagcaacatcactagttttatacttcagaggacctaaagccaagatgtaagtttcaaggttacagactggtggcatcagaatatatccttaacacatgtgtcctgctccatcctccctacagcaggctacttacctgcccttccccagccctgaagaaagcccaggtaaacccagagggttactgaaacttacaccctttccaaaagccttagttaaggctgatgagattaataacatagagactgagtcatcccagtaacattaagaatttaatctacaaacaccaagttagcagggaaagtgacccctgccagtcccttccaatatattcnnnnnnnnnnnnnaaagaaaatacctataagcacaatatattccatttagatgatgggggagaaatggtttatcaccattctgagatggcagaattaaagcttggattgactcttctacgctgggtggcttttccaactcattaattatttcaaatatagatattatagattcctttggtttacaaaaggctaccttaaccctccagagaagatctatggacacaagtagcttgctgcaggaaagcattttacaagcctactagaaagccagtctttttctctgctcaaactagatttcgttctggtaacatctctccattcttgcctttttcccccatttcaagttgcctcaggtttctgattgttccagaacacaccttctagccattttccttaacctccatttccccttcctttaagcctcgtccctcctttcttttcaccacatttatttcccaaagggctccgaacactgcagtctttacgtctcacttagagggtgagcaccacttcatgaaaatgtgtggag

SEQ ID NO: 144246 - DNA, 547 bp, Homo Sapiens
tcaaagggtctacttgagagatagtggtgtttactgctgcagcatgtatcacaagataagaaatgaaaaatcaatctttcttaccaccctgttctctttcccttttttatcttttcccttttgtcaattatagaattatagggacatttttctctgatagctggaagttgaacctcaaccaggtataaaagatgcataacaaccttttagcagtaagtgtcaagtgagtgagcactatgattatcaaggtgactttggaaaccttttaaaaatgcatttttgcaaaacaagataacatatattgataaaaagtgactctcagattggtaatgccagaaaaaattttaagaggactcaccaaaagtactagatctatgtaagttgtagaatagagtgaagtttttttatatatttgtggtagcctccatcttttaaactttttgaactcagtagaaaaacagactgaaattttaaagacatgcagtatttgtatcattttaaattctgtaacactgggaattaaatatactcaactttagaggacaaa

SEQ ID NO: 144247 - DNA, 1148 bp, Homo Sapiens
  misc_feature (1032)..(1066): n is a, c, g, or t
cattgtatgtcgctgaaacttgtctgtactttacgtgccatgtggcccccttgcggtgaatatatatgttctgagccgtgtaaagtgggattccccactgcgcgctggaattgcacaagaaggttgaatttttcgggtacacacatgtcccacgagggcttgcgttgccttgggggcacatgtatgaaagtattctcccgaggatgtacaaaccgagctcccgtggtcgttgaacaatcacggagtccgcatgctcgcgtcgtatacagagtctgctttccggtttagaccctgataaattccagtcttgactgacgatgtctgaggtgcaagggtggtatttggttgaaacaggcttctgacccgttgtgcttttgtgcagtgctatcgataaattgctgaagggtgtctggttactgggttgatggtgttcccattgtttgctgacggttgatgaactggttccagttgtatgagctggtggggtgatggtgggtggcagtgaataaggggctaagctagggccgactgtaacttcagtaactggaggagctgtgtgtgagttgttgggtgtggcctgggttgtgaccagggtgtaggtaattgggctggtggttgcagtgttttttgtagttgctggggtagttgttggaatttttactgtggccgctgtttgaaaggtgatatgaccatccatgaatcttgctgctaaagtttggtgaggtgcttgcttagctggttgctggacaggtttttttatgtcctgtactgttgctgctgcagtaggttgagaataatctctggtttctggaaatgcttttgctctcatttgactgccatcgtgcaaaattacggccagggacgcgaagagcgcggccgccgcgctgagctgccggggcatggtgggcgctgggcgaggttctgcagcgtgcggcgaggtccgggcaggccccgaatcggtgccagagaaacctacctgtccccggccgtaatggccgaattcccgggcatatgtccggtaccgtcgactgnnnnnnnnnnnnnnnnnnnnnnnnnnnnnnnnnnncggccgcttcctcgctaaactacttccgctgcgctcgtcgttcgactgcaaccaggatgcgccatattaggtatatagtctg

SEQ ID NO: 144248 - DNA, 403 bp, Homo Sapiens
cactttttctaacagcaatatagaaacaaataatcataaaaaataaaagtataaatcgtccattgattatgtaatagcacttggtattgctacagggtgtgggtcttgaactcggtcaggcatcgtcaagcctgcccaggccctccaggcctctttgatagctactgagcccctgaaggcatcaagacatgaccacgcatggcagtgtcggtggagagtttgcgttttacacccagcgatgcttggggatggcagagagatggatggataatgagtacaactgcaaacagcactgtacacatgtggtgagccaggaggctgggacggaggttaggccaatgttgctgctgactcatagaacccacagagagcagggacttcacaaagctgaattaatgtgggt

SEQ ID NO: 144249 - DNA, 1090 bp, Homo Sapiens
  misc_feature (197)..(238): n is a, c, g, or t
acgaaagaaaggttcccttccccaaggattctcccaggttagcgcgtttttcccagttcggggagtttgtaaaaacggccgggcaaggccttaggttataatacggcctcccttatgggggcccctttgtccaaaaaagctgggtacgggtaagctggggccccctcgagggaatactttagaggcgccggcccttnnnnnnnnnnnnnnnnnnnnnnnnnnnnnnnnnnnnnnnnnnttttaagactcaatatatgcatttatttaaaaatataaatatggaaaaataatttaaaagactagattgaatgtccctagattttcacacattcaaagactacattttttcaagagatggaatgggacacaaagcaagaatgaacggttctatactctcgaagaaagaaacccgggacatggtggggatccctggcctaggtgttcaaggtggtggcatcctgaacttccagcagttccctagcccggttccactaatgtcattccgcggctggagttaaagaagcaaacggtctacgtcaccaagaccatgagacggtttcaaaaatggtctacgtcaccaagaccatgagatggtttcacacaataggcttggcctatgagaggaggggaagcagcttcttactcagctggggaggcccttatactggggtgcaggcctcctcgccccatggcaggcgacttgcagccaagtggaggggaaccgtgccacgtcctggaggctgtgtggcttcctcagctgggctctggggcccactcagaggtctgaggccccaggggtcacctagcccagatccagccttgctctggatacccgtgtgacatggggtggtgtgtgtttgaggggctgccaggaggacacagatggacgcctgcttcgggtgtggagggagaggctggtgcagagcacgggggtgttggggggctctgtgactgcccccagggcacaggagctgctcaggaacggattctgacgtctgcccccgagagtggctggggtccgtggtgctgctgggcgggtcaaaccctgccacccatgctgtatggacctgccatggagacgggggtcaag

SEQ ID NO: 144250 - DNA, 310 bp, Homo Sapiens
acccatttattgctatttggcccctgcgttcgtgcctccatttgccagaaaatgagccaccggcgacacgaggagaggcaggagacccccagcccttgcacaaaacccactcccttggatgctgtcctcagcgagggtggctgggggccaaccagggggcccacccgcagagtggcagaggaggcaggttgacctgcggacgttgagctctgtggcgaaggtcctggccttctggtagaagaagagcgacttctcacggtccaggaggaagttgtggtagatggtggccagccgcgtgtagatcttcagc

SEQ ID NO: 144251 - DNA, 502 bp, Homo Sapiens
caataaaaccttttattgttgattctgttttaaaagaacttcttagaattcaagtggcaatcaaatgttatcaacgctctgtcccctcacgtagctgcggacagcagtttcaaagttctgtgccaaagcatttaccctgaaggctaaaatcagaccatctttaccacagtctacttatgacactcaggagaatcataataacttctctgcattgcagtctctgagtaatgggcaagggagaattgaactactgccgtcttcctctgaagcatcaggtgtttggctcagctgatgagaaagcgaaaccacatgcgttttccactccttcttagattggtaaatttaaatgaaaccagctgccctcgattctccatacagtctgcttggctaaaagcactcctacaatcactgtaatattcttaaactttcctaatacaaccccaaattagggcattttaagatgaaatgcctaaataaacataaatgaaggaaaagctcccct

SEQ ID NO: 144252 - DNA, 261 bp, Homo Sapiens
gcggccgcggggtcacgggaaactgccggaggctttcagggcccagggcccggcggggaggcttcagcgggcctgcattttcttaggcatccgctccaggcgggttcaagttctcaaccagaccttcggcgatccagcgcctagggaacgtcaatgcgggtgacattgcgcccccagctgtgtgtcccttgcgaccgggccccccgaccgggcgtcaccgcctgcgactctgagagccctgcgggctagagaccgtgcggc

SEQ ID NO: 144253 - DNA, 479 bp, Homo Sapiens
ttttgtaccagcttcaaaaatatttatccaaaaagtaaggcatcaactttacaaaaaaataattgaaggaggggaggaagttggaggaatgagaaaagagggaataagaagatggtcccctgaccctccaggggccaaccccagcctgccgggcatctactctgaaggggtcacaactcagaccaaacttggcatctcaccaactatggggtgggcaagctgggcggggaagctgggagacaccatccaggccaggaagggctcctgtgtattccagtttaagcagacagaattcggggtgggggagagaatcccgatttgtgataaaaggatcctaagtccttagtgcagcaggagtggctgggaaggttgcagggcccacagcaaactccatagccttcctttgaagcccagggaaaggtcagaggctgccagccacagaggagggccttttttgaggatctccagagtgggcgccc

SEQ ID NO: 144254 - DNA, 513 bp, Homo Sapiens
agcaacgaggacagatatccttcacatgtatctctctcctttccggcaaaagcaaggaggaaaaagcatccggcgagaagacttaagtgacatactcaaaagagaaggagtgtggggaggtcgcagattctgtagccaagacggctgggaaaaggacggagcgccacggacaggggacccgcggcctaacctcggggctgacccgccgcgctccctcgtctcctccgcaggtcctcaggcagtgcgtccagtcaagcccgctcggcagttcccgccgcagcccccgagatacagccagggccggcgcgcgcagccggggtggagggtcggggaatgaggccgccgggggcgggacgccggctcccggggccgcctctcccagggccagaggcgagccactcgggacaacttcctcttatgcccctggcccgggccctcgactgggttcccaggagccggtgagtctctcgcgctatctccagacccaagcgcgaatgccagggccgcggccgc

SEQ ID NO: 144255 - DNA, 536 bp, Homo Sapiens
aaatagtaatacaataattgtgggataattcagtataacccacttttaacaatggatagaacattcagacagaaaacaggtaagcaaacagcagacttgaacagcgctatagacaacatggacctaacatgtatacaaaacattctacctgacagtggcagaatatatatttctctcatgcacagataggacattctccataatagatcacattatgtcacaaaacaagtcttaacaaatggaagactgaaaacataccaagtatcttttctgaccataatggaacaaaactagaaatcagtagcagaaggaatactggaaaattcacaaatatgtggaaatttaacatactcttgaataaccagtgagtcaaagaagaaatcaaaagggaaattagaaaatatcttcggatgaaagcacaatatattaaaacgtgggatatagcaaaagcagtactgagggaattttataacaataactaaatttaaaaagaaaaatttcacataagctaatgttacacctcaaggaactagaaa

SEQ ID NO: 144256 - DNA, 370 bp, Homo Sapiens
tttaattggcttatttctacaagaaaatggggacttttttgtaaattactagaaaaagaatttcagcagtagcttgagaacattaggatttttgtaggataactcttaccatcttatttttcattttgccagatagaatgcttaacaccaaacgaccatattccaagagatctattatgaaactgtgttaatatattttgtaaagccaaagatatggtagaaaaactcatctaaaagagggagagcccacagtattggtgataatcatgagactctacacttgaacacagcctagtattcaccagtcttacctgtttccatacacaatcctgtcacactggaggatgtgtatatgctgaatcagcaacaa

SEQ ID NO: 144257 - DNA, 728 bp, Homo Sapiens
tttcacgttttacatgtacagagtttatttgttgtttttacttaaaaagatacccaactgaaatattactaatgattaaaaacaaattcagagttaattacaaattcagttgaaacaaaatttcagtttggattaaatttacactgtgaattacaatgaagtgtcactcaattgcaaaatgatttccattcatacagcattttgtttttcataaattttgacctctgaccaaagaaaacacagctttttgggtaacattcatgaaaacattgaagcctataatataaatttttattaccactttcaatagtcattaatataaaaagttaacaaatttaaacaacaaagtttaagctggggagagccccctcggggggcatcggtcaagctgctgaaccccctgctcaccgccagcagcaggtgcaacctgggagtgcgtgaatgcgtccacccacaggaggagcgctcctcatgctctgacagttctgcgacaagcaccagtttcaaatcaaacctagtataacaagtactccataaaacgtgtgctaaggcaaagaaataagcacatttggataatacaaatatccagaaacaatggaaaagaaaggcttctattagagaacagaaggcttagcatatatgagtgcgcaatgatcctgatagctacggatactgtttttatttacagtggcaaaaactttattactacagaaggtcactgacagaca

SEQ ID NO: 144258 - DNA, 748 bp, Homo Sapiens
  misc_feature (169)..(202): n is a, c, g, or t
  misc_feature (393)..(393): n is a, c, g, or t
ttttttacaagaaaatgtatttggaatcacttatgtaaataaagtttaataatcaaaactctacttcccctcaaaaacagatgagtaataagaaggaaagaggttattggactgggttatctctcagaatctgttcggctctgaatatttcaaaaacatttggttgggnnnnnnnnnnnnnnnnnnnnnnnnnnnnnnnnnncgatttgggcttttttctttttggtctggatgttggtggaatttccccattcgtaagacttttctgtgagagggaagtaagagaagaagaaataagcattttgggttcctacattggccttccttccttccgctggtacatgtagttggggaaagggtcggttttcttctttagttctgttgaggccccanagaagcaaaggatccccaaaggacaacagctgtcaggcctccatgtccaaggctgagcccaaatgcgtggggttggacttcccagccccatcctgccccttctctccgcactcttctgagacctggcagatttgcagtccagccctcccccaggaggtaaatctgggatgtcctctgaggccagagtcctgaaaactgtgttcaggctggggggcttctgagcagaggcacacagttcagcgattctgcagcccagggctgcgtccagtgctagctccctcctgatcgcctcctcagaaggcctaggggccccagggaagcagaccaggatgcaggtcatgttgtccaggctgcc

SEQ ID NO: 144259 - DNA, 989 bp, Homo Sapiens
  misc_feature (41)..(75): n is a, c, g, or t
  misc_feature (796)..(851): n is a, c, g, or t
gaacgacgagcgcagcgagtttgtgagcgaggaagcggcgnnnnnnnnnnnnnnnnnnnnnnnnnnnnnnnnnnncagtcgacggtaccggacatatgcccgggaattcggccattacggccggggagagttagtggaagggacttaagagaaagggcgtggtcttttggaaaggggcgattctgggtcgtaggagccgggccggaagtattgattagtgctggaaggtggaagagcagggcagcctggacaacatgacctgcatcctggtctgcttccctggggcccctaggccttctgaggaggcgatcaggagggagctagcactggacgcagaccctgggctgcagaatcgctgaactgtgtgcctctgctcagaagccccccagcctgaacacagttttcaggactctggcctcagaggacatcccagatttacctcctgggggagggctggactgcaaggccactgtcattgctgaagtttattctcagatctgccaggtctcagaagagtgcggagagaaggggcaggatggggctgggaagtccaaccccacgcatttgggctcagccttggacatggaggcctgacagctgttgtcctttggggatcctttgcttctctggggcctcaacagaactaaagaagaaaaccgaccctttccccaactacatgtaccagcggaaggaaggaaggccaatgtaggaacccaaaatgcttatttcttcttctcttacttccctctcacagaaaagtcttacgaatggggaaattccaccaacatccagaccnnnnnnnnnnnnnnnnnnnnnnnnnnnnnnnnnnnnnnnnnnnnnnnnnnnnnnnncccaaccaaatgtttttgaaatattcagagccgaacagattctgagagataacccagtccaataacctctttccttcttattactcatcatgtttttgaggggaagtagagttttgattattaaactttatttacata

SEQ ID NO: 144260 - DNA, 550 bp, Homo Sapiens
tttttcagcatctttcttttatttattgtactggaggagcaggaaattacacaagcctattaaaggctaagcaaattccaagtaaattgcataaatgggatttttttaaaggacacaaaataactctaaaacaatctatccatttcaaaacatcatcagatacctggggactgcgcatgaagagatgtgctcagcagcatcttatacaaattatccagactcaagccttttcctctcctatccagcctcatctcctggacccacaaaccaaaagagagtgcctgggaatgagagagcaaaagagagacagacagacagggagggctttgatggaaaccaagacatcaggaggtctctgcctctgattcagggttatttgaatcaagggaactcatttggcctcaagcacttaatcattttattcctctttctggttttattttgagacattaagaggaaagaagcattatggggattgaagagggctttttctctttctagctgctgcttctggagtcccttacccaatgcccagtgcgtattgtttggg

SEQ ID NO: 144261 - DNA, 188 bp, Homo Sapiens
ttttaatgctcagggccagtgttttaagaggctcctacctagtagtcacataatcctagcaagagtaaatcaagctttagttatttagaatgagatgctagacataataatagtccagttgccaattttgaacacttatcttttctgccctataattttttctcttcaagactctattcctttgaact

SEQ ID NO: 144262 - DNA, 991 bp, Homo Sapiens
  misc_feature (391)..(445): n is a, c, g, or t
attttttattctgaagcttgttcaatatggataggagtaaaacccaccgggagaggtgtattcaaagggttatttctaaatccatcccaccatttcctttacaaaggtcaacaattcttttctggctgggatataatgcacgttcatgttggcatgtggcataacgtgatggtgacgaggcctctcattggctgaaaaggctgcattgatagcaaaatgcttcacataggattccaaaatcgttatgatgttggtctggcatggaagtttcactaaccgtttcctcctgttaatgtagtaacaatcatcctccagctgcttcttcagaacttcagggatttctatagttattgttctttcttccatttcccttcttgtttgaagctctggnnnnnnnnnnnnnnnnnnnnnnnnnnnnnnnnnnnnnnnnnnnnnnnnnnnnnnntccttgttttcactacagtcagaggaactgcttaatgagttttcatcattttcatctttttcttcagtggggaggccttttaagacagattccacaccaggccaacctgcagcgcttcttctttcttcctgtgctcctcaggcgagctacagcttttcttgccaatttacgctgtaatctacgattttcatcggtatcacgaagcgcatgatcttctgctgcccatctatcccagcttctgttccaaccattaaaatggatcagatattctgggatctttctgcctttttcgtctttcccaacaataacatcaacaatcttggcatcgtacagcactcgcgccttggtggggtcaggctcgaagcacagcactttctcccctgagtggaatttaaatttcatgccctcgctcgcgctcatttgctcatcgtggcggagggcgaggctccggggcgggcggagcgcgccggacgcgtgggcggacgcgcgggtcgacgatatcccgggaattccggaccggtaccagccttgccgggcctagcgcct

SEQ ID NO: 144263 - DNA, 910 bp, Homo Sapiens
  misc_feature (188)..(202): n is a, c, g, or t
tgctagggtcacagcgttggccgggaaagagggtccgtaaatggccccggctgtcgccagggttcagcgaaaaaaaggactttttttcggggagaaggcgggttccccagtgggggcccttacggcggaggggaccaccgctcgggggagcagaggggggtttcaggatgcggccgtggccccttctnnnnnnnnnnnnnnntccaccggggtggtcagcctgactctttggggggactggagcggtggaatggattcaaccaagggcgggaccgggacgagagttcctgcctgggctccctgttagtgcttggggcactttccgtaattggaagaaaaaatttagacgaagtcacctttttatactgagctggttcatatggatagagtaagaccaacgggagagtgtaatcaaaggttattcttaatccatccgccatctccttacaaaggtcaatattcttttctgctgggatataatgcacgttcatgttggcatgtggcatagcgtgatggtgacgaggcctctcattggctgaaaaggctgcattgatagcaaaatgcttcacataggattccaaaatcgttatgatgttggtgtggcatggaagtttcactaaccgtttcctcctgttaatgtagtaacaatcatcctccagctgcttcttcagaacttcagggatttctatagttattgttctttcttccatttccctttttgtttgaagctctggttcttctttcacttcagtcttttcttcaatatcactttcttcacttattttttcatccttgttttcactactgtcagaggaactgcttaatgagttttcatcattttcatttttttcttcagtggggaggccttttaagacagagtccacaccaggcaacctgcagcgcttcatgg

SEQ ID NO: 144264 - DNA, 443 bp, Homo Sapiens
tttttttgttttataaaatcagatatttaatatttggatcagatatgtgggaggggggaaggctatatatttttggacttcttcctttttgtcatataaagctccaaattgattttatctttgttgtttttgtggatggaggtgagtactacaaaattgaccaatttagtatgtcagggaatgaagaggttccctggtcaatgttacagcctggttcctggaaaaagagcctgccagcgtgcattgctaattcccattcacacactgacttggcacaatttgctgtgctgttgtatgcaatgatctgcatcaatgacactggccaagggagaagcagaaacagaaatgaggacatgtaactttcaagaaaggaagagtatcatttaaatgaaaatttctctgttgcaaacatcagagaaaatgtgcaatcccaggccaataag

SEQ ID NO: 144265 - DNA, 860 bp, Homo Sapiens
ctcttgggaaccaagcatgtggacagtgcagccctcatcaaaatccaggagcggagcttgtgtgtagcatcaccaggtttcaatgtaacgcccagtgatgtccgaacactggtgaatggatttgccaagaaccctttgcaagcccgaagagaaggactgtatttcaagggaaaagattacagatgtgtccgggcagatgaatattctctttatgccaaaaatgagaacactggtgtggttgtcgtgaagacccatctgtatcttctggtagcaacttacactgagggcatgtatcctagcatctgtgtggaagccacagagagcctgggagactacctaagaaaaaaaggaagttaagtcatcagaggcccatgaaagacaattttattattttagaagaaaattgaagagcctaaagaaaaaatattttatggttgaaaaaacactagacagaaggcactaaaaaagaagaatgaattaagggagcaatttttattacttccagagatcctcttctttcactggaattacttgatcaactgttttttaataagtgttggtcatcggcatggaatgagagagcactgatcatttcacagagcatatctattgggaggctcctttctgtgaggctcttgtactcctacacaccttgctaagtatgccaagaatgcaaggctctcaccactctttatccaagacatttctcagggttaggttgcagcaagcaaccttgaaaaatgaagggatgtctcccatcaggacagagagcaagcttgcttactgtttgctataaaagcagtggagtccctgagctcagtgttacccctcctgtaatacaactccctgcatgtgtgaaa

SEQ ID NO: 144266 - DNA, 448 bp, Homo Sapiens
ttaactggaaataattaatattttttatttataaggtactgtgatattacttaacaaaatatctctgttaagcttaaattgataatttacttctattttgctgattataccaaacatttaaaaatttgaaaggagaaaaatactacttcctaacaggaaattatgtctagcaagtctctcaatttctggtaaattctctaattagactttggttaaattagattgggtattgtgattcttcagcttctatttccagagcttatttaactcagcacatgaactgcagtgcctcgaattcctcccagtaaacctgttcttgggtcttagaatgtttgctgggacctggggatgggaacagattatcaactagaggtatgggcttagggaggggaaagttttccttgtccatgcaccctcttagtactttgttgctaaaaatgattttcct

SEQ ID NO: 144267 - DNA, 1165 bp, Homo Sapiens
  misc_feature (847)..(847): n is a, c, g, or t
  misc_feature (880)..(880): n is a, c, g, or t
  misc_feature (1052)..(1104): n is a, c, g, or t
  misc_feature (1106)..(1107): n is a, c, g, or t
  misc_feature (1123)..(1124): n is a, c, g, or t
  misc_feature (1147)..(1147): n is a, c, g, or t
cttttgaaagttctgcagaatcagaagattggcagtacatttatatccaggagctgttactattcagggtgttctcaggagaaaaactttgttaaaagaaggcaaaaagcctacggtagcatcttggacaaaatattgggcagctttgtgtgggacacagcttttttactatgctgccaaatctctaaaggctaccgaaagaaaacatttcaaatcaacatccaataagaacgtatctgtgataggatggatggtgatgatggctgatgaccctgaacatcctgatctcttcctgctgactgactctgagaaaggaaattcgtacaagtttcaagctggcaatagaatgaatgcaatgttatggtttaagcatttgagtgcagcctgccaaagtaacaaacaacaggttcctacaaacttgatgacttttgagtagaagcctgagaaaaaaagagaggtgaactgttgcttctacgtgagcatgaggacctgataaaagagcgccagctataaaccatcctgtgccaggaagagcccagaggctctgtctcagtcgttggagttctcaaccaaaaaagcactaatttcagggaatgatttgagatattcccagagaacaaattggagttgcaaaacaaactgccatgaaccatgcttcttatctcagaactgacctgtggaaaccactgccttaaaagaatgaaaggaaaaccaacatgaaacaccaaatagtgtgtgtgaatcttctggcggtgctgtgcttggaatagatcgtagctaatttgcatttcttttaactttgtaataattttagaggggggaattgccttttttagatatgctttanaaaggaaaaacatactcttgtggattccatcangagctggttttgaaccgaggtgaagagacttagcagggattgtaccagcagcccacctgcaaggtttgttctccctctagtagtctgcaacctcactggctttctcacagcaagagtgtaggaatgagaaatgttagtcatgtgaagttcttgggtttgttttggatatttnnnnnnnnnnnnnnnnnnnnnnnnnnnnnnnnnnnnnnnnnnnnnnnnnnnnngnnggttaatttttgtgtnnttgttgttttgtgtggggggaanttttattttagggtaggg

SEQ ID NO: 144268 - DNA, 456 bp, Homo Sapiens
  misc_feature (37)..(37): n is a, c, g, or t
ctaggcactccccagtgatggagcttccagctgcccntaccattcggtgcacaagtgtccctgaacttcggtgaagtatgagccaccaagctccgcccaagggtgaccacagaagtagacaacttacgaaccagaaacatcaaccagcaaccccagacagtttatgtaagattgcttcattccagagagcagaactgggatccatgggcagaagtttcaaggggacagattccagttcgggagagagaagaaccctgtaactcttagaggcgcctttgagcaacgcgctctcaaggtgttccagcagggtgaggatcaccccccagaagtgctgctgggccaagccctgccttgaacaagatcctgaggtctcgcccaacagcaaggttctctggttagcaccaaatgagtggctcaacagttcgtgttgtggagcttcagaggcaggacaagcag

SEQ ID NO: 144269 - DNA, 368 bp, Homo Sapiens
tttgcttctctgtatgggggtatttttattttgttaacaaagaatttatggagccccaggacgtagcacagtgtatggcatgcaggagaccctcaacaaagaactgtggactcactgaatgctcattaattcaatgtatggccataatcaagctcttcatagaaaagttcagttatccttttcattttacattttcagatgttctattgcaatcattcagtacacaatcatcttcctccctttcttcaggaaattctttatattttatcccaattcttcatgaggcgttttaaacttgaagttccttagtttctccagggaagatagaaaacatctgattggtatcccttatttagcaatctgaattt

SEQ ID NO: 144270 - DNA, 457 bp, Homo Sapiens
gtatagacggggtcttgctacattaattctttgactggggctgggtcttcttttgcacagggcagcttgagactacaatcaccatggcttcctctcaaaacctagtcagggattaggctgtaagaataacaatacaagtactaaagactgaaattttattaaagccaaagattgagaactggtttccggacagcttctagccatgcattcataggctgtgagcaggagtcctgtagaataacaggagacctctggggtccaagctctgagcttctgggcacattttaaatgggtctcactttattgcccagtctggaatgcagtcacatgatcacagctcactacagcctggaacccttggactcaagcagttccaacctcagcctcctgagtagttgggactacaggcacgtgccacctcagctaattttatttatttatcttttagagacagggt

SEQ ID NO: 144271 - DNA, 844 bp, Homo Sapiens
  misc_feature (765)..(765): n is a, c, g, or t
gggaacaaaatacgatgggagagggaatagatgatgccgaagtgtcatcctgactgactgtccctgcagtgcccatgggttcccgtgccttattcattctcctctctcatttccacgatgtctgtcacctcctctgtcggaggcatgtctgtcatggcagagtcttccccctccgtggccgactcattctccatcttctttttctgcttccggtagacatagcacgcagcgatggcgaccatggtggattctcccacaaagcccgccaggagggagcccacgcccagggtcgcaccgtgcacccccaggtagggtaggaccacgaggctggcgatgaggacgatgatccgcagcacagagctgggggcaaggacgaaggttttcttcagtgtcatcagccacccggtgagatgcgccctcactgtgactggaactgggaagaaggagaagatccgcaaaggaacaacacagagttctgcataggcaaagtccactccgatgatgtctatcaagattttctcagacacgttgggtgtccaaaacatcacgacacagagcgtgagtgacagagccatgcagacgaaggtgaacttcttgatgtgggctgccgtgactgtgttgctcgtgctcaccagtttgttgctggggttattcttgtcgaaagcaggatacacagcacggatttccgtcaaccagccgtatggcatgtgacccacagggtatgtggctgtcaaaatcgccactgccggacgcgtgggcgacgcngtgggtcgacgatatcccgggaatatccggaccggtaccagcctgctttttataaccacgggtctatagtgtcacatag

SEQ ID NO: 144272 - DNA, 514 bp, Homo Sapiens
tttaacatttttagtaaatgtccccagagccctaatttcaggaatatacataggaaagagaagaaagaccaagaagacaaaggaaacacgttagacataagagcctccactgggaataaacatcacagttatctctggtggagccacttgctaagggtcatgagtgttctaacgaaactcacataagaaatcacatagtcctcttagtctataaatcagatatggtattattagcatccctgttgtaaagatagggaaaccaaatctcattcctgaggtctgcttttatctactaccatgcacagcctctatggaagaacctgcagatggccaagagcatggcttttgcacctgatacagctccatgagatttcaggttaaggtgtatagttacttaggttaaggtatatagttactttacttcacttcttgtatggactttggaaaaacaaatataaacatattattcatcttttgcatgtcttgaagaaagataagcaacacccaagaccta

SEQ ID NO: 144273 - DNA, 931 bp, Homo Sapiens
gtggcgcgcacggcgtcaccgtctagacgcaggcttgcagcgggcggtgtcgttcacgctcctgagcagagccttccggtgctttactcgacgccacaaatagtgcagggttcctcccaggggctgtcgcgagctagaactcttccccgcccctgtgagctcgggctgttcttcctcctccgcgtggctcactccagcctcggatgtttcctcgctgcacagacctgctcgggaagactcgagaaggccaccccaggactccagctctccccggaagggcttcccctcggattgcgtcttggcccctggaaccctccctctgtatcctctgctgttcctctcttggcctccatttgggttgtggcctggatactctggctcgctgcttcccttctcttaaggatcacagccctgcactgcctgtcgtccggtgcctggaaaccattgtattttttggtctgattttgtagttgtttgagaacttaagtctggtccctcacactccatgcccagaagcagaaatgagtaaagtttgttttatcttttcttaatatgacaattattgtgttggttcaacttatgttgtactttaattagaagaaatttggccgaaaatacaaggaaaatatacaaatgcaagtaattttttttaaacttccctgaaagcagggtctaaagaaattaccaaccaacttagactggatctagaagaaaaggaagggtctttgcagtcttaggactcttccgttccgcgacgtaggtgttaggataacagccataaatggttgtaagactttgggctcagataagtagacttaagttcaaattttgacttattttacaagtgtgtgatttttggcaagctcatcttcctaaaccatgagctccttatttgtaaaggggacattagccactctccagcaacagccct

SEQ ID NO: 144274 - DNA, 991 bp, Homo Sapiens
  misc_feature (127)..(138): n is a, c, g, or t
tttctttaacacaatattaacaccacccatttcatctgaaatcatgtttgatactgtgtcatatgaaaagcaggttgtaccaagaactcaatgagccaagctaatgtttaaggttttagatgaacannnnnnnnnnnnggattttggttgctgtgagtgcattcaccatgaattaatgttcatgaaaaagctgactatatgagatcaccactttctttgcttatactatgaagttgaccattctgaggctaagggctagtcagacaattttaccagacctggtaattctttctgaaccctgaatctgagagggctaggctttccaacaactcaaaaactgtaatcaattaatgaatagggattgcggattcagaaattatgagatatgagtttaggtgtcttaaagaagaacacgcaatgaaaatgtgttgagtcttttattggttattaataattgattttgaatactacatgtaggatattatgagttatatacattttttgctacaatgaagcactaaacttttgaatcatctgaagttatagaaacacactagtattaggcaggccaatgaagaaaagcctaaaaacttcagaaacacagcataaccacacttcattgaattccataaagagtgtatataataaaaatctttcagacaccacgttggagagaacttggtatgaaaagtgcaatgaaagcagtggcagaaagggtgagtttacgtttcaaatataaaagttttacacacaactgttacaagctttaaaaaccagtaagattttgcattcttggcaaagttttttgttcctaagcccccttcccataaaagtgattatcattgaaaaatcagtaaggcgaactgcaacagtttataaaactcacaaaaattttaatcatctcattttggcaaaattttaacatgtatggattccacagatccagtcttctaatttctggaatcacatggctctatctacgtgtatatga

SEQ ID NO: 144275 - DNA, 570 bp, Homo Sapiens
tttttaacattttgtctggcttactttattattccctctaaactcatacagatgatgatgacttttgagcgttttgaaactaagttgcagacaccgtaaccctttatcactaaacatgtgaacaaggatattctcttgcgtactcccagcacagtgatcaaaatcggggattttacactgatgtcctggtgctatctactccgcagcccacactcagatgtcaccgattgtcccaataacattcttgttttctgatccataacccaacccagggccacacattgcgctcattattgtatttgtcctcttgggtctggaacaggcctctgtccttgtctttttgaggggtgcagcctagttacttgtagactgcctgcttgggtttttctgctgtttgtccacagtttgattgaggctgtgccttttcctggagtgaggctgtgctcttctccctgcgtcctgcccggtgacgcagtctctgcatcccattcctggggatattcacttgataaagggcgtgtctgtcaggactcttcaggtgaagttgggttttttcccctattaagtttc

SEQ ID NO: 144276 - DNA, 479 bp, Homo Sapiens
ttttaagattattcaggatttattttttttaaagttattcaaagatacatcaaagattagattcctggaaatggggagagagttcagtctctggaaggttaacactgtgcagctgatttgtccaagtccgaccgatttttctccctgaaagactgctgggccttgggaccctgtaattagactgctgggagccccagccctcttccttctatttccttctctccattgcctcccgaatgtcccagcctcctcctggctagtagatgctgatggccctgggtgaccatccaagtggctccaagccttggatttctctccatctctggaccctggttttcctgatgtatgaataagtgtcttggacctgctcatttgggggatgcggccagcttccaacttccagaccctgcataccccatttcctgacttagcagtccttgaggagaggttcccatcaggtttggtgaaagtttctttcc

SEQ ID NO: 144277 - DNA, 811 bp, Homo Sapiens
tttctttataaatacgtatattttaagagcaacaaaacagagacaattttctcaaaataagcaaccactaaaatgtcaaggaaggacccatttatgacttaaaattcccatggctctctaacgaaagcaatgctaatttcggccttgggaaagtggaaaaaatatataattatgaaaagtcctcacctttcttgcaatttcttgagtttctcagggtctgcctttatcttactggtttccttttcatctgtgaaaccagaggctgccatcctgctcccattatcattttgatttgggaaatgagacactgcaaagaaagtaaatggtgtattttcttgcagagacccagacacatgcaaatggccttctgagttcattcttgatggagaggagctggaagaatccactaaggacaaattgccctgtggatttagtaagagatctgtatatagtggagccccctgaggctggcttgttaaagtagtatcttctgcttccctgacagcaaattcgtgtgcactatttactgggaaataattatggttttcggcactggcaaatggagtcctatttctaatgggagacagtggttggcaaacatgaaaccctgagtttccctctgagtctgagctgtgaactgaagtcgatgacattgacaagtctactggaatatcatctctcagagcagaatgcatgaatgatgcaggagggttataggatgaattcactgatgatcttggagatattggtctgccagaaataaagtagtcaagagaattttgagaactgtttaaatagtctttccagtatc

SEQ ID NO: 144278 - DNA, 503 bp, Homo Sapiens; identical to SEQ ID NO: 58673

SEQ ID NO: 144279 - DNA, 728 bp, Homo Sapiens
  misc_feature (307)..(315): n is a, c, g, or t
tttttttaatgaactaacatcttttctttattcctataacaatttgttggaaattgtaattactgaagatacagttgtcagttcataggtagtaaaagtacgtaaccccagaatttggggaaaaacaaatatttttcgtctgaaattaactagtaaaactcaactcataatgatggggactagtaatgcccagagtaaccttctgggactgaaagttctagtatttcctgaatcttggtcaagactccacatgaagtaattgcaaaggtatggcatctagtaaaatggagaatcaaagaaacatagnnnnnnnnnctgcacagtcaagagaaaagcatgctttcttctttctttcactggaaatatccatgtccatgtaggtagtcctgagctaatgtggcatcaggcatgggttcaacaatgtcaggtaccttaattccatccttttgccgctttgtacttggtccatgacctcccttgcaaatcaggatactttagtagagacttatgttaaaactctgggacaatgaccatgcccaggcacccaaaaagatggttacctttattcgacggttttctaaagagcacagagaaagttcaatagaaccctaaacaaaggtacaaactgcgttgaaagatacgtaaatgtgcctttaatagcacaagggtatcttagccacatcactgcaaactgcagtctccctggttacggggaaagcggtagttcg

SEQ ID NO: 144280 - DNA, 105 bp, Homo Sapiens
ctttagagactcaatttttaaaggtaactttccagcatctgtatatcacatataaaaagaaatcgtgtttttccagtaagactccagacactaaactgtggtgtc

SEQ ID NO: 144281 - DNA, 477 bp, Homo Sapiens
gcgcacacctgtgcacaaagctttggaatgggagttgagtgggtcccactcaaacttcatcaaatgtagggcttctgggacaagaaagtgaggctttgaaaactggacagaagaagaagcagaacatgtcccccaggcatatgaaagttacacgattctcaaaccatatccccgtgttagatcttttctcctgagataaatggaatgtttttttaaaacttatgtacaaaattttaagtgctgtcttcactaaagattttttgttctctcttgaagaagggcaaacaattataagtgaatttgttgagagcattctggtaatttttaccttagtttttaagttcaatggctatgtggcagaaaatacataaatactaaattctaaacaaatgagtgaaaatattttggaataacctaatcatcaaaagcacataagaattgtctattgctatttagtaaagtactttgaaatgttaa

SEQ ID NO: 144282 - DNA, 479 bp, Homo Sapiens
gaggaccgttttttcgtaactggcagtagtaatctggcggttgacactctcgttgcctgtataggctgatggcccactcacctttttagctgggctcctgacctgtccggccagaaagttgccactgggaaacctggacccctactgaatggatctgctggcacctagacctcagagaagggggaactgaagactgaagtctgaccactgttctttgttgaaaatttctttctcaggggcttggagggatcacatctacaatcctgagctaatattctcttctgctgtccccaaaatttaaacgaagcttctcttaacccattgcaaatgagaaaaatctttgaatctacctatgactataagcccttatttcaagatatcctgcctttttaggccagaaccaaagtgtaacctccatctattgatttacaattttgcctgtaactttggctttcctgaaatttaccccagccttaaaa

SEQ ID NO: 144283 - DNA, 592 bp, Homo Sapiens
tttttttgaagtttgattaagttttaatgagcaggagtaaggattgaagtgagaaaagatcatgctgttagctggctttggaatcccaagttcacgtagagacagggattccttggcaacatgaagtctggttatctctttaaatagctgacattaaatttggtcagggagatatctctccacacttgcaccatcttcacagcctcaggcttgattctatggtcaaaggtgtaagaggattggccattgaccattacctggtacttatctggcagcactgagatgctcagttcaaattcttggccatcctgaaagggcatattcttggattccacctgctgcttccaggccccatactcacggctgttcatgaccacacgacgaccaaagcacacttggaaatggaagacaatgtctgattcctccttcatctcagtgtggaaatccacctgcagatatggttcattcaagaaacaggcaagtggtcgccctttgattgtcacagtagaaccagtagacaaagaggcagcctctgtgtatgggcacgggtagcaaggacattgttgtctccttctgggtggctcttctgaat

SEQ ID NO: 144284 - DNA, 451 bp, Homo Sapiens
ctgagcgcgcggcgcgggagctgctggcagtcgctgcgtctctggcgagggagcgccgcgcctggggaggaggcggaggcagcggctggaggagcgcgagcggcggtttccttgcccggggccgcgggaaggccgaccgactgccgcgatggagcagctatcagatgaagaaattgatcatggtgctgaagaagacagtgacaaggaagatcaggacctggacaaaatgtttggagcctggcttggagaactagacaaactcactcagagtttggattctgacaagcccatggaaccagtaaaaagatctcctcttcgccaggaaacaaacatggccaacttttcttaccgcttctccatatacaacttgaatgaagctctgaatcagggagagactgtggatctggatgccttgatggctgatctttgctctatagagcaggagctcagc

SEQ ID NO: 144285 - DNA, 493 bp, Homo Sapiens
  misc_feature (418)..(418): n is a, c, g, or t
  misc_feature (425)..(425): n is a, c, g, or t
tttttttcagggaagaggactgcagtgtgtttattatagattaactttaaagtcaacaagcagaaactaagattgagaagctcatttgttgaactgagtggttttacagaaaacttaagtaccgctcagagaagggaagctcctgggggactgggaggactttgcaccttggctaaagtggagagtttgcaataaggacaccattcagtctaatacgggcttctgggggatttcgggaaatgtgcagatgaatgacttcttagttttcttaacacagagtttgtgtgtttctgagctgtcaccagggtgagataaaagcttaggggaaaccagattcaggagtagaacacaggccctttagagagacagctcagctgtgtctctgggggataacagcaatcttcgcagggaatcatanagaccanaatggtgaagctgtgggcacaataaatgtcttgcttaacgtcacattgattttcctttaatccgcagc

SEQ ID NO: 144286 - DNA, 475 bp, Homo Sapiens
tgtttttagcctaattgaaatgtgttgaaatctgaatttatgcctacattgagaatgacaaataatattcaaatttcttttgtacctttagcagcctggaagtttttctagctggtctggtagtttcctcatggatgataacatgtctaatactctaaatagccttgacgagcacactagtgagttttacagtatggatgaaaatcagcctgtgtctgctcagcagaattcacccacaaagttcctggccgtggaggcaaacgctgtgttatcctctttgcagaccatcccagaatttgcagagactctagaacttattgaatctgatcctgtagcatggagtgacgttaccagttttgatatttctgatgctgctgcttctcctatcaaatccaccccagttaaattaatgagaattcagcacaatgaaggagccatggaatgccaatttaacgtcagtcttgtacttgaaggg

SEQ ID NO: 144287 - DNA, 1771 bp, Homo Sapiens
catttagaaaatattgatctttgtttaatatgcatcatttaataaaacgcagggagggagctgtacaatgcagttttaagatatttttattggactggattaaaacatcactctgagaacacttagtcccctcacatgctagatttccttttcaaaatgtaatcttgatgatataataatgcataacttaaacttcccttcccttcaaaacatccttggttctactcaaggacctctaattccatagtatcttttgtagacacagaaagtatgcgttttctttgtctttgtgatgtattacacctcccagtgcagaattttaatatattccacatatcatatcttcctgtttcggttacaaaacagtacagaattggatcagcaacacaatttaaacttgttaatgcaaccgtgattctatacattgtgtaagttcgcttcccagaattgctgtggtcttcgaagttcacagcatgctctaaaatgcagcgaatcagcaacatcacatgaaagggagtaaagcataagacaaaagtaactgtgatgctgacaagtagttttatgattctcttcttttccttgttttccgtggctttattgtgccgcacagcttggtagactttccggttgcagatcaggatggtgacccaaggtattgcatagcctgtacacgtcctgaacaagttgaggttgatttgccatttctctaaagggtatttgtcatagcataaagtaaaacttagacttttcggcatcgcaatattcaacaactgtttcatcttcccacaacatgacagcattgaagatggtttccaatatccagatggacaggctgaccatgagtgcaaatcttcttgtccttaggaaaaaaaacttcaaagggtagacaacagccaaattccgatcaacggcaatgcaggtgaggaatgctgtgctgctgtaaaaattcatgtacatgagaaaagcactccctttgcacaaggcaggagagaaagtccagttgtctttattccaaagtataatcaatccataaagggagagttaatgcatagagtaaatctgatagtgacaaactgaagaggtaaattcctagttcactttccttctttgcttgcaggaaagacacacacagagatccaatattggctggaatgctgactataatcacaaagatgtaaacaatgggaaacaaatagtgatccaggtcatgctgttcttcaatacatgtgctgttcatttttttcctttttaaggtagcaattatattagttcttagaaagtaaacagagaagtcttgtctctttgtagtttgttttgaacatcgaattcgcttttactgagaattctttttcaatttttctttgttgtctaaagttctaattaattcatcaatgcttttaaagggtggatgtagatcaatttttacacagatatcagcagttggaagtaaaaatccaggctcctggcaattggctaaaggggtcaactgaatttaataaacagaagtccatgtgttcattatcacagaacgctgacaaacagcccacaagcatcaactgaggcatttgtaagtgtacatagagagttgtccgcaatttgtttttcttcataaatctcacagtagattggtgcaaacatgaatatacaaggctttgtttgcacagagattggtatttccttttaaaattcctttccttccatgtttcttccggtgatgtgtttgttgactgaggagcttgataaatctgtgcctgcatcaagtcagaagaga

SEQ ID NO: 144288 - DNA, 436 bp, Homo Sapiens
tttaaattttggtgacaagagaggtccctttgatggaaactggatcttctggacttggcttttgagatattctgaacatcttctcccagcgccatcacctatcaactcctggggctggtggaggtctgccagactgtgggcctaggggcttgttcacaaggattcagtgatgtagtaggcagctcctagagcccccagagccacagccacagttccgagggcttggaggacacgcgttacgatgactggagggttttcttgaagattttctgtagaaggtgagcaggttggggagtcctctccctggcgccatctgccagtcccgaggcagaaggacatcgaagatgcggctatggcatagccccagacgacgccagcaagcggagctgcaggggcaagtggcacaggagcaggaatgcgggccggcgcgaatcag

SEQ ID NO: 144289 - DNA, 524 bp, Homo Sapiens
tttttataatcagaaagtgatataatcttatatacaacgttaaatacaaatgtccctcaggcagggccaggcccccaacacaaggagaaatcgctgcctgaacatgctgcaggcaaaaacctgtcactctttcctcattcagcccagtgtctcattacatctcctgtcgatcagggtctaaatgtgtggggcggagaaccccagccaatcagtggtgctagcgtgaaaactgcccaatcaggtgcgcagctagagaggaagaggcgggctcttcaatatggcaaggcctttgtctcctagcttctaggctctgagtccagtacccgtctgtactattccatctcttccgctccattagctcctcggtgactccaccatagcccctgttatcctgtgacctgcaggtactgggagatccatagggaagaaggcggaacatccggaggctgggaaatggtgagtgcgcggagtgggtgtcccgagaagggggaagaggctgtttgaatccggtcggaactggctgc

SEQ ID NO: 144290 - DNA, 360 bp, Homo Sapiens
ccacaggtaacttctacatttattttataccaaaaaagttatgtgcaacaaataaacattcttacatatttacatttggttttatttaccagttagcaaaacagtgccttaaatctctgataaagagtatttctatctagattaaaggggaaacctgcccagtgaactccattttaaatgactgtttactctggagcttaaagcactagtaagaaatatttctgatggaacatactacacagatcatatacctaataaatacttaggccatgcttaatacagttttataacaaaatatttcaccttttctgggcgaatttgtagtaaaaaatgtttaaccaagtagccggggctcccacc

SEQ ID NO: 144291 - DNA, 530 bp, Homo Sapiens
ttttaaaaacttaaagatatttattttttaaaggggaacttatttgagaaacataaaaacacaacagaatactttatacaccacttaatataataaaacagacaataataacatacatttttgcaagcataaacactcaggttactaataacatttgggtgggtctaacagttatgagcagatgagccatatttataaagaaattggtcataaagggaaaggtataaatgcatatcactttggttgttaattgtgtatacccagctttttaactctggtcatctgaaatactgtgcccaacaacctcaagtcttttgatgagattgatggaaactgtgctgggtcaccactgcatatgcagtcacccaaagagctgagatctcaagaaattttatctttcacaaatgcagatgtacgaaaaggatatctcatttatcgaggaagtttcaacattttatgtacacactcaatgcttatacacaaagtcagtattgtgataatgcactttcatggagtcagatttctgatat

SEQ ID NO: 144292 - DNA, 391 bp, Homo Sapiens
  misc_feature (203)..(302): n is a, c, g, or t
tctttaatttagcaatatttcataattttcagaatacagatcttgcacaaacatagtgcaggcgcccaggccacagtttcccctcaccaggggccaaccattgctgaatcacagagagccctgtgggccgggagtaggcaaggagaatgttgtcatcctcattttgtatggctgctttatcatttgtaaaaggaagttaaggnnnnnnnnnnnnnnnnnnnnnnnnnnnnnnnnnnnnnnnnnnnnnnnnnnnnnnnnnnnnnnnnnnnnnnnnnnnnnnnnnnnnnnnnnnnnnnnnnnnncagtgatcactaaggcaacaggaaaagtaaccaacatttgactgtcactcttcttctgtgacatcagagacaaatagggctacttccca

SEQ ID NO: 144293 - DNA, 368 bp, Homo Sapiens
ttttttttctccgtttatttttaatattaatattctcacacaaaaatcaccgaaaataggggtagggttgggaagacccctctgcccctggggcagagagacagtgcagtgcgagggtgcgggactgtaaaccccccacccctccgcagccccagcgtggagaaaaaacaaccaacaaaacgaaaataaagccccagagaaactcaccccggggtgtccctgccccagtgaggccctggccctgggttgtttcacacttaaaaagaaaagggggtgggggtgaaggtctgtgttttttaaagttggccggggctgggaaggacggggttccttttcctcatagttctttctttaaaacctttaatttt

SEQ ID NO: 144294 - DNA, 253 bp, Homo Sapiens
atgcactaaacttaggaggcggaagttgttttttttggaggcctttgcccatttcactccctccttcccgttccaccttctaggtttctcattccctctgcttcttctcttttgctggctctggcctgcagccctcttgcccctggtgtaaagggctcaaaacgccagacagctctgccgccatggggaggagaccctgactgagaagccagggccccggcctccaaggtcaccaataccttgggcagggccg

SEQ ID NO: 144295 - DNA, 657 bp, Homo Sapiens
  misc_feature (596)..(596): n is a, c, g, or t
ttttatgtatcaaatatatttatctcacttatatagctgcttcaaataacaaaatgttttctgaagataaaataatttccttgaacccaatcagtgacaactggatgttgagagcaatcagattggttttgttcccccaaataagctgaagcacaggccaagactagaggcattaggacaaattctcacaactacagccctggatctcaggagctcgtacagagccgtgttctgacatcctggcagttctgagcagatctccttccaggcaagcaagtggggactctagaatccagctctccctctggtagttgcgccatcttcacctcggctcccaaagtctctgctccagtggacaatgttagaagctggttatgctgcagcctttgaaggttttctggacagcaaggaatgaagacctctcaggctggcccaagcacaggtgggtttattctaaaggtgttggttgcagtctacctggagaacatctaagagcacaagacgaaagtgcgtaaattccgcggggactgcacgcagagatggtagcctgtctcagaagcatctggttcctttccctccacttcctcctcttgctntactgcacacccttccgggcccagcccaaccggctgcccctcgtgccggcacgaggcctcg

SEQ ID NO: 144296 - DNA, 638 bp, Homo Sapiens
tatttcatgtgtgcaaatttaagtttattaagtcaatcactagtgctacaactacagaagatacatttacaacttcaaaattgtttcagttttaatagcatagaatatctcaatgtagtatttagatatttagctgcttgttaaacattaactaaaatgaaacacttcctgaacaatgctgccatattttttaaattaatggacattatatgaaactgttttgaattaacataaaaactgatgaagtagtacagaaagttctcatacacccttcccccacctcagcatcctttttgtaatcacatcttacatgagtgtggtaaatgttacaatgactgaaataatattgatacattcttattaatgaaagtctagagtttggcacagaggtagagatggacaatcttgatgtccagttttttcatagctgtatgtatccagtaattaatttcccatttggtaggagggcaacagttttatcaatatttgtatcgtatgttagtgtaggcgacattacttctccattagatgctggcttcatttcttgttgtacttgaaattagacttctcacagaccagcaaggggcctgcaaccattcacatactactgagggttgccatggttatgttggccctac

SEQ ID NO: 144297 - DNA, 788 bp, Homo Sapiens
tgcttttcatcacccgctctcacatcccatctggggcctctgcttccatcctaccatttcgcaagcctggccaactcaagctccgtgtgctgcacctagagcagcccatctctgtgtcagggaggtgagctgctcagttgccagagtatcaacctgagcccaggacactgccagactgctgagtcaaagagggtttagcagcccattttcatagacagacaggtgagaggaggatgctggacatggtcccagagacgtggggactcaagaaacatgaagatctgttcacagctaagggcacatttccatgccgagaaatcaggcgtgagcgcaagagtcctatcgtctaccagaaaaagaaatctttgggagcattcaaggaggaatggcttcatgatggcaatgagcggcatcgcctgaaagacagccttcgagagtctcccagagccgctgaggagcaaggcagagaactgcaatccaagcaaatgtggtgggtgtgaagctttcaagaagttgggtcaagaacaaggactgaaagaggagcatcaatttgtaagttcaggaatgtctgctccatctttgcagagacaagcaaatatcagggaccacccaagtccattcattgtgaactaagtgaatcatgacacaaccacacaatggaacaccgtgcaggattatgatatacagactgctgaagatctagagttattgatatggaaagatgcccatgatgtattgttagcaaaaaaaatcagcctacaaaacaacatgcatagcataatcctaaa

SEQ ID NO: 144298 - DNA, 726 bp, Homo Sapiens
tttaattcacttttacgatgcaacaatattttcatatgcattatctcacttcatccttacaaaaatcctatgcagaaaggtttaactattatcacacttgatttttatagatgaggaaacttgagcttcagaaagattaagagatttgatctggctcttggtgattgagtagcagagcagtaactgcaagccatgtttttttcccttctagttcagccctcctctactatactgcagttctaatgcaaaaccatttataacagtgccgtctgaaccaggtatcccatttgccttttaaaaataatgacaagtacatatctgctgacattagtcagactactgctattttttaaatacattgaacatggaaggatggcaaactcaaacttagaaataattgagtttcttattttgaggcaccaggactatgctatatttagctactttaactcttgcagaggtacaatatctaggttggcaggtaactatggaaatgtaaatgaattaagaattgttgacagaggtgtattaaattttaagagtctcaggaggtcctctatatctggaagtgggaaaatgacacttcttgctaaactctaagttatcttttaaaacttaagaatctaacagtaacaacaaccattgaatctactactaacaaccactgaactgtacacctaatggatggacttatagtatacaaattatacttcaataaagctgttc

SEQ ID NO: 144299 - DNA, 476 bp, Homo Sapiens
ttttttttgtagaaatttacttatcacttgagatacctagagacattttgggccatcacaaaggaaggtaaggagtatccccctaggaaccaatttgcgtaactagtgaataaaggatctattgtcaacaaaataataccttaaagatgcaattcagaaacaggggtaacaggcaaagctggaaaagattgtgcctgggcttctgtttcctgtgacagatgaagggaaaaagcaatagatgttaatatcttcgtttagcgaggggtagaatgacattgactcctcccactgtgaacggggtctaggcagctgcagggagaaatgatcgaagcaggcaggagcagcctcttgaaaatggggagttgccttgagagcctgtcgaccaaaatgactcctcggaggggacagaaacaaaggaatccagtggagggacttccgttgatgactgttcaagttgtctcaattgctgttccatt

SEQ ID NO: 144300 - DNA, 754 bp, Homo Sapiens
  misc_feature (503)..(503): n is a, c, g, or t
ttttttatgctgtaaagacttttctttattgttcatttattctgttcccttatataagctaggtattaggctaggtatggaaatacaaaaaggaataagataaggcagctgccttcaaggatctcactgtctagggaaggggaaacacaaatatctcaacaccattgagtgagtgtgatgatagagatacgcattcagtcaacaaacatgtcctatgtgctgggtgctgtgctaggtgctgaagatacaatgaacgaagcaagcatggtccttgaattcaccgagctcctattccttgaaatcccacctcctggaatcccccatcagcaagtgtccgctgtacctggcctgctaccacctaaagactgagcgcagccagcaggactgggaaaggcagggcgatgatggcagtgaagggtaagcgggaccactcgcaaggggaggggaaggcgggtagggatggactttgcggcgatggggaggtggtgtcttgagggagcccncagagaagaggcctcctccagaggagggggtggcttggatggcccgtgaaagtcctcctcctggatccctgaacatccccacgtccaggcccctcagatcccggccgccagccctgggagcctcggttgggcgacgaagctgcgggctggggcaccggctgcctccacgggccggttctgactcaggggctcggcccggagctgcttccccggcggcggggctgactcaaccccctctgcccgaggagttg

SEQ ID NO: 144301 - DNA, 483 bp, Homo Sapiens
acttctgtttcttattccctttgctgtgcttcagctacactaaacctcttgctcttcgttatctatcacagttgcttaaacaccccaggcacacctctgtactgggcagttccctgtgtttgggatgccttttcctcagatagcctcctggctttctttttccattccttcagttctttacttcaaagcccctttctcagtaaggacttttctggccatcctagaattcccactatccctcctctcaaacctgtaaacatttcattttcctgctttagtttttctcctttaacactgtatattttgcctaatctatctatggttattgtgtttatttcactcccatgagtaggatgtttgtgtgcctagaaaagggcctagcttgcaataagtagctactcaataaatatttattaaatgagcaactgaagtttacccttcggtgtattgttttaaacattagattgattctcaggtaagaaa

SEQ ID NO: 144302 - DNA, 422 bp, Homo Sapiens
tttttttgagtttggctatttattgatgccacacagagggaggttatgattacagtctggttttaagtactgaaatatccaccaaggtaccccttgaggaggctgggtagaaggggaaatggcaaagcagcacagagatgcagggagggcaatgggctgggccgtgtatgtcatacaattattttggaggacaatgatgggtaggattgtgctttacccaccatgttttttagtaacataacttagaatactacttgaataagcagtgcagacaacaggagtggcatcaaatatgttagctaggttgtaacaccaggcagttcatgtcatgtggcctctccttcaaaagtgaatcactgtggaccaagcaccagaaacatcgtcccaaagattcatcttgaagtcagaaaggagaagagcta

SEQ ID NO: 144303 - DNA, 550 bp, Homo Sapiens
aggcgggaatgtagctccttttgggatacgagtttccctggtggagcctggcttcttccgaacccctggtgcccaccctggagagtttggagaaaaccctgcaggcctgtttggcacggttgcttcctgccacacaggcccactatgggggggccttcctcaccaagtacctgaaaatgcaacagcgcatcatgaacctgatctgtgacccggacctaaccaaggtgagccgatgcctggagcatgccctgactgctcgacacccccgaacccgctacagcccaggttgggatgccaagctgctctggctgcctgcctcctacctgccagccagcctggtggatgctgtgctcacctgggtccttcccaagcctgcccaagcagtttactgaatccagccttccagcaagagattgtttttcaaggacaaggactttgatttatttctgcccccaccctggtactgcctggtgcctgccacaaaataagcactaacaaaagtgtattgtttaaaaaataaaaagaaggtgggcagaaatgtgcccagtgg

SEQ ID NO: 144304 - DNA, 996 bp, Homo Sapiens
cctgcccttacggtgtgggacatagttcatgggaacccagaaaaggtgcgttggttttttggggccctgcccattttggacccccagggctacgttcgtggggtggttcatcgccatcagtttgttggtgggaatcctcatcttcctgctgctggccgtgctgctctggaagatgggcttctttcgccgaaggtacaaagaaattatcgaagctgagaagaaccggaaagagaatgaagacagttgggactgggtccagaaaaaccagtgagctgccacaccagtcacatgacctgatcactagcctgtcatccttggtctttgtatcttccatatttggaagaaaaaaatcttctccagatttttcggaggccccactgatgctgttctcttcttcattctatcaagcccaggtgccagcctgaggcagccacttcggccaggtcacacgaccggggccagcaccacttcctttaaagatgaactctgaactttggagagtgagctacagagccgagcaatatttatggatgcaacacgcatggtcaaccctcaggggaaaactgttacctaaagtatttttataaatataagccttttatactgattatgtcttttatatttgtatcgatgttttattatttctattaaatagttatataattcactcaagcactgatatctggcctaaaatcttggaagtacatgtccatgaatacaaattttaaaggatgaaaatcttaccgtactttggaacttgctgtttaaaaagacagatgaaataagttgaagaaacctcatgtaatgaatccaccaggctggcagtggtgcatataaactgtgggtgtggcaagaccccgaagacatttcacatctttatcgcctcgatcaagtgtggagtcacatgctaatgtgtgctaaagaactgtaagtgttttttcatatgtacttttcattggaagattcccaacaagaatttggatggaaaacctgaaa

SEQ ID NO: 144305 - DNA, 387 bp, Homo Sapiens
ttttccttactagataatttttatttaatcctttatcaactgttaattgcttttcaaaagaagttccttttaaactaggccctttatagcacatttcaaaagttatctgaagaatcaaacatcttttgaaagctgagtagggagagggaaaaaagaaggtatacttgccttatttgtagcagtagcactggatccagcgtggctgtgatagttgcaaggatcatgggtcacttcgggtttggtagaggatttgtgggtccatccttggaacaattcctctggctcatgaggtcactgatacccaacacggcagaatggtataccaggttgccacggcaggcttttgaagttcgctgggtgcagccagcataggcacgcaaggccttg

SEQ ID NO: 144306 - DNA, 484 bp, Homo Sapiens
  misc_feature (362)..(422): n is a, c, g, or t
tatgatccaattacaaaaaagttatctgattttatttcttatatatttggcacaaacagcagagactgaaagctactacacatgttgaactgctgacaggaaaagaacccagtagataaatctaggctttccactccatatattagctggggctgccataacaaaacatcatagactgggtggcttaaacaacaatttacttctcacagttctgaagtctggaagtctgagaacaggtcgccagcatggttaggttctcgtagggttctcttcctgttctgtagacagctggcttcttcctgcatcctcacatggtgcagagagcaagcaggctttctgatgtctttttgagacgagtctcnnnnnnnnnnnnnnnnnnnnnnnnnnnnnnnnnnnnnnnnnnnnnnnnnnnnnnnnnnnnntggttcaagcgattcttctccttcagccctccgagtagctgggactacaggcacatgccact

SEQ ID NO: 144307 - DNA, 662 bp, Homo Sapiens
  misc_feature (102)..(112): n is a, c, g, or t
ttttcttacaaggcagtcactgattaattagaataaacagaagaattgttgctgaaaacatagttatacattacattcatccaactgaagattagtgtgttnnnnnnnnnnngttaagaaaaaatcttttatgttccagttcagctgcacttgattcaagtgttgctctcagaggtttgtgttgttataaattaaacatgctgctgccttagcagccaaaggtactaggaaaaaatgttcatgtcacagaataaatagagcagtctctttcaagcaaaaaagttatctcacaccaatccgggaggtcatccactctagaccttggcataacccttctcctgtgagagcacagcaggattgaatgtgccatggatgattcttaattgaactcagggtggggtgtttcgagatttcagctgctgtcatacaccctttcatatcctgtttatttgcaaagataaggactgcagccttccgtaaattctcatgagccaacattctgtataattcttcttttgtaatagctagtcgttccctgtcaatgctatcaacaacaagaatgatgaactctgtatttgagtaatatgtgttccaggatgatcgcagagactcctgaccaccatatcccacataagagaatgagtggtcttcacacctatttc

SEQ ID NO: 144308 - DNA, 426 bp, Homo Sapiens
ttttaataattacttccagtttaatttatagactatataatttgtcatgaaacaaacagttttcattttgacataatttctgacaactcagtgacataaatatatccatgtgagctcctattttgtttgacatgctcacttacctcacatcagttctgccgatagatttggtaagtggtgcttttagtttccttaatgcacccctcaggatttcatgcaaatgaaattattatgacaaatttttctatagccatttctaacacagggaactcataaagaaatcaaatgtctgcacttcactgtgaaaacactaaactctcagccataatgagactccacacattatcagaaaccccaaggcataccaaaaagacaaggtcaacggagacagtctttggaaggggaggtcataaatgttgaatctgg

SEQ ID NO: 144309 - DNA, 576 bp, Homo Sapiens
  misc_feature (491)..(491): n is a, c, g, or t
  misc_feature (540)..(540): n is a, c, g, or t
tttattaacaaatatgtgatttatgtattcactccttcttgatgtgcattcagaaggaataaaggatcttcttgggaaaaaagtgtttaccacacctgataagttgccattgttcaccttccaggtaattgtgttattttggtcttcaaggccctgtggtacttggaagcaattccttaatagtcaaacaagggcacattgccaggtttccattgtcaacgttgcagaacttactactgtttaatactttgtagaaggaggaatatttaaacacaaatcttgtttcaggaaagtgctccatagaaagtaagttgcggaaagtaccagagtcatttctatcaaaagatatatttcaggatccgggataatttgaccatatgacttcctggtggaaggtggaaacccagcattcagatgatcatttgaaacatcatcttcccctgtttgttagcttggatctggccgtcctgcagtctttccatgtgttgatnggttgtgtgtgaagaattatttgtgcattcatttagtctgcatttattncatcttgtgagctgagggattctgctaagcacccca

SEQ ID NO: 144310 - DNA, 433 bp, Homo Sapiens
tttgatctgatgttatttttcatataagacattacagcataccttcatcttaattcagtgttgggattttgtccaaatattccatcagggagcagtcacagaagggccaggatcaaagtattctgtagccaagtagttctgaggaaagtgaagcactgaactgaacatcaaaatatgtcatatctggaggccacttcataattccagtttgtggctgaagaggggtctgtaagctttcactggtcagccctggtttccccagagcagttgtgattcagtaaacagagtgtgttattttagtagacagtaacttaagtgcctgttggcctgcccatgtcctcccctttatctattaccaggattaacaatttgtgatgattctggactccaaataccgatgatgtttatagtccttatgtattctggccctgtg

SEQ ID NO: 144311 - DNA, 443 bp, Homo Sapiens
  misc_feature (414)..(414): n is a, c, g, or t
  misc_feature (429)..(429): n is a, c, g, or t
tttttgcatttttcaaggagatacattcgtactgatttttgcttccaaatatattttaaggctgtttggtaaaatatataccagacatgaggctcaatttacagggttttgtttttacagggaattcttaactactcagctttaaaaaagtaaaacttcgaagctaaacatgctttaatatcagctctgctcccaatggtcccatgctcagtgggatgtggggaatgaggcagggagacaccgcagctctggagggcgcgctgggggccaaccgcacatcgaacgccctgccagccacgggctgcagaggggctggggacattgtaaagtgcaaatcaaggcgaagaaacaaagtgctatggggtcatcgaaagctattctgcctgtggctaagtacatggtactccttaagcncggaaggaaagacangtattggggtggaa

SEQ ID NO: 144312 - DNA, 1174 bp, Homo Sapiens
  misc_feature (66)..(116): n is a, c, g, or t
tctgtcattaatcattttattgagcactgtagttagaacagcattattgagtttagcacaacaacnnnnnnnnnnnnnnnnnnnnnnnnnnnnnnnnnnnnnnnnnnnnnnnnnnnccaaacacagactggaagcctagagtcgctggcagccgtgtcaaacccttgcgatacgctatactaaaaaaatttgaaatatccacccgtcctctccactctgccacaaactagcaaagtcaaaaatacaaaagtcttcaacttgttcacttttgcagaataaagcaaaaacgtctttgtgctccttactaccagaagcaaaatatcctctgagttaccacatgtaatagcttctggatgtgtcgacctgggttggcttggtgtctgcagaaccatctttgtctttctcgctgtcaccttcccagaggttaatgagtggtgggtacagctcatttagtgggattgaagaggttttttgcatatacttttttaatgagtggtggtagttttttctcttaaatcttttgggaaagtacacagcaatgggacgccgggctaatgacgggaaacatagaccccattactggcggatgggctgtacttgtttcttgatcagagatgtccactgcgaaggcggcatttttggttgtgacatttacgcatgacttttgagtctgctgatgaatattggacactgtgagacacacttcataatctgtggaaggctgcagatgcgttaggttgtattcatggacatcgactgggaccctggcagtatatgttatgtgagggttatcaatcttcatggtggcagacgaccattttaagtttgacgtcatgacattggaattaactttccaggacactaagatggaatgggattctgtctgcttgacgtatatttttagcacctgggtaccatccagaagggtcccgttaaccttaattgttgccacccgagtgtctgccccttggacattctgggcaacacatgtgtatcttcctgagtcttcaatttgtatgttagatatttccaaggtaccttcgctacttagcttgtatttatctgaaagggtttccacagttatcttatttccaatgggagtgacccagtaaatttcaggttctggctcagccatggctcgacagtctaggaaaaccgtcgtgccgatatccac

SEQ ID NO: 144313 - DNA, 455 bp, Homo Sapiens
ttccaatgccccaaaataatcttttattggaatagggccccaactcattcatctggctgctgttgggttaaaacaacagagttaaatagttgcgactgagatcctatgactgaaacctgaacacattatttaacccttggaagttttcttagcccttctctggaagccaaaagctaagactgaagcacagccttaagtacatatagttccttttcccaaagtatgtattaacagcatacatttaaaaaataaaaataccccgtttcaaacacattaaagtttgttcataatttgaggaaacatcctttcacctaaatagaatttaagtttctaattccaatactatgctatcttctagttcagatgttcaagctagtgtttacgcccaggcagtttctggcactagagattaagataaaatttatggtattttccgaggggctatgatcctactg

SEQ ID NO: 144314 - DNA, 343 bp, Homo Sapiens
ctttaagctatctatttccatgaatgtttttctcttcacttcttgtatcatttttttggatttccttgcattgggcttcatcattctccggtccctctctggttagcttaataactaacctcctgaattctttttcaggaaaatcaggatttctttttagtttggatccattgctggtgagctggtgtgatttttgggagggtgttaaagagccctgttttgtcatattaccagggttggttttctggttccttctcatttgagtaggctctgtcagaaggaatgtctaggtctgaagactgttgttcagattcctttgtcccaaggggtgttcacttgatgt

SEQ ID NO: 144315 - DNA, 808 bp, Homo Sapiens
gctggaccggtccggaattcccgggatatcgtcgacccacgcgtccgagaaatgggggtcctaactggtgggcacacagcactggagtgatttttatctgtttacaatcatgtcacactgaatacttatgggagccggagatgagggtaggaaaggtttgatcttgtaatatgtcactgtgtttccttagtggccagccagccttcagaatagctaaaggccttccttccttccagtcagcctgagagagaacacctgtcccctaagcacctggtgtctccattggaggcagactgctctcaggagactactagaagcttcagcccggaagacaggctgctctctcatgctggtggcccaaattgagaaagtggtgtcccttcctgattttgccaccagccctaccgaatagttgtaaaccagtatcaggaattgggatcgctagagtgtttcacgtattagaagatgaatcgtcctcatcacagacctccctgtcaggactgtgatctagaaggcatcacacacagctttctggcacgaatcacattttgtggaagtgactactcaggtttgtatattttagtatcaataaagaattgcacaggtttgaataggaaaaatgtattctatagatttacagtttgaatttaggaatatttcagtatatatagtttttattcgttttaagtgaatcatagtaaaatcagtcatggtgatttaaaatagctatcaagaacaagttcttggaattatctgttgtatctgtgataggaaaccattttacagtattaaattactttattacaaa

SEQ ID NO: 144316 - DNA, 377 bp, Homo Sapiens
ggagatatataaacagatttattgcaaatgactggcttacacaattgtggggttggttggacaagtctgaagtctgcagggcaagccctaatgaagggcaggctggacctcttgggcatgaattgaatggctgcccactggcagaatctcttctccttctggaaagcctcaactctgccctgaaggccctttccccagaagacaatgcaaagtcctcgggtgatgttcactcttcttaacgaatgagtccatataaagcactcagtgttggtctcttctgctggtagactgggcactcaacagtggccatagcaaggttggccttagtgagtagacatagtgctgagcccatgcatgggtaagcccatgcgtaactg

SEQ ID NO: 144317 - DNA, 476 bp, Homo Sapiens
cattgctaaattatcttttcagaataaaaaatagagtattctttatcctttctgttgtctcacatgacaagcatgggatggtgaggaaatggcatattgcctatgttcgccgccccacccccttagttccaccaccccttcaccgtcacccccagttcactagtgtatcagaatgcatcttcagaattacacactgaagatacaaaaggtccagttggtaagctcatcagtaaataacaaggctttgaaatctgacaaattagctatttttgtaggaagataatagaacagcaagatggaagacaagtgatgagtatcatctgttttgaggttgacaaggtgtgacataaccctgttaatagacacaagtaaaagaaaatcatactaggattggatattagtgagcgagcaccgaccagtagaaacaacaacagcataaatctgttatttaagtatcccaataatgaggttaaaaa

SEQ ID NO: 144318 - DNA, 502 bp, Homo Sapiens
tttttattttttcattggctcctttattcccacattgcaggaaccctgcagggtaagaagccatccccatttcacagatgacgagactgaggctgacagaggtgaaactgcctccctagtgtcctacagcttgtgagtggcaaggccagaggctgcactctgagctcttcacactctagtttatcaccacagcctgcatcacctggtggaggtaagtgtcacctgccttcactggctgagaagttggcagagcaagaacatgtgtccaggcccaatcccaggcctccgcaaacctggttgcatccctgttaaacaggttattgcggcgaaccatccgcagaaagccagtggggtcagtgaccgagttgagtttgttgttcatctcttcaaattgctggtccatgatgtctcccgcttcactctctgtctcactgctggcacaggcccttgagtagtgagactccacccccagggcctcccggacactggcaatgtgctgctc

SEQ ID NO: 144319 - DNA, 916 bp, Homo Sapiens
tcacattcagtctcccaaagtccctttcatctcctgatagagtaattgtatccagcttctgttactcccctgagaatttttccttgaagaagaactactgggtacactggacaatgaatcatgtctctggatgaatcgctgagatgagtttgtaagatcaacatagatttgcttagcccaggggaaccgggaagtttgttcgtccttaaatcacaaccgatccatacagtctcgtcacttctgaacggggaggaaagcgtcgactcaaatcaggtgaaatgtgctgatacatatagaatgggttatacacatcatagctaggtccgtgctgggatgaactggaaagttctacctttcgatctccaaagatgctctggcagatccttcaagttcttccagatgtgaaggagtttcttgtgtcctgggttgaatgtaagataacttaaacttgggcaccacaatggtacttctttgccatcagatggtaatttggaaagcaataatcctcagtacagccaagctgaggctttacagacacagaagtcaatggaggtacagagatagtagcattttgactatttgggactgctgctttaaaatctctttccacagaaaagttgtgtttttctgtttcaccatagaaacatcctccacagcaactctttataaattctgttgccattacattcaatttccaatatccagcaaaagacacaaacttccaatcttaatattaatctccagcccgcagggcggggccgccctcacaggcgccccccacagccctgagcgagctgccaggtgggagaagcgcacctgagccaagccacgccgcgcctttccccgcccgggtcccgccgccctcctccgggtctccacgtcccacgcccgcgctgggccggcgccgcgcggccgc

SEQ ID NO: 144320 - DNA, 901 bp, Homo Sapiens
tcgagtgtcccataatagaggccaacttaaatctcggcacggtaaactgtgatccagatctgttctactgaagaattataaacagtgtcacattcagtctcccaaaagtccctttcatcgtcctgatagagtaatggtatccaggcttctgttactcccctgagaatttttccttgaagaagaactactgggtacactgggacaatgaatcatgtctctggatgaatcgctgagatgagtttgtaagatcaaacatagatttgcttagcccaggggaaccgggaagtttgttcgtccttaaatcacaaaccgatccatacagtctcgtcacttctgaacggggaggaaagcgtcgactcaaatcaggtgaaatgtgctgatacatatagaatgggttatacacatcatagctaggtccgtgctgggatgaactggaaagttctacctttcgatctccaaaagatgctctggcagatccttcaagttcttccagatgtgaaggagtttcttgtgtcctgggttgaatgtaagataacttaaacttgggcaccacaaatggtacttctttgccatcagatggtaatttggaaagcaaataatcctcagtacagccaagctgaggctttacagaaacagaagtcaatggaggtacagagatagtagcattttgactatttgggactgctgctttaaaatctctttccacagaaaagttgtgtttttctgtttcaccatagaaacatcctccacagcaactctttataaattctgttgccattacattcaatttccaatatccagcaaaagacacaaacttccaatcttaatattaatctgctggaggcagtgggcgctctgctgtcgccgcctgcgggaactgtgactccggtcacctcgcgcg

SEQ ID NO: 144321 - DNA, 826 bp, Homo Sapiens
cagtcgacggtaccggacatatgcccgggaattcggccattacggccgggtctgaatatgaaagaaaatatcagatgtgcactttaaatgagcttaattgcttgaagtggtgcctgagaatatcgaattgcctcctattgggtgtggctgtgttgaaatagatttgtactcgtcgctgtggtgaagatgatcagtatcagctgttcacagcaaatatattcccagcatgtcacttttccattaaagcagctaagttgtctttgaatgttccatcgttccgagtaagtattttacttgttttctcagtacatcagagagagcgtgatccccctacagctgtcacttccaaagtgttcctgtaggcataaatggtgttacagacactgaggtgcactcttggtttctgagcagagttgtcatactggtttcctggtctctagggcactggggcagtgtactttgaaatcaccgaacaggcttgcaattaagatcaataaggctgcagcaccatttcaatttacttgtccatcttacccagtagtttttgtgtttttaaattcgtttgggtggttatgtttgcatgcttaagcacacatttgacaattaattatagctgtactacccgatgtttttccttggggatgatggccttgttcctttttaaattctgatgcttgaattctattttctagtgatttttcacatctccctttaagtttttgctgcagcaatttgagagagtacttttgattaaatgattctgatggtgggcaccaatctacaactatgtcattaactgaagatacatgttttaatcttgttggga

SEQ ID NO: 144322 - DNA, 490 bp, Homo Sapiens
agcaaccaagatgtctttcagtaggtaaatggatttttaaaaaaggtacattcatataatgaaatattatacagtgattaaaaagaaatgagtaatgaatctaggaaaacacacggaggaaccctacatgcatctgctgtgtgaaagaagccagtttgaaaaggctgcatattgtgtgattcccaactaccatgacattttggaaaaggctgaaactatagtgacagtcaaaagtccaggggtccagaggagagagaagggatgaacagctagaacacatggggttttcagggcagttaaattcttctgtgtgacactatataatggtggttaaattatgcatttgtcaaaactcaacaatgtacagcacaaagagtgaaccctaatgtaaactgtggatgttaataataatgtatccatatgaaacaattgctgatccttaaaaatgtaccacattttagctgttacttttccaagcacagctatattt

SEQ ID NO: 144323 - DNA, 489 bp, Homo Sapiens
atattcactatttctcatattgatgcaattgtggtgctctttttcatttgaaacatcttctcctaaaatatacactttaagaaatagtcatttctgtttttgcattaaagtaaattaaagcagaaaacacatgctcacttttggctaacttcagtgtatagatttcatacttatgttgtctttcctgggtacagatttattactgaacaagtacgtgtaagtaaaatgtcattggtgagcaggacacaagataaaaggtgaacaccacatatggtgtgaattgtaaatgcttataccacaaacttgaaaatgtgtcatgtagagccatggaaaatgtctagttgtttttatgtagtacacacattttaatggtgctaacaacctgggctcttttgttcatagagttattctgaaaaaaatttcataaaagacactgcctaaagataggtagaataggctgtagcttgatttactgtggaataaaaacca

SEQ ID NO: 144324 - DNA, 510 bp, Homo Sapiens
gcggccgccgaggcgactagtagctgctgcacgccagcctggagcaccagcgcggggtgagtgagcttctgcggggccggttgcgggagctggaggaagcccgcgaggctgcggaggaggcagcggcgggggcccgggcccagctacgcgaggccaccacccagaccccgtggagctgtgccgaaaaggccgcgcagaccgagtccccggcagaggcgccctccttgactcaggagagctcgcccggatccatggacggagacagggccgtggcgcccgcgggcatcctcaaatccatcatgaagaagagagacggcacacctggtgcccaacccagctccggacccaagagcctgcagtttgttggggtcctcaacggagagtgagcgcctttcccctcctgtggcagcttctgccgggacatagactggggttggaaccccagctctgcccctctactggcagcgtggtctgggcaatcctcagtttcctcatcgttaaatgggaacg

SEQ ID NO: 144325 - DNA, 594 bp, Homo Sapiens
gccatcctggagcaccagcgcggggtgagtgagcttctgcggggccggttgcgggagctggaggaagcccgcgaggctgcggaggaggcagcggcgggggcccgggcccagctacgcgaggccaccacccagaccccgtggagctgtgccgaaaaggccgcgcagaccgagtccccggcagaggcgccctccttgactcaggagagctcgcccggatccatggacggagacagggccgtggcgcccgcgggcatcctcaaatccatcatgaagaagagagacggcacacctggtgcccaacccagctccggacccaagagcctgcagtttgttggggtcctcaacggagagtacgagagctcctccagcgaggacgccagcgacagcgagaacggtggcgccgagcccccgggtagctcctcgggctccggggatgacagcggcggtggatccgactcgggcacccctggccctcccagcggcggagacataccggaccctgagcccgatgcggatgcagagcctcagcatgtggcacaggggaggtgcgagctgagcccgcgtctgatggatgcgtgcgtagcgctgcagcgg

SEQ ID NO: 144326 - DNA, 584 bp, Homo Sapiens
ttttttttactggggcaattgacaaagaaatttcattatttctgtggtatacaataatttaacaggataacaattattaccaataacatataacaagatctatcaacattttagcaatatgatacaattttgggatgcatattaataacagatttatacaaatacaactcaaagaaaattaaacaacattttttatttgatcagcttcctgtatgattttaatataccaaattagcctaatatgtttcttttggacttccaggggccctatttggacttccaagggctttaatgcccaaaagttagcttgaggtcgaaaacatttaagttagaattttacatttgattttggaaagtttgtcaaatatcaaaggtttaaaacacttgatcaaaataagattacaggtcactgtaagataatagttattcatttagccaaactgataattcaaaaatttcaaaaagcaaaaattttactctttgacagaggggagattcagttttccaaacaatcaaaagacataataaaaacagcattagggaaattctctcctcttattactaatattttttgcagtttactc

SEQ ID NO: 144327 - DNA, 431 bp, Homo Sapiens
ttaggacaaataagggttatttttctctgtaaattcatttaaaagtatgttatctatgattatcctatcaaggtcagaaatgttagatcttactccaagataggtaaacgcctttgaaacgcaacaaaaagagacgatgatcttatgagctcatttatgttcatgcgtgaaagtgtgaaggtcactagctttgctgtgtttctacaagtttccttgactgtaaaaacagtcaaaatgtaaccaacctaattcaagatgttaaattaattaagttaaataaaattagccaaagcactgtaaattaaatgacataatctttaagttctgtactgatgacacccttttgatcaaaagggatggtgacccagtaaaggtgcttttggggaggttattacttctctaattccgaatttatcatcactgactcttta

SEQ ID NO: 144328 - DNA, 540 bp, Homo Sapiens
cgcagaggataaagtgtccccggagctgaaagatcgcacagaggatgcgaaagggatggaggacgaaggccagaccaaaatcaagcagaggcgaagtcggaccaatttcaccctggaacaactcaatgagctggagaggctttttgacgagacccactatcccgacgccttcatgcgagaggaactgagccagcgactgggcctgtcggaggcccgagtgcaggtttggtttcaaaatcgaagagctaaatgtagaaaacaagaaaatcaactccataaaggtgttctcataggggccgccagccagtttgaagcttgtagagtcgcaccttatgtcaacgtaggtgctttaaggatgccatttcagcaggttcaggcgcagctgcagctggacagcgctgtggcgcacgcgcaccaccacctgcatccgcacctggccgcgcacgcgccctacatgatgttcccagcaccgcccttcggactgccgctcgccacgatggccgcggattcggcttccgccgcctcggtagtggcggccgc

SEQ ID NO: 144329 - DNA, 476 bp, Homo Sapiens
tttttcataagacaagcagtttattgtttaaaaaatgttggactatattacaaactactaaagtctaagggaaactaaattcatttacatttttaaaatgtcatctatattgtaaacaacattagttgatccaacgtgcagaagcctatgacgattattggcacttctgatatggaggtgaagttctggaagtgcttccattcagaaacttattgtagaagaagaactgcaggtggctccatgagggacacacacaggtactttgaagccttgtacttctccctaattgcttgctgaggtcgatggggtatatcaaggtacgctttatgaagctcactcaggcaaggcacaatttcacttaatgaatacccctgtaaatgcagcaaggggtttctggccaaaagtgcttgttcacagtattagtttgccaggcaaaaagctgctgcagctttcagtgaaggaagatatttcaagaa

SEQ ID NO: 144330 - DNA, 420 bp, Homo Sapiens
ttttagaattgaccttaattttattttattggaatgtgagtttactagattatgttggagacaagtgacaattttacaatgctaagaaattctatcaataaatatactatatctctcctttgttcaggtcttcttttatgttcttctgagctgtgggcaaagtggcacgtgcaatgtcaaggataaggagtacgccttgtttttgctctttcttccttgttgctggctggattgtgaatgtaattactgagtttgaagcaaccatttttgaatcaataatgaccttggaaatggaggcaatacatagccagagtaacacatttgaggggccaggattcctcaccctgtggagcgccatatcaggtctggatcacctgtactggacttacatgggaaagagaaaaaaatcttctcatttat

SEQ ID NO: 144331 - DNA, 464 bp, Homo Sapiens
  misc_feature (187)..(187): n is a, c, g, or t
  misc_feature (303)..(303): n is a, c, g, or t
  misc_feature (316)..(316): n is a, c, g, or t
  misc_feature (337)..(339): n is a, c, g, or t
tttgttctgagtagatttattattattatcaggagaggtctctgcaaagcagaaccctgtagaaactgcattcctgtgaatggcatccagaccctcgttaactaaaatgccgctccattttcacgccacgctgcatttcaaggatttagttgggctgtctgtatcttccggctccccgcagagcgtngcactgcgactctttccggcttcctgcctggttctcccaggtggaccatcaggtgtggcacctgcacggctggccgctgccgaccactgctcctcctctgctccagggcgtctggncgagtccgaggtnaggcgagcacgagatggcagnnnagattttctcctctgcttagaaggaagctgccggtgctcttcagaggccctgtattcctgtctggtaagatacagcaatgcttctgcagaatgccaggcaaaacctcccagggcaatgaatcctt

SEQ ID NO: 144332 - DNA, 454 bp, Homo Sapiens
  misc_feature (221)..(221): n is a, c, g, or t
tatgagtctaggtggcagtttctaattagggctgtgaccttgaccatgccccctaccttcctgggcctcaggaaatgaagatggaaccagctccactcataactgagcctggagacttcatgtttctagacttactgagattcttggatgacacatgccaattaatccagttaatctttttcttatcagcaagaggcaagaggaaagtgggggcacggggnaaggtgaaattatttatatcctcaattttatatgtttttctgggcaatgttttaagcactgcacataccatatatctgctagaggtgcccagcaatgtgagacaaaactcatagcaggcaatggaatgaagagccacctcctctgagctacaaaatcattgctatgctaaaaactataattctacgaggtctatgacttttttgtccttaatatgtgctaagtgttacccaaa

SEQ ID NO: 144333 - DNA, 467 bp, Homo Sapiens
ttttttaaagatttaaaacacattttattttttcaattgtgctatattttaataagcagtagagtgcttacatgacaagttggttttttaaacaattctgtcattacagcaactgtgatggttactgatgtttccactcttttggggtaactctgccaacaggggataggttccattctattccaatctgagtggctgtaaacacccatgtagcaacacagaaagcagttccactggctagcacagcattaccatatttatcatgaaaatctggtgagtgttttacatggctatgtcttgccatgctttgcagaatgctttgaatcttgagactgcttagtgcatttctggccaagggaaacatcatgaaggattgcagttgccttcagctactggtctattttgttgcaaagaggctgttagaaatctgaagctcaaatgctctcctcagaaagtttcagattctg

SEQ ID NO: 144334 - DNA, 670 bp, Homo Sapiens
tttgactatccattttgtttttattctcttggtgtgggacaggtccaaactaaaacatttttagtttgttgtcccatccagtttcccgatgggttacctcagatgtgaaccataataaccaggagaagtggcatgctgggcccagggcccaactgaggaatgtgaggccaactaataacttagctccttctaaactaatatccattcaaagaaattttcaagtctcatttaatgtggatggagctggtgccagggaggactatttattgagatcttaattcacaaatgtctcaaagcagtttaaaatgttcttgatgttacgtaatgagttagaaacctgtccaaccacataccagatgcatgggctggggctgggacaagttacttgaccaatctggacttccattattcatgactccaggagctccttcactcatgaactgtgtacctagacagagacacagctcagggcaggcatttttattacctttgtgtcccaaggagagggcctccttttttgagaggcatagcatatgggacaagaatgtggttctgcagctgggcagcttgggtttatatgctggctcctctactgcctactgattgaccactagcaagttattatatttaacctctccgtgccttcattttcctgcccggggcactgtct

SEQ ID NO: 144335 - DNA, 680 bp, Homo Sapiens
taaaatcattgcaactcagcccccccagaagatcaccttcatgaaggagttgcacattgacccccaatgaatccgatgttgaagaaaggacggatcaagatatttgtcaaatcgatcttcacatttcacatctgactttttccattttactgaatatgacatctggattttagtatttggaaccagtttcacctttccttcactagttagattaacatcaacaattcgatttccattaaaacctatttcaagttttttataggtccaaagatagtaatcttctccattttcatcagcctcaccaacaataccccatattggtaaatcatctatgtacatctggtaccagtaatgattttttatggcatatacaaatgcatctctcttttctttatctaaatcaatttcacagtaagtggctggcatcacatcatctttaaatttaatatccagaccactaaattccaattcaaccccttgaagtgcttctcccagagtttcatggtaatgactgatacttttttttgaccccacacagaatggaagtgaaaagtacttatatgtttcttgacgattatggtagggcccaacagtattcatccataagacaacttcctctttatcttgatacgtgtgttcgtgctcgtccgcccgggtccggggcagcagcagcagcagca

SEQ ID NO: 144336 - DNA, 525 bp, Homo Sapiens
tgccaggcgccatgcggcacgccctctgtgaggtagaggtccccacagtagcccagcagtctggaggcgtgctccttctcctgcagggacagcagcagcaggaactcgttacgctgcagcagggcccacacggacttggcttccgccagggacacccggttgtccttgttgaagtcagccatgagcaggacctggccaaccagcgccggcagggaaggcaggtctcccaggttcgccttgaggaagccgagggtcatctcccggaattccttgatggaggtgccccgggtgggcttgtcaaacagtaccagctcccgccggggggccgcatccgaccgggccttggagtcgagggtctcctcaatgccacacttgatggttacatccttgtcccgccagagcccgctgtacacctgctggcccggggcacaccgagaggcaggtcctccactccaccatatgcagctcacacaggtcctggcagacggagcccgagatgatccccttgcggtactggtcacaaat

SEQ ID NO: 144337 - DNA, 443 bp, Homo Sapiens
cgttttgatcacaccttgtcggatggccgccgagcttttgccttccccgccgtgcatcgcgtccctcatgacctcttccgcctccagcttgcccttctcgttccctcggaagtagtcgagggccggcccgaggccttccaacttgaccgccctggaggctctacgaccggtctccacggccccccgaggcctcaccgatgcgtccaggcaagcccctagctcctacttcttggccttgacgtgcagcgcccggggctgcaccgggtgtaactcgggcctacagggggcgccctcggaagaggcgggcggcagcaggagccgcaggtcgggcctgaactgccgctgggagaggaagcagcgcccttgccaggaacgtggggctgtggtagcagcaacacctgctccagcttcacctccagcagctgctgcgccgcacacggcac

SEQ ID NO: 144338 - DNA, 415 bp, Homo Sapiens
tttaattttactagactctgtttaattagagtttgttgtgttccaagctatggcttttcacaatggtcaggttaacttcatatttagaagagtgagattctgagccactgatgagcccaaatttcaagtttctctttttctgtgtggtagacaaacattgtttccttactggtattttatctgtcactccaaatggctgaatactcaaagaactttaaggtacattctacatgattttttatgtgttttgtgttttaggtatctgatcagcaacaggttccatcatgtgccctcccacagagtctcaaaatctcagggcaattcctttgagttgagttgcggtctcagggctgagtagcatccatcatgagacaaacacaatgttgttgagatagactcatacctggagatctgg

SEQ ID NO: 144339 - DNA, 504 bp, Homo Sapiens
cagttttactgacatttattaagcacagatggtatgggatactgagtgcccccccagccctctgtgctccccccacgcacacgctgtctatgtcgattaggctgctgtgccgtcggttcccttcttggtctagcagagccttcagctccttgatctgctcagccaactccgggttcaagtcaaactccgctgggaaggcggagatccagtacctgaccaggtggcacgttttcacctgcagggaattggagttgtccttccgggattgttggtagatgtggagcagcttggccgccagctgagaggaggggatgtaccaggggtgcatcatgaggaacatgcgcaccagctccctgactcccctcactcccagattttggcagagccttgccccacggaaaggtaccccggccctacacatactcactcccccaggctggaggacaggggagctcctgtacggagttctcaggcggacttttcctaagagccacccagagccgt

SEQ ID NO: 144340 - DNA, 905 bp, Homo Sapiens
ggtctcagggctaacgtgctgtgggtctcctgaggcgcgagatggaactgttggctcaggcccccgaccactgccatcagcgtgttgaagttctgcagctgtagcagcttctccggcacggtggacaaagtgtgtgatgaccagggccccgctgcgggggctgtgggtttgctgaggatcatgagctgcaacccactgtgagacgctgttgaagagggagatgaaccgctccaggacgggtttgtccacagtgcagccatgagtcacgaaactgtgatagtcctgaaacaggatcttgcagaaggagcgatactccaagtaggtgagatgctccgccagctccatgggctccaggtggtcaaacaacagggacatcttgcgctttttctgtcccacagggttccgctgagtcacctgccgcttccacttgtaggtagggacgctgtctatgtcgattaggctgctgtgccgtcggttcccttcttggtctagcagagccttcagctccttgatctgctcagccaactccgggttcaagtcaaactccgctgggaaggcggagatccagtacctgaccaggtggcacgttttcacctgcagggaattggagttgtccttccgggattgttggtagatgtggagcagcttggccgccagctgagaggaggggatgtaccaggggtgcatcatgaggaacatgcgcaccagctgcgggtcccgcaccttcccggagtcatcgaaggcttcgatgcacccgcggagcagctcctccaccgtgcagcccttgtccaggtccagggtgcctgccatggccgccggcgcggggtgggctgggcccaggctgcgctccgggagcctcccaccgggctcggaccagaacccatgtcccgggagaggcagagcgg

SEQ ID NO: 144341 - DNA, 451 bp, Homo Sapiens
  misc_feature (58)..(68): n is a, c, g, or t
ttttttattcttcataagcattcattgaataagtgggggcatgagtaactccctctcnnnnnnnnnnnctttctcacccccgtgattgcctggagagagtagctccctctcaatgattctcacagaatcctctctaggatggaggcgggtgctcaccttggcctggaactttgatctcatggacagcagaggtcctggtgcaactttaccatgccacaagcagttgtagcagtgcaattgtaaatctcaccagaaggtgacagttgccaaggtgacagcttctcatggtacgtgataaggaactgggtggagaggaaacctagccttggaaagggagcaccataggagttggtgggagcaggtgaaaggcttggttccttgctccctgcctggtgcctggtcactgcagacactgagtcagggaccaaggggaggagggaagcagtcatcg

SEQ ID NO: 144342 - DNA, 1173 bp, Homo Sapiens
  misc_feature (284)..(292): n is a, c, g, or t
  misc_feature (685)..(715): n is a, c, g, or t
  misc_feature (1072)..(1106): n is a, c, g, or t
tttttttggtcacaggtattactgtcttacagtgtgaataccccatgaaaacgtagaactctttgcaacttatgtcacacctgtatcttcaagggcaaggattatttgttgctatagtttttatgtcactaaagtaccttttagtgtcatatacatagtagataacactggataataataataaaaaagactaagaatgctaaagtagtctaggaattcctaaatcttaataaaaactgagaaataaagttgtgatactatataacacttaaggcacgagtaannnnnnnnncaccgtttcccctccatggctatgaaggaactgggagaaggatgctcctttcattaattaaaattcttcactttgaaaatttaagtttattagggaaggaaggaagaaaaatatgaagatgtaagtatacataccttggagtaagtatttccttatattggagtttctctaatttagctggggctactaatgacatgggaatcacaatgttatctatgtcataagagctctcacttctcaatctccgtcgtgcagtattctgcaaaacaggattacagtagatttacagtactgtctagttacttgtaatgataccctcctttcatcagttatgtaaatatggcagtacacgttacataatttttgtaaatacattgttataaagtctgactnnnnnnnnnnnnnnnnnnnnnnnnnnnnnnnatttttctatcttttgtaaatcagaacaatctcttggtagatgtgtaatgtgtatttatgtgtgcaagcatacaagcttatttttaagaccacaaaaaataggtcttaaatgcaaaactctttatcagaaaagaccaacatacatcaccctaaatgtcaatgaaaatgatcagtaaccactttttattaggaaaggcagtgaaacatttttggtcagcccttcagtatactcttcatttatgcattcctggttcctgagtttcggaattcatttctaaaccctcccaccttttgacctctctattccccggccgtaatggccgaattcccgggcatatgtccggtaccgtcgactgnnnnnnnnnnnnnnnnnnnnnnnnnnnnnnnnnnncgccgcttcctcgctcactgatctcgctgcgctcgtcgttcggctgctaacgcggcgccctatatga

SEQ ID NO: 144343 - DNA, 572 bp, Homo Sapiens
  misc_feature (196)..(196): n is a, c, g, or t
  misc_feature (396)..(396): n is a, c, g, or t
  misc_feature (429)..(429): n is a, c, g, or t
ttttgagtggtaaatggagcttaacttttgtacgttcttggggaatggctgcagggacccctggctaaaacatttgcatgtttctccttgttggtcagtagcgaactgtagggagcatcctcatcataggcttgcgggcaaagatgatcttgttatagttttcagttggacagtctctggaatccgcatgtaagtngtgtgggttctgggatcatggtaggagccatggccaataccgaataagcgccccacattgataacgtggattctgacagcgtgtccctgaacacagctttgccagaagacttggaagacttcctccttttcggctgaatgacgctgggaaggtttattctgccttgatgcccagggtctttcctcgaggcaccatgcttnccagtctctagttttgtttttcaatgagtcttnactgctgagagtataagtgactagccgcagggtcatgttttcagtactcggggagtcccatgtttctggggagccttcttcttctcatcctcccttgcccaatcttgcctcgagccaaatctttaggaatcgattaatcgaat

SEQ ID NO: 144344 - DNA, 488 bp, Homo Sapiens
  misc_feature (363)..(363): n is a, c, g, or t
gatgtttgttgttcagatgaatgacacactcaagttacaaaaatggggccttaaaagaagcacattgtacaatgaacaagcagattggagttaagaacactgaaacactaacccgctaccacgagaagagacggagggggtacaggaagggaaggaaggggctaccaacacaggggtcagacggaactgaaagggaggctaacttggtaaggatggaggaaaggcaggtctactccagggctgatttctggatgccggttcctgggcacccttgccttgtacttgccaccccctccaacttcacccacccccattccaacctggtcattctgggtggtgaaagacacccacaccagaatgggnctgcgccaatcaggtctttaccaagtagggtggtcaccttgccctagtgcagccctggatttggaaggtgatggtggaagcagtgggacaagaggccagaaaggagttgaaagttcaggcccctg

SEQ ID NO: 144345 - DNA, 427 bp, Homo Sapiens
ttttaaatgcctctaagtttatttatatttagtgtgtcttctgattttggaaacttccaggttagaccaaacagatgtctgcaagagtttaagcatttacatttaaaataagatggaaacagtatgggtgttcctctgtataccattttggtggagaaatcataaaggatgtatctgaggggattaaaatatcattatcataagtaaaacagcatcttaggaaaacaggcaggttatatacaatggaaggatttttaagcccatatggacattgggttgggtagggagccaaccaagagtctcaagtccctctgctttcctagtaaaagaattgcaaatgcaaataataaagccatttgcaaatgtccctgtgagcctccttgcccattgttgaatttgattattggaggtcaagttttcagccata

SEQ ID NO: 144346 - DNA, 476 bp, Homo Sapiens
  misc_feature (350)..(350): n is a, c, g, or t
  misc_feature (361)..(361): n is a, c, g, or t
  misc_feature (380)..(380): n is a, c, g, or t
  misc_feature (414)..(414): n is a, c, g, or t
  misc_feature (418)..(418): n is a, c, g, or t
tttcttatcgtggagattagattggttaaagttttggaaaactcctgaattaaacttcttgcaaagtttactcttcttgtaaagagtagcttctttgctgttcgttgggcttggctcctgaaaaggacttggtttcaccttgatgtttccttgaagacaatgctctaaatctctgccagaaggatcgtcagtgaacaacgcaaatccagactgcgctggtttcctcattcctgtgtcctggttcaaagtattcaaaaattcttccactgtggtagatgcgtcaaaaccaactacctggtatatcccattcatgaagtgcacaggtatactaaagggcaaagaatggtgantaagggtttcngagaagagttgaaagaatntcctccttgagggtcttgcttctctgtaccattntgtntgcgttctttctaccaacgctggcagtaaatggcatattttccaaattctgtcctgga

SEQ ID NO: 144347 - DNA, 437 bp, Homo Sapiens
tttttattaatgatatgtttgtttatttgtttttctgtgtgattttaaggattctcctgtgctgtagaagtcataataacccttgatcttcatagatgacagtctccaaagtctttttgctccatgtattctgtctgtcacttacaggaggtacaaataaagccagtacctgggcagataacatctgacccccacgtaactccttgatctgatttttgttcttcttgcagtggatgatcctctgagtaaggaaaagacgagtcactatatgagcctttctgaggatgtgagaaatgtggtatttggagatgaccatgatggtgcacccggggagtcccagagagcagagaactttgcagcatggggagctcaggccttctcctctggcaggcattactgggaagtggatgtaacccagtcctccagctggattctag

SEQ ID NO: 144348 - DNA, 397 bp, Homo Sapiens
aagccgacctataaacaagcagtttgtccctgcttgctcgcctggcactaaggacccacagagatgtcactcggtttaatgctgtctcattttgatgcctggcccgtttggggttgccgcccctttactacgccgggaccctcctgggccctcaggctcccaggcactgcaggatgctggctgggcactcagcagtcgaggcgctgggcatgctcagtggctgggccccggcgggccgcgggggagcgcgcctcggcccaatgcggctgaggggcggagcgagtttcccggggaggcctgctgattggtgggatggcctgtttttcaagccttgcactgcagagggaaggtgggggtagaagggttgagggtaccaaggtaggttgcaaagcgtagt

SEQ ID NO: 144349 - DNA, 500 bp, Homo Sapiens
ttttcctttcaacagcttttactaagcatcttcattgctggccctgtgttagatgacagcataaaccagcaagacagaccaggctgaagcaaaattaagactgagagacgaaaccaaggttgagcccaggttaggaaagtttaacctcccagctgggtgctccagccccaatagcgtcgcgatgctggggacgaggtctaggagaagggaaatggggggcacttagagccccaaatccatgaaccacgctggtctgttttaggaaagcaacatcttgaggcttcatggtgttctgtgctccctgctgggaagcgctgggctggctggaggttttcatctcgggactgggggtgcatccccacactgcctggctgaatatgttggtgctttcccaatgtccttgacgtctggtgtttgtctggtgcgacacgtcagtggggagacggtcgtgctaacagcgtattcggctcagcaaaagctttcattgcatgcatccatgg

SEQ ID NO: 144350 - DNA, 525 bp, Homo Sapiens
tttttagatagaagtgactgtgtggttggtctctgaggtatttgggggactctgtatttgctcgtttacgtgttggaaaaaccaagtggctttggggtttcgccctatcccactccctctctttcctgctccattggttccttaagaaatgctatattttgtgagtgcaagctggcttggggagccctctcttgtgtaaatgtcccccatgtttctgaaaagtgctgtagtttagtcccctcacccccagcactgcccaaacaggggccaagtgcgccccaattccaagaatgaaggcagagcgacaacagtgcggacaccccggctgctagcccacggtgaagcccggcggggttgcccaccagttgcgaaagccccctttcctcagggagcacgcgggacctcggtggagatctccagtgaggcttagaggagcccagggcctcgggcgggttggggtttgtcctcagtgcattggacgcgctgctctctcccctgaaggctgggctcgcgtgggcggccgca

SEQ ID NO: 144351 - DNA, 1023 bp, Homo Sapiens
  misc_feature (379)..(395): n is a, c, g, or t
  misc_feature (932)..(932): n is a, c, g, or t
ggggtgagcccaccattttggtgcgccaatttccccctccgcaagattgggaggcccctcgttccctaaagagagcgggggagaaccaaaccccctttcaaagacaaagccgcccccttttggtgcccgtaagggtttttccaccagccccccaaaaagcggccaacgtgagacgcccaggtaagcttactttgccttggaggccaagccccgggaaaaggggagggcgttcgttaaaccttggccatttaaggccccacaacttggaggggaatggctttttcccccgggtaaccaaattggcaaccccaaactccctaggccctagaaaaagtggctcccccttcctattcctggcttaggaaaaggtcaggccccnnnnnnnnnnnnnnnnnagaaaatgcttcttcaattctctcttgctgtcaggccaatgatgacgcgccaggctccccaggtggagctgtgcactccggggagacctatcctttaatgggtgacaaccaggctctgcactgctggcaagaggctgcttgggacattttacgctgaggcagaatgaatgtcctggttttcaaaaggtggcagtggctctctccaaaaggtgaagttactgaaggtatccgaacagggaaagtctgaagaatggcttcttttcagcaacgggaaaacgtggtcgactacttcacagagtctcacatacgaagagatgttggtctttgcatgttcctgtaccagctctcctttagggttgacggtaaatattctattcaaagacactccttacttgcttgtatgaatacacatcagctggtgcggtttccaaaagcagcataaaagggttctgtgttggggaaaaacaggtttttgatgtctgtcaaacactggacttaaacttttctggcttctttcaatacttctctgtccggcanagaagaagctgctggactcacagcagggccctggggcgccacgtgccttctctgaccagtgcagtccccgcgttctgtccgctcccatgcc

SEQ ID NO: 144352 - DNA, 606 bp, Homo Sapiens
cttggaatttgtgtctttggtttgtgacttctggcagtgtcgggcctgttgttgccgcttgccctagccctcctggcccccctggtcaccatggcccatcggcttcggtttcattttggctctggtcgcagcaacacagcccccgaatcagacatcctagaccaggagagagaagacgacttcttcatggcattccacaccctaccgcggagaagcagcccgcaccccttcgcccagaacggaggggaggacggcggcggaggcctgcagggaggcgtgggtgcgcttaagcggagctcgtccatgttcatcccgcagctcttgaccagcatcgacgcccgccccacgtgcagctcctccgtgcagatctccctgcagcgcaaggccacggacggggccacggacgggtgcgggccgcccgagggcgccgacgatgggcctccatgcgcaacgcccgaccccagggaccaggcctccgccactgccaccacgagggcctcgccccagagtggctcccgggagccctcgccgagggacacccccgggagctcccctccgagggcagcccgggacccagggctccaggtcaacggcacgtgcggccgc

SEQ ID NO: 144353 - DNA, 459 bp, Homo Sapiens
ttttcttttaaataagcaaagtgctctgggcacatgtataaatcatctgaaatcacaattcagcttcgtttatcacaagtagaagtatgaagtagtgtttttctttgtgacacacatgctggaatcttccgaggaaactatcgctgactttttagcattttaaaatttaggatttctagaacagatgagatgaaaccaattttcattccaaacattacagcttgtggtttctggtttctttaaagcactcacgctatttaactacatttcagtgaatctctttcctggtggaaatcagctgttctgaaaaatcaagggattcctcctggtgctttacaggagctctaatccatagcccttcccataatcaatccgagtgaaaaccagccgtaccatggatgtgtgtcgctgccaacgcaagcagccagcgtgtgcgcctgtgggggaggtaactggaaa

SEQ ID NO: 144354 - DNA, 548 bp, Homo Sapiens
ttttcaattttcaatgaaattttaattatacatattttatctgtcctaggtcatgaatgtttttctccctgtccggatgtgattagattgtcctgagaaacaaattcagcctcctgcctcctgaaggcttcaggaagcagctcctagatggggtgaagcaggcaacccgtgtgtgtccacaggacccggagcctctctctccttggattaggccccctcctcaggattacagggctcttcagttttctcaacatgctactatacatgagacccttcctgtgcttcgaggtttcttctcaggactttgtatgtattacatgttttcagtttttttctgagatggaatgttgacgtctccttattacaaattattcttttaatttgtctcttagaataattttttccagagctcctgcccgcccgcgcctggcggaatggagcggcgccagggctgagccaggcgcgcaggggccgccgcacgtgccgcgcggggagcggatgcccagcgggcggagagccagcgccagaggccgggtcggagcggccgc

SEQ ID NO: 144355 - DNA, 434 bp, Homo Sapiens
ctcaggattacagggctcttcagttttctcaacatgctgttataccagagaagcacaagaacactttatttcattatatttttcttcaatttttcaaaacaacaccaaaggtaataattttaacaataaacatattacaacctactatacatgagacccttcctgtgcttcgaggtttcttctcaggactttgtatgtattacatgttttcagtttttttctgagatggaatgttgacgtctccttattacagattattcttttaatttgtctcttagaataattttttccagagctcctgcccgcccgcgcctggcggaatggagcggcgccagggctgagccaggcgcgcaggggccgccgcacgtgccgcgcggggagcggatgcccagcgggcggagagccagcgccagaggccgggtcggagcggccgc

SEQ ID NO: 144356 - DNA, 483 bp, Homo Sapiens
  misc_feature (231)..(271): n is a, c, g, or t
tttgacattgttatgtgtatatatatttttgaaaaaaccgaggaagcaaagagggtgcaaggtccctctcctgtggctccccagactttcctgttccccagctcactctctccattcatcagaccacggtgctgatccggcttggcttggccttggggtttgcactgggggggttggctgtgccagggggcccagaggcgtgcagcgggccatggggggaggtgggtggannnnnnnnnnnnnnnnnnnnnnnnnnnnnnnnnnnnnnnnntatataaaagaggttgtgtgtgatgggttagggtggtgacaatggtgactaggggtggtgggtgtgagagtaggatgcccttggttattcgggatacatgtgccccaaccgcacctgctgcgtccacccgccgtggagggggtgtgtggagagtgagtgcttagagaccttgtgttgtgggtgggaaggtggttggtggtagtaattttaat

SEQ ID NO: 144357 - DNA, 522 bp, Homo Sapiens
gcggccgccgcccagccaggtgcaaaatgccgtgtcattgggagactccgcagccggagcattagattacagctcgacggagctcgggaagggcggcgggggtggaagatgagcagaagcccctgttctcggaacgccggctgacaagcggggtgagcgcagccggggcggggacccagcctagcccactggagcagccgggggtggcccgttcccctttaagagcaactgctctaagccaggagccagagattcgagccggcctcgcccagccagccctctccagcgaggggacccacaagcggcgcctcggccctcccgacctttccgagccctctttgcgccctgggcgcacggggccctacacgcgccaagcatgctgagggtcttcatcctctatgccgagaacgtccacacacccgacaccgacatcagcgatgcctactgctccgcggtgtttgcaggtaggaggggccgaccaccctcgcccggggtcggggtggggtagaggaggggacgccg

SEQ ID NO: 144358 - DNA, 572 bp, Homo Sapiens
  misc_feature (94)..(111): n is a, c, g, or t
gaccctgctagggaaacaggtcttgactcagccaaagtggcgttcttgtgggtgattaatgacaggcctagatctcgccctagtgacatccatnnnnnnnnnnnnnnnnnnactatactaaaatcagccgtgtctgaactgaaggaggtgctgtagcctcgcctcaaaccacccagtcccagagttaatagctgcaaccaatcgattacggcaagcacacatccagattggggtgaaatgtgaccctttcgcctaaatttacgaataatatcgtcctctctgatcatttccgctggggctccagcgactacggaaacaattccaatcattcggcccaaagaaaaagatgtccctgttctacccaatacgggcaagcaaagcccctacccacctccaaacactatccccttgacatcagcccatttctattgtgtcttattaggtcctcgggctacgaggacctagtgaaaaacgtggctgccctactactttgctaagaacaagaaccacacagtccggcacccccaccccaggggccgcatcccacaccccaggacccctgttcccagttc

SEQ ID NO: 144359 - DNA, 493 bp, Homo Sapiens
ggtggactgtgaacctcactttccctatgttcagcagcacaaagggaagaagccaccacatcagcccaggagccctgagcagcacaggcagtagggccactcactttggccatccgcacccaaatgcaatcaatcaacccagcttcggaagctaccctaggatctcgtcaataaactgctaagaagccatcaactggcctaaagaaagagttcactgaagaacgcaattgctttaaagaaagaaaaattagtttcctatttaagtcttaaaaaaaagcaaaccatgtcctgagatgtctgtgttaatagtgcagagagaacctagggtttgaggttgctgtagcaatggcattggagaactttaacttgaacattctcatcgatacttcctggacatattttgtgtttttaacttacttagtatttatttgccttgttcatatgttcaattttctgaaatttcaattaaactattggtgtttcactttttaaa

SEQ ID NO: 144360 - DNA, 670 bp, Homo Sapiens
  misc_feature (133)..(133): n is a, c, g, or t
  misc_feature (139)..(139): n is a, c, g, or t
cccacgtcaacactgaagccattctgcccaatcttgagccagatgagcggtctccagagctacagcacacccagcatccgctacatcgaccacgcggccgtgctgctgcacgggctggcctcgctgctgggcntggtgnagaatggagtcatcctcttcgtggtgggctgccgcatgcgccagaccgtggtcaccacctgggtgctgcacctggcgctgtccgacctgttggcctctgcttccctgcccttcttcacctacttcttggccgtgggccactcgtgggagctgggcaccaccttctgcaaactgcactcctccatcttctttctcaacatgttcgccagcggcttcctgctcagcgccatcagcctggaccgctgcctgcaggtggtgcggccggtgtgggcgcagaaccaccgcaccgtggccgcggcgcacaaagtctgcctggtgctttgggcactagcggtgctcaacacggtgccctatttcgtgttccgggacaccatctcgcggctggacgggcgcattatgtgctactacaatgtgctgctcctgaacccggggcctgaccgcgatgccacgtgcaactcgcgccaggcggccctggccgtcagcaagttcctgctggccttcctggtgccgctggcgatcatcgcctagagac

SEQ ID NO: 144361 - DNA, 792 bp, Homo Sapiens
  misc_feature (688)..(701): n is a, c, g, or t
  misc_feature (724)..(735): n is a, c, g, or t
gggacagctgctgtttcggcgcggggccgggccgctgccgcgacgtgtggaggcaggagatcgatgattgccgcaggagaagtgcgggcgcccttcacctggggcccctcccgaaccgcccccgggcccatgcccctccagggcccaggagcgagccagcgggagggcgagggcgagcgctcctggtgaggacagattaaggcgaacccccagtcagcggacatttgagcggctcctcgccgcggtctctgcccccactccaaaccggactcgacgcctgtcccgggccgtgacgcacgcaccggaggaaaaagtgcttctcggctcgctccctctttggggaagagagctcactccccatgcgggcgcgggacactccatctctgttcctgccggtcgggtccgcaaacaccggggatcccagctgcggcgcccaaagggttaacgcaggcgttcggccagtgcaaaccggcctcgcaggatccgcgcttaaaatccgggtgttttcattttgggtttgtttcttctactatgccaagctggtggctctcttttaattctcttgtaacatctcaaccctgcacccatctttcctgaggggaaaaggaaacgggataacttgcggtatttcgatgctcaaaggtaaccggcggctttgctccaaccttcaagagattttgcaagttgnnnnnnnnnnnnnnccatccttcgtaacatctacttnnnnnnnnnnnngcaagttttccttcttgtacacgcatatacacagtaaagatgtgtatcttacctaaa

SEQ ID NO: 144362 - DNA, 1953 bp, Homo Sapiens
  misc_feature (795)..(795): n is a, c, g, or t
gtttgtgtgtgttttggagccctaaaataagcattttatttaataaaaaatggcttctacatctcaaatcatgtccataacttacaatctaaatgaaagccagttacataaataagaaggtcattctggaagaatcaaattcctaggacaggagggaaataagtgcgtccagaaacttgctccgatcctcagctttcagctcaattactgagaggtcaaaatggttgtgcagcatccgggagctggtgctttccgctgccttctcaaacgccctcccaaaaaagttcttcctgtccgagctgtcggtctctggggggatgcccaccacggtcactgtgccatgctccatgctcaggggggcagccatcaccaggggcagcagtttgcagcgccggttctttgtcgaacacacaaaggacttgagcaggtgtttgctgagcaggcttagggatgccggcctagagaacagcatgacatctggagtgccctccatgagagagcagtacaggaaaggcccctgggagatgacgaggttggtgcaaaggcagctggcaatggtctgctgggtggctcgcagctgcttcttggcgagttccaggccatggtacagcttgtccaggttactcctggagaggctgtccagagcctggatgaagtgatctgtccctgagccatcccttctcgggggctctccatcaaagacatggtggcaaagaccacgtcgctggccagaaacttgtgcttgaacccaaaatgaatgctgaaagtctgcacgcgcatgtccttcatcccaanatttatttgcagactcttcaatcatttcccgcaaattctccttcaaggagatgtccatggcctggaacttctgcttcacctgcttcaggggaagacccatgtctgcaaggaactcctggagccgcttctgtccatgcacagaccacagcttgaacctggctgcggtatagctggtgttgcacaggctgtcatggagggaccagtgctggtagagcaccaggcggaggtcatactcaaaggagatccgtgtgcagtccacggagagtgtgttctcctcatcctcgttccggtggttgtggcgggaaacgtggcgctgcaggacaccaacatcagtcacgtatttcatttgagtgatcttgtcttgcacccactggtctgttagtccaacgatggcccaccacagcatgtcattcaggtccttggacagcatccaagccagctcaaacatcaccatggctgacgatgtcccatgatattcatactgctcgtagtcaaagaggatgtctcttctccgggcctcccactctcgccgctgcctcctccgcatggtttgctccactatctcctcttctaaccgtgtgcgcttctcagaaggctctgacccatcactgtcatttcctgaatgctcttcatcctcctcttcatccctgaagatgtcttcataggcgggaacttcaaggtcatcatcttgtttaatgagtaatttgatctgggtatcgttgtatacattgacgacattgactggcctatgggtgtcacacacaaagaatatagtgtcttcatcaggttgaagaatatccaataggtctacattagctccacagtttatgagaataaaataatgaaactgttctttatgctcaagaaatgcagtttcaagttcttgccacccagaaactggaaccagcgtatattgcacgtggtcacactggaacaaggcctgaaggatcttgcacgcacacagagcatccacgtccgaggccacgaagagaaggaccctctggctctggaccacctcgtagaactctttgcggaaatcggacacgaacatagccacggcggccggacgcctggcgctcgcgctgaggtaccaagagcccgctggcacgagcctcgtgccgatttaacacccaggcctcgtacctagcctagggtttg

SEQ ID NO: 144363 - DNA, 535 bp, Homo Sapiens
tttttttatgtagacacgtttatttatttaggaaactaagtctaactcattgtagggattttatactcaactatacagagtatccaccaaagtcctaatctaaagtcctgctccctgtcactttttaaaagccagggtagcagtaacatgacaaacggctgctgtggcttcctcttgagagaggacagggaaagcctttcctcttcggctggttatgtggggaacttccttagtttttttccacaagaaattctcctttggctttgtttttctgaatggatggagactatgaaggggtttgtagttgtaagagatttaatattcaaaactgaaatattctgcatttcttagaaagaccccatcttcccccaccccctttttgaattattaattcaagatcaacaaagcattcctcaagatcacttttaaaaaaagttagaagtgaagcaaatacattcagcttactgatcactatagtattgcataagcacagctcaagaactgagctttgtatgtgtccttttgggggataaca

SEQ ID NO: 144364 - DNA, 583 bp, Homo Sapiens
aaaatcattctcttcattgagctctatatagtttcctgtacgcatggcaatatgcatttctatttcttcccgtgctcggtcaacattttcaggcatccctgtcacttcaaagacaggttccttatctctgctcggagttactatgtaggtgtgggtctgctgctgaattcttttaatagttgctcctttgggtccaaccactaatcctaccacacgataagggaccctgacttggacggtggtttgaccgggcagattaggactacatgataatcctcccagggcaggcccatttttgtttcgagatgcacgaatcatggagaagtgctctgcagctgagaggatctctcttttggccatggcaacatcttctttccttccagtgacaacaaaaatgggctcttcaccacgaacaggagtcttgatatacgtgtttgtcttggctctcagtgctttaattttacaaccctggcggccgacgatctcggcgacgtgctcggagctgggcaccgggacgcactcggtggtgttgacgctctttctccggagcagggccgcctgctccccgttcagggcggccgca

SEQ ID NO: 144365 - DNA, 526 bp, Homo Sapiens
  misc_feature (493)..(493): n is a, c, g, or t
tttgaatcaggaacacctgtgcagtctatgaaccttgtatccagaaaaattcacatatgtgaaaaactattctcatactaaaaatttttatactattttaggtagttttttggcaattctgaagcttgttgattaatctttaaatcggtcaactcatgagaaaaacctctgcgctagaccatgtgtttctaagaaaaaccacaaaattcgggaaagtctaaatcaagacaactacttgatttcttactttctttctcaaatttcccctctcattcccttccccctgaaaatatacctgtatacatatccacagagatatcagcgtaaacgtctaagatatatagcaatttctttctaagtggtgaccagtcaaagaacaagtcaaactctccaaaagtgggtgagagttgcttaccaatgatattctccgaggcatctctcacagtctcatcagaggtggaggaaaccatgtgggtggacaacacaacatgtntgtgatgttacaatggcaattgtgaatgacctg

SEQ ID NO: 144366 - DNA, 498 bp, Homo Sapiens
ctaggtggaaagctccttgcaggcaggaaccccatctccttgactttactttggaatccccgcagcctcatacggggctgaggcaggtccttccgtaaaatggaactgaatgagcggcgcttaatccatccgccaaaggccagtctcccttgggttttcaacagctggagaaatatcaaaagaatctgaatatcaccatctggaagttgtgccatggactccagtgggcaggattcgagctgggattctcttcttcctctagcagtgtatttcttctgcttaaaatgagcacaaacacatctaattccctaatggaccaactcagacctaaaagtctcttattctttgcccgccttcctctacccacatggattcctgggattctctaaatgcagatggcaatggggagggctggggattcccatcaaggatatttgatcatcggtgacttcacttaaccaataaatcaaacgtgttgaaatacacacaagtaaaaaa

SEQ ID NO: 144367 - DNA, 402 bp, Homo Sapiens
ttttgtgtttaccattttattttatttgatgactaactttcttttattgcttcataaaatgaacctcatggaatgtttgcttacttcccattgcatgaggaataaaaaggaattgcttaagtgtgtttgacgatcattgtaaatagcatataaacaggactgaaaatatagacctgctcaatagtgggcatagatacagtgaaagatactgaatatttatattcatgaatcacagtaagattttcaagatggacttggtaaacagccaggatgtaaactgtcagccccaggattcagtgtttccctgtatcttgcatactctacgcagtttgctctgaatcaccagggttaattgcaagttttgaaagggggaagggaagagcccacatgaagagttgctga

SEQ ID NO: 144368 - DNA, 519 bp, Homo Sapiens
  misc_feature (245)..(312): n is a, c, g, or t
  misc_feature (387)..(387): n is a, c, g, or t
gtatgtttttttatactgtattcttacaataaactaagcttgggaaaataaaatgtcattaagaatatcataagagaaagcatttactaagtggaagtggattatcatagaagtcttcatcctcgttgtcttcatgttgagtggctgaggaggaggggctggtcttgctgcctcagggtggcagagaggaagacatggaggaagtgggaagggaggcaggagaggcagggacacttggtataacnnnnnnnnnnnnnnnnnnnnnnnnnnnnnnnnnnnnnnnnnnnnnnnnnnnnnnnnnnnnnnnnnnnntgcttgaaagtgtttagtcagcagtcctgaacgacatgtaaacaatggttgaatgaaggagcaagggagcctaanggtggggagaggcgggtgtcggcaaggaccttcctccaagacagggttgctgcgaggggcaaatggtgactgatgattcacaagaaggcgtacctgtgtgacagcacctgtaagccaggtgggatcagtgcg

SEQ ID NO: 144369 - DNA, 1059 bp, Homo Sapiens
aggaattattttttcccttaaattaaaaaaggttaagttattcccaaccccctttcatttccatgaaaatgaaggccctttaggaattccccttgaaactttttaaaaaaacattttttatatggtccccaaaaccatggaaacatgctttcagaggatacaaaatccagtgtaattccaaaaatcctcagtaccatttttccccctggaaaacaaatgggaaaaagcacaagactgtcagggagtttccttccttttccgcagtagctgacacaactgtttcaaagcaatgattttttttctttagggactgtatcattgacaggttttacaatttcatttaacactgtgctttgttgagaaataaccacttatttctattttaagggagtcatcatattggaattaaaacacatgtttacagtacatattggcacaatatgaaaaataaacactttttgaattttcaaccccaaacaattgttattaaataaataattattcctcatagtgcatgtcttaatttacctgtcattgcccattgacacagatgaagctgaataaataatgttaggtagtttattaacgtcttctttcataattctgcattgcactcctttcataagccacagaatttaaagctcttttgcccattagtccaaccaaaggaatcgtgttttatgtcttttgtgagagatctggccatgtccagcatcccgtttgcccattaatccaaagaactgctgaggcttgggtctccgggcgattctctgcagaagatgctcaaagggctccggcagttcctccttgatctggtcgctgtcgtaccagtcggaccagtaattcagatcatcattggctcctatttcttctgcaaacagctgagtggagacaagaaaaaaagactgccaaggccacgaggattttcatgttggattttgcgacggacagtcccgcggggtgctgagtttctctggttcctccgagcgcacgctggtcgctccgcactctcggtagctgccgccgggaaggaggtccgatcccgggaattccggaccc

SEQ ID NO: 144370 - DNA, 575 bp, Homo Sapiens
  misc_feature (399)..(439): n is a, c, g, or t
  misc_feature (517)..(517): n is a, c, g, or t
ttttctcttactcctcagggatccttgttctgatgcctggtattttctgaggctaaatgtaaagaagggttaattatcacctgctgtgctggcctggggactaactgggtcatgctgagatcctacggaagcagcagaactatagttaccaaagtgagttctgaagcttactttttgttttaaatggctttttaagattatgctgcattttagatatacctaagactattttaacatacgtgtaaattttcatgcctaacaataaacataggtctatttgccactagaactagaattgcactatccaatatgagttactagccatatgtgcccgcttaaacttaaagagaattaaaaattcagttcctcagtcacacaagccactctctggagtgctcnnnnnnnnnnnnnnnnnnnnnnnnnnnnnnnnnnnnnnnnncgatatggaacatttccattgttgcaaaaagatctactggacactgctgaactagagcattacctatatcactgtatntgccgtgtgaattccttccttctctggcctcctacccagatgaaaccattctgtttaa

SEQ ID NO: 144371 - DNA, 586 bp, Homo Sapiens
  misc_feature (490)..(490): n is a, c, g, or t
tttacataaaaagtataatgctgctgaatggtacccaaatgtctgttgtataccatgccaatacagcagctcagccaaaaatgcgaatagaataatttgccaagtaaaagaaaacataacaaattggtaatggtttctatcttgacagaaaatgaaaatgatccctcaatgtgtggccactcatgtggacacataaaaatgtcttagaagcaatcattttacctcagataacagaccctgacagtgtagtacagcacaatggctgactttcacttcttagaaaagcggcaaccgtgacctacaaaatagtctgggaaccatgtaatttatgcataacacacatgcacatgccatgcactcataatatttgttataaatcattctgaatataagattcctttcctgagaagaatatactttatgagagaggatctaaatcaccagagacttgagaaagctatactgaacagaaatgatgtgttgcttatcngttacaaaatcaagtctaaatgcataaaaggcattcataaggcctatttgctatctgatctgctagtgcttgacatggaggatttggtgatgtgat

SEQ ID NO: 144372 - DNA, 469 bp, Homo Sapiens
gcggccgcacacgcggcagttgtgcggcttcacctcgctgtgctgcatcatgtggcgcttcaggtggctggtctgggtgaaggccttgtggcacacctggcacttgtggggccgcgtgccctggtgggtcagcatgtgggtatgcaggtggctgagctgcttgaagagcttcccgcagtgcgtgcacgcgtgcggcttgatcccactgtggcccaggatgtgggtgaccaggttgtacttggaggtgtaggacttctcgcaggtggggcactgccagcgcttctgcgagccgcccacgtccacgtagtagctgtcatcgatctgcacgttcacgtccaccctctccaccttctgcttggtctcctcgctctcctggggctcggctttccggggcagcagaggttccgggggctgcttgggcaggaatgtgtgccggctgaaggggaagggcgaggacgagggcacgaag

SEQ ID NO: 144373 - DNA, 1025 bp, Homo Sapiens
tttttcaatagtaaaaaccaaaccctaaaattttattaaataatacaaattctatttcactacatgtaagtctggtagggagatggagaaaacatttccaattaagtgtttgaaacaatttgtgttttttcgtctgaaaaggcttcagccgtcctctgccttttaagaggtggatcttcatgattctctggatttctggtctggttcttgtagaggacagaggcaggaatctgaaacgtgatgcacagcatttccttgtttggggccacatttcttaccaggtgaactgaactgcatgcctccagagaaatgcctaacacagctccagccctttgccgaacatcctcagcagggttagcatctttggaaaagctataacaatgcactatgggaaggaactcactgctgcatggctgcccatctaaaagccacttgaaagcactaagaaactctatagcttttgctggcaagttcatgacaacgtgcacagagggttttctttcttttgacagacccagcagctgcattaactcttctttgactggtccttggaggaagtctttcccatccaagttgaagactttcaccttttggtccactttatttaatttacagttgtacaacagccatttatgagattcaggattgagatcattggcaaatacagtgcagtttttctttgctactggaatggcaaagggcccaaccccagcaaaaacatcaaataggacatccccaggtttgagaagttctgtgatacggctgtgttctgtagacagacgaggattccaatagacttttgaaaaatcaaattcataggtgtagttgttttctcgaacctttgtcatcatgttctgctctccagatagcacttccatttggaaatttcggtacatattgtcaatattatttattttatttactgctgaggtgattcctggatttttgtcaatcataacctggccaattaaatgtttgaaaggcagctgatgatctcgaaggtttaggtgtgcaatcctcgtgcc

SEQ ID NO: 144374 - DNA, 1233 bp, Homo Sapiens
ttttgagtcaatatgatttattgttttctcttctgccattaacattctagctactgggtaagttgttctccatccttgggatctcatggttgggaggagaggtctgggttccctcccacaaaactctcaacgatagaatagaagcacagctgcctcagttatctcacggctgctgctgtaaccaacatgagttccatatccactccaatcaaaaccagaaaaatctccacactgctggggactggcctctggaaagtatcctcctccaccaatgcagtggtgctcagtgttacatccggtgaccctcattccagcacacaaggcgttggctgctctctcgttattaaataccctgaactgaacaaatcccgcagtgaattcccgctggccatagggtgagtaataagatgctgttttctgggcgtcgccaaaatcatagaccacagggatcaccgggccgttgtcagtccaacactttccttctccatatttcactggatatttctggtagatgccaaacagattatgtcccagtgtctggaggaagccagtgtccgtgcggtacctcagcagggagctgtttctccagtgctgcatgggggacttattgggcacgtgccagatgcccaggtccttggcctggatgtcgtagtagccagggttcttgtagtcatcgctcgtggccgcctctgcagatccaaaggtgttgtagttggcccagttgccgtccccctctgggtagtctgctttgttgccctgctgactggaccagcgatcgcccaccgtgcacttcccacgcatgtcattctcgtgcacgctggccaccagggtccagccgccacccccagaggtcatgtcacagaaggtctggtagataacaccattcttggtgcggagaaaatacaggccatcaaatgcactaggacattcgtctttgatttccttgcagcttctgggcagagatggagacgaagaacaggtccattccttgaagtaagtattagcctcatctgtactccatcctctggtggtcgctatgagaaacagcaggaagctgagttggttcattgtaatcttgtctgagtctcagctgcactttccttgggtacagagagctccttcactccctccctccactgcgcctggagctcaacagagtgcagctttctccaaaaacgctcctcccggccgtaatggccgaattcccgggcatatgtccggtaccgtcgactg

SEQ ID NO: 144375 - DNA, 950 bp, Homo Sapiens
gcaaattgatgtgatttagtctcctctcctccttgttagaattccagtttttccgtctccaaatagccggggttggaagatgggttctcgccctgacaccgcagagctctgtctcatctatagaacaagagtacagccgcctccgttatctcccgactgcagctgctcttaacgtgagttccatatccatcccagtcaaaggcggagaagtccccacactgacggggtttgccctgtgggaagaaccctcctccaccgatgcagtgatgctcagtgttacagccagtaacttttatcccagcacaaagggcgttggctgctctctcgttattaaacacccggatctgatcgaatcctgcacaaattcccgttgaccatacggtgagtaataagatgcagtcttcttagcatcaccaaagtcatagaccacaggtatggctgggccattgtcattccaacatgtccctgatctgtatttcactgggtatttctggtagatgccaaacagattatgtcccagtctctggaggaagccagtgttggtgcaggtacctcagcagggcgctgtttctccaatgctgcatgggggacttgttgggcacatgccagatgcccaggtccttggcctggatgtcgtagcccagggttctggaaagcaacagacactgagcctgactgggccaggaggtaccaggaggcagaaggtccacatgtgcagcctcagctgggctgagagctctgggatcagtaggcagatggccagccacagctcagacaccccactcccagctgatgatcccaccaccacccagggccctaacagccttgttgagaggaagttgtgattcaagtcctgtatttctctcttcttctccagcccttccccatatccccaccttccagccctccctcctgcaggctggtggccagccacactccacacctcaccc

SEQ ID NO: 144376 - DNA, 582 bp, Homo Sapiens
tggtagaagatatcggcaagttttatagatgaagctgcaacagacctatccttcaaagaggaagtatgaacttgcttacaagagctgcaaacgagagaataccgcttctgggaagaaagtcagaacatcactagtcttagataattgggacacagaagaatcaggcactcaactgttgattgtagacatttcagacatgcagtgactgcagcactagtattcctgatattgaagcataccttgaaaacgtctttggcaattacatatgaccaccttacatctgttttcagccactgctttctaagagccatgtagcacattttcttaatccatgtaaaatgatttgagttcctggcgtttaattaacatagaacttttggggaaagttattatatagaagatcacatctatgacatagtaatctttaaaataagggaaggaaaaaaacataagcttgattttttgttatgaatatatttcctaatttgtaaataaagcattgttggctcatttttttacattacatcctctctttaaatcttttgcaaaattttgaagcaataaagactaacatataaaaaa

SEQ ID NO: 144377 - DNA, 610 bp, Homo Sapiens
ttgacctaacaccaaatttatcactttttaaaaacaagagattttccccaaaagtgaaggaataagaaacaaatccggtgtccatgcattcccaaactgcagtcttgatcccaagatacctcctcctctctcagaccgagttggctcccttggaatccagtggtggtatatgggttgagggttcttttgtgctgggttccttactgcctctctcgtgagttttagggatgcattctgcagttttttttgctgtcccagaggtgcccagccttgactccacttctgtgtctgggatcccaggtgggcgggactcctgggttcctgtgctctcagcggccccctcaggttcctctccttgctgctgttgccccaggtgatgttcaaccatcatctggagctctttcattgtgggtgtgatccttgtcatcttcttccgttgccgtggagacattgccaaagtggacttgagatgtgggttggggatccggtcttcatctatctctggggatgactggtcacttgttagcacgaggttggcaggggtggggcggcgctcccaatctgctccgcccctcggggtcaaggtggggtccaaaacgggaaccggaaa

SEQ ID NO: 144378 - DNA, 549 bp, Homo Sapiens
ttttttcaatccagagaaaaatatatttgaaaaaaacaacaaagttatgaatacagtggtttttaacaaggtacaagggacttcatgatagttttgttaacaatgcttcttaaacataactttcaatggacagtgttgattttatgtaagatcaagacaagaggaaaaggaagattatagaatttccagatggagataaatgtcaaaggaagatgaggcttcagacagataaagacaacaaacaagtcatgggaaggccccagtgagagctgactcagtgagggagactacacacatgaggaagtgataattgagtgtttcgcatccagcaggaaagaacctagaaaaagaggagaaaaaaggaaatgtattataaaatctcaacaagttgtctaacccaagaacccaagacaaattttgacagctttgttggcttcagtttctagcattatttttattggttgaattaggtacaagtagctctatgggtagcaaaagcccacaggtgatagagacaatttctgcaaaacaaacacattgtatcttgtg

SEQ ID NO: 144379 - DNA, 525 bp, Homo Sapiens
  misc_feature (11)..(11): n is a, c, g, or t
ttttttcatangagtttggcatgttaatttttatcagcgacttctggggcctagcaccattcccggaagaagggagttgtcgggcagggtccttaatgggggttgcaattcttgtcttggttgggaaagagcctagctgggaacaggggtcgtttgtgtagtaactgtattaagcagttctggtgggtttgttgtaactgttcggtgtccttggggtcccatctagcattgtggggtcttggctctttctgaagaggagtcttggctcaggtgtttgggtcctccatatccgaagttctaaatcaccagttttatccaaaggctgagagcaagtactgtgagtagcaagtgagtcagtagccggtggatcttttaattctgggttcacattttggtcaaggttctgcttttcacgagttttgcatttctatcctgtaaaatgagggaaggggttgttgaactaggtgatcagaggccatggctgccattctgaggttgtgtcccatctggttctttgacagtgac

SEQ ID NO: 144380 - DNA, 510 bp, Homo Sapiens
ttttttcaaaatcattctttctgtttattgactttttagcttctgggttttgcaaataaaataatattcttagcttcctttatacaataatatcagagtgttttatgtataataagaaattcacccttcagcctctattcactctttatcctgagagagaaactgaggcacagaggcttgatcaggtctgcaggttatcatgatcagctcccagaacaaagtaaagatagccaaaatgtaaacttttccagactttgtgactggtggtccagtgtgtgagataggtactcagatgtcctggcattcagtctgatttttattatccagttccagccaagagcaagatgcccaaagtctgaactcacattactgtccatttcatctgctacaacacaaagatggaacgctgttatcaagtaacgctctgttctgcgcctgcagccactgcacagcaagctaaattcttgggaagcctcacttccttgttcatttcacagatgtatgtggaag

SEQ ID NO: 144381 - DNA, 613 bp, Homo Sapiens
ttttttttgcatcaacatttttattgaaatacaaaaagtgcaaacggtgaaatacatgattggtgccaaggaagtcattaagtgtgaatgtgaacactggattcacacagtacaagcacccgctccctggggtacagaccagtgggggacatgagaaagaccaaatagatccgaaaggctccccagtgaatggggctgtgagcgacacttgatacacaaaggagggcggagagcagagcagccctggccgaggctagagaccaagggactgatgaagaaccagcagcagcccaggccccagggggctggatgcactgctgatggtcttgggagagcccagcgaagttatgcccaggcccagcctggcttgcggatggggctgggctggtcagtgaggatccccacagtacgggctctggaatcatcctgcctggccaaggtcatgggggcagggtcactgcaggtacttccctgtactccccaaggacaaggctgcaggaagagggatccccaggaaggagtgtaattctacgagacagtgggagtgagatcagccatcactggggccgaggttctttgaaagacaacagggctggccgggcgcagtggctca

SEQ ID NO: 144382 - DNA, 534 bp, Homo Sapiens
tttggtttgttgtcattttattttaagtaagaacaaattgtttgagtgctcagcatgcccttcatttttttgtaagttaatgaggtggcaaccacagttgagaacacagattggaggaggcaatattgtttttctcaatttaattccattaatgggggcagtgtggtattgggtagattctgcatgttagtcagagtcttcagattgctgttgatcttttggatcacatgaagtagaagttaaattcacatcttctttatatgaatttgaggaagctgaagtgtctggttgcacatcttgttctgaatctagattggacaaataggctaaacatgtgtcttgtactgagctttggccagaagaagaatgaaaatctgccttcacgtcttctgattgcaggtcccctgaggtttgccctatacatttcatgtcccctggtttgatgtctctagtgtacatatctcctttttgtgtaactctggattgaaggtcttgttggtctttatcttgagtgtcttgacattctaggttatg

SEQ ID NO: 144383 - DNA, 399 bp, Homo Sapiens
ttttaaatgttcagagctattttaattttattttaactgctgatttctctattcagatctcttgactcagaagctacagatgtgggtttagtccctattattggatgtagcacttgattcgagggaggcagatgaggagctttgtagcaggcagcctgggatgaaatctcagccagcccacttttcctctcggtaactgtgacccagggactcagcactgcccagcttccatttcattagctctattgctgctgagccttcagtacaatccttccacttacaaaggctgcttcaggaaagcagagataaaagggctgtgtacctgtagtaagagaagtatagtgaagtgggtagagcggaagctctggtctcagggccacccaggtttgaatcccatca

SEQ ID NO: 144384 - DNA, 757 bp, Homo Sapiens
taccccattcttcttttagttccttcaactgaacagagtttatattttgtaatgggggtctcagagcatcccgatcccatctgtaatctcccacagcaaatagtttggcttcatctcgaacagccttctctcgagactcaaagagttttggcaacactttgataattggcttaagcaagatgattttggaaccaaattcacttaaggctttcctcagtgtctctatacaggccactatgatcttgggattcttattgtccaagcctttcaggagctcttcttgaacagcctctcctttctcaatctctatgtacataagacagatctctatgcccagctccttggctttagctttaggttgattgaacaccttacttacaacacctgacacaacttctcctgtggtttttcctgctacatgggcattttcatcataaacaagtgcagcttctaatcctttcaattgaaccactgcattggaatcagtgacaaattttttgatcaatcctaaaaatttggaccactctgggctcttttcatcctttattttctggaagatcttcagggcctcttcatacccacttaaccttgctttccacagcttgtgttcacatttctgatcaactggcagtttcaaccactcactgtcatctcccattgtgcttccaggttttccttagaattaagagtatttcctcagctgggtcagaaccaagcggcctgctctaagccgtttgaaaccgcttgggccgccccc

SEQ ID NO: 144385 - DNA, 476 bp, Homo Sapiens
aagcgccctgaccactgggtcccaggtcccagcccgcatgccaggtggcccacgacgccccccagagcctgccctctctgctctcaaggcaccaagacgctgagtggcagcatagccccaatggacgtctgtgtccggcacttcctgcaggccacaggctgcagcatggagtcggccctggaggctgcatccctgcaccccgcccagttgctggggctggagaagagtaaggggaccctggactttggtgctgacgcagacttcgtggtgctcgacgactcccttcacgtccaggccacctacatctcgggtgagctggtgtggcaggcggacgcagctaggcagtgacaaggacctcggctgagaggacacctggccgcagcgggatgccatcagggccgggtggttggggagctggtctccagggagtgagtcgggagccctgctggattgatgcccagggcctgtgcggccgc

SEQ ID NO: 144386 - DNA, 1102 bp, Homo Sapiens
taatatgtatattgtaaatgaaataattttaaacaaaataagggtgagtctatacagtcatatcggtaaacgggggacaaaaaagtagatggagattagaactagaattaaggcttcaagaggaattgacgacaattcattaagaattcagaatgccgacatgaccaggccaaggcaagatgaattgataccaacagaaccccagtgatgggcacgtaagcaataacaaagcggcggggttgtgggcgtaccatatgcgtcatcccatagaagatgcagcggcctgcgggcagccggtcgatggtcaggagccccacgatgcctgggtcgcggtggtggaaaggcagcatggcgttgaagaggtgggtgatgaaggtggctccgctccacacagcatcctctgccgcccgcaggtcagccactgagtgccctagggacacgcagatgccacgggccgtcagcgcccggatcacttcgtggctacggcccaactctggggccagcgtcacgatgcggacattgtccaggggcccgtaggtggccagcaagtcctggaaggcatcggcctcgaaggagcggaggtgggcctcggggtgcgcgccccgcttctcccggctgatgaaggggccctccaggtgcagcccgaggacccctgccccatggggaccaccactcttcacagggatctgaggaacaaccttgtgataaacctccggtggggaagtgaccagggtggggcagaaggaggtgacgccgtgcgacaggatcctccgggccacgagggcaacccccgaacccacgtcctccgtggcttgagagaagtcaacaccaaatccaccgttgatctgcacgtcgatgaatccgggagccaagatgcggcccccgcagtcccgccgctcgtcggccacgcgccgctcctcaaagaacagcttctctgggtccaagatgcggcctccgcgcacccacagatcctccctgagcagtttccctccgcgcaggatccggcagttagtgaactggagcacgcgggcccccgccgcgccctgctcgccgcgcatcgtgagccgtgtcgggagcgagcggctccggagccccgcggcgg

SEQ ID NO: 144387 - DNA, 1596 bp, Homo Sapiens
aacaaggcctgggcaccaatccaagcagggctcccgactcactccctggagaccagctccccaaccacccggccctgatggcatcccgctgcggccaggtgtcctctcagccgaggtccttgtcactgcctagctgcgtccgcctgccacaccagctcacccgagatgtaggtggcctggacgtgaagggagtcgtcgagcaccacgaagtctgcgtcacaccaaagtccagggtccccttactcttctccagccccagcaactgggcggggtgcagggatgcagcctccagggccgactccatgctgcagcctgccttgtgggccgtcagctcgttgacattccacttcctgctgtcctggcgtttgccggccgttgcccaggcccaccggcactggctgtcatcggtgactctgcagcaggccctgggaatggcaccgtgggtggtctgcctgtcgcctgggtttgtgtgcgtgccatgtgcactcatgccataggagctcctgtgggcagagcttgggctacagtccgggcacccggtccagccccttggggacccaccactcacagaccacctaaacccgcacccgtgctgctcactgacctgtggcctgcaggaagtgccggacacagacgtcccttggggttatgctgccactcaagcgtcttggtgccttgagagcaagagaggggcaggctctgggggggtcgtgggccacttggcatgcgggctgggacttgggacccagtgggtcagggcgttcacctgccacgtaggccgtcagaccgtccacttccacttcctgctgtcccagcgtgtgccggccgttgcccaggcccaaggcagggatggcatcggtgaccagcaccagcccctggggatgggcacggtgggcgatccgcagggcggcggggttggtgtgcgtgccatctgcaatcatcccatagaagatgcagcggcctgcgggcagccggtcgctggtcaggagccccacgatgcctgggtcgcggtggtggaaaggcagcatggcgttgaagaggtgggtgatgaaggtggctccgctccacacagcatcctctgccgcccgcaggtcagccactgagtgcccgaggacccctgccccatggggaccaccactcttcacagggatctgaggaacaaccttgtgataaacctccggtggggaagtgaccagggtggggcagaaggaggtgacgccgtgcgacaggatcctccgggccacgagggcaacccccgaacccacgtcctccgtggcttgagagaagtcaacaccaaatccaccgttgatctgcacgtcgatgaatccgggagccaagatgcggcccccgcagtcccgccgctcgtcggccacgcgccgctcctcaaagaacagcttctctgggtccaagatgcggcctccgcgcacccacagatcctccctgagcagtttccctccgcgcaggatccggcagttagtgaactggagcacgcgggcccccgccgcgccctgctcgccgcgcatcgtgagccgtgtcgggagcgagcggctccggagcccctcgtgccgaattcgccacccaggcctcgctaccttg

SEQ ID NO: 144388 - DNA, 1314 bp, Homo Sapiens
tccagcagggctcccgactcactccctggagaccagctccccaaccacccggccctgatggcatcccgctgcggccaggtgtcctctcagccgaggtccttgtcactgcctagctgcgtccgcctgccacaccagctcacccgagatgtaggtggcctggacgtgaagggagtcgtcgagcaccacgaagtctgcgtcagcaccaaagtccagggtccccttactcttctccagccccaggcaactgggcggggtgcagggatgcagcctccaggggccgactccatgctgcagcctgtggcctgcaggaagtgccggacacagacgtccattggggctatgctgccactcagcgtcttggtgcctgccacgtaggccgtcagaccgtccacttccacttcctgctgtcccagcgtgtgccggccgttgcccaggcccaaggcagggatggcatcggtgaccagcaccagcccctggggatgggcacggtgggcgatccgcagggcggcggggttggtgtgcgtgccatctgcaatcatcccatagaagatgcagcggcctgcgggcagccggtcgctggtcaggagccccacgatgcctgggtcgcggtggtggaaaggcagcatggcgttgaagaggtgggtgatgaaggtggctccgctccacacagcatcctctgccgcccgcaggtcagccactgagtgccctagggacacgcagatgccacgggccgtcagcgcccggatcacttcgtggctacggcccaactctggggccagcgtcacgatgcggacattgtccaggggcccgtaggtggccagcaagtcctggaaggcatcggcctcgaaggagcggaggtgggcctcggggtgcgcgccccgcttctcccggctgatgaaggggccctccaggtgcagcccttgtgataaacctccggtggggaagtgaccagggtggggcagaaggaggtgacgccgtgcgacaggatcctccgggccacgagggcaacccccgaacccacgtcctccgtggcttgagagaagtcaacaccaaatccaccgttgatctgcacgtcagatgaatccgggagccaagatgcggcccccgcagtcccgccgctcgtcggccacgcgccgctcctcaaagaacagcttctctgggtgccaagatgcggcctccgcgcacccacagatcctccctgagcagtttccctccgcgcaggatccggcagttagtgaactggagcacgcgggccccccgcgcctgctcgccgcgcatcgtgagccgtgtcgggagcgagcgctccgagccccg

SEQ ID NO: 144389 - DNA, 527 bp, Homo Sapiens
gcgatctcacttttgggccttcttcctcttctgctcgctccctctccccgcactacaggcccagtgagaaggcggtcaaacatcgactcaggaacaaaaccagactgcttaactatatcagtccagtctggagcaactgcaaattcaggattttcttccagccacctgggtagatccttcattggaggcgccatagctccacccatcttcttcccatttcgtttattgacaacaggcaccctttcttctcctgtcaaagtgtttatatccaatttattagggtttcgacatctatgtcgtttctgtttcggtttctgaaatgaggaaaacagcacatctgcattctttggtacataacttggcatatcaacagtgtaagtagggtgcagcttcagccattcaactaaatccttatttttaggagcatcttcccccaccagcctagtcccatcttcaagattgataacagggatccgtgtgtctgggtccagctgtccgggagaaggaatgtttcttgtgggtgggtc

SEQ ID NO: 144390 - DNA, 506 bp, Homo Sapiens
  misc_feature (347)..(347): n is a, c, g, or t
  misc_feature (417)..(418): n is a, c, g, or t
tttcatcatcataatcatttattttttgttttcttaaatgaagcataataaacagttaaaattctcagaaaaatcatctatagttgagtgtaaaactcccctaaatcagtcttctagggccacatggagcagaagcagcttcccacccaagcacctctgaactgtgcgtgaggaggcacaattcagggttgtttctcgagaacactcattggaaaacaattcactactgcacgaagagggccaaagatctgcagagaaatgtgaagcaagtgttttgcactttttatccaaatattgattaggttttaaagcaactgatcacttgctgacagctcagccacgggatngccacgcctgagtctggaaggaggagaagcaccaagtccttacggtatgagatggcactgaatgaggctnntatggcggggtttcccacaacgtgaccttcgtttgcttctgaggtgctccacccattcctgcagatcctgctgtgttgacgacactat

SEQ ID NO: 144391 - DNA, 506 bp, Homo Sapiens
ttttttttaccattgaattgtgaccttatgtgtcatttattgcattaggagtgagccaatgttttaccctttgagatgagcagattgcttgaggggagttaaagtccttacatatgtcatcagcaaaccattttcacggactgctgggcagaatttaggcagatcagggaagtgatgacaatggctgggggctccaggcctccctgttcctgctcatcacagcctcacatcttggctgtcagtccctgagcagccagaaagatcaggagtagggtgaacacagcagagatggccaggacagtggagacttgtttactgtcaccattgggaacctctgaaggtgctttaaaagggtggggccaaaagctgggggcagagtcagaacagctggggcagcagtaagtctctgacccctccccacccagtgattttgggaagtttttctgcttggctcctcagacccagcttgcccctctgtcctggaaatgagcctcaattaatttctc

SEQ ID NO: 144392 - DNA, 553 bp, Homo Sapiens
cccaccaggtggaccttaccaagaactacgtgagggatataatgatgttgctctaatttccaatgcaaaacggatggataatcatacccaaagtcagcatctggatgaagaagtgtatcgaaaagtactgcaactggattggatgatcggccctcaaggccctcagacaagtattctaagtcctgatcaacaatggaaagatgtcttgcttcttctaatttactatttaagattgtatttgggtgtattgcttctgatgataaatacggtctgtagcctgataacatataagaaaggcatattcctgagggtccatttcctattattaccacaggaaaagtcactgacgaatcttccagtaaagaagtttcttcaactaatggcatcgctttaacttttcgccccaagttgtcaccaaagtattgcactaaggaattaaaaatctctccttcagtttcagtgtcactatagtttctgaaatgaccggccagggagcagcggcagcaccacacgggcatggagcgctgcgcgaggggcgcccgagcgcggccgc

SEQ ID NO: 144393 - DNA, 335 bp, Homo Sapiens
tttggtgttccatcaggttttacttttatttgaccattctcaaagttcagatgagcatctgcagctggtctgagctaacatgaagttctgctgttgtttcctcccttactgtagggtgacagacagtagttcccaaggtgtgatctgaggactggggatctggaagcattttcagggggtccacaagacacttctggggggcttatgaagccctcccttttccaactactaccttgggagtccagaatttttcctcatttttttccaatgcaatttggacatgcaattcaggagggcagagctatacagagagtctctttcagagtaggtatttt

SEQ ID NO: 144394 - DNA, 219 bp, Homo Sapiens
tttttacatgcaatacttttattttagacatgcaaggaaagctatttcagaatctactaatttaaagcaagcagctgtatacagacagcaaaagaagcaacattttgttacagcttagcacaaggcatccaacacaaacaggcatgagacaatgcatatttatgtagcattaaaaccagatgaataatatattgtggggcaggaggaggaaaggagggg

SEQ ID NO: 144395 - DNA, 694 bp, Homo Sapiens
tagtgaaaaggatttggtgaaacaggcaaagaccttaaatagtgcagcaaataaactgatcccaaaacatcattaggcatttttaagttggtcacgtcgcaagtccgatatcacaacttaattgtaaaaggaagaaatctgaaagttactacatttaagctctgattctatataaaatgtcaccaaaaagttgactttgaatttgttggacttttaaaaaaccagttggaaatataggttgggtttttttcttattgttttctccccagggttagaaaaattggtataagttcctaattaaaagctgaataaactttgagaaattatttctgagttgaccaataaataaaaataccactttctttaaaaaagcctagggaattgaagctctgtacatatactaatgatgcctttacaacccagtccttgataataccagattctcggtgcattgttcatgtctgtatctgcaagcctgttctgccattgcagtgtgatgaacctagaggtaactaccatgtgaacttgaactcttctaaaatagttctgtgtctcttagaccatgaccccttttcacttttgttatataggtttaatccccaagccaaggatagtacttagtatttcactacacttctattctcagtaaccaagattgcttgcaactttttttgccttggtgacttttgaaaaa

SEQ ID NO: 144396 - DNA, 735 bp, Homo Sapiens
tatttgaggacttgctgtattgtttttttgaaagtaagttgaagacatagaaaattccatccggaaacattccccacgcctcacctaaaaataagaacattcacctacattatcacattaccatcatcacatctaataaaaagataacctaatttcaatattatcatctactatacggtccatatttaaattttcccaatgagggattccctgagcatcagatcttttcttgctcaggctggacacaggtggcaggaagagggcagtgcaaggcaagttgctgactaggacaaagccccgggaagccaggccccattttgctgactcttacagcattactttcctaataaataatactgttaattgttaagagtaatcaaatgtctggcttcagtggttgtgaatgtgatttttacttccagcaaacccataagaagaaatcaaatctgagttatttatgagtaaaaaataaactgaggctgagcacagtggctcatgaccacttctcagtcctacctaggaacttgagttttgcctgcaagaccatgaatgtcagcccataactcaaataccgtaggtttgtcagtactagaaaatgttgcatagatttaggttgcaaactatacaaaataagcttaaagacatgtgaaaccatgacaatgcagaaatggtttaaaaattgattattggaggaaagttatcttattttaataaggaagtacttgtactataaag

SEQ ID NO: 144397 - DNA, 554 bp, Homo Sapiens
agggctgtgtgtgttttgaatcagcgtccaatatatggtactgtttctcccatagccgggattcacgtggtcccggtatcaaggggtggaagtggaagtggcaccacttaccatcaaccctagtgatacactagcaaaatttttgcttcctgttcccgcgacattactttctgctggcacagaggtcttagttctagagggaggaatgctgccaccaggagacacaaaaattccattaaactgaaacttaagattgctacctggacactttgggttcctcctacctttaagtgaagaggctaagaagggagatacagtgttggctggggtgattgacctggactatgaagatgaaatcagtctactacgccgcaacggaggtaaggaagaggaagagttgcatggaatacaggagatccattagggcatcttttagtattaccatgccctgtgattaaggtcaatgggaaattatagcagcccaatccaggcaggactacaagtgatccagacccttcatgaatgaaggtttgaatcactccaccaggaaaaaa

SEQ ID NO: 144398 - DNA, 416 bp, Homo Sapiens
ttttaaaggcatagacatctttattgggagatatgggcagaaaaattatttcctcagggtggggcatttggctaaacacttgccaatatcctttactgtgtaatttaggtaacacaggcagaaaaggcgtttgaaaagcagaaatcaagtggcaaatatcagatctgagggacgcaatgagggtggagttgaaatccgtggtccttggatttgaaacttaccagcccgtgaacaaggttggtattgcttttggcataagacgacagcctttcttttcattagctcaggaggaatactggctttccaagtgagctcctccaatccagtgatatttgcacatctcacctgggcctttcggttacaaattcaccaccttaaggagccgtgtgaaaaagcaagaacaatcaataagaagg

SEQ ID NO: 144399 - DNA, 428 bp, Homo Sapiens
tttgggttttctgatttgaagtcccttgttattttcaccacacaattatgtccctttttggtttggaatctaaaacacagaaagaaataggattcttctctctggaaaacattaggtaatgtttgggtaatgtccatggtgagagattcaagtgaacatctcagcagcctgcgttgggaggcaggatctagacgtgccaggctgggatggatccgagaggctcatctggtccaatagtgaagctcaggtccagggaaggagcacagcccggggccactgtggggatgtggaaacagcatgaggctgggacgaaatcctgctccaccacttactgccaggagacttgggcaagcggtttaatcagaggctttttcccatttcaaatggggataaacagggccctcctggcctgggtaccctcgggctgt

SEQ ID NO: 144400 - DNA, 1559 bp, Homo Sapiens
  misc_feature (74)..(359): n is a, c, g, or t
tctcatctctcctccctccttgcgtcgccctcccctctctgtcttggctctcctccggccctctcgctttgccnnnnnnnnnnnnnnnnnnnnnnnnnnnnnnnnnnnnnnnnnnnnnnnnnnnnnnnnnnnnnnnnnnnnnnnnnnnnnnnnnnnnnnnnnnnnnnnnnnnnnnnnnnnnnnnnnnnnnnnnnnnnnnnnnnnnnnnnnnnnnnnnnnnnnnnnnnnnnnnnnnnnnnnnnnnnnnnnnnnnnnnnnnnnnnnnnnnnnnnnnnnnnnnnnnnnnnnnnnnnnnnnnnnnnnnnnnnnnnnnnnnnnnnnnnnnnnnnnnnnnnnnnnnnnnnnnnnnnnnnnnnnnnctcccattgtgtcctccggcgtcgtagactgccttcctgctgccccgccgtgtgcgtgcccagggtgctccctccccggttgtgccttccttcgtcaaggcccgaaggccgcgtgcctcatgccacgctcccctcgcgttgcagcttccggagagtttccaactgctccttcacgtgtgtccagtacaggacctccatgtctgcaaaggacggaccctttcgccgaagccgcctgctgtcggcatggtcatgcataggcagccaggtaccactggtggaagtcactgcagcttggcagcagcccttcctcttgcgcttctgtcccagagcctcctccacacaggggggcacagagtaaggcctaccgtttcttgaagggcttagactccaaggagtcaaaggggtccaggctctgccaggggtctggagtctccttcacgcaggatgcaggctctggggccccctcccgctcccgcagcatgtacctcctgggcagggcagcactctgctgcgggctcctggactccttgggctccagagcggccttgggggccgaggcctcaggaagctctactgcctcctctgcatcctcgtcctcgcccccacccaggggcatcgggccttctggagaggggcctggctcctgggagaagccgagtgctgggacagggctcctgcacacggaaacttccattggctgctcctcagtcctcccggtgtccttctgggtccctggcatgggggaaacgcccgctggttccatgggggacatgccctctggctccaacatgaaggcccctctggggtggggaacgcacgtgttcatcctgaaatccttccggctggccaggacctcaccctgacggctgtacaggggattgttgttcttctccatttcatcaggggccaccagggccatgggcaggagggggatgatgaggacctcactgggcgtctgatcattcttgagatccacgttagtccgggagtcagggaagtcatccagcgacaggaactcattctctgcctcctgggggaccccggagctggcaaccccattggccctgtcctcctgcaccgaagagagctgcttggcccgcctctttccagagatgaaatcaagggcctggtagacgagtgagtagaggtattcccggacgcgtgggtcgacgatatcgcaggaattccggaccggtccac

SEQ ID NO: 144401 - DNA, 977 bp, Homo Sapiens
ctggtccagaacggcttgggccgagcgtcaggactctactgcttctctgcatcctcgtcctcgcccccaccagggcatcggccattctggagagggcctgctcctgggagaaccgagtgctggacaggctccctgcacacgggaacttccattgtctgctcctcagtcctcccggtgtccttctgggtccctggcatgggggaaacgcccgctggttccatgggggacatgccctctggctccgacatgaaggcccctctgggttggggaacgcacgtgttcatcctgaaatccttccggctggccaggacctcaccctgacggctgtacaggggattgttgttcttctccatttcatcaggggccaccagggccatgggcaggagggggatgatgaggacctcactgggcgtctgatcattcttgagatccacgttagtccgggagtcagggaagtcatccagcgacaggaactcattctctgcctcctgggggaccccggagctggcaaccccattggccctgtcctcctgcaccgaagagagctgcttggcccgcctctttccagagatgaaatcaagggcctggtagacgagtgagtagaggtattccaccttcttactgtagacgcaggcagagccctggatcaacaacgctgcctcaatgaagttcattgtggtcttgccttcgtcaaaagaaatgcagatctgatccagctcctccagatactcgcccagctgggccgccacgtccacctcccagttcttggtgaggtcgcggatgggctgcaagaggtgggcgaagcgcgcctccacgtcctccatgtccgggagggaacgggcggcaaagggaccgcagggctgccttccgaggggtacggcgtcctcagcccgccactagttctggcgccattttgctgcctcgtgccgaattcgccacccaggcctcgctaccttaggaccgttatagttactgcc

SEQ ID NO: 144402 - DNA, 1080 bp, Homo Sapiens
  misc_feature (160)..(160): n is a, c, g, or t
  misc_feature (168)..(168): n is a, c, g, or t
  misc_feature (289)..(289): n is a, c, g, or t
acaggttttgggggcccccccttcccggttttcccggaaggaaagttcccttcgggggccaggggcagcccttttggtggggggtttccgggactcctgggggctcccagagcggcccttgggggcccgaagtctccaggaagcttttactgccttcttnggcatccntggtccttggcccccacccagggggcatcgggcttctggagagggggcctgctcctggggagaagcccgagtgctgggacagggctccctgcacacgggaaaactttccattggctgctcntcagtcctccccggtgtctttctgggtcccctggcatgggggaaacgcccgctggttccatgggggacatgccttctggctccaacatgaagggcccctctggggtggggaacgcacgtgttcatcctgaaatccttccggctggccaggacctcaccctgacggctgtacaggggattgttgttcttctccatttcatcaggggccaccagggccatgggcaggagggggatgatgaggacctcactgggcgtctgatcattcttgagatccacgttagtccgggagtcagggaagtcatccagcgacaggaactcattctctgcctcctgggggaccccggagctggcaaccccattggccctgtcctcctgcaccgaagagagctgcttggcccgcctctttccagagatgaaatcaagggcctggtagacgagtgagtagaggtattccaccttcttactgtagacgcaggcagagccctggatcaacaacgctgcctcaatgaagttcattgtggtcttgccttcgtcaaaagaaatgcagatctgatccagctcctccagatactcgcccagctgggccgccacgtccacctcccagttcttggtgaggtcgcggatgggctgcaagaggtgggcgaagcgcgcctccacgtcctccatgtccgggagggagcgggcggcaaagggaccgcagggctgccttccgaggggtacggcgtcctcagccggccactagttctggcgccatgttgctagggaaggaattccggaccggtccagcctctt

SEQ ID NO: 144403 - DNA, 1078 bp, Homo Sapiens
  misc_feature (882)..(1008): n is a, c, g, or t
tggtcccggtccggatttccgggatatcgtcgacccacgcgtccgcgcgccccgggctcggccgacccggcggggatctaggggtgggcgacttcgcgggaccgtggcgcatgtttcctgggagttactgatcatcttctttgaagaaacatgaagttacactatgttgctgtgcttactctagccatcctgatgttcctgacatggcttccaagaatcactgagctgtaacaaagcactctgtgctagtgatgtgagcaaatgcctcattcaggagctctgccagtgccggccgggagaaggcaattgctcctgctgtaaggagtgcatgctgtgtcttggggccctttgggacgagtgctgtgactgtgttggtatgtgtaatcctcgaaattatagtgacacacctccaacttcaaagagcacagtggaggagctgcatgaaccgatcccttctctcttccgggcactcacagaaggagatactcagttgaattggaacatcgtttctttccctgttgcagaagaactttcacatcatgagaatctggtttcattttttagaaactgtgaaccagccacaccaccagaatgtgtctgtccccagcaataatgttcacgcgccttattccagtgacaaaggtaactgccaacagttgactttttccattccgccccctcatgtggtctgtccgtgtaatctattaaacctatataagaccatcttttggagcagccttttggttttgaatttgtatcatctcacataaattctagactcaataaccctgatcccatcatatctagaggcacatggccagaaggataagagacaaaacaatatctccaatccttgagtagattaaaaggcatgtcggctgnnnnnnnnnnnnnnnnnnnnnnnnnnnnnnnnnnnnnnnnnnnnnnnnnnnnnnnnnnnnnnnnnnnnnnnnnnnnnnnnnnnnnnnnnnnnnnnnnnnnnnnnnnnnnnnnnnnnnnnnnnnnnnnttaccgggttggtggcgggcgcctgtagtccagctacgagggaggctgaggcacggagaattgcttgaac

SEQ ID NO: 144404 - DNA, 596 bp, Homo Sapiens
ggcctgtagctctacatggaccgccgctcagcaccctgccgtgccgtatacatcttctggaagaagcagacatccagttcaacttcagtttgtggatctgctgaaggtcaccactcagcaaagcatacattgacatctaccccctcaggaagctgcccagcctcaaagatgggcatcttatcttaagtgatagttgctgatcccatagataacagggcaggaagtttcagctgagacgatggagcatgcagtggaagaggtgaagcacagcctgcagctctttgaggagtattttctgcaggataagatgttcatcaccgggaaccaaatctcactggctgccctggtgtccgtgggtgaaaatgatcaagcccatggcagccatctataatgtcttcctcaacagctccaagctagctgagtggcgtatgcaggtggagctgaatattggctctggcctctttagggaggcccatgatcgactaatgcagttggccgactgggacttttcaacattggattcaatggtcaaggagaatatttctgagttgctgaagaagagcaggtgaccctaggcgcagcctgtcccgcagggc

SEQ ID NO: 144405 - DNA, 1016 bp, Homo Sapiens
  misc_feature (803)..(803): n is a, c, g, or t
  misc_feature (871)..(871): n is a, c, g, or t
  misc_feature (966)..(966): n is a, c, g, or t
tttgtatttcataagccaacccttattttattaaaatgtgtacaagagatggggaaggaaaaggaccagactgtactgtggccatgtacacaaaggcatgcaccacatcccagctctgctgccctgggctgtcccacaggcagctctctagaacttgagagcctcaaaaggggcctcatgaagcccagatcttccctggtcaagctgatggcattcgtataactgaaagttggggaagaccaccaggtcagtggagtggagaggttttgtatatggtcttctttgaagaaacttacttcttgcaagccctggcatcttccaattggctgtcctagtagtggacgtggcatcagcctaccagcaatggaggtctactcacccttcactgagttttgtccctgaagtcagaagccctggcacagccaagttcacaggccaaatcacacttcaggcccacactgcttcacgcaatgacacacgtacagacggatatacagaaacacttctcaaggagtgcatgagcatggttcatttcatatttctttcaatccagtctttaaaaggcagcaccttggtgaaggcagtggagagcctgtggctgcatgttttatcatagctccagctgaccagtcccatcagatgccagcgtggctcaggagatgctcgtcccgggaaggacacagccgcgatgcctcctgtctctgcagtgcagatatcagaaggggcagtgggttcccagctggcacagaacatgttatcagtgacactcactgggatgccatggtcctcatgctgctcctcanacagcagcgagtccaccacactgaccaccccagagcgcagtgtgtcgttcttgaagccagggctcctnacgtctgccaggacattccagccagccacagtgatgtgggactcctggaaggaagtgctgagatcccgactggcagcgaggcagatgggctggantcgggtgctgatacgggccttgtctaggagcttcaggatggcgatgtcag

SEQ ID NO: 144406 - DNA, 420 bp, Homo Sapiens
atttggacaaagaaaaaaatccaagtttgttttcatctatggtagctattggataacagatttttcactttgagaagcgaaatgaacaagtcctttctgtcagtcaggatagactaggttaggctgtggtaacactctccaaatctcagtggcttacaacaacaaaggtttatttcttgcttactcacacaaacctagacacaaaatgaaaacactctcctgttttcacatgcatggagacagacatgaatgcataggcatttacagaatcatggaatcctgggatgtaaactcatgcaaacacgtttatagatactggtcagcttaaatagcacaactctctctttattggggatttcaagagatcccaggacccaagaagggtacaagaatatccactgtcagccaaggaaatgccca

SEQ ID NO: 144407 - DNA, 581 bp, Homo Sapiens
atcattttaggaggtttatttgccaaagcctcaggaggtcctgacgacaggggcccagggtggtcagggcacagcttggttttacgcatttttagggagacgtgagacatgaatcaatgtatgtaaaaagtacgtggttccgtccagaaaggtggggaccactcagggaggggcttcaggtcatgggtaggtgagacaaacagtggccttcttttgagtttctgatgagcttctccaaagaggcaatcagaacatgcatccatctctgtgagcagagggatgactttgagtagaatgggaggcaggtttgccctgaccagttctcaacttgaaggggtccaagctattttgctttcacagggggaaaggctggccactcaggaggggctgatcccgacctggccggtcccccttaacccagcccaggccgacacctggggcagaagcctcagagaagctggtgggtgggtgtcgtcctcagccaggtgccggcagcgtttccagaggtgatacgtgggcaaagccaggagcagcagtcccagcaccgcactgctggtccacagagccgcgggcagcgtgtc

SEQ ID NO: 144408 - DNA, 459 bp, Homo Sapiens
  misc_feature (325)..(385): n is a, c, g, or t
ttttgctgttccataaagaatttaagaattaaaatacatccgcattgcagagggctgggtagaatgcaaaggactagtttaaactcgggctgtagaaactgcactgaggcaaccttgtcttggagcgtggacgccttcccggggcacgtccgtttcggatgcagccacaaagcaaatggggtagaacttggacgagaaccgcaccccgcctcccattccggacctcgttgaggtggagagcagcgtggggtgggttttctttcttattgcgggcgttcagcggatcgtgtctccgagtccgggcgtccggctgcaagcccgtggnnnnnnnnnnnnnnnnnnnnnnnnnnnnnnnnnnnnnnnnnnnnnnnnnnnnnnnnnnnnnctgcctgcgggctccgacgcagtctcgagagcaacaggttaagccggcgagacgtcagcgcgccccctctccgc

SEQ ID NO: 144409 - DNA, 550 bp, Homo Sapiens
ttttttgtgtttgaagccagagacagactttattgcttacattggacccttgagataagtgaggattccccctaaatgtttcagaatcatcttagtctcatcctttctttctctccagccagagaaatcttgggaaattgacctgaaacaactggaatatctaattgatgaaaagacagcttgtctcattgtcaataatccatcaaacccctgtgggtcagtgttcagcaaacgtcatcttcagaagattctggcaggtacgtccagcagacttcacagaggacgaggtggggacagaatccttcagctgttgtgtgaaatgacaaaaaccagtcattccctaagttccaagcctggggtggaggtggggagctccactgatgtctctcatcaatactgtgccataggagtggtaggcctggcttttaattttcttcagcaaatccaagacgaatatacaaaggatgagattagataaagatttcagtttcccgtatgccaccgctgccgccaattttccaaaaaagcctggctcctcttttcctgttcc

SEQ ID NO: 144410 - DNA, 685 bp, Homo Sapiens
gtacatttcaaatatattttattactttccatcttagaaagaatatgaaacctgcatgcaatgctaatggtttctgacatgtacatagcatataacacagcagtacaatgcggcatatactggggggcagtgtgtggagggggcgttcttaagggtatatgtacagaggaaagggcgcatggtcatcttagctttcgaaagaggactgcactgtttaacattgaagaattacatggggaatcacaaatatattgctttagtactgcatgttctgttgtggtgaagggaaagaaacatgctttgaaggtttttccttgtcaacagaatgtgtgtctgtagctgtgtattgcgcatgtattcatatatttttaagttttctcctaaggtttttgctgacagtgttgggaacctcacatgcttctgaagcattaaatattgaacctgtgaacctttcagaaatcctcaggttgggaaagaccccacaccttctttaaggatcatttgtctcgccatcacaggatcttggaaatgtttcctagggtgtgtaaaaattaaccaggggggaatgaagcacatttttctggcaaccaaacttgagttcctcagagaacagatgcagagagacctgctcctgcttgcccggctacagggccactgtggagtcacctgagcttgaccgccatac

SEQ ID NO: 144411 - DNA, 651 bp, Homo Sapiens
  misc_feature (68)..(148): n is a, c, g, or t
  misc_feature (193)..(216): n is a, c, g, or t
aagagacggggtcttatatgttgctcaggctagactgctgtggctattcacaggtgtgatcatagcannnnnnnnnnnnnnnnnnnnnnnnnnnnnnnnnnnnnnnnnnnnnnnnnnnnnnnnnnnnnnnnnnnnnnnnnnnnnnnnnataattactctttttatgattccttttttattccgaatcttgcannnnnnnnnnnnnnnnnnnnnnnnccatcagcctcatgaggaggttattattattattttttggacctttcaaagaaccagatcttggatttactatcctctggctttcatttgcttgagtctttatagtttgcaaagtttccattttcagaagaagaaagagacccaggaacattctgtggcttgctcaaggtcccacagcctgctagcaagtggctgaactggaatttaagctaggcccctgactccaggctgctccaagagatctctgagccaagcttttgaaggcaccatcagtggtgcctgggatctccggggatctcccagcaattttgtcttcttttaggtcacctgtccctttacctgctgcttcagtttcttaggcacagggcttctctctggtaacagacaggaagctcctctgaggctacgtgcccctgggagactgtggggaggctg

SEQ ID NO: 144412 - DNA, 749 bp, Homo Sapiens
ttttcctgacgtatacagatcatcctggacagtttatttctctaattctgttaatcaaagcagagatcagaacggattaactgtggcaacgtcgtatcaggagcacaaagagaagcctgcctctttcagtttggtcttttctccagcaaaacagaaatgcaatttagtcaaacacatacagaggccccactgtactgcctcactgatggagggaaatacttgggtgcaatcacacacagtgttagtgattggcaactgtccagtgctatttcgctaaaactggtaaaaacagtttccttgggcaagcagctgattggctacttcatactgtgctgagttgggctcagcttgtctgtctctgggaggccctaaggggctcctctttttcagctagggataaggggagactgtcaaccagtatcttagcgtgaactgtcaatcgctgagcccctgccaaggactctctggaagtccctcaggtatgctgaaaataccttatactgaaaaggtagctctcgctgcatccactgccacatagtattcccagtgaggcctattaacacagggccataactggctcttgaggacacacttgagcgatgtgtttttaaccaaacctcagggaaggcagccttgtcctgctgctgttgcagcctccatagctctcttgggatcaaggactgtgttgatgtcttcaagccaacaaggagcttggtgccagtactgtcctgaattattggctctagccc

SEQ ID NO: 144413 - DNA, 402 bp, Homo Sapiens
tttagcagccatggatatcacattgcataagagatagttccctcccttagagataagaggcagacgtttaaactgtcagttgcgatggcttgtgactctcatgaggtctgcgtaggggtcagcacggtcacaaaacctgtggaggaggaggtggttaggaaggaaaatccaccgagatgaagctgtactggatacaaaatcacacgttcctgggctttggcagggagcttgcccactgcacttcctgcctcgaggctatggctggggtgggattctggcccttgtaggcggcctgggtccagtctccgccatgcactcactaactccattactgctaatgggatgtcatcagcgaagcgagtggtggcggcaggtggagtcccgccccaagacccccgggcg

SEQ ID NO: 144414 - DNA, 275 bp, Homo Sapiens
gtagataaacaaagtttggaggtaaatctagacccttgaattagtcctagatcatccataagaagctaccacatggcccaagatggctgctcaaatgccagcagttgcatctacatttcagacaggaggaggaatgtgtggggaagagaagggcacacttttgtttaaggtcccttcatggaaatcgtatatgatttacttctgcctgtatttcattgtccagaatttatcccagggctgcccctagctgcaggaagagctgggaaaggtagttt

SEQ ID NO: 144415 - DNA, 662 bp, Homo Sapiens
  misc_feature (298)..(298): n is a, c, g, or t
ccaaatttctgtgaaatagttttgtctttagcagtcgtttgtttcagttataacggttataaatggcacttcatttgatttctttaaacattttacttggcctgctgtttaatcaagacatggaagccaggacctcgggacgggggcggggctccgacagaggcggcgattgtggcggcccatttgtaaatgctgcggagattgaggtgtcggttcgtgctgctgagctgcccaggcttcacggagcgagctggggaagccggcctctctggggtgtctgtctctctgacctggctgnggcggaacttgagttcctgtgggcagcgcggcagccgcagtccgctggagcagggtggtgaagtagcgttgctggctgtcctaagggccggtcttgccccagctttgtcaagggcttctctcttgaagcttcgtgtggattcatggctttcaagaacgtgttgtattttaggggactgctaaatcacttcccagaccaactagttacttctcacggtctaagagtggctttgaatttgctgtttgtatccactctcctccctcaccgtgcagagaatttatctttttttcaatactgctttaaagaatgtttacatagcactttctggagatttcaaggctgtcagtttgttacattttttaaa

SEQ ID NO: 144416 - DNA, 1037 bp, Homo Sapiens
  misc_feature (1021)..(1021): n is a, c, g, or t
cttactcatttgtgtttattcttggacttatcctgacataatggggtttttttaattatagattcacactgcatttattcatcacccctgtcctctcatccataactcaaatttactaccagcaacacaaaatacaaagatgtgtccagtttcactacagctcttcgcgtttacaagtgtcgagcgcttgctttcggaacgcccttgtgattggccgagccaatgccagtgacatcaaccaacttacttttgattggaaggctggttgctgggactgtagcgtttgcaggaagtcacttaactgtttgggagctggaaaaccgaagctgaagttctcttttgccataggaacgagcgcaactgactaggaaagatgtgtcccaaagctccgcaagctggaacgtgagccaggaggcccggaccggccacgggaccgcgaggcactccgaaagtgtgcggctgccccttccctgcctcccagctgttacccttttaaatgtcagtgttcgaggctgtaggggtagcacgaggcagcgaaacggaacagtcggattggccgcacgcctcagttctagacgcacctctccaccgaaggccgttctgactggcagggggagaaagtaaacagagttgaatcaccctccccactggccaattggagggggtttggtttgtgacgtgatgggattctgcgaaattgttactgagcaagagaatgccggaacggtgcggaccggccggagcaggggttcagaagccgtcagtggactcgggaaaaagtgtctcttagacctggcgctcggcgggaccctcgccacccgcgtcggggtgatcgggtgaatgtcctggggctttggctcgacggcgaggcggccgagggcgtgcacctctcttgcagtttcctctcccagcgcctcgggggcgttttcagtcgaataaacttgcgaccgccacgtgtggcatctttccaagggagccagatcagaggggccggcgcgcccgtcgggggatcgcggccgcnagcttagtccctttag

SEQ ID NO: 144417 - DNA, 469 bp, Homo Sapiens
accttatctatgctcccaattccaattccttgtgaacatactttgtaaagtcctgtaaaatcctgtctcttttgccatgctgctgcaaggtcataaagtagataaaattagataaaacctaagttgcaattctgtttttcctcaaaatctaagacatgtcacaaaataatttactgcctttgtttctctctctggtaacatcttcccaccacatgtatttcccgccttaaagagattaaaaggcaatcacccaaaaccaacagtggctaccctctccggaccccttccatgctgtgtaagctttgtactgtcactctgctcaataaaacctacagtttttttcttctcttggtctgtgtctccatcactcgccgcgggcagccgccacacccaattttttggtgtggctaaggcaagaacgtttggcattacatttaatttcagaaccagcaggaccgctccccaggtg

SEQ ID NO: 144418 - DNA, 407 bp, Homo Sapiens
  misc_feature (70)..(70): n is a, c, g, or t
agcactgggcggctggagtgcaggatcaggtggggagccctagactgcttcagtagatgtgtgaatctgnatgtttctgagcactgcctctttccttcagtagtctccctgagaagcaccacatggctatgcaaaggataaacacgttgtgggggcgagacgggtctgagtctaaggaacaaatgacatgtggcttgaggccacactccagacacggaattgggtttgctgaaagccttgagttggggtctcagctagaccactgacttgctgtgtgatccttgggcaagttccttcaccatctcagtcctacatggagcttaataaaacctgctttgtcctgatgactaaatggagtaaggcagggaggatacaccgtgcttggctcattaaagacatttaaccaa

SEQ ID NO: 144419 - DNA, 501 bp, Homo Sapiens
agttctttcttctctaaatatgtgaataatattttaagcatagtgttatttgttctttttccagaagttcccttctggaaaagcatatctttgtataattgtaggaaaaataatcttgacttacttggtccaaagcacattattaactggggattaatttcctagtagtcatctgtcgggagggctgatccaccccgaggcacattaactggcgtgactttcaggacggcggggctgtgggagccactggacacatctgccccccaacccctagcctcttgaattactcaagtccctcagctctgttggcacaaatacgtgctggatgatagaagaaccgtttttcccatggatgaactttttttggcttgaattcttacaaggcctgacttctggatctggagaaagaagacttctttgtgtcccatcttcaaaatgcctcctccacttgttgcagaagcctaaaattcctttagttggggcagaaagccaattattatt

SEQ ID NO: 144420 - DNA, 500 bp, Homo Sapiens
ttttttctgggatttattgatttattgataaacagtaaaactgacttcctgtcagcctgggtatagtggatgatcaggagagggaggggtccagggaccagtttcgggtgggcggctagctctctggctcatgtgcctggtttgcacagaagagctcactgtggacaaggtgaccttaaggagtctgtgggcttcaaggggacagctggagataaatacctggctcaggggaagtgcctggcttgagatgtaaatgtggcagaaagatgggaattggagtctgagggtaaaagataaaccgggaagagggtgaagatgagaagcgagcgcctgggtgtgagcgtgaaggatgcctatgttaatagcctgctgtggggggtcagcctgccaaggagcagctagagctcaagaagcaaattcaggagagcaacacagccactgagccctggaaggtggcgctccacaagctctgatcggggctcccaaaacaatgacagatg

SEQ ID NO: 144421 - DNA, 512 bp, Homo Sapiens
tacataaatgacaccttcacataagagttttacttagacaataaacctcttctccaaaggcaaatgcagtcatcattttaacgagattgattctccaagactcgccaggatgcaaataaaatcagcatagccaatgcattcacctgtcataaaggaaaggaatgaagggaacagcacctcaaggaggagatacgattagtaaaacccagttctactaaaacctcagtcacttatgttaagttatcaactttgggatccaaatgataggaagcaatcatgatcagcactttccagaagcctgggagaaaaacaaacgagcatcacgtaggagtatttctaagtcataaaatacaaatgaggaactatcaattgggattaaaataaagggcataagatccagttgaaagcacctcaactgctgtggtcaacgtctccacccataaatgatgacttggcaatactgtattcattgttaaactttccttaattcaagccacactgttgttgttgct

SEQ ID NO: 144422 - DNA, 715 bp, Homo Sapiens
  misc_feature (378)..(413): n is a, c, g, or t
  misc_feature (580)..(580): n is a, c, g, or t
ttttttgttagatattttactgtatattttttcggtgactatttctaacacgactcatagatgaagtaaaagtttggtagaaaaaactgaaattcttatgccacaagagttgattaatagtagtattatttaaaaggaattatataataaaagctagtgaataacaattacataattaaacatatataataaaaagctagtggaaaaactagtggtaaacaattatgtaaaaataataaaaccaaacatgctttaaacattttaaattcgaaacatttcacctttctgatcgagactgttcaaccaaaagagcaactaaagctatcatcttttcaagggcagctggcctgtatttttcttctgccagagagaggatannnnnnnnnnnnnnnnnnnnnnnnnnnnnnnnnnnngataacacttcaacttgaggattttcaggtccttttgttcccatgtaaaaatgtaccattgtagatatagcttgcaatgaaagcaaaaattggctctcttcttcacccatttttgcaaattcgtaaaggaaggcaaaatactctgtaagatgtttactgtgaggttntacaccatgttccataattaataacaaggttctcacaaagcgagtgacacatgaacgaccacctatatcttctactgacgtatccatatcatctgacccatcgttcattcctggctgcaaatagagatgagcatt

SEQ ID NO: 144423 - DNA, 696 bp, Homo Sapiens
  misc_feature (62)..(71): n is a, c, g, or t
tgggacataatttaactcgcccataactaaaaacatttcttcttccacaattgctagattcnnnnnnnnnnctctttctctgtctgagcactatgtactccccataatgttgttgcaaaaggcagaggctggcatcccacttcagtagcatctttaaatctctttggttgattctgaattctattatttttcaagatgttggcagccatgccattaacagtagtactttctttccatatttctagatcctgcccactctcctcaaagtgacatggtgtctgaaaagggcttaaaaacatttctaaactggttccacacggattttctaaagagctatgttccaggaaagattttttatgtttctcattttctccagcttctgatgctacaattgtctcttgttctaacatctttgattctgagcaagagctgtctttgttttgtaaagatggctctgtcattttgctatggcctggaccacctgattcataaatgtacaaaaatgcatcatttgtattttttctggtagcttctgaatccctagaactctgtgtgtttacgttttctgcagtagtttttcttttcacagcttttgactgcaaattaaacatctcataggaatctaaaatattatttacatgcttcctggaaattgctcctctcatcggaagtcacacgcttctgaaggattagcat

SEQ ID NO: 144424 - DNA, 489 bp, Homo Sapiens
ttttatttcatacctgaggtaatgttttattaaatcatttacacaaatttccttactttgatatccatttatgatggccttattcattagggtatagaccaagagattctcaaaagcacagttgcttaaacaagagggaagtttccttctctcacagagaggcccattgtgagctggcagtccaggccacgtaggtgtctatgctccacaaggttgttcaggtacccaggcttcttctgtcctattgttcttctagcctctaggttaccctcatccataggaatcacatctgcattcctgtaatgtacaatttctccctggaagccatgccttctcttcatcttcagggactccatgttcatttcatgcctttgatccagctgttaggaaatgggctctcccttcggaggaagcacgaggtgccacctgtctccaagtctccacatcttcatttttttgtttgtagaaagggcatggtgagaacacccc

SEQ ID NO: 144425 - DNA, 729 bp, Homo Sapiens
tttccatgctctacgttttattgcagatataggtggacagtcattatttctgacactttctcagcattacaaggagtactctagggggaaaactagtgtacggtgttacagaaatagattgatataaccacatagaaaccagttactttactgagccattgtagccaatacaatattcccttaatgacattaaacagtcacctagattccaaattcagtgtaggactcctatctaaaaacaacctcagttatctacaaattaagttgccaagagggaaatttatttttttcatcatacaatggtttacaagaaatatattcctgaatgacaataattttttttagcattcaagtttattattatttaggggacattaaaacaagacaatggtcaacagcaatcactttatggcacttgtggggcattagaaatcagtatattgagaagcctccgcttaagaggacttggagtggttactgtacagtagatactagtgtcacataaattgcaataacatgatttatcatacagaagaggtgttaaagttgtctctggccatgagctatttaagagagaggcttttgcacaatgtttttgagcccagcaagtgagttatggaatcctgtaagagttccttcttacctgtaagtcactgcttttagcagtggtgatctcctcaaaacccctgagcaatagtaggcacaggatttcaacctttagttacatca

SEQ ID NO: 144426 - DNA, 744 bp, Homo Sapiens
  misc_feature (254)..(267): n is a, c, g, or t
  misc_feature (632)..(642): n is a, c, g, or t
tccaaactttctaacagaagaaattgaaaaactcagcatatggagttctactgtatttatggaatagcaacacttctgtcttaagttggtggactggcttacatactgacagcacactcaagccacggtgctattcaggaaatccagattcacttttattcaactccaacgtttagtttctaaagcagtttagggatatttttaaaccaacccatttgacatctccagtcccatttcaacattattaccgcacnnnnnnnnnnnnnnctgctgagattatggtatacatgtctcaaatgttggcagacttgttcagaactattacttcagactggttcaccttattatttcactcttatgtaattacttatctacaactaccttctcagaaaaatttcttacactgccacagtcaatgcaaatttcaattctcggtaccaacaagctgaaactgcactttctgaaatcctggaaagtacttcagttcaacgagaccaattaataaactgatacaacctgctccagtcacttaaaatgaatgctgcacctgcatatctgatctttctgctcagaaaaagcagaaccttgccttccccttgatctgtgtcccttaacaatcttgtttttctttnnnnnnnnnnntcactctaatgtttatgatcacaaaaaaatctttgtgtggggggaagccaggtctagtaagtttgagaacttttcagccagtttgtgggtcttttctaatag

SEQ ID NO: 144427 - DNA, 478 bp, Homo Sapiens
ttaatggtttgatttgttttaatgcacaatagtaagcaaaatgtgatcatttactatatgcttgatgttataaattaacattcaatacaaacaatcatccttatcttctgataaacaagacatcaggcaagccagataaaagccagctcattggtattatttgggacatctgaatatacatgagatgtgggagcactctcacctctcatggttgtgtggttccccagaactgcagcaccaaatttgccctgctttacataattgaccatttgtgtatcgatatgcatggactgctgttgcgaccagtattgtgggagtgctcatggtggctggtgctgtttttggtgttgcctgatttcctgttgctgccgttccctggcctttcttaggctgttttggggctgtgtactggaaaaattcatttccatggccagcagctgcctgatccagtccaaaaagtgaggccaatctggcaccg

SEQ ID NO: 144428 - DNA, 938 bp, Homo Sapiens
tttaaagcaacacactcacaacactgacaataatttaattaataaagagtccaccttttaatattcgtgtttaacacatctatgggtttggtagaaagcaaattcatgaccttgaaatagtagtaggtgataacatgtgacttgccagtaaattctcatatcttcactgtcacttaggagataatcgaagaatatgaacatatttaattcctaaagttcctgcaataacctacatacaccttaacattcagctttattaaacaggctttttgaaatagcatgtgaagaagttatcgctgtgcctcattttgaatggtattttctgcttcattttgattttcaacagcaaaaggatatggtgctcttcctaaaagaaactgttcccatttgggaatatattcttctactgatgcccagtaacgagtctcaagagaaaccacctcaggccgtggaagtgggtgaatcctggtctgtagtgacttttctgctgcttctatatcctttaaaagactaaggttccttttaaaagcagtctcaacagtttggagttgagatgccttttctgtgtgttgatcacccaatttattctccatttgttgaagtaacattaatctttgtgatactatttcttcatgtcttttagaaaggcgaatttcttgagcaaacaaggaagtcatctttaatcaaagcttggctaaagacactggaccgacacagacagaggtctagtgaaatgctctgaaggcctccgaaactgcaggcaactcatctggttgggcttaaaaggttaaagtgcttgcccttctcagagtcatctgccctccggccgccccaactcccgcttatacccaaaggactcatgaaccttcctcatcagcctggctctttacgttaacaacatcctccccagcggtcctgcaaggccctgcgcggccgca

SEQ ID NO: 144429 - DNA, 978 bp, Homo Sapiens
  misc_feature (162)..(162): n is a, c, g, or t
ttttttcacttatttcagtatttattgactatcagtatattctgccctgtggtgttaatggaggataccaagatatgttggggttaaataagttacaaaaagacatgtaaaccaggaggtcatcctgtggttgtaagtggggaaggctccctgaggatgtancaattggctgtttcaaggagaaaggaaggtaatagaagtcaggagctaaagggcatcctgtcactgcttctctggaggtcactgcttctgtcttccagatcttagacaaactcttggaccgagagagccagacacataagccacagacgctgagttctttctactcatctagccgcccaaccacagccagccagaggtctccttcaaagcacgggggcccatctgccccaggggccctgcaaccactgacctcaggctctgcagggcctgctcaaccagggagtgtggcaggggctgggccaggccccactgagggcttcacagagaagaatgtgcctgagagttccccacattccccctgtgagggtcttccatctgaggcagctttgaccccaaggccagaagggaaggttcctagccgcttggcacttggcagtcgtggaggctataatggacggggatgggggtccccaggacggcctaagaagaagcacacaggcatggccagcattgacagcagtgcccctgaaacaacatcggatagttcccccaccttaagcctgagaccacttcgagggggctgggcccccacctcctggggtcgaggtcaggacagtgaccgcattagcagctcttcttcggactccctgggctcctcatcctccagtggaagtcgccgggccattgccagtggaggagcccggtgcgaagactgttgaagttggcaggtacaagggcgccccccctagagtcatgccctcatgtacccatcaaccttcagaggcacctgccctttcactttcagtgggcaaaaaa

SEQ ID NO: 144430 - DNA, 679 bp, Homo Sapiens
gagtttcaagttagtcttaaatgtatatatttattctctaatccatgtcaagaatttaaggtattctaccacagtgtagaactcaacaggactagtagcttattggatcaagaaagactgaaacaagttaattaaatgtctgtttttttccatctaaaatttatcaggcacatagtaagtattatattacagtacctgttagtgttgtcaaaggcaagacagattcagtatctataacatcagatgcctggataaagccatgtggtgaaggaacgataagtattgtttcatcatcaattgtttgatcaacttgttcttctatagtgggagactctaaaccctcagtaacataagcactggctaaatcagagggtgattcctcttgtttaaggtcggtgtcagagatttcttcttctgttctgaccataacactattcatcagttctgtgctattttggtcactgaatttggatacatgagcatcattaaatgatggctccacagtcatcttagggtgatgaatttcatctgggaaagtgtctgcttctagggcgtctggaggctcaggaaaatcagatgactgaatatcgctatcgactgtcagtctgctttggatatggaagaatgatgcctctgtggcacaatctgaatgatgactctttggtgtgtgacactgcac

SEQ ID NO: 144431 - DNA, 578 bp, Homo Sapiens
ggttcaataccatactttattagtatgcccaggtcatggcccaagcagtaacagagactctagaattagagttaagtccaggaaagaaggagattctgagtggcatagatttgtctcaagtgatgtagtggtgagtgacagaattaactactaataggcagcactgagttctttcctctcctttccatttgatctctcttctcaggccatctcttttcccattcacattttgctgcatcttcagtatgaaagtaggttgaaaagaactgtaattttcacaattactggtcattttatttatgtttctaattcaatgtattattcattttcctcttcaaaggaatcacattgtattttggaaatgtatgtgtaaaaaacatggaaacttgtggaaacccactcttgaacttccctggacatgattcagagactgattgaggaaagggctgaatgtctggctttagaggatgtttgtggtgcggcaatgggaagctgggaaaattggcctcatgaagtggcagcacctcacctgttctaagaggagggagtcggacactaatgcagtgtgctgcgatgga

SEQ ID NO: 144432 - DNA, 208 bp, Homo Sapiens
gcctaatagtatttgatttttcactttaagcccaaatccggtttttgctactcccttctcccctgtaaagccccaccagtgtgtatatttctactctcatagcaacatgacttgtttagcatttgtcttattatatatgctttttatatcatattcatttgttaatatgtcacttatatacaataaaatttaccgtacgggcataaaa

SEQ ID NO: 144433 - DNA, 451 bp, Homo Sapiens
gacggatggcattttttagtgatgatgcatgatacaaagagaatagctgaagatctttaaaaagtaagaatgatctagggctgagcgcatcaaaacactgttttgactaggagacagaaacagactatggacatcaaggagggaatagcaaagcatccagatgtcatctggggaaagcagtacttttttgctacttgctgtaaaatttaattgccacagtattaatttaaaatataatctaccttaatcttattagtagacttctacacttgtccaaaattttatatatcttctttccatttcccaaattaacatctcccccaacaaccctattttaattgtaccactcaccctgtggcaagaactaacaacttgggtgtcatttttaagcctttcaattccctttcttccagcatccaatcttctctagattatttccttaatctttctg

SEQ ID NO: 144434 - DNA, 638 bp, Homo Sapiens
cggctgcccccacccatggctgtcccaggtgctttacacagctcatgctggactgtggcagaagggaccggaacagccggccccggtttgcggagattgtcaacaccctagataagatgatccggaacccggcaagtctcaagactgtggcaaccatcaccgccgtgccttcccagcccgtgatcgaccgctccatcccagacttcacggcctttaccaccgtggatgactggctcagcgccatcaaaatggtccagtacagggacagcttcctcactgctggcttcacctccctccagctggtcacccagatgacatcagaacctcctgagaataggcatcaccttggcaggccatcagaagaagatcccttgaacagcattcattctatgagggtccagataagtcagtcaccaaccggcaatggcatgagaactcttttttcttggggaaggagaggagggaaaaggaccagggtcaagggggaccagaggttgaccactgtggaatgtactggagagactggcttctcagctgaggaatgcatttccatcagtgaagaatcaaccggacctgttgctagcaggcaatctccatttctcagtgacagaagcatgtttgagatgccgtgggaaacc

SEQ ID NO: 144435 - DNA, 1254 bp, Homo Sapiens
gaaaatgaacattttataatctaatctctttaattttatgtacatgaatataatgtatgtcaactttgtacatgagatacatatagtatttaaacattttactcaacaaacaagaatttacaatagcaatataactgactagagggctatcaacttaataatacttagattagatctgtactttaataggaaaagaatttaatagtttacaatcatagaaacactgacatttaaaacaagaatttataaaataatttatatatatcctagcatctatagagaggaatgatttgcatttgtgggtgtgtgcaatgaatggcatattttaaatttttaggtaataaaataatttagaagcagttcatgcagtggtcaaagcaaggaatggcaagttccttcaagaagccctctatctttgacaccaaccggcatcagacacacactaggtaccatggggcacgctagaacaagtctccttcaagagttacttatataaacatcaatatacacacgttgatatccttccttccatagtacaagtacaggtcacaacttctctcaactgtgggagtagtcagtttatacttaaagtgatttaatgtcccttctggagttctacataatatatctctataagaaggtaactaacagaactttctagttttcacaaccttactctgatactttacagagtgccccccaatgtcctatgacataaacatccagcaggtaagatttgccaggctgaagacctttaattgtttctgtggtcactgctttctgcaggttttgactgtggaaatatttacagaggaccttttctgacttcttccttatatctggtcctagacattggttttgctctcttttcttctggtcttcattgtagttatcatccacttcttttttgtagatgcgaaacttgttcctttcctgagtgcctagccaagccacggtggccgaggaacaggtacggagcttgtcaaaggctttgattcttgtgtcttcaggaagagagggaaatgactgcttagtaggccttgtggtagctagaattttcaacatagatgctcctttcttgtttcctttcagtcgaacgaggtatttagctttaggttttcctctaagctgaaactgctgaatgccttccacattctgagacagaagaagtttcccatctcttctcacttggatttggacagcacccggccgtaatggccgaattcccgggcatatgtccggtaccgtcgactg

SEQ ID NO: 144436 - DNA, 908 bp, Homo Sapiens
  misc_feature (510)..(535): n is a, c, g, or t
agatttctcgggggttttcgcatggagcatgctgggttgggaactggcggtcctgtaagtgtgagagtctggtcgtgctggaagttggcttctagaagaggtgtgaagtgtgtgggttgagttgaagtttgttgcgaattttttaatgtcgtttagaacattgtcacaatgtgtttaaccgtgactcactggtttttaaccacggttagatacttgttagtataacaggtgagtgtacttgtaccgtgatgactgtaatatatttcaaatactttttggagggtctgatattgatcctgatataatttgtcaatgactggccttgaccacagcataagcagatgtctgatgaatgtgctaaccacccttctccaatatacctccatcctagaggacaatattagtctcacagtcatgatttccaatataacatatttaggtgttcagactgctggaataatagatttcagattgctggaatctaataatgctgcctttgaagatgactgnnnnnnnnnnnnnnnnnnnnnnnnnncctgttgtagaagtaatgtgcaactcatgaggtactttccctcatccgaacagatgaccaagattttgaagactaccttatttctcacttagttaaaactttcaagaaaaaatatttagaatgacttaaagactcttgtataaataactacctaaatacagaacaaattgggaggatgtgggtcaaacacagctgagctccactcagctcaaattagatgagtcttttgactacaagctcattttcttaacatatgggttcctgcacgacttgataagatttggctgagcaccacagtaatcttttaagacactaatccaaaccccggccgtaatggccgaattcccgggcatatgtccggtaccgtcgactg

SEQ ID NO: 144437 - DNA, 582 bp, Homo Sapiens
tttctttagcaaaatatggttttattacttacacttattatggtattgttaaatttgaaaagaaatataaagagaaatgaactgatttacgcttgttttcaatattaaacaaccagaatgccagtaaatcttttcaatgccccattttggattcttaggtgagagtggattgctgggacgtgttggcaaattttaaatacaactgattgcctgttttccatattcatatattgcgaatgtaactccaggagagtgaattttatctcaaaattctccaagagttgccttcaaatagcgtctctgtgcatatgcatacggcatacacttgacgtctaccatgtgtacctgtgcgctggaaactagtcgtggaactgaattgaattagtggatttgagttgaaatgaacccatccaaacgaccccaggtctgcgctctttgaggcttctctcagtaacatttctaatgaaagcaagaaaagcagtaaagtaaaacaacaatagtaataacccaccatgagcaccaggttacccgaacacagacccatcgcgtattctagcgcaacccaagtatttccgggtggcg

SEQ ID NO: 144438 - DNA, 485 bp, Homo Sapiens
ttttttctttttaaacattttcattgagaaattgacacggacactaatgaggtttatcatggatggtctcagaagctttcctgtgtatgtgaagcagaactataggcctttttgtataagttcctgtacatcttgtccatgctgttctcaaagatgggtcggtgggattttcccttataagaggctgccctgttggaccagtattcaccgtcatccaaatggaaagtgccacgtggctgctgacatgagctatactcggggtcactgtcataggcagagtctctacataaaagacttcttttcagttccagttcatcatctttctctaggtctctctcatcatataaatgtctttgatgagcctgatgtgatttcaagacattttttacccggtcatggatctcatcgcagtttgaaggtgaacaccaatcagaatgaaatctttccctgagagaagctctatttaacacagggcttggagaatg

SEQ ID NO: 144439 - DNA, 619 bp, Homo Sapiens
atgggccaaggtaacccctaaggggttttcttaggcttcttggagcttagatttgtatgtatatcaaaatgtctttaaaatgttaagttgggcagaaggcagttgaagtgagctttcaaggtatgggaggttttctacattttatactatttcaatctatgcctttaaagttgcttatgattttagctgtacactcattttttaaggggaagaagtttccttggaccattcgcctttcttagatgtcctcactccctgtgatctcataaaactgcctatttgacatctctatctagaaatctaattaaagctcacactcagcatatccaaaactgaattcttggtcttccctcccaaacttgcttctccttcagtcttctccaactcagtaaatggcaatgccatacttctggttgctcaggccaaaaaccctgaagtcatccttgattcttcttttagcacccatatccaatccattagcaaatctggtagaccctaccttcacaatatatctaaagctgaccacctcttttgacctctactattaacgccctattccaagccaccatcatctcttccctggattgaagctgtcatctacaaaaattcttcttatatc

SEQ ID NO: 144440 - DNA, 170 bp, Homo Sapiens
cctcttttggtgtcttaaggctttttgaagcttattttactgtgagtttattgggagtatatggattattttcgattaaaaagtggaattattggtccccttccaattgtaattatcttgaatttttatacattagtttctcaaatatatagaatgcaaaattaaaaaaa

SEQ ID NO: 144441 - DNA, 596 bp, Homo Sapiens
tttttttataaagaagtaataggctttatttttcagagcagctttaggcttccagaagaattgagcataaggtacagagacttcctgtacactcctcccggcctggccacgcacttggacgccaggctatggctctactcgtcgaggaggatccgtcctcacaccacgagctggctctggtactgagcccacatcccctgctgtgctcaggctgccctgcttgccaaacaacatgggctgtgccaaagctccaggaggctggccaaggcatccccaggctactggtctggctgctgcatggggccatgcccagacgacccagggagctctatggcggggtggcggggtggcaggctccctgcgtgctgcaccagacacttgtctctgattccaaacatgtccgcctcctctctcggggaggccatttgccccggggagcctctgtgttcatttcctgtcggtaactgtgtctcggggaagtagtcctgcggaaacttctccttctccagcatgggcgtgctctctaaggtatccgagtagatctctttgccagcgacctttctatacttcttagctttaaagtcaaactgggagat

SEQ ID NO: 144442 - DNA, 1089 bp, Homo Sapiens
gttgaattgataatttgtatctctctgagatttttcacaaacatgatcaccaatttcgcatggtctcccacattcttcttgattacaaagtgaaggcaggcagggcgctgtggacaatgacaaggcagcggctgatcctgcccatctgtcaggagctgtcccggccgccgctcacgccactcctgcagagacactggcgcgcggtgccgttgttgtctcggaaaacctcctggttgaagtagtcgaagagtttcttttctaactggagcataaccttccggtcgttgtccgactcacgaaatatgagcttcaccacttcattggtgtcggcggcccggaccgtctgcatggtggcttttgtgcagacgtctccacgacggacttggaatccagccggaagttgaaatcaccaaatacaaagtaggaaaccttctcgaatcgctgatcaatgattctgtccagcacgtagcccagtgccttgtgccggattcccgagtacacggaagggcttgtttcccaggcgaccagattggaagcatcatggaaaagatggatattcaccaagtcaaaggcacagtctgcaatgcaccacctcgtccggatgaagccttttcttgaccatttgcactcggggaagtagtcctgcggaaacttctccttctccagcatgggcgtgctctctaaggtatccgagtagatctctttgccagcgacctttctatacttcttagctttaaagtcaaactggtagatgttttttaaggactcatgaagaaaataaaagcttcctagtgccgtgaagtgctcctgggatttgtagttttcatccaggtagactcgagccctgttatattctttcatcgcatcactcgacaatagttctttgacgaacttgtccacgtgggacatggaggcctcgtagttcttccctccaaactcctgacagtgcaaggccatgaagtgcggcttgtgtgtgtgcacgacctggtaaaattcccgaagccagttcttctgcaggttttctgggtcgtcgaagagcgagcccacgttggccgtgaccagcagcaccgcggtgcccggggcggccgc

SEQ ID NO: 144443 - DNA, 211 bp, Homo Sapiens
  misc_feature (109)..(120): n is a, c, g, or t
aatatagtcttgtactacctagaaaaggatactacttgcttttccaattgaattattttagagcacattagtaccaagtgctgtcctgctgtcagggtcatgaagattnnnnnnnnnnnngcataagttctgctcccagaaattctagttagcaaaggaggcaaactaggaaattatcacaaaacagagtgctaagttttagcaattgggg

SEQ ID NO: 144444 - DNA, 490 bp, Homo Sapiens
tttcttttttgccctccactactccccgccaagactgaaagtgcctcgagggcagtgccttgcctgattaatttgtgtcccaccatgcttttctctgtgagtgccagtaattatttgttgaatagaaattaccttctatgcttttatgtgatttctggggtggtcgtagttcactgtctgccattaggaagatcagggtcttacctctttggttttgcccatgtgaggtgctgcgaagggtttcttgctgcacaccaacatcttttctgatgtctttactggcttttaagtcaggttgttgtcagattgccatttcataccttttggccagttttgtgtaatgtcttctgtggtcgtgggcgggaactccatgtacccaggaaggcattcctggcacctgtgttgtgaccatctttagaaacctggcggaattcacttgtaaagcaagatggttgtcaaggccagaggtgaggggcaaggtgagtgtgac

SEQ ID NO: 144445 - DNA, 518 bp, Homo Sapiens
attgcaaaacatttgttacagaaatttcagaaagtttttcccgtggtatctgccaacttctgctctgaattgtatatctaaacaatcaaactcaaagtgcattgtgaatccaataatagacctttaaaaaagaacaattcttctaaggatttatatatatttatagtgtcgatagatatgcataccgtggtctatccatacacaaagaaggaaaagatgtatatatattcagcaaacccaattttaaaaccattgtatttgtaggaattcatttaaaaatgatatctgaataatttcccccattataaactagggttagaacgtttacaaatgagagtctaggtcctatattatgaaatggctatgagtacagtatactgcacgtactgtttttacacagcggtagcagcaatataaactcaggtcagacgcagtagtgacaggaagcaggtaagtcttcataccatgctatggtactcttcttctgaatctctctcacaaagactctgtgttcaagt

SEQ ID NO: 144446 - DNA, 514 bp, Homo Sapiens
tttgaaataagttatgttccttttattcccactgcactgagccaatggcggtcttggcacccctgactgcttgcctggcctgcctcattaattgcagtggcacttggccacccttcgaacccccttgataagccgcttgtgcccctgtttggagcccagtagtgacctgtgctgtccaaaggggcgctgcccagagcgccacctctgctgtcgttgcctcttgaccttgagcttggacttggaggcctgcttcttgcccagggtgaaggagcctgaggcccccctgccggtcacctgctgagcccttgtccaccagccccttgagcacacgcttgaagtgataggcatttcgggccatgtcgtaacccgtggtggaaacagccttcttcagggtggccagggacacatacttgcaggtccccttgtccgccacagccctcaggatcaccttggacgtgctgggcttctggcagggtttggcacaggtgcgttgcccagtcgctgtcttgctagg

SEQ ID NO: 144447 - DNA, 538 bp, Homo Sapiens
cactttgctctgacccatagtatactctttgcccagtagtgtatggttgaattcatttttgcttctttgctaagaggtagttcgacaccttcttgcttctgagtttattcctatttcttcccagctcttcaaactttaagaaactgaagagggcagcaaagtaacctggccatcttttatcagggcagtcagaggcacctgactggctgagtggcagatagattaatggaggagctttgttgctgtattgcctagtttcatcctcttggactcttttcatatacttgaatagcctaattatctgaagccagaagtgagttgacagtgccagttagtggtggcagtaattatgactgaaggtatctgtgagcattaaagcattccattcagtgacatgaatgaaacttaccctagctctttaagataaaataggtgtaatatctcaataggtattctgtaagacgtaatagtagccctagagttgatggctgtgtttttttctacctctcagaattttaatgcatcttccttttagatt

SEQ ID NO: 144448 - DNA, 413 bp, Homo Sapiens
tttgaatgttgccaagatggcatttattgctggctgggacacgggtacatagagggctgggggaccagagggtctatcttctccctgcagccgcgctggtgaggcgtgcccaggggcacgaagccctcctgaggatttttcagtctcagggctgctgggccctggtacttgaaaggaaactcgtccttgtattgtgttgagaagaagcgcagtccacccagagggggctccatgtggctgttcttgcaccgctgtagcatctcttcagtcaccggggccggaggtgttctgtgtggcttcagcatcttctggttcatggttaaaaaatcgaattcgcccgtgccccgcggcaggttgctttgctgcaagtggaggttgggcgctttctgcacctgcctccactctgaggggca

SEQ ID NO: 144449 - DNA, 446 bp, Homo Sapiens
  misc_feature (433)..(433): n is a, c, g, or t
tttttggcattttaaaatgtattttttcaatcactcctcttccagccatttatccgtccgtctgtatgtatgtctatccagtcagccaaagtaattgggtgcctcctgagtgccaggcgctgtgctgggttctagctataaagagagatgaaccctctgcttgtcctcagggagctcataatctagggcggaagcttgatggtaacaaatgctcatgccatcgttttcattgcagtcatgattcattctgggacggtgagatacaggctgctgcaataaccaggtgtctaacttggattggggctcaggtccctgtagaagttacatcgagccgactcctgaagcaacaagtgttccaggcagagggaagagcttgtgcaaaggcaatgaggctagcaggcttgtctcagctgtctgttccatggagacccanaaagagggaaaga

SEQ ID NO: 144450 - DNA, 613 bp, Homo Sapiens
  misc_feature (602)..(602): n is a, c, g, or t
tgaggacatgtgggatgagacggaattggggctgtacaaggtcaatgagtacgtcgatgctcgggacacgaacatgggggcgtggtttgaggcgcaggtggtcagggtgacgcggaaggccccctcccgggacgagccctgcagctccacgtccaggccggcgctggaggaggacgtcatttaccacgtgaaatacgacgactacccggagaacggcgtggtccagatgaactccagggacgtccgagcgcgcgcccgcaccatcatcaagtggcaggacctggaggtgggccaggtggtcatgctcaactacaaccccgacaaccccaaggagcggggcttctggtacgacgcggagatctccaggaagcgcgagaccaggacggcgcgggaactctacgccaacgtggtgctgggggatgattctctgaacgactgtcggatcatcttcgtggacgaagtcttcaagattgagcggccgggtgaagggagccccatggttgacaaccccatgagacggaagagcgggccgttcctgcagcactgcaaggacgacgtgaacagactctgccgggtctgcgcctgccacctgtgcggggccngcaagaccccg

SEQ ID NO: 144451 - DNA, 599 bp, Homo Sapiens
ttttcaatcagtttagaagtttattgtgccacgattgaagacacacccaggatacagatctgtgcctttctccaaagatgattttgagggcttcaatatttaaaggggcaaagcaggctggaggggaaataggaagtgtagggtcacattactgaatccacaggttgcaagataaaaccacataggggaatagtgaattatgtattcgtcttatgctcagtaaatctgtgctgtacacaagataaggtgatagagtggagatatttgacctttatctgtagctatctgcttaggaactaaaggaaaggcagttgcttgcatgactcagctttcagcttaaatttttccatttggcctagtgaattggagtcccgagtttctattttcctttcacatttctccccacttttctttttaaaatctttcagataaagcattttagaagaaaatgactctctggtcttgggttttgtctgatcttttgtggctaggacagtttattcctagacgaataggtctcatgttgttaggaagctaattttttggcaggttgtgaagtctcatgtcctacaaagagaacatagggggaggaagaaaaa

SEQ ID NO: 144452 - DNA, 1220 bp, Homo Sapiens
  misc_feature (312)..(321): n is a, c, g, or t
gatgtgagcaggtgtgtggaagatgggggggatggtgtggtgtgggaagtggcgaagcattttattagcacaaaagctgtgttcctgttatcaaatgaaatgcgcttcctatgttacagctcagtagttgttcaagccagtttctcttgacttcagtagccaaattgcagcatgctgtgtaggtacacagtgcacttgagaaatgtctgcacatcccgaccctgcactatatcacaagcagtagtgaaaggtgtagcaaataagaagattccatgaacttctcagctacctgagacttctgctgcaccctgnnnnnnnnnntcaggctagaaaccacataaaacaactaaaccaaactgaatgcaggggctgctatgaggaagaatgaactttgcagcctgttccaaatgctaaggtgaaggaggtccttcctggctctgctcactaggtgtgcaagtcaggagatattcatttcgtgatcatcctgttcctatcacctgtggtgaaatttctactgctttcaagtcttccagcccctatttgaatgccaaaattcttaagttccttcaagtaaaagagatcttcattttaaaaataaaagtcaatggctctggtctcctgtagccttttcagcccctgtaacagtgctttctcacttagattttcactgtcacttcaataaaggggtgagaagagagaactggcctgcgatcaatgaaaactattcagtaaaaactcttcatgccagacatggccccagaaacaggaggaaagtttaccagacagcaggagtgggtggtggctgggtccagtggaatgggtaaacctaaaaggggacgaaaatggttttcaggctgctgtggccctctctacacacaattttgtggccatgaagtcctggctactaagcatcattgtctttgcgcaaccgctgcacctgccacttccctcaacccattaataatcgggttcctgggaggattttcatccccagtttactggacatgcctccgagccacctccccgctccggccctccctctcgttggtcgccttcagactcccccacacgcgggacggcccctccccccaccctcctcaccggctagccgcggccagcagagccttcgagcggctctgtcaggctgcctggagcgtaaggaagaagaaggcgcgaaggaagaagacttcctcatattcttggcttccaggggcgctagg

SEQ ID NO: 144453 - DNA, 405 bp, Homo Sapiens
tttgacactgtgtatattatcactttttgagcacttttcttttcgttgcattccagggatgcaagctcttttatttttccaaatattctccaaatttttaggttcattagtatatcgctgcctgtaaatactccgctctctttgctaataatttattgcctcattctacctctatcacttcagctgctccttgaggcctgcatgcaaatgtctgtcatttatttactcagcaatatttattgattagctagtaagtctctggttcttctaggctttgggatacagcattaaagaggagataatctcttccttttcagatcttcattctgaaaaggatgctgttagtggatttcttcttgaagaataataatcatttatttccacagggctggagaggcctcagga

SEQ ID NO: 144454 - DNA, 1036 bp, Homo Sapiens
gggcgaggcggtatagtaaacctggtctgattgttggttgtcatgatcagtgttctggaagtggtgggctgaggtttgccactgggcaattggcaaggcggtgggtaagccggccatgagaggagctggcgcttgcagacctgaactggtaaacactgggcgttgtgcagggcggtgtgtctgaatcaacgtcactcccagaaagtgaagacacagaagaggccgaggagcctgaagacaggagctgggggctggacagcgacaaagtcaagcgctggccatagggagactcgggctctcggttctgcgtctgctccccattgcatgtggctattcgctctttgatcttgatcctgctgtccatgcctggcgacgggtgggctttgctgccccacttctctttgatccacctccggtagtcaatcacctcctgagttactttgatgattcttcctaaagtactttcggcgtctctgtttggataggacctggccagcggtgacacggcatggctgagcactatgtaggcataatcgaagacctgcttcacctgcatggcgccataggagctccggccaacgtcattccctggcagcagggggtcctcaatgcacagcatcgacggtctgtacccgctggtcatggctttcatgatctcctctttggcgatataggcacctccttctttgattctaataccggttttcaagtaattaaaatttctcccatagagttcaaaaaattctacaataagcattccaaggttttcatcagctctccgggcatcaattcttggatgcaactgtagaaagttaatggccattaaaattaggctgtatgagctaattccacctgtaaaaacttcattcaggtccctctgcagaaggaactgtttcaatactaaaatcaagtaaggcagcaatgaatatttcttcatgtaattcttgatgaactccgctgcccggacgcccgtctccatgattaaagctggatgtccctcgtgccgaattaccacccaggcctcgtacctagcctt

SEQ ID NO: 144455 - DNA, 415 bp, Homo Sapiens
tttccattactgttatttattagaacagtagaccaattctaataacacatttatattagaaatagcaaagagttctcttttttgccaataagttccaggagttttcactttaggaatgatcatctgaagctaaacaattcatattcaccctgatctcgcagaagctctgagtcaattcccatgcaaggctaaagggtaactgagctgatggactaagttttttgatgaaattaaagcaggggtcatggtgatctttcacagttgagtgatgtctttcttcaaagacgtatatatcttggatgtattccataagagttgctctcctttatgagccttgtcagatggggtcttcttataattccactttcctctgatttcagagcagctatggtagcacttccatgcatgtactctg

SEQ ID NO: 144456 - DNA, 793 bp, Homo Sapiens
atccagagacaactgtggaatcctgttagccagaaggttccacatataacccatgttccactcaaggcacacttgatgatctttgacagcgcgttcaaaaggcgggatggtctgcaggagggtataattctttgctacagcatggagcaagttttcctcccatttaacattccagtctctgccactgtatttgtgagtaatccaggcgcgtactatcactgcagatacagagatggaatgtctgatgaaataatcatctctgtaaaccataatgcttggaaatttcacatgtactatttgtgtcctgctggtgtgaagatgtttctcattcttccacctttttttgtacacgggaatgctacttctgaactcagatgaaacaactgcttccaaattgacaacacaaggctgagagcataaatactcaaccgagacttcagaaacgttgcgaacgtttccttcaaagacagtaaaataaataaagtctttgtaagccacgctctgctcagctttgggtatcactgatgtcgtcagggaagtctgcctacccaaagatggtacaacattcaggtagcagagcaggagcagcgcgcaggcagagcggccgccgaggccctgggggacgccgccactcgggaccatggctgcggcccgggggccgaccgcgagcggcgggggttgctgctgctgctgccgcggccacccgagccccgcgccgcgccgctgcatggcgaggccgcccggatccgggccggaacaggtcacctggtgcagggaccggcccccgcccgag

SEQ ID NO: 144457 - DNA, 607 bp, Homo Sapiens
ttttgaattttcaaaaaattgagctttatttacatatcatttgcataaactggtaatttaacagtatgaataaatcctagggcagaagacagtttggagaccccagggcacaagtgctgagtttggaagatttggtactgtaccctttgaagccctcgcctggtccccgcaccccttgcctgcctgttaacaagagcccgtaccagggagcaaatcaggggcaaatagcccagaagcccagtagtggacagacctccatgcctggaggaggaggccacctctgagagcaggaggagctgcccgaacccttcctcacagcctccttttcctgctctcaacacctccagcttgcagatagacagccccagcaccggcagaatgaaaaggtcctgaggcagcagggctgtggctctggtaaataaaagaggcctctctttagtaaggtagaggagctcagactgcacaccctggtctctgacaccaaggctcgctccatgcccaggactaggggcagcgtgggagctgctggctggggccatgctcgcaacctcttctctgccacgtctatctccagcgatgctctcagctccagtgctgagcccagtgg

SEQ ID NO: 144458 - DNA, 441 bp, Homo Sapiens
cagatcttggagggatggcatttgttcttttgtcacttcaaggatagcaagttcccatccaggaatgttaaggtgaaggtgaagctcactgggtagcttatgcagagtatttatcttccttataaatcacacaccttttctctgctgtgaatggagatttccaactaacatcccaagtgtatgtctcttccctgaccacacaggttgttatttacacagatggcttcccacagtcagacttatttttacctgtacaccatcttcctttttcttcccttacaatcatccagggctcttttccttgctccaatgatgtaattacatctggcttagaaaagtcatgtcctgcttacaaagaaaaaaaggccacttgatatagaaacatactttgctgtcaaaattacaattgtaataaatcaaggatcaaaatgaaaaacaaaa

SEQ ID NO: 144459 - DNA, 881 bp, Homo Sapiens
  misc_feature (379)..(403): n is a, c, g, or t
tggtacggtccggtattcccgggatatcgtcgacccacgcgtcgggagaaagagctaaagaatcaggctcagttcccctactctggcgctctaactccccacaccccaggtgccactgtgggtgactatactggccctacgggccttcctggcttttgtctttcctcccttaccccaaattcattgagcacttaaaggagcagagatgcagccagtgtctgggctcccccagtggtgaaatgatctggaagctagatgctagtaacaggtagtgattgggttttatgagtatttttccggggaatgtggtacccctgactgtaagtggtgggagagggaggggggttaatggaactgggtctgggattattttaaaatnnnnnnnnnnnnnnnnnnnnnnnnntcttacatctttacttgccctctgtgctttgaaagcactggataaattgtttggttttgcttttctctcttccacaaaattggaagctttttcttaaaaatgttttccccacaagtcatcttgccttgtggcatgtctgtctagcctcttcctccctccctcatgatgaagtgccatttctgttacgtctccctctccccaagctcagaggtgctcagaggtacgagatgcccaagtttgtcagttgagattaaaagtaaggaacagagaatgtgcaataccgtctggctgggggctgtccctgccctgccctgagctgagtcctttccctgggagccaggccaccttagaatggggtttggaagtaagatgtatagagttggggaatcatggagaaggaaagcctatagtcgagtgcctgcttaggtgctgaggtcacaggggagatggtggaatcttccctgtttttatcccctca

SEQ ID NO: 144460 - DNA, 427 bp, Homo Sapiens
tttttcagatgtaatattgatttataaaacaacagtgcacagctgccaagcttcgctcttgaatacagagggtcttcaattcccaacaaattactggcatttctaccaatttacaaattagagtttcctcagaatatctcacagttcttaatattccagtcaccttccttttcagccttctctcttgaaatattctgcaagttcatggcaaatgatgtggggccttcaacgaagatggggaaccccattttctcatctgtgtagcctgtgttgcgtttgcggttgtttttcttaaggataatttttgcttctaaatactgagaaagaataatcaggtgcttgagaagtggtgtctctgctcatctccccacacgtgactgctttctgtctggtgctttgtcatggtgcctccagaacagacttcctc

SEQ ID NO: 144461 - DNA, 288 bp, Homo Sapiens
gcggccgcatccccgccgcggctcatctcgtcaggcgtgaagccgttcatgtctccgagctcccgaggccggcgctgacagaaatcccctctctcctggccgctccgcctctctccgctccggcagcggcaattcactctgcacaccaagttagacagcggcacggccaaacaccaactgtcccgggcctgctggtctctgctggcaccgaaacagtggacagtgctgagggccgggacgcagactcgagcgtctcctggagcggggaccccgctcactgtcacatgg

SEQ ID NO: 144462 - DNA, 455 bp, Homo Sapiens
tttgaaagggaactctgctattttatttgttatgtgaaagagtctgggtgcttgtcgggtgcagctagatggtcagtccctgaaggcaaacaggaggcctaagacgacaccccaagcaggatcttgcctggaggatgctgcaccaacaatctgagacttctctaagatgttgaggacctcagtcactttgatgctcccaatatgatgaaaatctgctaaaagctggttatgttcacgagcacaccccatgaggaggaaggtggtattgagaaaccctgcctgaaattttaaggtggaactgtaacacgtagaagcagccaaggggcaagaattagtggtgacaaaatttgggaggcaatccttcatgtgctcgcccacacaggtcgggcagctacaggacgcagatgtgatagacttatgagtgctggccttgagtttcacaaaaggctccaaat

SEQ ID NO: 144463 - DNA, 560 bp, Homo Sapiens
gcaaggtcctctgcgccgtggcagccaggagtcgccgccacgaccgccgggtctcagtgggtgcctgcgccttctccccgcccgcctgccccgggccatccagaaacttgctctacccgccgcgggtgctcggcagtgctgcccatggcccagcccaggagcctatttagggcgccggacgggctggacagaggcgcggctcagtaattgaaggcctgaaacgcccatgtgccactgactaggaggcttccctgctgcggcacttcatgacccagcggcgcgcggcccagtgaagccaccgtggtgtccagcatggccgcgctgctcctgggcgcggtgctgctggtggcccagccccagctagtgccttcccgccccgccgagctaggccagcaggagcttctgcggaaagcggggaccctccaggatgacgtccgcgatggcgtggccccaaacggctctgcccagcagttgccgcagaccatcatcatcggcgtgcgcaagggcggcacgcgcgcactgctggagatgctcagcctgcaccccgacgtggcggccgc

SEQ ID NO: 144464 - DNA, 539 bp, Homo Sapiens
  misc_feature (48)..(48): n is a, c, g, or t
tcatctaaaggttcattgatctcgatgtctaacacttcatcagtgtanagctgctcctcctctggctcttccacatattctatttggtcttctgtcaactcagcttcgtggccttcatactgtccttcttctgggtactcttgagtatacaattctgatccatcagatttgtgataaaccagttcatcctctccttgttcttgttcatactcagattcctgttctccagattggtcgttagtgttgtcagagagttcaaatgatgtaaccatgccagatgtagcattcagactaattgtaacaccctgagaactgaaattttcttcatcttcattatcactctgcaaaagatcatcatttagctcttcatctgacaaatccgactgattctttttgccagatagcaaatcttctccaagtaaatcatcttcaagttcactgtcccagtcctcatcagcagctcttcttctccacgaccgttccgcgccaggcttatcaaactggtcaaagtcatcatctccggcgcctgctcctccgct

SEQ ID NO: 144465 - DNA, 1116 bp, Homo Sapiens
  misc_feature (94)..(94): n is a, c, g, or t
tctccatgcgcatgctgataaattcctccttcaaagcgccctgtgacttgtttgtctggaagagaagggattggaatggctgacccaaacttanccaggagacgctcatataaccagtcaaagtgcttatacctgtgatttacagatcgattagtgttagtaggtgttagctgatattcgatgtagctctctagaccatacattttggagcctttcctgggatctgctaccacacagtcaaaagtagaggtaggataaacccacattgggccataatctccaacaatgatgggaattttctctttgggttttgctagttgtttggccaacaaatactgttccgtgccaggtttcgcaaatccaggaaatttgttaaggggaattttcatggatgaggaactagcacgactgtttcctcgctgagcgccgcctgcatcagctgactctgaatccttaaagtaggaagaggatttgggcccatcccagtcttcatcccagtcatcatcatcaccagttgctggtccttggtaggcctgggggtggccgaaggcagtgtcccagttgttgggagtgtttgtgtttctttgggctccagccccctctggctgggccccccagccttctgagctttcccagttcccagatttggaggcactccaggctgaccaggggtcattgccactgccaacctggtgattgttgctggcagccgacgaactggcctgagctgtgctggctgagagagaatcaaggaaggcttggtcagccactgaatttccacaagaaaattgatcttttccatcactgggtaaaatttcaacgtagtctgtgggaaccagccctcgttctcctttgatgtttcttccttccagccatcctccacctacatccggatttgtgattgtgatgatttctccttcattaaccgtcagttcattatttccaggttcagcagcaaaatcatacataacccgagccttggtggccatggcgggcgggtcccccggcccgggacggccggctcgtctcccgcgccgcggatggtgattctgagccgcgcaggcaaaggcaagggcgagggcggcggctccggctgggccccggcgcggcggccgc

SEQ ID NO: 144466 - DNA, 495 bp, Homo Sapiens
ttttaacttctccctcagattcccagtattcgaattcatccctgttttggaataaatttgccaaactgactttgaaattgcatgacatttttggtgaccaaaaaacggcagacagtccacctggaatatttagttcctcaggctggatttttactgcattttgtccctaagttggaagacatgtctatcttttttaagggaatttgcaataaacgaatgggataagaaaaggccccatggcaacacaaaccctaaacttcagccaatgctctcaatactaactcaatacaaacttaggtcatattagtcctgatgatcctaattcttaccccttttaaaggatcgcaatagaatctcatcagagccaaggattagattctaaagtcagtgcaaaagataaaaccttacagagccaaagttacctttgcaaaagatcctcaaaaaagagccatgttggagattatattccattgctttcaaaacctaacacagcta

SEQ ID NO: 144467 - DNA, 457 bp, Homo Sapiens
gactcaacacatacactttaatttaaatcaagagatgagttccatgtaatagaaatccataattgctagggtaaatgaaataaacagaacctagggacaaagaggcaagggaagttgcagctttgatgcatataggggtaatatgaaactgaaaacagtagaaccttgctacagattgattgtcagaacattaacaaaaagtcagtaagagggcatgattttatgtgtgggaaatcagacaagctagagccagttcctgcagggagggctagaatgggaaagcagctgactcagtcccaagtgctcagtactatatccacaagggtggtcactgccaccactcagaagattacagagaaggaaatggcaaagtctgatttcactggattctcccatacagttctgccacttactaagcatatctgatatctttctactccaagtatgaacccaaatc

SEQ ID NO: 144468 - DNA, 779 bp, Homo Sapiens
  misc_feature (62)..(80): n is a, c, g, or t
cagaacatagagtaacacctggaagaccaatattgttacgctatgttctgttaggatctttnnnnnnnnnnnnnnnnnnnctcagatatttagtagtccattcgtgcttaaaatattcatatgcatgagaagcctaaagaaaaaaaacacctctgtacatgatgatcaaaagaaagttataaatttttttgaaattgcactgttatttaaaccactttcctgaagtcagaccctccttgtagctggcacagtttttcaggtcaattggcaacctggggaggcccctctggtattagtgaagtaaagaaggtggtgatgaaagaccaagctgaagccattaatccaggcctttgaattgcactggcatcttcacctccatcttctccactctcatcttcaagcccatcatccataagacgctccatttcttcaagttccaagttgtttgcattttgcccatcattgttaacttcggcattattgttgggagcctgctgatgacctccttcttgcctaaaaggaaaccatccagcttggtgtaaataaaccagtagcatggctcccattaccatgataaaccgactaaaagaagaatagaagtatacaatgctaaggagaatcgcagctcgtgagaacgtgtacatccagtctagccagtctcgattggagtcttcttcatttagtactggacctccctgtgcattcatttgaacattctcattcatgggtcgatttttttgggccactaggtttggagcttggtgggcttcttctccctg

SEQ ID NO: 144469 - DNA, 689 bp, Homo Sapiens
gtacctaaagacagagtcctcctcagctctgtcttgacggttgcctgggacacctcaatcagattcacagagctcttgcctaaggagaacttgtggatctcagcctctgagccccagtgaacacgcaaggtcaagcagttagacactgagctgtgttggaaactgggcactttctccgaggctggagtgggccggtaggggaagtgtagggtcatgtacctatagccggtttcagtctcttgcgtatccttaaacctctggagtgtccccatggactccggaggaaaaacagacttcaccgcaaggtccccttctaaactgctttcccgtgactcatctatcttgttgacggcaggcaggctggcctcatccatagtggaaaggctgagggaactagaactttgcagagagctttcggaattgttctcctgactgtaggtcacaaagccctgggagaagctcctggccaggtcaccgtctcgatcctgtggcaaaccacctactggctcaccgaggatggatggctggtggtctgttgctagcttctgggggcagagcagggcagacacagaaccctgtgttcgattcctcccctgtccacagacagatgtcttgggacgaacttgagccaatgcactgccgggggaagcttgaaacagaccatgaatcttggatgccctgattttggt

SEQ ID NO: 144470 - DNA, 804 bp, Homo Sapiens
tttttgagaagcatattaaatttttacattaatcatattgccagagacacaccaaacttctgctattgctgttgacaagcacagttgtggaggtgtttgatttttctgaagcagcattagcagaaacctcagtgtctagccacttgtcctgtgggccttgacagacgggacgtaggatatgcatggcactggtgcagatcatagtgggtatagtgtggttctagggtcagcggtgcacgcagctttctgatggtggtttcctaggcatggcagcagcagtgtgattcagagacgtcatttcctgatcatagaagagtcattgcttccttggtggcctggttctgggaagactttgggactcattcctgaaaaactaatctagagcctatttaatcaaccctcccaagtattcaatatctttgtgtttatactagctaaaatggattctattttccgcaaatgaatcttaactgataccacacattgtgtacaggaagaatagtggctgcagacaataggatctcaggaatatgggaaagtagaattgcttatctgttctcgtagagtttgaaagtagcaataattatgctagtactagaaaatgagacactgccactctgtggtgcacaatggctaagactgacctatatacattttctaatcttgtccttgtgtatttcgtgatctgctggttcaacatctgtttgtacgttaaacacctcaatcttaatattctaagaacgatgatccttcccattgagcctactaagacccccattttagcaaggaccaacactgagttgc

SEQ ID NO: 144471 - DNA, 499 bp, Homo Sapiens
  misc_feature (408)..(408): n is a, c, g, or t
gagacttcaaatagcaaactctcacctaagttttggataaaaattaatcaccccgcgaagaacatgtagagctttacaggtttcaatgctatatccaaacacaaagcttatacttgttttacacatgttctgcttttccaccctgcaagttatcaaacacacgtacacccaaagccaacttcattctacagacctgcaattcgaatcatgcaatcacgaatttgttagggagcagccaaaatcacggttttgtataactgctgatgaacacttccagagtagtggcggttattttctcagagatcacaactttttacctccccacccccaccccgtaaaaaggttaaggcttcccgaagttggcttggaaactgtatatataaaaacttacacgttccctttctcctngcctcggtgctatcttgactcttttattgtcaaaaaaggaagtacaagcacgaattaaaagccaagcaccagccacaatgtacgcaacgca

SEQ ID NO: 144472 - DNA, 418 bp, Homo Sapiens
ttttttgtattaacttaaaagatccttaatgcatttattttaaaccacaaaatcaaaatacagcaatcttaaaatgaatcactataaaccatacattgtctcttcttttattatttaaatactgatatcattcttctcttcatgggacagttctgcacctagtttaaaccatcattactaatgccatgctgaatgcttgtctctgaaaaaatctagtaaaattggcagggatgtgataaccttaactacaaatgaaataacttcaaatttaaggggctgtcagaaaaatggaatttcacaactaattatttccaaaaaagtctcctgctcaccatttgttagaaggatataaaaacctagctgcatcacataggaatccttgtatccttgtcttatatttgttgcgaagttgatgtct

SEQ ID NO: 144473 - DNA, 849 bp, Homo Sapiens
aggagtaattgaaatatatttattactttagtaagtaaataattagtgttacatgtatataataagagtatattggtggggggggagagtgtgggtggtagtaattttgtggtggagggatatttttctatataatgggagacacagttgttgatagattgttgttccccatttttttcggggtgggtggggggggaagatgtactttttgaatatgtgtacatcaaaaccaaaaagttaacttttactttttcctttattggcaacttttgatgcatttttcgattttggttcccagagggcattttttacaaatcttgaagctgcacctctgtccagcttgccagcctttttcttgtctgttatttccttgactctgttcatatatactctgattctttccaattcctgttttactggatgttccttaggattaactccttgggttgccaaataaacccaaaacattgaatttaatgtgtatgcagaaaccaaatccacttttgcttgttcaagtggatccaacttctgcaacaactcatttctagaaacagacatcatggtcttcagcatctcatccacagcaccaatggaattctcaaacgctgacaaatactcgtgaatttctactggatagtcttcattaatttcttcacctgccattatggctgactcacggccttcgactccagtctcccggaaagcggtcgggcaaccgatgacgacaatggccgaattcgcgggcatctgtccgcgctaccgtcggctgctttccgatgatctcaccaatgtatagctttttatacacaaattacataccaataaagtgatttaaaagtataggataaa

SEQ ID NO: 144474 - DNA, 630 bp, Homo Sapiens
tgtggattcccaggaatcataaagtctagcaatattgggatgctgatgaccttttaacatttcagcttcttctttaaatctctgcctctcagactttgttaattttcgatcctgcagttcacaccaggcgacttccacggtggtttcagtgtccagacctttgtagaccgtcttaaaggagcctctgccgatttcgatgtcaaacttgagaaagcggccatcgttagacattcccacggccttggtctccagctcttcgatatcatcctgctgctggctccgttcctcctgtggctccttggcgctgccgccgccgctgccacttctcgccggcggcggctcctctttgctccccacaaggctaggctgggacactgggcggtctttgctggtactgctggggacagtcgagggggcagggcccgcgacggcctgttccccaggggcggcagcggctggaggctgctgggctacctgggaagtggcggtggcggtcacggtctcttcccggtggggctccggtggagcactctgcgggacagccgcggggatgctgggctggggcagggaaagaggaaggccgggaagctccagtgcagtggcattggagtcgcagatgacgctccggcg

SEQ ID NO: 144475 - DNA, 623 bp, Homo Sapiens
tattaataaggtctttattatcaccagttagtgcaggcaaggtaggtgattccagtggagggtgatttgtggcctcaatggacacatcttaggggttaaacacagacttgaccacatccacaaggaatgtgcatcttcctgagctcaaattagatttccctcaaggcccctcaaccagcatcggttcagctgagcacagtcctgaatccctagagaacacaggaaggaaggctcagggtactgttttccccatgcatgaggacaggactgctgcaaatttttggatccaggcaagatggaaagtgactatggcttctgccttatgctgcatgggtgagatggccctgcaaaggttcctgggctggtcagaaacagagtagcttctgaaggcttttccacattagcagtacatgtaggtaattattctggtatggggattctgcttcatgaagtttgacttggctgaagattttctcacaaaaaccacttccataaggctccactcaagtatgaatctttttatgctgtgttccctgatgctcagccaggtgcaaaatgtctttcaagaatggcccacacatgtcacaggaagtagctttcttggtggaatgatctgcattagg

SEQ ID NO: 144476 - DNA, 857 bp, Homo Sapiens
gattaaatcattcattcattcaacatttattgagcgcctactgtgtgctaggcaccgtgctaggcgcagaaatacagagatgcataagatacagtccatgcccttaaggattcacagtctagaaggggagacaaacatgtaaacaagtaaaatacagtgtgataagtgccacaagagaagcattgacaaagtgcagaggtagcctggaggggaggggcacaggggttgccttcctggaggagggggcctttgaggggatcgtgagagatgaacttgccaggcagacaaggcaggaggagcaggggaaggcattccagtcggaagaaacagcatgagcgaaggcacagaggcatgaaactgcatgtcttgcttggtgagtggggaactctaactagtctggtggtattgctaaagtgtactagaggctgtggctagagaagggggcagaggccagatcatgaggggaaactgagggcaggggcatcttggagggtcaccagaggtgagcagagcccgagggcaggctttgacacaggaaaagagggctcctggctgactcaaggtacacctgcctgaggaccacagggttcctcgctgtggctccaaagggatctcgacccaagagtagaggagcagcagagctggaggtgaagcagaggggtcgggccaggtctgggacccagagctgccatgcactcccgcgctctcacagacttctgatttccaacctgtacgtcagagccccctcctgccagccggatgggggcctggatccagtgggaaatcacatgggaatatggctggcaaactgcaaagggccagatgagtgtcaggttacagaataaatctttactaac

SEQ ID NO: 144477 - DNA, 1176 bp, Homo Sapiens
  misc_feature (540)..(631): n is a, c, g, or t
ggcatacgtgattctctcctgtgtactgcactctctctcgacgtagaggcagcagtaaaccttcttgccttgcgcgcgccggtcgactcgtatgcggtcgtccttgtgtttgtgctaccgcctcactactgctagtcgctcggctgcgtgcgcgttgtttttttgtatttccctgctcgacggacagcttcattcttcagtactgctctctcgtcctgtctggcgttttggcttctccaaccgtacggtttagttcttgcgcccatccctagctccgagcaggtatggttattgttcctcttctcaactaggtagtctgctcctcctcgatactgcttttgttgtcacactgctgtatacacatgcgtgttacatatccagccgcccgctctcgccagcccgtcatcaaaagtcgtaccactccacattctagggtccccacttttagttgcaataaaccgtggtgttgtcgccgctgctcgtgttgcgccctctctgggggcctttcttttcgatctcgccccgcccccactcttgtgnnnnnnnnnnnnnnnnnnnnnnnnnnnnnnnnnnnnnnnnnnnnnnnnnnnnnnnnnnnnnnnnnnnnnnnnnnnnnnnnnnnnnnnnnnnnatagctaaacaattttattggctttttgtgaaataaaaaacacacaacaaaccaccatggttaaaggccataatcagcatcaaccaaatgaaccagccacttggttacagtagctgataacaacactagtggatattattgcttataccccaagttcatttatacatccattatattttggcaagattacaatcaaatgggagctttggttgtaaaatttcaactatgactactcattgaaaactcatcttctaccattttatggtgggatacatgtcaattcttccacatcttgtctcctttctccttccatcgataagatttacaagcctattgaaaataattaagatggatgcatttgtaactatccctactctactgccttctcttttgtcatgacaaggtgatgcatttctgggcctctcctaagatcttctatctggtgtttccactgccagtaataaatgcccatctgtaatctagatagattttcaaatgcatatggctgtcagcattggggtttggactcaactgtctcatttcca

SEQ ID NO: 144478 - DNA, 501 bp, Homo Sapiens
  misc_feature (283)..(299): n is a, c, g, or t
gtagaggtccttagagatgttctcagcaggctgggatgcctctggagcatgctctgatatttgatagctgcctccaggaccaagggatgtcttttttctgtcttttctctgaccattccctatgtccaagcacatgtgcagcttcgactcgcctctgtgataacgatagacatgggttgcccctccttcctctggcacagatgaataatatttcccacactgacttgaagtatagtccatgaattcagccattgttctgaaggaagcactaagggttgggggnnnnnnnnnnnnnnnnnccgggagaacgcgctgcgggccggctgccggctgtttctctaggtggggcgcctcccgggcaaggacccccatgcagcctttgggacgctccagggcatgccagtccaccgccctcctcttggccctctccagcacttctagagccagctttgctgaacgctgcagggaacgtcggtccaccccattcagcgctgcggccgc

SEQ ID NO: 144479 - DNA, 644 bp, Homo Sapiens
ggtgatgtgatggcagtgatggtcaacatcacacagggaagaccaggtccacgctttgtccagaatcaactgctaccacatgagtcttcttggttaagtcatttgagcccacagtgacagaataggtccctggatatacttctatgtagaggtccttagagatgttctcagcaggctgggatgcctctggagcatgctctgatatttgatagctgcctccaggggaccaaggggatgtcttttttctgtcttttctctgaccattccctatgtccaagcacatgtgcagcttcgactcgcctctgtgataacgatagacatgggttgcccctccttcctctggcacagatgaataatatttctctcccgggagaacgcgctgcgggccggctgccggctgtttctctaggtggggcgcctcccgggcaaggacccccatgcagcctttgggacgctccagggcatgccagtccaccgccctcctcttggccctctccagcacttctagagccagccttgctgaacgctgcagggaacgtcggtccaccccattcagcgctgcggccgccaaacagttgtccatggctccccggctcactcgtcaaggcgcatgcgcgcaacgctatcctaggaagagggacccc

SEQ ID NO: 144480 - DNA, 1563 bp, Homo Sapiens
ttgagataataaactgttttatttattgaagagtaaaatagtacattaacaaaatcttatctgatagagagataataccagaagtcttcttactgtgattatcagctaagtgactggttgaaatcaggatataaatcactggatagtttttttctggaaagacttagaacacatcaataaggccctctaataaagaaattgaaatgagatcttgccctttggagaaagagaactgtgtaattcctgtagccagggcacttagtcaaagagaaacagagggttgtgacaatggtccagtgagcctggccccagaactcccttcaactagtctcttgcttgactttggggagaagactgggcattatttagaggctggagactaattcgacaatgggaagatgcaaaaattcatatcctgggttcaccctttgatgttgggccattaaatccagtttgtctttgcctctcttgtctaaaagatgctcagatattagtttcaccactttgagagacatggctgctgccgtcagtgagtgaaagattgtcttgctgcctgagatgggatgtgcctggccaacacccacttctctggttgtataagacagggacctaaaaagggaaaggatgggaggaggatcatcctgcagtgatcatgtagggcttcatgctataaatggttttgcatttccggagatgaaacaagtctcttcaccacagaactactgcagatcatagccctatggtctggctggtttttgtcaatctggcagttcagggtcagtgcaaaggacatcccctacacctcaatcacacatacacagatggtgatgattccgatatacaggaaattggaatgaaaccacagtcttgctttcgcatagcaaccctccacttttcgatctgaggggcaagatgctggtgggccactggtccaatcactcgtgccatttataccacaacactgcagaaatgactggatggagtcccacgctgccttggtgctattgtctgagtggtaacggtggatgctgtcggtcagacccttagccacatactcattcagcttctgttcatatacaaagagcaggatggccaaggtcacctcagcaaggaggataatcagcagcaggatgaagaacgacataagcagacacttgttttccttgatagagcccatgcagcccaggaaggcaactaccatgataatagagcccacgatgacaaacacattgcccagcgtgagggaggggaggttatggaagagcactccgaagttgttgtggatcagcaggtagatcccaaagcccaaaatgcagcagccacagatccaaaagagcaagttgaagaaaaacaggacatacttcagcagtttcaagctactcatgcccatgccgtgatattcttgcccttttccaggcaccgttcctcagtcctttcggcagaatttagtgattatccttgaggtggccgagacaaggctggtaacacagatatccggggctgtgttacaggatcccagtgtccttcaagaccaccttggatgtttcttcagtctgtcctccc

SEQ ID NO: 144481 - DNA, 495 bp, Homo Sapiens
  misc_feature (458)..(458): n is a, c, g, or t
tttgctagtcacaaagcccaactttttattgaagtataacatacacacagaaaagtgcccagatcaaaagtgtacagctccaagaatgttcacaaacggaaagcacccaggtaaccggcaaccagatcaagaaacagaacaccccagaagcaccacctcatgcccgcttctggttactgtcttcttaggactgatctctacttgcaaccgcatggatgaattttgctgggttttaaactttatataaatggaatcctatggtgcatttttgccttatctcgttcaacactagggttggtgaatacactccaagttgggggtggagttgcagctcattcccattgcagtctgggattccatcgtgtgaatataccctaatgtgcttatccagccaacatgggcattggggtgctttcctgttcggggttattatggagagtggttttgtgaagatttanagcatgtctctggatgaacacatgtacacatttctgt

SEQ ID NO: 144482 - DNA, 392 bp, Homo Sapiens
gctttttaaagatgctgtatttcatttaaatattcagataaggaaatagtctgaaatctgctttcccacttgttcatcacttcagcaatcgagacactttgggtcctatttcacacacagaaacagagcatctttaaagtctgagaaatcagcatagtttactttaccgaaaattcacgttcaaaatggtgcatgctctactgatgtagagggtggagttggcgatgacggggacgtgagaggtgagctggccccagatcctgctgaattattggagttgctgtacttcgctgaatgctcttcactattttcaagagcagatcgttttgacttctttcgagctaaaatctttctttttgttctttcctcctcagatccatggtgggactgag

SEQ ID NO: 144483 - DNA, 476 bp, Homo Sapiens
ttttttttgtggttaaacatttattgacaactcacagaatgataattttctcccatcactagcaggaatccagtaggagtcttttgaaacaattgttgatttgaaagtccggtgtcttgtatcctaaaccgagaacatagtaatgagatgcaaataaactagaaacaaaggaagagatgtatacatgactgtaagctgatcttttagaagtttgttgaaatctgcaaacctttttcattttgctcatttgccatgatttgtcaccttcaccaagataaatacaattatctcttcccccagttcttctatcactgcctggtctaaggtgagaaaaacaaccttaactctcttttgtctttgggagtttatgcaggatattcatcaggaagtgactgggtgactttatccaggagcaactcatgtgacatatgccctttgtccgtggttcactaatcaacaccaactggcccgtacca

SEQ ID NO: 144484 - DNA, 648 bp, Homo Sapiens
ttttggtgtgtagagacaaggtcttgctatgttactaaggctagagatccttttaaaatgtctttctgctaggttgttgggccatcacctctcctttgtttccttctcctctcccagcttctctggattccatctgtttcttatactgagaagtttgctacctagctagccctcaacctctttgttttatgaatggaaaggctgggacccagacagggcaagtgactcacccagtgtcacagagctgttaaatggcagagccatgattgaatcgggccatgactactttcctacatgacatattgaaaccagtttgagcctcggtttcctctctggcaaaacagagatactaatgcccacctccccagtttgctttgaaaatacagaatcaagggccaggccagtgatggaaaagaccaggtgtgagatgagacatggtcaccaccacagcctgcagtaactgggccaggtggggctaggcagatcagggagcacaggccctgggagcagccacccctcagcttggctgatgctgccctgatggaatcatcctgcagtgccagatcttctgactcttcaagagaagcccaaaatttgaattttggtgccacatctctctatttaagtagattcaaatttaaaacacca

SEQ ID NO: 144485 - DNA, 522 bp, Homo Sapiens
ttttttttcactttcctaaagattttaattcctcaaagagaaatgctgtcatgcttgaatagacttaaggccagttttcatttaagaactgttgggatattttacaaaattcaggataggctcctgcgtatgctgcacacacacactagcagactgcgcatgcacagctctgcaaagcgtgtgtcttaggacgggctccggcctgaccaggagcagggcagcccagccaccgacgcatctgagcgtagacagacagatctgagcttggatggtggtcactgcgctatggcaggaatgtgcaccccgaagcttggggcgggaccagcgtggccaaggcacttttgggcaacatcccgggcaccattccctggctgtgagtagcccactggggtgagtccaagggctcccgcttgaccacaggggcggcctcagcagctctgcaggtgcaggactgttcacctcggccccgtgcacagagctggtggggaggctccgactggggaaggccgtgtgtgggctcca

SEQ ID NO: 144486 - DNA, 560 bp, Homo Sapiens
tcattatagtttttatcataacaattaaaataacttcacctattttatttggcacagatatttcatagagaaacatacattagtttgtccagataaaaataaaagatgtggattaccaaaaagttacacaattttacttttttaaaaaatgcattttttgttagccaaggaaattatttacctgaagatcattgtgaggattccaatcagaatcaaaaattatacatgtatcagctgcagttaagttgatgcccaacccaccagctcgggtacacaggagaaaaacaaatctatctgaatcaggtttactaaatctatctatagcagcttgccgaagatttcctctgactctgccatcaattcgctcatataagtatctatggaatgaaatggaataaatttacataaataagtataataaaactgaagacatattctatcaaatgtaaagtcagttttcctgcagcattatgttttctctaaaattaagaagcaatatcatctcaagtagtttctgtgactttatactttttggtgttggtgttaaggagaaaacaaaa

SEQ ID NO: 144487 - DNA, 652 bp, Homo Sapiens
gctgtgagaagatctgtcagtcttctttattaattgaagaaatgtcttcaggggagcactttctaagtatgcttacttagttacagcaaaggctcaatctcttagcaagcaacccattattattattagcagtaatataataataataacaataatagcaaatattttctctggaatagcaaatctcagagggtatttttattgctaatattattagtgttatgagggtatctttctcatgctgggctctaatcgccatttttatgagtactgtatattctttcatttaggcaaaaggatttatttatgaagggacttttttccttcctgcactactgctctgaagcttaactgtttgtaagaggagcatgccatacttagagggtgatatatgttatcagtggaatgctgccttctcaaataaggtagctgcaatgtcactaaatgctcaatagcatatgagcatgaattttgagttttctttcgtctattttttccaagtgtagcttggcaatgactagctatattatagcagggattccagtatcaggtaagaaactgtacttttaaaaatggttccttctaacacgagaatcaacaattttatgtgtgatgatgtaatatgaagaatgccaaatgatcaagagagaga

SEQ ID NO: 144488 - DNA, 1073 bp, Homo Sapiens
ttccgcgcggagttctctttcctttaaggggtcccctctgggtacacttggtccacttcccccaaaaagggccgagcaagattgctccctcccaagcctttttggagcccctttttcccctgcttcagggggcttcccaaggggcaaagctccccggtctgttccccttcctccccagagcaacgacggtccaaaatcaatacctggccatcgccactggaaaggaacatggatgttgaacccgcaccaattcaaagaaactgtcgctctagctcgttcatgtcctccacccgtgatgtctctcaggatctggcagtaatccacattccatacagcctggtcatcccacaccttggaggccagcaggatcgcccctaaaacaatccgcttccagttggccggacagatatctatctctgcgtatgttaaaagtctttcaaggtacaccagggtgacgatggcacattcagccgtcagctgagcagcactgaacagtgtccgaacgaaccggtacatctgcttctgctctgggttgtgtttgtcataatctggtggcacttcggatttcgaaagagggtgaagattttcatcaaaaatatctaagagcatccttccatctgggtccctgtttttgatgtgataatatattgcaagagcgacacatttaattgtatacttgaggtttggttgactgactgtgctatcatctaggaaaatggtggagcaggaactgtatttccttgctatttgtcctggaggatgatggttaatgaagagactcttgcgtttttctctcacgtctgtctgagatttactgaggaatattgtgctggcccgaggatgatctgaaggattgaattccatgttcaaatcgtctatgttctcccggtcgctgatgtgctgcaggttgcagcccgtgtcctcgcggctcaggtccgtgtctggccggtaggactccagccgggagtgggcattcctccggagcttgggactggacgacacgcagcacgaggtagtgttccccatcttcggcggccccccgactcctgctgctatcctgttctcccagtccc

SEQ ID NO: 144489 - DNA, 440 bp, Homo Sapiens
gttgtcatatactgtaagagagcagagattgaaacactttattattttattcttctttcattagactagtcgcctcctgaagccatgggaaatcacagtgctttggtatctggagagaggcgaatgcaaaggcatatctgcaatttttatttctggtgggcctttttggaagacaactttacgatcttccccatggcaaagcctttcactgtgattcaaaaacagagagtcttctaaagggccagtatggatcccacacacttctgcttgcttcagattcacattcctgaatatcatgttttctttccaaggcatgacataacgtcttgggatcatcccttgctttaatgaaaatcgtggcaaatgaatctcttcatacttattagcagatttatagagactctcatcagagcagttgttagtgagtttaggcaaagtag

SEQ ID NO: 144490 - DNA, 491 bp, Homo Sapiens
  misc_feature (413)..(413): n is a, c, g, or t
gcggccgcctccggctcccgtcaggcccaggcccggccggccgaggcggcctatggttctctgtggtggacgcaggtcggcggcgtcgcatcgcagccgcctgtctgtgcacgaacggtcggtcactaggagtcctcaaggcttctctggttgagccgcacatcccgcaccccctgtcgaaacggtggagtcgctcgcccgcgggtcctcagcgagtcagtggcgcagtcgggattcgaaccgggcccaaggcgtcccgtggcaccgggcgttctccaggcgtgcagcgccgagcggtgtactgagcgctgtcctccgctaccgtctcgcggcccctgaccgcattctcggggtgtctccttgtggtgtgacaccccacgcgttttgtaggcgcggacctcgggcccagaganacggggagaggaactgttcccgggtttaccacgtagctcagcgccagcgtccgatccggccggctttccaagctcccg

SEQ ID NO: 144491 - DNA, 652 bp, Homo Sapiens
tttaaatatattcacggattaccagaaagatcttgaaaaaccctattttgctccatgaccagcacttcctggccgcagatggactctaagtaactttttgcttaatgcttggtgtttcaggtcggtgatccttcctctctgacacgttacgcttgactttggcagtgattggagaagtatccgggttcagcgaaggactcgagtgcgacttcttcagtcctgcagcctcgctttcatcgttactcagtagctctttgcctccttccttgagaatgctgacatacatttcatagcgggttttctcaaactccagatagtggtctttcagtttgtactcatcgacgtccttggctttgaccttcttgtcggggggatatgagcggtgctcggccagctcggtggtgatctgcttcagcttactttcatgtgacttcagatgctcctcctgagacagttttgttgtagtggcaggcagaagtgggcggctcaacttcttctgagagccgattgctgctgcaaatggtggtgcagaagatacagctgccacacaatagattatgtctatccacccttgcatttgctctgggctctgacgttgaagaagcaagaccctccagtcgctactattagtgtaaccacttcctacgtgcgg

SEQ ID NO: 144492 - DNA, 475 bp, Homo Sapiens
tttagtttatgagttactgcaactttattagttatagcttgttttctttcccaatttaaaggagtataagagaatatttaacattttattttagacaatgtgatagttgtgaggtcattgtgtaagagaagaaagaaggaagctaatctataatgaagatcaacagttaagagagaaagggtcttctctggcatcctttagtcttttacaacattttataaaacaatgtaggtaaagaaaaagctaatccataattagaggaacaaaggttacagctgcctaggttacagctgcctgttgtatgacttgggcctcataaccacatttctttaaggttcaaaataatttaaagttccaaccactttgattttgaatttcttattttcacataacaaacaacctcaacatctctgtagtttataatctcatttacttattttttctcactcacaggtcagtggttcagttggagttt

SEQ ID NO: 144493 - DNA, 686 bp, Homo Sapiens
tttatataaaatgcttttatttacttaaaggcattggttttgttttgttttgtctaacctagctatattcaatacagaaggcttagtgaaaccagcaccagagaaagcagtagtcgaaatattggtcattgcatttccccacccgaccagaggtgaggcagtggtgcctaagtcctgaggaccccaggatacatggaatctaggcttgtgtcagaaactcaagcagtgtgggctgtaggtgctggaagaagagtcagggatgttctagttattactccagtgaaaatccattgggacctttgctgcattctgcgtgatctttaaagagttttcttatcttaatgcctaaaattccaccctttcaaatgtgtttttcttcgtcagagttctgtctattccttctcaaacccattatatggcacaacatcaggaagcctggagaccctgtcacatcatctcaaatagcagcatcgagaccaagtgtgatccaacatgtgtagtttctagaaaattgaagtctccacaatctgatagaaactcatcttctcattggttgatgagtttcacttcccagcctgtgctctcaggttagctttcctacaggttagatgagggctccatgagctgcagcatcgttgtgttcgcagtaaagttcagaggcagagaaaggcccatttctttctgct

SEQ ID NO: 144494 - DNA, 509 bp, Homo Sapiens
  misc_feature (393)..(393): n is a, c, g, or t
  misc_feature (413)..(413): n is a, c, g, or t
tttaaagaaacaaatatttccctttatttattacatctactcatgggacatacataataatcaaaattttcaatttacaggcctataaataatgctatttaactgaaaagcagccagcaaacagcaacatatacatgtatttgaaaagcttactcatggaaagtaatttccatagcaactcagttttgtagaatggaatgataaatcaagaactatcagcatttaagaatcagaagagtactgaatttgccttactcctttgccagctgcacactggtaggctttgctccgataggtatcccgtatttgtgtaaagtgttaatcaatatctccctcatgtcattgttgtaggaatcaaagtcaaacacatttcgaactacactggagagaccntcagtcggaaatttctgtanaatgtttgacctatgttgacaacttctctggtagaataagtatagttaataatccctttggtcagccaaactcctcagctctccaaaggcagccac

SEQ ID NO: 144495 - DNA, 333 bp, Homo Sapiens
tttcgttattattcattttttaatttttgctttattaaatcactgaggcttgttgagtggatcgctctggaatcccgatttgggaaaggtgcgaggccatttgtgtgggtgcgctgcctacacagctcccagatgtgggaaggagccaggaaagaaagggctccccgttcctcaaaaagtggggcgcggggcgggaggcagtgtgcagaatgaaactttatttttctctgttggccaggaagacgggctttgggccacggagcggtcacctgtcggggctggtttgggaaggggtggacctgggggagcggagcggggcctggcggggagggt

SEQ ID NO: 144496 - DNA, 653 bp, Homo Sapiens
tttaacctgaagaattaatttttatttgaaaaaaagaattacaacatgaaatatacagaaaatagcagagcacaactaatttaagttacattaattataagcagaaatccagaaaaaaagtgtgaaaatattaacttttaaatacggcttttgtaaactactctcatgaaaattttttctggggccatacagacagtagcccctgaacaaaattttctcctgccccgaaaagaatttctgggctttgtattgtttcacacaagttaaaacaatgggcacaaaagctgtggtttcaacaaaagcgtattaaatcataatgttgtgctttacttgaccttagccattttgcagccgtaattttgacttaattcattaataaactaaataatccaaggcacaccgattgcatttggttacaaagtagagaagaaataattttcaagtccaaaagtattctgagatgagaatctttcaagcacaatatctgacacattaaatacatgattttaaaaagacagcgtaccataattaaaagctgtattaaatgaaagaaaagaagtatgtgctgtggtttctttgcgtgtccattaacctgaaaacaacatctgcatcatttgagctcaatgtcttttgcgcagtatttatccagatga

SEQ ID NO: 144497 - DNA, 978 bp, Homo Sapiens
  misc_feature (199)..(207): n is a, c, g, or t
  misc_feature (323)..(345): n is a, c, g, or t
ggttacggtccggaattcccgggatatcgtcgacccacgcgtccgaaaacttttttgaataatacgtagaatttgacaaggttcatacagtgcatacagtgtgaccttttctgaggtgggcagggagggttgctacgtgtgtgatttaaaatttcaaggaggaacaaaaacattctagccaaggagaattgcatgttannnnnnnnnctactaatttaaacgtgcatttttcacagttacacatttaagttttgctaccaaaaatggccatttttctagacagataacattttcctaaagtggaagagagatccactgttctnnnnnnnnnnnnnnnnnnnnnnncctcctaattggggccttctcccttaattttataagaagagtaattggtaaaactcttgtttaacctatattattttctttttttctaaatccctctaagttctcccttaaaatttggcctcctaacaattggaatcatggttggttggcatctggcctggatggagtcccctgggtcaaacctctccctatcaattatcagaagctggtgcactaaagtgtatttcctattccttcaggtggatggactttataaggtcacccttgtgtaaacataacatgtggtaccttctcatgttataaatgaatgcgacgagggaggcttatatttaacccctttaaaacgtgtgtccacgaccaatcagagtaaacaatctactggatccaggttcttccttgctgtgaagcacagacagtccgtacctcattaatcttcggttacaagggggtatacctactcagatggtgggcgccacggtgaacccgttatacgggtaccccatcatgtatcttctaaaaagctctgcgcgccgttcgcatgcgaaccccatggggggagaattgacaaacaaggggggacaacaggggcgaaacacacatggtaaagaacactgtgttctttgtagaaaccag

SEQ ID NO: 144498 - DNA, 488 bp, Homo Sapiens
tttgtaaatgctatttatcaagttaagaaaatatccctctatttcccgtttgctgagagttcttattatgaataaaaaacttcgattttgcgaaatgctttttatgtatctattaatatgattgtgtaattttccctctttagcctaatgatgtgaatgaattacattcactgactttcaaatgttgaaccagccttgtgtacctgagataagtcccacttggttgtggtatatgaattttttcacaaatcgttgagaattttttgcatctagaatcattagagatattggtctgtagttttgtggtaatacctttgtctggtttgggttttagggtaatgctggtcccacaggatgagttagagagtattctatctgcttctatcttctggaagagattgtagagaactgatataattccttccatcaatgtgtggtagaattcaccagtgaacccatctggacctgatggttttgttttggaatat

SEQ ID NO: 144499 - DNA, 541 bp, Homo Sapiens
gagacagtgtcttgctctgttgcccaggctggagtctggatcggacccaggaccgtgcagagaagggaggcgcccagccaccatgagacagtcccccagcacttgcctcgctctcaggcacatgaacccaggtctagagaacacttgaggggccccatggggatgcgcagatggtactcaccactcctccgtgatccgcgtcttcagctccggcagcaggaactgcccgtggaagcggtggatggaggagatgttagagaatatgcccatgatgacttctggagggatccccgcatccgtcagcctggtgcagaaaacctgagcatagagaagcccacgtgtggccagtgagcctcttccactgagcacagttgccgccccgcttcggccacaggtgagggcgctcgggaggggccgctgctgccaccttgtgttttcttaatgaatttcagaattattgtcctcccttttcatccaactggttcagacaacctcatggtcttaatgcaagctcacttatgacttacgaatgtgggtgagg

SEQ ID NO: 144500 - DNA, 729 bp, Homo Sapiens
  misc_feature (542)..(542): n is a, c, g, or t
  misc_feature (671)..(671): n is a, c, g, or t
tttaagtttaaatacttctatttttattaaagaaagtataaaacactggattctatattttcaaacactattattttaagaatcagtcaaatcagtccggtctcttcatactgccaacatgtccaatacttctgtcttactatatttctaaaaaatcttgaattctctaccccactagtacagaagacattaatgaaacttcttgggccttccttgaggtctttccatttttctttccatttcccttttccgttgatgtgcctcaaacctctcagccattgatacaagctcctctggaatactctgatttgctctttccagaatattaatcaattcagaggcaaccctccaatcatttctagtcaaagttgtaatggaaacaccagtcctccctgctcttcccgtgcgccctattcggtgtacgtattcttcaatattccgtgggaagtcaaaattatagacatgtgtaacgtcatggacatcaagtcctctagaggctagatcagttgcaattagtattctcactttgcctgttttaaagntctctaatgctttctcccgatctctctgttctctatctccatgcagagactctactgatatatttccaaggattaggtcacctgataagtgatcccgcacagcttttcgagaaacgaagacaatgactntgtcttgtgatgacatactttgtagaaaagtttgcatgtgactccatttctcttcttc

SEQ ID NO: 144501 - DNA, 508 bp, Homo Sapiens
tttttttacatgatataattttattatttttacaaatgtcaaagtctccagaactgtttgtgggtaaaaacttactgccacctggtggatctgagttaagacaaagggaaatagatatcttttttaagctctcctaaatactattattatttcctttgttcttttaactttaaaaagaaaacaaatatgtatttactttttaaaagactacatttgggggaatttctgcatttggtttcaattggaggggaaaataatgtatatgaatgttattttgataaatatggttatatgcattagatgttatatgcattataggcattagagttacattgtaactttagaagatggctcttcctttcatttccacggctgtttttatcctgaatagtaacttatccatccatttctggaaggttcaggaattggataaataaaactagataattacctgaagtgtgtgtaatgctgtaataaagaccactgtgtgtgacctctctgaactttc

SEQ ID NO: 144502 - DNA, 699 bp, Homo Sapiens
ctgctgttatgtctgtaattactaaacttttttcatataattgcatttttcaaacatataaggatgacaaaaaaataatataacaggtaaacagaagtgccattttgcttccacggctctggcctcctaaggggcaggaaagcaggtgaccttattcctggtatcaaaatggcatggctggagttcaggtgggctgatgggaagctgtgcatcctacagcaccctggaatggctgaaattaagtattttatatggcaaaattgactcatggagcagaaatagcctgctcatatggacatggaagcaagatgtccttcaggcccctaaacctcttctgagcctcttcgcctgcagatagctgggcaggcgtgtctgaccatcccatgtggccagggtccatcttcagcagttgtggattgaggcctttgtccttgcctgtgctgatttgagaggtactggagaaaggcggtggtgtcttggtcttcgtctccagtgttagccactgcaatggcagggggaggaggtggtgggctgagagcatggacagtgcaaaggcagtcatggctgattgctctggataaagtggctgtgctccttctggatgtctgcatcagggctgctgaggcacagctgagaatgcaccacacagctgactatgctgctgtgcatatctcattactaaatgcccgtccctttcaa

SEQ ID NO: 144503 - DNA, 394 bp, Homo Sapiens
tttagattctaatataaggcttttattagtgcacaaactggagcaatgtgaggcagccattcaccacgtggtgacatggaggctggaagaatgaccaagtgtcatgtgagaccaagaatttacatgaagggaatccttgcacataagtgtccagcagaaccaaggctgggccctcctgacccaaactgggtcacacgtatgctgtgatcagtcagaaaaaagaatgaattttctctaaaggcttagactgctcaagatttcctccaaagacttaagagagacacacagatgtctgccttgtcttagcacataggagtgaccagtgcccactgtgcaaggtggtagagggtagatggtttctaccagagaaacaaggaagaatgaggttcaactt

SEQ ID NO: 144504 - DNA, 670 bp, Homo Sapiens
acgccagacaggttcgaattaaacgaccacttagggatttgccctgagccaagaatcggcagagggccaaaccacattgacaggcactgcctccctctctccccgtttggtaagaagagccactgtgatatgccaaggagaatctgggctgtattgttgtccacttcagtagacaccgtccacatgtgactgctggcatgaaatagaagtgcagttcctccatcgcactgggtaaggcctccagtattggacagcacacagaaaggttttcatcatcaagagagttctgctggtcagccctgctccaggggatgcctctgccttcgcatagcacactgcttgaggccctgccaggcaccaagcactgccctgggcccatgggatagagcggggaaggtgatggctcttccagaggattccctcagatggggaggcagcagtatgagctctgagcagaagtgggtattgttgatacagaggaagttctttgccacgagaactttcaagcagtgaaaggaattcccatcaggactcagaccccaggccgagatcttgccctgaatgtaccctgcctctgctttctcctgcatcccatgctaagcagggtcatggtctgaactactcagattggatttccaaaccatccttgtataaactgctctgatctaga

SEQ ID NO: 144505 - DNA, 598 bp, Homo Sapiens
ttcatttatgcaagaaatatttattaatcacctaaatcattctagaaactggggatacagcagtaaagaatacaaaaaatcctgcccttatagagcatacattctagaggtgggaaagaggcaataaataagataattgagtgctatatagtatgttaggtattgagtgctaaggaaaataataaaatgaggaaagaggataggaaatgccagatggtttacaagtttagctattgtgttcaagaaagttctcacaaaaaggtaagttgagtgaagacctgaaggaggtaaaagagtgacctttgcggatatctgggaaagactgtccccaggagaatgaacaataagggcaaagaccctgaggtaggtattatcatctccatttttacagatgggaaaattacttgcccaagagcccattgcttgaagacggagccaggattcaaactcaggtctgcttgatgttagagctagtgtaccacacacctgcccagtgacgtagtgtgagtgacattaggcaatctagaaacactctatactatggatgatgacacagagcctagaagcatgaagcaacttgctgggatgaacacgtgtg

SEQ ID NO: 144506 - DNA, 573 bp, Homo Sapiens
ttttatgctaaatatttatcgagtaaagatcttgaaagatgagaatggggcaaagggagaagcaaaggcagaacttggcaaatggagcagttgaattgcaatacagtttcaacagaggctgacagggagctctggacttgagacagccgtgagaattgtctcaattgagacaagggaatcaagtctttgtgtccccagaaagactagtcatgggtgcagcctgtgcccagggagggggcaaaattttagatgagtcagtttcccttggctgaggatatttcaggacagggagtcatctgagagccatcactacccttcaacaacccgggcagctggatgaatgggtgccccaactgtaagggggatcttgacagcagcccagcatctactactgtccttccctcaagttgttcaggttcatgcacttcatctagtgcattcacctccgtctaggaacagatactccagaactgtggctggcgctcttcttgaggaaacctatttcttgtcaaatttggactggagcatactgagagatgtgtcactggatcacttgggggaccaaatttcttt

SEQ ID NO: 144507 - DNA, 478 bp, Homo Sapiens
ataaaattttagatacccaggttttctttaaaaaccaaggttctggcactctacgtctgaccactttgcacatggcaatgatctgctgaagctgacaggcatgtgacctcaagattgccaactgcctaccattcctcaagtactaacatcacatcaacttcagtcacttggaggcctattagcttccaaatatgcaaccagtgttttataagggctttgtctacatcacctccgtgaatcttcacaaaaatcttgtgatgtagatagggtcaagagtgcttttaacactcatttttccaatatgactcagagaaatttccccaagttagtctccctaagttagcaagttgtagaatcaagactctaattgagaattatgattgcaaggcatgatttgccctcttgactactctagttctcacataatgtggggaatatccagaacttggagccaagttacattcttaattcagttttt

SEQ ID NO: 144508 - DNA, 435 bp, Homo Sapiens
gttaaaattttattattattccacaataaatatttatctccatctctgtaatggagggtaggtacaaatatgcctatttaaggaaaacaaacattgctcaaggatcttaagacatgcacatccttacagagaaacaaaaggaaggtaacatttattaagcacctactatgtgctaggcaatctgcaggttagtgacatactatttaattctcacatctatatgttttgtgagttctctgaatgtaacaaacaagaaactgaggctcacagagattaaataaatctaagaagaaagatctgattctagcacatcatgttggagaagctatttagcaaacctcaactactccaatcagcaaaactcatattcttgttctttctttaaaggaatattttccctagttttctacatggttcacttcctgaactgctggt

SEQ ID NO: 144509 - DNA, 546 bp, Homo Sapiens
tttttggttttgaaatgctttattaacattgacttgaacagtacagtgtggaggctctcatcacaagcagcacaggacatcctaacaagctttcgctgctgcctgacagcctctcaaacgtggagggagatgaaggcaaacagcgaagggaattccagggcagctgcaggtgggatggcagcacacagaatcccaaggtgggaacagcagtaggcgtcatggtgttatcgtgctgtggaaactaggctactggaatctatacttcaatccacattttctttactcatgaaggaaatacattgaaaaaactattacctctaccagttattcacgaaggaaacacttcggaagaattgattacctctaccacttatctatagtcttatcagaaaacttactatcaggtggttgttttgttacctatttttttcacttaaaagttgtgtaactccctttaatgatccaaaaattagagcggtacttgcatatgcagtgacagtttaaagggtaagtagttagcttgaatttccgaactagggatgaatg

SEQ ID NO: 144510 - DNA, 437 bp, Homo Sapiens
ttttttttacctcagaatacctttattgaccaacacttggtaatagcctgtgagctgtactttggaaaacactgatccagcatgtctcaggtctctttaaggacttatactgacgaactataggaagagtattgcagagtcttctgacacaggttcaggtgattaagaccagatttagtgccctggtgtcgacaaagcacctgttcatgcttactagccccttaagaacaacgccattcccctgttcctaatgaaagccttcattcaaggtaagtggtagtggctgtcacagaattttggtatccacctacagtacaataagtagcagaagtcaccaagaatgctaagttatcttcaaaatgggttggttttcctttccagactgacttgtttttctccacagcaaatgttttgccaccgttcactagaacagttct

SEQ ID NO: 144511 - DNA, 498 bp, Homo Sapiens
tttaataattgaactatcaccatatttttattcttaataaacttcatcaattacatggtacatatatgccattcaagatcgacattcttttagaatactacagagttatttccactttaaagcagagaaaattgaggcacaggatgattcaatgatttgcccctgtcctcctgccaataaagggtcaaactggaatcagaagtcagcttttctgatggaggctaactcctgtaaaatcgcatgtggagaaaggactcttgtgtttgacagtctaagggccttttctgcctaatctaaggtctgtttccctatatgcaggctgggaggggtgattgtgcagagggacccttggagaactgttacattatgcaaacttgattatcctgtctgacattattgatgtcagcagccattgtgaaatgaagtttgggagatggagtgtggaaggtggcacttgtaatttttaataatcatcctcttttacttcttggggggagg

SEQ ID NO: 144512 - DNA, 456 bp, Homo Sapiens
tttttctttattctcagagattaaattttagtaggaacagatggagggaagacaacaaaataatgatgtaataaagcaataaattattttctgtcagaactgaaagaggatagccaggatgggcctcactgagaaggtgacatttgagcagacttgaagaagatgcaggagccagcaggcaagatatgggagcccttgagggaagagtgtcctaggagaggggacagtcagtgtgtgggctccgggcagcaggttgcttgccatactgaagaacagcaaggaggccagagtgctggaagaaaatttgcaagggcaagagtgataggagatgaggaaagagaaaggataggggatcagaccgtgaaaggccttgcaggacacttagcagggaggtgagtgtcatgatgatctgacttatgttttaaaaggatctctgactgctgtgtggacgacaga

SEQ ID NO: 144513 - DNA, 563 bp, Homo Sapiens
tttttaatttttaaaagaggtttattggacttacagttccacatggctggggaggcttcacaatcatggcggaaggcaaggagcagcaaatcacatcttatatagatggcagcaggcaaaatgagggcttgtgcaggaaaactccctcttataataaccaaaagatctcgtgagacttcctcactatcacaagaacagcacgggaaagacttgcccccatgatttagttacctcccaccaggtccctccaacaacacatgggaattcaagatgagatttgggtggggacacagccaaaccatatcaatcaccatcagaaaagaaagacgttgcaccgttttttattaggcaagccagtcattctcttgctctctttgcaggtaaacttttccttttctaaatgcttctgtctctgagtatttcttcaacaagggtaaagattcatagagtgcttggacacagaactggatactctgctcctgggggcagagttcactgcaagtgataagggaaagagctgagaaatgagaacctgctctgtcagcccaagggtctttggagct

SEQ ID NO: 144514 - DNA, 463 bp, Homo Sapiens
actgctgggattacagtgaactctgcctccaggagcagagtatccagttctgtgtccaagcactctatgaatctttacccttgttgaagaaatactcagagacagaagcatttagaaaaggaaaagtttacctgcaaagagagcaagagaatgactggcttgcctaataaaaaacctatgaaatacacaagggcaggggattacctcggtatctccagatgagtgaaatgccatgcacatcttgatgggctgattactggacaaatgggatcacataaagctaaaaagcttctgcacagtaaaggaaataatcaacaaagtgaagagacaacccatagaatgggagaaattatttgcaaactacccatctaacatgggattaataaccagaatatgtaaggaactcaaacaactcagtaggaaaaaaacaaataattcgattaaaaatgcacaaaaggtcaaa

SEQ ID NO: 144515 - DNA, 1179 bp, Homo Sapiens
  misc_feature (56)..(56): n is a, c, g, or t
tgtacatttgttagacataatgctatgcacatttagtggactgcaatatgcagtanacatgacttagatgcactgggaaactaaaacaatgcgcttccttgctttattgtgatgttggctttaccgaggtggtctggaactgaacccacaatatctccgagatatacctgtactttttactaaaaatatttcatttgagaagtaaacctcaagaactaccaggacttttcagatgggaagagcgaggccctggcagggcgagtctaggtgtgcagcctagtgggggccggggtcaagtccactcggtatttgtggcttcactcagcaggccgcccgtcccctccgtggggccattcgacagtccctgggtaggggacggttgcactaggaggtaaacatgattccagcatgggctgctccaaggccctgagaccccaggacctagcaggggggtgggatccagtcctgcagcaggtgctctgaagaggagtcatctcccaagatgagaaggccccggggggaggatgaagtgtggtcagaccgtcggctgagcgtgatcacttccccagacccatgcgggtgagaggactcagcagacgcctccgaagcctgcggcaggcaggcctttactcttcactggggggccagtcagagggctgtcatggcaggccagtggcaacatgccagccaacacatgctgcttcatcagtaatttctggaacatgacactgcacagcggtgtcctctccagcgggacattactagtaatacactgatgatgtggagattgccccagggggcatccgctgggcttctcccaactcccaagccacctcttcagaatcacagagtcagtttaaaggggccccccacctccccggaggctgcggcctagtcatcatacatggatctcggcccgcagctccttggtgacgtagttcaccagcatggccagcagctgctgctgcagggcctcgctgcccatgaccagcgcagtcagctgcacggcgtccgtccactccaggtgcctgatgatggctgcggcttcgttaaagagcctctgttgctcggcagggggcagctccattaggatctgaggaaccggcttaaactgtccacttgtcatcccctcgtgccgaattcgccacccaggcctcgctaccttaaaccgtgatagta

SEQ ID NO: 144516 - DNA, 428 bp, Homo Sapiens
tttttcaacaatagtaaagtttaattggtcatagttcttgtttgaaatgtgatagcaattaaggaccatagttcactgtaaagtggcctgatttaaagacgtagccattttcattgttactctggtaacacaggccatactaacctgggcacctactagaagacgtataaagactagaaacctttgggaaacccaagcttgccatccaccatttaggatgcctacaaaccaactgttagttgctcctgtaaacacaccatgttttcctcttgagagacttctttattgtatttggtgtcagtgtctaaggaaacagcagtatcagccacctttacattaagctttctgtagtaacaaaatcagtagagagaaaattgcagcattccattttgttcaataccaaacataggccccagcttgagtaaaaa

SEQ ID NO: 144517 - DNA, 482 bp, Homo Sapiens
cttcactagatgcacagtgcaggcagaaagtagaatgcatcttcaattgtcctctaggctgcctgtaaccttttcatgggcaacttgttctaatgccaccagccaacccatgttttagtttgctggggctacattacaaagtaccacagactggagggcttaaacaacataaacttattgtctcacagatctggaggctaaaagtgtgagattgagaggctggctggcttggttccttctgagggctgtgaggggaggatccattccagacttctctccttggcttgctgatggctgtcttctctctctgtcttcacatcatcttccctctgggtgtcactgtgttcaaatttcccttttatagggacaggttagtaagattagggcccacccttatgacctcgttttaacttctataatgatctagtttccaaataagttacaccctgaagtactaaaggttaggacttcaacatgtgaat

SEQ ID NO: 144518 - DNA, 1086 bp, Homo Sapiens
gtggccgatgcctccaaggcgggcagcaccacgctgctgtgccgcgacgggcccggcttttacccgcaccagagcctgcacgcctggcaccgggacacggacgctgaggccctggagctggacggccggccccacctgctgctggcctcggcttcccagcggcccgtgctcttccactggaccggtggccgcttcgagagacgcacagacatccccgaggccgaggatgtctatgccacacgccacttccaggctggtggggacgtgttcctgtgcctcacacgctacattggggactccatggtcatgcgctgggacggctccatgtttcgtctgctgcagcaacttccctcgcgcggtgcccacgtcttccagccactgctcatcgccagggaccagctggccatcctaggcagcgacttcgccttcagccaggtcctccgccttgagcctgacaaggggctcctggagccactgcaggagctggggcctccggccctggtggccccccgtgcctttgcccacatcactatggccggcagacgcttcctctttgctgcttgctttaagggccccacacagatctaccagcatcacgagatcgacctcagtgcctgagaccaccaacgggactctgggcatggctggggcccctggacggccccttggctggctcctggccctacttggggtgatggtccgcctgtgagctgctgaccgtgggccacgttcatcagccacacgtctaggccttaagcccacttcttaaaggatctgcacccatggggggacatagagggtcccagcctactggacctcccgagctgcccttcaggtctaaagcaacatctggacatctcggctggggcagattccccatcaaaggcaacctggggggtgcaggctggtgcactgcatggagtcgaggtggaggtcacgtgcagagctccatgaggtcccggagcccccctctcaacccgctcctaccccgctggtccctctgaaagcaccgaggggttgatggcattcctttcccattctaaactccacgcagccaatcgctttcctggaggagcgccaacctcg

SEQ ID NO: 144519 - DNA, 500 bp, Homo Sapiens
ttttatgtaccaggtctttattttcttgatcattatgctctattcgaaatccgctggggtcagaaggtctcggggaaaagacagaatggaaaagaatgaagatgtggcagagggatgcaggatgcttggtggggagtcgggctgggggtgatggctaggggacattgtgctgaagcattggcctcttcggattgaacaccaaagagaatattatgtcatctgctacctcactctaaatctgatctggagagacaggccagaccacagagctcgaaggcattggatgtcctgccttgtcatttgttaggtgccaagctgtgagaaattagcaagataaagtttggctttgacaacagcagtgagtaacagagggatgggagtttggtgtaacctgtagcagcacatgactcacttgctttcctccattctggcccaccacccattaatactgcaggtgaagacagatttgctcttcctcctattactctcctgtcttggag

SEQ ID NO: 144520 - DNA, 576 bp, Homo Sapiens
ttgagagttaattatttactgttttctaattcttgccagtatttatgaacagctgtagcttgatatttacctactgaattttaggagaactaatggtcacagtttgggttcttttatgtgtatgtttttaaaacagctattttgtgaatctaggtggttggtttttagaagatttcaggagatgcagtccagcacaattagagctggaacattgttacagcaggctttttgttgctcatgggcagatagagggaaagaatcagttgttagccccaaatttccacatttcagtgttgtaaactctgaatgtgataggtagatgtgggctaagaataatttcctccagtgaagacacgggagaagagcttctattatgaggttatagataaggccttagttatatcatggaaatggactccatgtagttctagaactgcatttcccaaagtatatcctgtgagatgctccacagaaaaaatgattgcatggactaagtttgaaaaatgttgcatgctactcttcccctcgaagatgacagtggatgtcagcattaaagactttgacaggtctttctgt

SEQ ID NO: 144521 - DNA, 234 bp, Homo Sapiens
tatcagaacccctgagttaaatagtctttcatgttgtattctaagttctctgatatctccaaatccttattagccatgataccctctcttttagagtaattccactggcttttgttagttgttattcccttcctaaatattttgtttccagtttgtaaacatttttaagagaagtgaaacgcaggcttcatctaacctaaggagctctgcttgaagctcttcccttaattaatc

SEQ ID NO: 144522 - DNA, 481 bp, Homo Sapiens
tagagatgcgtttttctcacatgctcctctaggttttgttttgtgggggctcacatagtgagatgtgaaatctatgcattctgtgttttatcaaaaagcaaagatattctcaccttcaccttgctgagctgcataacatttccaggagacagtcacctagtagaccaacatccaacataggtctggatttgacttgtcattgtcttttcccagccttggagggccaaggcctttaccactctgctactggccttgctgagagctgaccatgaatacatgctttttgcagggtggaataccctcaaagagaacctgcacgcctggggtcccaggatggctggcttgcccctcccgtccgaagatgacctcgtccttctctttcagtcccggtgggtcttcggactgccgccgccgcgctttcctcggcctgggcacgctgggtcagaagtggtcccggctcgcgtccctgttgggcggccgc

SEQ ID NO: 144523 - DNA, 550 bp, Homo Sapiens
aagaaattataaaagtattatttgggaactgataaatgtccatattaaaatgaaatcttcacaatttatgttcctctgccgaggctccagccggtccctctgttcggggtccttgacttcccgcaacagtggaagatacctgtatgggccataaacttctaggagacaccatataaattatagttcaaaataaagaaatcataccccgccaccctacccttagaagttaagtaggatatgctgactcttctgggtcctcagattggaagtccagtcccagctttaatgttgacacagctttggtatagaagaactttagagctaaagcctgcccaccaaagttcaagtcctgaggtgggcaaattgcctaatctttcccatattcagctttatttaacctctgagtcttaaattcctcactggaatgagttgttcattcttccactgttgttattaaaagcaagtgagataatgtttgtggaattattttgtgaattgtaatgtgttctacccttattacttattatagagtcattgatgaagtaaatcc

SEQ ID NO: 144524 - DNA, 512 bp, Homo Sapiens
tttttagtttttacttgattttgtgaggggacgaacagcgtgacaattaaaagaagatctgggaatcgtaagtactgacagaatacctggagggaaggtgggactggagaatagtttgtgaaacagatcctgctgaggatgaatccagaacttcctgaagggttccgcttctgctgtgtagggacaaggttgtaaatagacaagccacaggcacctgcaaatggtaagtgtggtagagaggggctggaattgcctgttggtgtatctgtgggaagcagctgctatccttgaggaagaaaagatggagaaggtaagtggctatcaacctgtcagagacaacacattctgtgaagttgtactctttcatttctgacactgtggttcttaatatctgtgctaaacctggcagtcattgaggttcgcaaagtatctccttctatgtgacagtaaaactggaattactatcagaatggaatccattcctgctagagtaaaaccatgaaaagaaatcg

SEQ ID NO: 144525 - DNA, 1041 bp, Homo Sapiens
tgatcatatgacgttttagctgattagctgaaataaatttcttcatacattcttgacaatcaaatatctcatgaatctttctatgttcctgtaggcttgatgctgaagaacactttttattgcacactgaacatataagctttttcttaggatctccagtgtggacattttcctggtgtcttttcagggcatccttgctcttcagcctctttccacagctgtcagccttgcacacaaacctggcatccccccggcaagtctcctggtgctgctcaaaactcgatgctgaactgaaggaagaattgcaaacagagcactgaaaacttcgcgaagactccttcagactgcttttcgctgtgcactgaagaacatgtctttgcaaagcctgcttaactgggaatttcttcccacagttcttgcacttaaattctttctcctctgtgggtttctggtgcaatgtctggagatgctcagcaagaatatcctcactggtaaaactcgattcacattgaggacaagcatagtcctctttacagccaaggcgatcttttctgcccgctgttgattgtcttctagaattttcaacttccccttctttgatgactgtcataatttgctgttcttcctcctcagcctccatgtcactatccaggtagccaatcagaagctccgtgtctgtttctatatcttcaactgccaaatagaaaatgttttctccttcttgaatggcagccaagttcttctgctcctgagatggtgcctcatgaacgaagcgaagccagttggagtgccgtgggttggtagcatccaaaatgtacaaaacttctcccttactcccacgaacctcccacatcaacctgtaatccatttttcatccaagtcttcaggcattctcttctctccagcaaagggtccgaacttttcaccctttcgcactctgcgggccgtgtagagccccatgccgtcctgaacccgggaggacttcagggagaacctgtccggcacgtacatgcccagcattttcccgggcgcggcggccgc

SEQ ID NO: 144526 - DNA, 578 bp, Homo Sapiens
tttattttcctattggaatcttttattctgttttattgaggcttaagcaaaacagctttgcccataactcactgtggcctggagttatgacaccaacttgtatttggccaactaagaaagaggccaaactgcattcttcttagaaggtctattcagttgataaatggcactaaactgttggtttttttcatataacctttactcataagttgcattgattatgctctaagagataagggactgatggtaattcagatgggcacctctgaaaagatttatcagttttctgtcccgttccagccagattttttggaaaaccttggggaaagactgaaattccccaccaatctgagactgtatgcgagtttttacaacattaattggggaaaaccaggatcccaacatggcacccaatagacctccaccggataaaatcattgaccagatgagcactgtgagtcgttgcggtaggcagatgctccttaatgggacctcgaaggccgaaaaacaagacattgctgagtccattccggaaaagaatgggcaccaagcctcgataatactctccaattccatga

SEQ ID NO: 144527 - DNA, 839 bp, Homo Sapiens
  misc_feature (664)..(677): n is a, c, g, or t
  misc_feature (680)..(692): n is a, c, g, or t
ctgagtggagagagtatgaagtcgacggcgcgccgaattcggcacgaggtctgcctccaattgccactttgttttgaggcttccttccctaccttattattctgaaggaagtagagatcttgcttctgaaacccctcctaagaaactgcccagggacaagataaattacaaacaattcatgggagtttactacctaagttgcttctagggcatatgtataccatactagtagtctagatttctggatatactctacagtagatgggggttatggttgaaactgattctctttcagtattccctctaaacatctcccctactcccccagcttagttaaaccctgcgtttggaccttcctgcctgcagctattagtagaaagtaaaacatatttccatatttcccttcacctaacattttattttttggaagcgttatcagtcctatttggttagtgagaaccatgttccccttattcccgctaagttgctgctgtttactaccttagattctcatttgttttctctttctttcctctccttccacattaattattagaacataagttgatcaggaaaattaaatgagactttagtattttggcacttcctaattgacaccttgggagactgcaggaagggaaagagaatcaatgatcagttattnnnnnnnnnnnnnnggnnnnnnnnnnnnngggagacagagtctcaccttttgcccagctggaggcagtgcgtgatctcgctcatgcaactctgcctcaggttcagcgatctctgctcacttccgagtactggattcagccagcacacgctgctattttattttagtaacaggtcac

SEQ ID NO: 144528 - DNA, 523 bp, Homo Sapiens
catgtatttttacggaattcctgtccagatctgtttattcttttacagtattaaatgattttcactaatatattttttactgctatcatctaaatcagtgggccatggaagaaacctcatatatcattcagttcaatcccattgcttcagaatcagatcatagcatatctattctaagtagaggaatgcttttttccttttcttgaaagtttctctttcaaatagatttcaggcctctagagtctttcaaccctcacattcaggaataattttatgtaaattttcatgctttataatgttcttacttttttctattcaattttgtctatatattgatgattaagatgtattttatttatttttatccatagctttttccatataagtatgtatcttagggtcagaactgctgaaagagacaaactcagccaaaaacacttggaaagcatattttggtatctgcattgctttgcatatctaaattttcccataaagtaataaagtaaaatggttgcagagtgaa

SEQ ID NO: 144529 - DNA, 477 bp, Homo Sapiens
gcgttttttcccctctgacgggcagactatgaggtttcctaagtgctttccctaagtccagaatcaaagagatttgattggttctttccttcaccagcttattttattgtgttggatgatgacttggcttttcatgtaaccctgagagagagggatttgtttacgctcccctgggctttgggaggggactgaggtctttgaggaagaaggcagctttggataacatcgagaactaggatttggtggtgaagttgtataatgagaccacattctacccaggactgaacatgactatcgaagccaacctactcagagcatttgatacagaagttaaaatgggttcagtcttctttgtaaataaaattgtatgtttttccttgtggctgtggggtcccagttagaataagctgtttataatgacataaataaccatggcatctctagaagttatgcatcaacgtcttttcaccagtgtgc

SEQ ID NO: 144530 - DNA, 483 bp, Homo Sapiens
gcggccgctcctgctggcatctgggtgcagtgtgggtgctgagccagttccatgaaaacgaggtgaagctgggcagggcggggcacagccccaggtcaccccaggttaagcggttcctcagcctcagggctttgtgactcgggccccaaggctcacttggagcaaaggaatcctgacttccaaggctggaagggcccagaaggctgcagccgccaccaggtcccccggcctcagcctggacagagctcagggtgtgcagggcaggagagcacacagcccaggctttgctcactgtcaccagagggtcgtgtgtgacgccccctccccccagctattgacaaagttcttgcacatgtgttttaccctggtactccagagggaatgaccaagagtttcctgggttccttccggacacgtgcatctcatttaacctaacaactgaatccggtgtgtcttcgtggatgcacccgctttggggtagct

SEQ ID NO: 144531 - DNA, 553 bp, Homo Sapiens
tctaattcttaggatttttattgtatacatattgaaagaccttttgattttaaaaatgtagttttatcatatatcactcataggtatatatacaaagtaaattatgagtgaaataaactagtttcactattctaattattttcccatttataatagtaatcttaattactattcaaaattcttgaataattttgatgatgacaacatatcttagtagaatgttctactactaataacagtatgcttctgagattttttcccctaagcctccagtactcattctgcaagttttgatgctggcactttcttgactttaccagaagatatcaacagaatattttcagggaacaaataaggcttattttccttcctcaaatggctcttaaagagtttactgattgaaacgtcaagaggttgcagttgtccaataatgtcggcaagactaacagccaagttcacacctcctggatgactagtataccatgactgctgttctgctggtagcagttgtaagatgccattgattatatcatggagagtcatttcagagatg

SEQ ID NO: 144532 - DNA, 594 bp, Homo Sapiens
ctttccaataactgttgttttaatttaacttctttctctgttatctctctcattttaagatttaccttgttgatccagaacaccatggcatcctcgaggtcgtacggaagttctttcgaggcactgaacgttgagaagcgcttgacactggccaccaccttctcgatgctgatcatctccacagtgtaggccatcatcagggcatccaccattgccatgtgggcactcatttttatgggtgcgcgactgaggtcggactctgtcacgggggtgtcatcactctccatcacatagatccctttccgggacagggcctggatgacagactggtgtccctgtaaggcggccacctggtcccctttcaggatgaggctgcagacacggcagtacagctcgctggacaggagaagcttgataacaggcggcttaatgtgctcctgctcatactggtcaacgtagaaagggtctctgaggtcctcagggatgttatctcggccgtaggccttggcgcagatccactgcaggttggcggcgatcttggcgcgcgccgcgtcgtagcggtccaggggcacgaggtcggcggcgccgtccggc

SEQ ID NO: 144533 - DNA, 515 bp, Homo Sapiens
tttttaacaatggaagacactttattattattatttttaatcatctctcaacatttcaactcttggtagaaatcaaatgtaaaacatctgcatttttaaattagcatgtatttaactatctcaatcacagcaacctcatccagtaagatgcacacctgggagcagggctgtagtatttcgtattccagtctgtgaccacagtgcgtccgtgatgacaggtacactggactttccctcctaggatgtgttagtcattcctgcttttgtccatagggtaagttacgtggcatcacggttggttagaaagagttagttactgtaatgctggcgcaatctggaaatggaaaactagaaaactagagctctcaggagtgggccaggcattgccgatttctgaaatgtgaaaaggaagaacatcaaagatgaatgccctgctaggctggtcttagtaataaagttggttgaaattcagcttaatatacacactgtacatctacatgtgatctaccagatag

SEQ ID NO: 144534 - DNA, 669 bp, Homo Sapiens
gatggggttgtagcccaagaccttttcctccacatcggcctcactggcagaaccactcacagttgcatagtatcgcatggcatacttagctgagactgtttttcctgccccagactctccacttacgatgatggactgatttcgttcatctctggccatttgcttgtaagcttcttcagctactgcaaagatatgtggatccatatcacccatgttctgaccactgtatgcattaataatatcttctccataaataggcagctgttcatagggatttatagctactaggactataccacaatacgtataaataagtttggaatcaataaagcggactctgagattatggagcacagcaggctcatgaagatagctgagggctgtgaggtcattttcaccaacaagtatgtcaggatttcgtaagtgaggcagctccttggtctttggatctagatggtattccaaatcctttccttcctcgaggtgaagcaggaggactttatctcctggcttataatctttgagcagctctgctgacttccagacttcctctggatcaggtatccaaacgttggcaaactttgtgtagagctccgacgcagccatggcgggccccgcgcgcctacgcacaccgcctgtgcggaggccgcacctcgcctgggcggccgc

SEQ ID NO: 144535 - DNA, 458 bp, Homo Sapiens
ttttctctaaacaactcctttactacgtgatgtactgtgaaacttttctattttgttctattctcaattttattaaaaacggagggtgatgatcccgatctaccaaaccaatttcacaatgcgctagagattataacccgcggtttggaaaatactggctttggaaagagctctttgatctgtgtcattctcctcacatctccctacacctctgcggagttccgattgtttggtttcgtcctgataatcactgtgctgtgttttccctacacgctctgtgacggggccgtccgcctccttcctgggctcctttaagagggtggtaacggtacatcaccgcgggagtggagaggcagggcccactaggtcgtcgctgcaggccaggcccgctcatccagttattgtgaaagccggggtgtgcgcgcgaagagtgggagggtaggggtgaggcaagggca

SEQ ID NO: 144536 - DNA, 1146 bp, Homo Sapiens
gctcctggtcttcgtgcgtgttgtcgggggttggtcctgcgcgcctgctcgttttctttcgttgctggctgtttcggtgtggtgtcgtggcctctgctgggtgtcctcttcgttggcattggtgtatcttctttgccccttgttcgttttggtgtttgtgcctctctgccgtcctttccggccgcttggagttcgtttccaccgtcgtccatcccggctctactctggggcgtccttttctgtctgccgatctgtgattctgctgaacatgtctggtttaccagcttgccactttccgtgtaccactttgtaagagctgtgtctgtttatgtgcattaaagtgcccatatcggtaccttgcgtgaagtctaggtgctcaatgtctgggctaacgctttacacaggattgtttttccagtgccaggaggaacctggatcagcatccacccgtttccaggtgatgaggttgctgttgacgttcttgtctgaaaacagtaaagttgtcatcacataatcgaggagatgggatttgacttccacatcgtataccaagctgtcccaaagcccatggaattcagctgcaggtagaacccagtgatttgctgcaattatgttttctgtctcttcctccagattttcactgctggggccatcttcattcagctggaaaatgtgaagtgcaacagtgcatgcactcaaatcgatgggctgtgagtctttaacctttaattctgtgtcaataatagacacagactgcacatttctgctcaaaaaaggttcatcaaactcagtccatgtgtaatcaccaaacacaatattatgtctgttgagtagctttctaacactcaggtttatgtcttctttctttgcagtgctgctgccgcgctgatgcacctccacgtggaccgttggcgactcggccacacagggaagcgcctgcttcaggtcgcccacggcctcgtccatggcgcccccgagagcagtggggacccaaccagggcgcggccgccagccacctcacgcccagcgtcgccgccacagccgctgcctcagcccgcgggccccgccctagcttcgaatctgccgcgcgaggcgcaccacctcccctcgtgccgaattcaaacacccagcctcgtacctagcctt

SEQ ID NO: 144537 - DNA, 537 bp, Homo Sapiens
tttcaatattctgtcaaatttttttaataattttaatggaaatgttaaattaacttctattgccattattaatctctcaaggaccatctgttccacctgttcctatagatgtttctaattaatggtttacttttcctcaaagtctgtgtatttgtaattatgattgaaggattacagtggtccctgttgatcattcaactggctttcttcagcaattgtagagtgtaccatccctacagcagagctctctcctgaatgggagcatactccagtcctctttgggtgggtgggtgcgatgcaaatggatttctttccaggttgaacaaacaaacagcatgtaagtaggttaaggatttgcctcaataaatccaagtaagccagggaagacatttctctgggagtagggagtttcaggacatttcattcctctacaaagctgcttttctattatttttctttttcctaaaggaagagccaccactttatatagagttcatcttatctattatatcttaagagaaaataccatagccagct

SEQ ID NO: 144538 - DNA, 450 bp, Homo Sapiens
aaactcattattttaaacacataaatgttagaaactacacattattctttcacaaatgtttacacattaattttaataaacatttttttcaattgtggtaaaatacataacataaaataaaaccctttaaccattttaaagtgtacagttctgtggtattgtatatgtgacattgctgtgtgaccatcatcatcactttctagttccagaatattttcatcgccctaaacgaaacttcatacccattaagcagttactacccatttttcaccccctactccccaggtaatctactttctgtccctatgaacttttctattctgaatattttatataaatggaaccataaactatctgtgtatgtgtatgtgtatgtggcttctttcccttagcctaatatttttagagttcttccatgtcatagcatgtatcagtgcttctttccttttt

SEQ ID NO: 144539 - DNA, 539 bp, Homo Sapiens
tttcatttatgatcaccagattttaatacctgccaaaatccacaaatattgccacaacaaaatgtgttattaaatagaataaagttaagtgtttattgggcttaaagatggggctcttcgaccgtttggctacataaatgtgctagagcaacagagcgagcggctcgcaggccaatctgccagtgttggttcgctgggaaagggggcgaaaccgaggacacttttaagctgaccagattggggttggctgccctacctgcggggtggctgtggggagttaccctcagctctgaagatgcctccccttaactgaaaacgtctttggccggtaaagccgcccacgcgggccgcgcctcttccaagtctgcgcaggccgcctttgtccctgcagtgactgccgcgagggcaaggagcgagcgcggagaatgtcaccagagtttattgaagtgtttataagccgagaactctggtttttgcggggaggcggagtgcttatccaacttcactggagcaaaaattctgtgggcctagaatcccag

SEQ ID NO: 144540 - DNA, 455 bp, Homo Sapiens
ataagattgcagcaattcagtcacatcttcaggctccacttgtaattctgctccactgaagtcttgaaccccacaaagtcatccatgagggttaaaataacttctttcaaacttctgttaatgttggtattttgacctgccatgaatcacaaatgttctgaatggcatatagaacggtgaatcctttccagaaggcttttaatttactttgcccagattcctaagaggaattactatttatgactgctatagacttataaaatgtttcttaaataagacttgaaagtcagaattatcccttgatccatgagctgaagaaaggatattgtgttaacaggcacgaaaacaacattaatctccttgtacatatccatcagagctctttggtgaccagatgcattgtcagtgagcagtaatattttgtttgtggcaccccaacagcagtaaacatcaag

SEQ ID NO: 144541 - DNA, 1004 bp, Homo Sapiens
  misc_feature (45)..(84): n is a, c, g, or t
  misc_feature (88)..(122): n is a, c, g, or t
  misc_feature (261)..(261): n is a, c, g, or t
aagaatgtatagactcactatagggcgctagctcgctctgatagnnnnnnnnnnnnnnnnnnnnnnnnnnnnnnnnnnnnnnnnccgnnnnnnnnnnnnnnnnnnnnnnnnnnnnnnnnnnncagtcgacggtaccggacatatgcccgggaattcggccattacggccgggggtgcaagggagagatgattaggaagaaaatgtcttaaacggctgtaattgagaaatactgatctagagtcatttcctgcttcttaaantgttcgttttctcttccctgggtattttctcatttccaaagacccagagtctcagagccagtttaagtggaagaaactttgagaggtttcttaatcaattccttctatctctcaaaccatgccagtaacttccttggtgaaaaaatctatactcctctcacagttcttcgggcatggaaattctatagcattctttggtataaccaacccactgaaccctccacaacatcttgaattccattcaactcgagctgaagtattctttttgagtttcagtatatcttttctagtgtcccacttttagaaaggtccaaagatgatatataataagtgaaaatacaattaatcagagctttatttgcatatccattaaatatctgaaggctattaccagttgtgcttcagcctcctttcccttgcaattctcccagggtggcatcctctacggagtcttgttgctccattgttgaccactgatgtaactcaacgtgaaaccttcccaaagctctccacatcactctctgttatggctgtgaccagcagtgaacatgaaaagaacttatttcatgccttctccaaactatattgtttctttgctaagtccagacctgctttttctacatttataggttttctattttaatcgccatgcaaaattctttatcatactcaatcattttggtttatcttcctgacttcttacctttaacatccctgttaaagattacactgttgttgtttca

SEQ ID NO: 144542 - DNA, 942 bp, Homo Sapiens
  misc_feature (241)..(286): n is a, c, g, or t
  misc_feature (391)..(446): n is a, c, g, or t
accaatcattttaattattattcttcataacaattttaggaggaccagagctactgactatggctaccaaaaagactctacccatattacagatgggcaaattaaggcataagaaaactaagaaatatgcacaatagcagttgaaacaagaagccacagacctaggatttcatgatttcatttcaactgtttgccttctacttttaagttgctgatgaactcttaatcaaatagcataagnnnnnnnnnnnnnnnnnnnnnnnnnnnnnnnnnnnnnnnnnnnnnncctaagccttcctgccgcaacagttttttatgctaatcagggaggtcattttggtaaaatacttcttgaagccgagcctcaagatgaaggcaaagcacgaaatgnnnnnnnnnnnnnnnnnnnnnnnnnnnnnnnnnnnnnnnnnnnnnnnnnnnnnnnnatatactatatttatgggaaccccttcatacctctgagtgtgtaccaggcatcctccacaatagcagacagtgttttctgggataagtaagtttgatttcattaatacagggcattttggtccaagttgtgcttatcccatagccaggaaactctgcattctagtacttgggagacctgtaatcatataataaatgtacattaattaccttgagccagtaattggtccgatctttgactcttttgccattaaacttacctgggcattcttgtttcattcaattccacctgcaatcaagtcctacaagctaaaattagatgaactcaactttgacaaccatgagaccactgttatcaaaactttcttttctggaatgtaatcaatgtttcttctaggttctaaaaattgtgatcagaccataatgttacattattatcaacaatagtgattgatagagtgttatcagtcataactaaataaagcttgcaacaaaaaa

SEQ ID NO: 144543 - DNA, 1069 bp, Homo Sapiens
gacaagacaacaattttattataaaaggaatgcatagtaggtctcatgtaaaataaaacaagaaataaacctttaggtggcggccaagagctatcattatgaattccttagcctgtttttatgagaatttatgctcttgtttgaaagttgtcatgtaaaatgggctatttaaaccacaataattcagtgcaaagcaaacataaggacaaaattaggcctaagaaggaactagatttgaatgttaatatcatcaaataattaatcaaattttaattttgatttgatttgacagttggtgtcttgattatgattagtagttagagacccagttctgggaagataatggtattgatatggagttacaggattaattattcttagcacttaagtaattgttttaatcttcacataaatcatctttaaacaaaatggtagctttttaagaactcaaagagtgttataaagatgtcaaaactgtccagatgcttattgtacaattgaaagctccattcaaagttgacacaggccccagaagaaaggtcagttatctaactcacttttgcaacatctggcagaaactatgacttgttggagtaccagtgtgttcttcttctccttttttactgctctccgaaatgaaagtttatgattgtatctgccatgtgcccctttcagttcttgtatttttcggagtccttcagtggctgtttggcagaggctcaaagcaatttcagggaaacaatttgaactgaactgtgtggttcatgaagtttgagatcaacagactggcaactcttcagctttcagaaataatgtggtcatgctgtgtgtgtctcattgcacttctgggttatggtttatttagttttatggaacaaaataggtttccatgtaaaataacattttcaccttacttaatagctgttactcagtctctttcagcctttggattcaccgaacagattatggcactttaaaaatgttcttcagaaagatttctttttcataggtgtctctggtaatacttgcttcttgcttttcacattttgccacttcttccaacttcaaa

SEQ ID NO: 144544 - DNA, 480 bp, Homo Sapiens
tttaacctagagaaaaaatttattattggccatgtatgccagttttatacattgtcataataaacatttttcaagcagctttaaagaatattataggaaaaaagtatataattttacagatgtctgtttttaaaaataagaaagtttaccaatacttacaacaaacaaataaaatgtaattgctatatcaaactgaaaacaaaatcagttttatgttggttatcccagtggattttcactatgtattattcctacaagaaaatgtccatagtaatgaagtaagtgattccacgtgtgactgcccaagggtggttttaaccatttctcagaactgagataaagctctaacaattctgatgcctgagttcagcctataatctcatagctgatcgggcccttggaactcatacccctggggtccaagcaggtaactttgagaagttcaagagaaatgtcaggggaggttggaggacctcccag

SEQ ID NO: 144545 - DNA, 255 bp, Homo Sapiens
actgattgagccctggcaggcatatgcatgcagcactgcctacacagtcctgagtcagaaacttctcatggggtctctgagtctggaatgtctgagttctcagaaggggtagcatttgctgctaaccctctgcctccctagcttgagctgtctctcgtggttttttcccctgatggatgttaacatcttcccaacagagctatcaacccagtgagggaggagtctgtgtagatcacctcccatcattctccatag

SEQ ID NO: 144546 - DNA, 434 bp, Homo Sapiens
ttttagaatgcaggaggtaaaagcattttatttatttttggttttgctataaaataattacagatagctacaaaaaagtctaatacatagtgtaacagttgtcagattacatacccagttgtgcccaaagtgggttatatggatgagtctttgccaacatgtccacactctgagaggaatgcttttctaaaaatatttttataggtggttgtccatttggcatgactgttggaacccaggcaagatgattggtcagaactgcagtaatgagagctggcaagaatctgaaaacaaaatacatctgatcagattccaatcagtcttcatgaaaccttaggtaaaatgtagtgaaaaagtaagcaaggggagtatatatgttcatgtggccaaatggcaccaaaaaaaggagagagagaggaaaggatgagtatata

SEQ ID NO: 144547 - DNA, 355 bp, Homo Sapiens
ttttggtttatcagaactatctttatttaaaatttttccaattttataaatgctcctatgcttatcagctgctatttgaatcaacactctgagcatggatactggttgatgatctgagaaataagccataattgcctgccagacccacataatcttggaactcacgaacattcccagtatgtaaatggatgattaaactccatggcctcttgatccaagttggtccattcacagctcaaaaaattacactaggctaatcagattgctctgctgagttcagaaaatgagaaacagattaatcaattagcaagtgtgataaaagcaaaatagaaatgtaaaaaataactatttaaaa

SEQ ID NO: 144548 - DNA, 324 bp, Homo Sapiens
tcctgctagagatgtgatttagtcttttcatgtttttgcccaacctgatctcaatctcctaagctcaagagatcttcctgctttggcatcccaaagtactggcattactggcatgagccaccaatgcccaggctaatattgattttttattgcttttactccatttaattttcaagccttgcttaaattagtattctaaatgtttaaaatacttagatccatttgaatcaaatgaatctaaagaagttcacggcacaggtcaaattgataaaggtgatgaacttgatacagtttttcttttcacaaaaaatcttgcacgactac

SEQ ID NO: 144549 - DNA, 736 bp, Homo Sapiens
tttttttataaaccattaattttttattaaatttgtagtcaaatatgacaatattttttctttcataaaaacaagcaacataaatatttataacattatcagtttgggaaaagacaaagaaaggaaaaatgaataaaagcgatcaaaagacaaattcgaacatagaataaatataccctgttaacatgcatgcttagccctgtggctgctgctagagtaccaggccctgagcctcacaatcacagttcaaaatctcctccagcttcaacatatccaaggcagggattttggcgacttcaaagaagaccgggtgagaatacttgtaatacacagccttgagactatcgtaagaactgaaagtcagcagtttgttcagctgtctgaccaaggggtgaagctcagagatactgtagccactgtaatgctccaggaagggaacccagtatccgagcttcttcatgtagagggccaggagtaaggaggcagcagctagcttggaagccttctcctggacatagtggtattcctgcagggtcatctcgcagatgtagcgggacaaggtcagtgtcttcatgttggtgtggatacacctagcatatctgcgcagaaaatggtaggcgatgggaatgttaatgtcacatttgaagacgttcaggatgttgatttccatgctgagtaccctagatcgctgattattatcatcacagatgtacacaaagtcatccacacgaggtga

SEQ ID NO: 144550 - DNA, 510 bp, Homo Sapiens
ttttgatgttgaataccactgaatattttattgtttatattttattacacagaaatacagcaattattacaaaacgagtattaggaatggcaaaggctttaggacagactattagcggaaaacatttggaacttaaggagtgttttacatttggaacttactttaaggagtgtcgttcagacactagctatatcttaacctcaatttttagaagtaagcaagctctcattttttgctattcatatttgaagtgattaaactcataaatttgaaatttactttttagagaccaaagattaaaattaggtgggatgtcagcttttaaaatatactaagatttcctacaactaccaatagcttatttccctgggaaacagattacattgtagtacttaacccagaactcatgcagttcatccaaaatgatggtaaacttttttcctcagaattacctaactttccttgactatgaattcaacattcaagaatcttcttctggtagcaggagcg

SEQ ID NO: 144551 - DNA, 442 bp, Homo Sapiens
gaagtaagaaagaaggaattgcatgacttccaggatccagcttggtgagggcgtggacggcagagccctgagatgggatcacgtgaagacgagcagggaacgtcaacaagggaggagaccttggcaatgcctgcacagcccgctcagccgcgtagcagagccctcacagtcgctggcttcatgcggtgtagagaaagctggttaaattcatctaactgcaatttgccttccatgtctagtctccttttggccatgaggacgataatccagccggctaggtatagcactgtggggaggacaaagtctcacttcctgatcagcagtggccaagggaggcttttctctgcatttgtgaggctgtgatatctttcatgcactcctttgaaagtgctcaccagcacgatggaacacattagcttaaatatttctcttcacaggttgc

SEQ ID NO: 144552 - DNA, 524 bp, Homo Sapiens
attctcatggcactttgcgaagctcttaagatatttctcacatttttcattgttaactgttactatatcccatgttagactatgggtgccttaagtttaattcaattcaaccaaagtgtgctgaatgtttattgtgtcagggactgtgctaagtactcatgacattcatattagagaacccctggaattgtttgcagtgtaatgggtagataattctgccctgttacccttgtaatctattccagcaccatccatggaagggattcagtaaaaattattgaattcaattgaattaggtcaataacaatcataaaaataactttaagggtagtaatgcttgcctttcattgagcatatgatattcggagctcaccatgcaaacactgcacatacttttgttgatttaatgttcataacagtcctatgaatgaggggcatctctaaacagaagcaataatgctaacatgggaaataaggttaggcataaatttgccaagatgacaaatttagttaggttcaaccta

SEQ ID NO: 144553 - DNA, 760 bp, Homo Sapiens
ttagtgacctatgaacagcttgtcaaaaaagcaggctggtaccggtccggaatcccgggatatgtcgaccacgcgtcgcgccagcggtggcgcaacggctctcgtccccgccctcctgctacctgtagtcgcctgggccgcccccggcccagccctgccttgcgccaccctgcgctgtccagactgaggggtcaggcggagagccgggccgcgcccttcggtcagcttctctccctttcacccgcgcctcctcgcgagacccggggctgggccgtgcccgtcgccgcgcagcaggaagggagcggctgccacggaaaacgcctggccggacggtgtggctggcggccctgcctgggcgcggagggcggcggtggcgggccccgcggccttctctcagcttcctttctcctcacgacggcctccacagtccggagcccggcggagcccggacctggcggggagagctgcctccacggccgggcacccagaccccaccgtcgcagtcgccaccacctcagtccatccttggtaccggcaatgggcttcgtatcctccagtgcacttgtaactgacttggacacggaatactaagaactcacttctgtcctcatcccagtcgcgccggcggtgaccatctcggctcttttgggcttaactgccgctcctctggactctgtctgactttgggggcaccatggaccaaagtgggatggagattcctgtgaccctcatcattaaagcaccgaatcagaaatacaaa

SEQ ID NO: 144554 - DNA, 467 bp, Homo Sapiens
tttacttttgccctttgcatttatacctttaatgtatcctaaattgatgtttgtgtatggtgtgagataagaagccagctgttcctagtcttcatgcagacaccagttgtgccagcctcctgggctgcgcacagcggttcgtggacccatctccagtgcccctgctgtgtccaagcttgcggtgccctcctggccagcgggctctccttgggacactgccacttgccttcatggtggactctgcctggtgttggtgtcagctcgctctctctccagcccgtgcagcctgccaggactcttccagacacgggatttgtcggtgaacaacgcagagctgatgcagacatgtgggtaaagatgttgtccatccagtcgcacgcaccggccagcttgctcttatttatcttctgtactttgcctttgctgcttgagagttctgtaaacaattcttaataaacaaagaggca

SEQ ID NO: 144555 - DNA, 647 bp, Homo Sapiens
gcttgatctggccccgctcgtccagcaggatgttggagggcttgacgtcgcggtggatgacaccgtgcttctccttcaggtagtacagcgccttcacaatcgccactgtcatcttgcccagaatgcgctcggggatggggccctgcatccgcttcttgagcttctcagcgcaggtgcccatgagctccatggcgatgaagacgtccgtgttggtgatgaacgtcccaaagcactgcacgatgtaggggcagtcgtggctcttcagcaccacatccaggtccatgaggatgcgcttgttctcctccttgttcccggagcgccgcatttgcttaacggcaatgacgtggccggtcttccggaagcgcatcttccacacctggccgcaggtgccgctgcccatctcgcccaagttctccaggtcgttgatttctgcctggtagcgctggcccccgatggtcaggtagcccgtctgcttcatgatctcctgcagcttctggtcaatctcaatgctctccatgctgcggggtgtgaacagggttgacgggagccccagcatgtggcggggcctggcggggggcgtggggtgctgcggggagctctctgaggtcgatccttcgccgggcctccccgttctcctgctgcagctt

SEQ ID NO: 144556 - DNA, 450 bp, Homo Sapiens
atttcttttataacatattggctttaaaattttcttacaaaatttattaaaaagacatacaaacaacatatgggagatgagaataagattcctctaatacaaaggcattagggtaaataatatttcaggtgctagacagcaggcatggcacatttattcaccaagaccagaatccctgggggtaatcgcttccgttttttccagcccactattattagttgtgagaagtaatttgcttgacttgctttcattctctgactccagttttgcagcctcctcccaagtagttgctagccgtttcccaagggtttctggaagctttagtgttaacactccactcaggagggccatagtcccaacaaacaactagaaggaattaaaaataatgataagtgacacatcaagaaaggaacgaacccttcggagaatagaatttcctaactgttttca

SEQ ID NO: 144557 - DNA, 449 bp, Homo Sapiens
ttttttctagttgaaccaaaatcttttatccagggtgagggcatacaaactgcaaggggcctgggtgggggaggcagataagcgcccgcctcttccgacctctcaggtgcgtgtgagccgatgctccgctagggggcgcgggagagcaggccgccccccgcgtgactctcagagcccgagggctccctccaggtccgctgccttctgcccacaggaaggagtcactttcccaactggcggggagcgggggagtcactttcccaactggcgcgggcgggttgggaggggccgctgagccgcatctgccacagtcacgaagctttcttagcacctcctggagttcaaggaaaatccagaagcagctctttccttgaaggaagacgttcacagcatcgcacccacgaagagggtgcggcttccccctctcacccttctgggtctcggccgat

SEQ ID NO: 144558 - DNA, 402 bp, Homo Sapiens
  misc_feature (269)..(320): n is a, c, g, or t
ttttcaccagagttcaactgattttcttcctaaactgtaactgaagctaaaccatgaatattgaagcacttcagggagcatttggacaaacttttcgccaaaggaattggaatgttggatatagctctgaatgaggccttcaacattctgagtgatttcaaccacacgggacaaggaagtatctgcagtcaggccatcatgttcataactgatggggcggtggacacctatgatacaatctttgcaaaatacaattggccagatcgaannnnnnnnnnnnnnnnnnnnnnnnnnnnnnnnnnnnnnnnnnnnnnnnnnnnccaaagacattttttgctgtgaagtcacctcctctcccaacttgtcctttaaaatatatgtatagaaagaaaggcataaaaa

SEQ ID NO: 144559 - DNA, 533 bp, Homo Sapiens
  misc_feature (67)..(79): n is a, c, g, or t
ccgtataagaatatattatttaaaagacagtttaaaaataaaattctgtacagcatcatgaattccnnnnnnnnnnnnngtatcagtgaacaaaatggttcttagaaaacatggtcttgtggtgccaggtgcccagggcagctcttccctgcacaaggatcccgcgcagctacggccagcccgtccagaactgcagccacgccccccgctttcctcaggcacagtctccttcactgtttttcacatctctgcttctctctctggacttctcggtggccccagacgtcaagctgtcagtcttcttctgtaactctttcatggcgtcatctatccgcttcatctcctcgtagctatttggggattcccatagtggctgctgcatgatctcctctaccctggggaagagcttggtcactgtttcggtccatgaacggggccacgggaaggccttctgacttctcacggtcgctctgagagataggcagaggtgagttggatggatgtatcccaggacggcagcagcgtcctgcaga

SEQ ID NO: 144560 - DNA, 435 bp, Homo Sapiens
ttttacttatcattcattattatttggaattgcttatttgctttcgtgatggtttaaggcaggcatccccactggaactccaggagggcagggcagattctgtcttggtcagcactgtatctgcagcacttagtacaaggtttacatagagcaggaaaaaaattatttttgtgaagagaggcacaaatgccatgaggcctgaaagatctcccttttgggctcatcttcctcctgaaattgccctttttgcacgtcttgttttggaatccaagtctgccctgagtttagttccttggttgtgaaacgtggctctgcagtgtcaatgatccaacttgaagcagctgctgccaagcccgtgctcctggccctcatgtcttggattcagcaggaactggccacattccaaatactggcgtctgcagctctgggcgcttg

SEQ ID NO: 144561 - DNA, 491 bp, Homo Sapiens
tttatttttccaattttttattttgaaaagttcgttttccagaaaagttgaaaaaactgcacaataacacacctagactcatcacttagatccaccaactattaacagtttgttacatttgctttacctccatataaaatacatcagtctctgaggcatttatatgtcagttgtagccatcaggtctcttgtctaatgattcagcactaacatcctaagaactagggcattcttgtaaatagccactgtcacactgaaaaatctaatgatgatacaataatactgtctaatatatagtccatatataactacaaagttccccagttgtccctcaaatctctctcacagcttttttgccttcaatgcagtgctgcatcaggggtcacttaatggaccaacccagttgtgttatctgtctggaccaattccctagcttgactttttttagagtgtagtgcagggaaattgttttgctgaatgtcttccaacct

SEQ ID NO: 144562 - DNA, 506 bp, Homo Sapiens
ttttgtacggaaacagactgtttaatagtgggagggaaaacccaacatgaaatataaaacaagtaatcatgcgccttgtgagttttggtttctgttgtttctttctgggtgtatgtgttttgatggcaacgtcggtctgaacagcctgctccagcatttctcggggaagaagctgaggatgcggttggtcccagggatcgaaaggcctgctgacacgccctcagcttcgccagccaccaaaaccctggacagacgagttatttgacccaaagctgaaccctcctgtgcctgatccaaaaccagagaatccgctactctgggtcccaaaaccagaagtctgttgggacagtgatccgaaagtgggggcattctgactcgcgagcgtgccgaaggatgtggtgttgctgctgctcccaaacccgaatcctcctgcgctggcagctgcagtgccctctccgaacactttgcctcccgtcgagcccagagggcttgtaaaggctggggct

SEQ ID NO: 144563 - DNA, 371 bp, Homo Sapiens
tttggtgtcttataagttttaattgctcatagaaactatggtccatgggaaagggaaggagtggagctgagttaatgaatgattcaaactagttttccaaggggccctgcaagggaaagaaagttgactaacatatgtgctgggtagccatgcccagagagagcaaaccctttcatgggtgaaacactcttcaggtttcaggtcattttagggacttgctggtgaatggctagccacaaaggtaacatttatcaagttactcaggttaagttcatcattaaatttcctattttctttctcctggaatctcgtgggttttgtttaatgttggagacagatggtgctgaggcatttcaggtgttagttgatga

SEQ ID NO: 144564 - DNA, 446 bp, Homo Sapiens
tccccacctccctccccggagccccccttttccacgccattgtcactggccacttccaagctgacctccggctgcggctcgtcatcctccagggccttgatgcggacacgctgggcgtcctcagccatctcgttgaggcagccctggagcatggtgtagacagcgccaaagctgatgccgccagccaccagcgtcccaaacacagggatgcccctctcaaaggcgcgggccacccgcatggcgccgtcggacgactgggaatagagccgcaggacagtctcaggcgagacctcgttggccagtggggagcggatgaccgagcgcaggtcacctgcctgtttgcccacctgctcggccagcttggccagcgagtcgtcgtccagaccaaagctgcggtggtagccacgcagtgagtggatgagcaacgcatcatcgtaggcggccgc

SEQ ID NO: 144565 - DNA, 518 bp, Homo Sapiens
tcctgatacctgtattttttaccagaaaaaaattctaacagcagaaaagtcaatgtgatgggttacgcctccttaacgtgccccatttgaccttgtaagcttccttccacaggctgaccttgttttgtgcaatcagtgtgatcttttgtcagctatgcaaaacagtttttgtttactgaatctggtttaaaaggcaagaagttgcttcccatagggcactttgatccttggtgtagggcactttgatcctcggtggaaagggatgtgtatgccttgaaacatggagagtcacatgcgatgcttggttttgtgtagaactaacatgagataatcttttcactggttttcagaattgtggagaattcacttaggaaaataagcatgtgtatcaatggatgactaatatggacatgtactttaactgatttcacagaagcagtgctcctgatattttgagacactaattttatttggttcttctttaccatatgatcaattagctgcttacctcataaggt

SEQ ID NO: 144566 - DNA, 528 bp, Homo Sapiens
acgctttatggtttttatttttaatgaaactattatgttaggtaattgatcataatttggtcatttactgaaagaaacagcaacagataacctttgaaaactactggaaggtgaatcatctctcccattcaacatttgaatgacttcaattcacagtgacttagactaaagcaagagaacatcaaatgtactgttataagctgaactactaactcagaggaggaaccactggcaagcccataaaactgaaactcacaaaaccatgatttattgggagatgtttatgtcacttttgagaaaatattaaacaggtgcttttttatttgtagtaaggtcatggagtatattttgagtttcattgtattctaaattgaaattttgtacttttagggtattctgaaattcttaagtgattcagattagactttggatgctataggtaatgcaaaggcagaaaccatttcttctcttattcatcaccagatctctggtgtttcgtataggtcctcacatggctggtgaatgaat

SEQ ID NO: 144567 - DNA, 1006 bp, Homo Sapiens
ggtttttgggattcctttaaggcatggatgtagggcaaacacaggacccggacccattgtgtctcgcatcacttttggtcaaaaacatcatcttgtcaccttcccagagtccccatagaaccatcacgtgagccagacactgccatagtgtcgctgatccatgcgatggaaaagatccagtccttgtgtccatcatctcctacacacacaggatccagcgtaggtagtcgatagatggcaagactgttggggttgtctcctccagtggctagcagtgttctagaaggattcagctcgatggcatggataccacagccctgctgggtcacacctccaggctcctggtctttcagaatggggatcttggtgatctggcttgtctggacatctacgacaaatagcgtgttgcattttgtgccacacaccacttgcctatgattcaaccactgagatgcaaacactttattaagggtcccaaggtgaaactctctctccttcaggagactgggaagttgctgtgctgcataaccatgcaacactcgagagtagctggtttcattctgtagcctgacttcccggttcttcaagtagtatactaaggatctcttcacaggaggaagtcttttccttttgtgaagcgagtgatcccagccaaactgcgggccctgagcgtcgctcccagctcccggcgaggcgggcgctttccgcttcctgctaactactttccgggccatagtgggcagcgccgccgcggccccgcagccacatggggcgggggaagcgaaggatagcaggacggcgggtcatatactgggccccggggccgcgcaccttagtgcgcccggcccggaaaatggcccggacccggagcggcagcagaaaaaagataggcggaaagaaaggaaagagagaggaaggacttgagccgggaaagggaaggggaagcgagaatgagcggctttccgacggcagagcctgcaaggacgatcccgggaattccggaccc

SEQ ID NO: 144568 - DNA, 512 bp, Homo Sapiens
tttttttaaatatacattatttaatagctacaggaggagtcataaatatttatgaaagcggaaactgagcttcatgcctcttcatggaagcctggaggcatgggtggagttttctgccctctgatgtcaaaaggtgaagcagaggacactaaggtactcagtgtgcatcctttgtagactggccagagccactccaaggtcagtggtctattatcaggaaggaatgctggttagttgttgtgtctggttgctctcttttctcatcatacctcaggcctgttaactgtctctgagaggtaggtggtgatgtcaatgcttacaatgggatatggccaaacttcaggtctaggacaacatttggttcatgctactgctcagagtctggtttttaggtctccactcaaatgggcactcagcattacccacaaaataaacggtttctctcttaggttgactttcccactctgaggctttcttttgtcaagtttagcataaagctgcctcttacatat

SEQ ID NO: 144569 - DNA, 1078 bp, Homo Sapiens
  misc_feature (154)..(154): n is a, c, g, or t
  misc_feature (515)..(515): n is a, c, g, or t
  misc_feature (521)..(521): n is a, c, g, or t
  misc_feature (541)..(541): n is a, c, g, or t
  misc_feature (544)..(546): n is a, c, g, or t
  misc_feature (552)..(553): n is a, c, g, or t
  misc_feature (555)..(555): n is a, c, g, or t
  misc_feature (557)..(558): n is a, c, g, or t
  misc_feature (562)..(596): n is a, c, g, or t
ccatcaatatgacgttacacgacgcggtgggttgagggacatcacaggagtatattaggaccgcgtaggcagaagaaaaaattgttatatggatattattgtccacatagctcatatgaggcgttttgtgcaaggaagagcaccccttcagaancaatgacgagcatatggttttctgaaagcgggatattcccaatggagacgttgattgcagagttttcccgctaccgtggggtaatgctggggaagggtgatagttcgccggtgaagcaatttatccttccatagtaattgagcggcataccacaggctccactagaataaagcaacgcccccctccaatcgctaaggggggcagtatgttaatccgcccctttcaattgagagggaaggtaaataacacgccaggtatccccagccacaagtatgtcgcaagtacaagatgaagggcaggggaacggggggatcccccagagttccttcgcacccccgtccggttctcccctgggtctctnggtgcngcgggtcgtcgctcccgccnagnnngagggnncntnnccgnnnnnnnnnnnnnnnnnnnnnnnnnnnnnnnnnnnagcgcggcactcggggcaccgcccgcccgcggcctcgtcgtcgtcgtcctcctcctccccgcccgcgcggtagtagctctgtccgcagctgctgcagaccgagggcgcgcccaccgcgtggatcttcttgtgtctccggagcgcggcgccctgcacgaagccctccccgcactccacgcagatgtgggccggctcctcgccccccgccgccccgagcccgtccccgtgctgggcccgctggtgcgccaggagcccggccccgtgcccgaagcccttcccgcactccagacacacgtacggcttgggggccggggcgcgccgcgaccggggccccgcggcctttgcccccgcgcccgccatggctgccgcggccgcggccccctcgcccggcgcgcccaccacgatgatgccctcgccatcgcccacggggatggcgatctcgccgtccgccctgtgccgaattcgccacccaggcctcgctc

SEQ ID NO: 144570 - DNA, 895 bp, Homo Sapiens
tttttaatgggttacataaagagcatattttttatttgaggatcactggaaatgtctttattaacattagaaaatctgactattctttttaagaggacaagagatatgactgtatttcatctgcttaagtgtttttgactgtaatagtcttgctaaggttcctgtaggccaaaatctcaacatcagttaaatatgcgactgcattttctcctactcagtattatggaatggaatcttaagtatgaaagatgtcttggttagtatgtcaaaatgttgagcaatatcatttcagtctaaacacagaaatgaaaaaagagcagatgatttcccttttgctgtaattcactttgggatgcatgtcatgaagagcactatacaaaagcaattttcattgactgactgactgattgaggaaaagggtgaatgttctttcagcttaagtccctactgaagtatgatttttatagctcctgacagctctgctgcaggacatctgggttttgctgcataaaatgtaatagtctctgaccagcctgggtagcctctctgcatcgaagtggcttcttgccctcttttgctatgtgcttgaagaggtaggtgacgatgtagtctaaactgttacagcatctggaggagaccactgtatcaagagtagtgagtccctctgcgatagatgtgagaacatacatgagtacaggaggctctaagttgatgatgaagctcatatggtcctgagtgagacattccaggagtggataataagactggctcagtttccggtattgtagcaagtcactgtgggacactgacagcagcattttgacaaaagcctggagtacattgtcaaaatggttgtccccatacaacttgaagacgccaaagctgacataatttc

SEQ ID NO: 144571 - DNA, 1030 bp, Homo Sapiens
ttttttttctcatttaaagatgaaattcttattattattctgtatcatgcattaagagagagaaagaggattgtttttgcattgcgtttgtcacacagcagcacaaagacaatatatgtaagcgtagcgttcaccagatttgacacaagagatagcgaacaccacaaagattaggacagaccgcgtatagtaagctctgcggaactccaagaatctagagggggctgtgggaacgctgcttagatctcctcgtcgccggcctccttgctgaaggtggtcatgtcgatcttctcggggaagatgatgttgacggccaggtcctccccgctgttgtactgaagcagcaggttcttcttcttccgcagcatgtggttgtagcgcaggttggacacccaggtctcgcacttgttgaggaagacgatacccacagtgcccagcaccaccaggctggtgagcacgcccaggatggtgaagcagatggcctggccctcggtgaggagaggggttttcttgttgagctctttcatggacaccttcaggatgcggtgctccggctgctgcaccggcagctcgtgcaccccaggggtcaggcggtaggccagcccatagccgctgggcagacgggtgacctgctgggggctcagcgcgcgcttcttgacacaggtgagacctgtgaactcgggcttgcacagacactcgtagctcacctgggtgtgctgcaggcaggtgcccccgttctggcacgggctgctggcgcagttggtcaccgggcggctgcaggtcttgtcgatgaagccggctgggcaccggcagcggaagtcgcccccaatgtcagtgcagacgccgtcgttctcgcatgggttgggggtgcagctgttggccacgatctcgcagaaattgcctgagaagccaggggggcacaggcaggaggcatgggaggcccggccctcatcatccacgcaggtgcctccgtgctggcagggggagccgttgatcacacagggcccgtcctttttctggcagtcctttc

SEQ ID NO: 144572 - DNA, 635 bp, Homo Sapiens
ttttagcttttgttcatatatattttaaccaatacggataataaactgtaaagtcacaaatgctcaagatacccacctcagtgccagagcattagtttaacattctagtggcttacatggttagttagaatactttgtatgggccagacatgattctttgtgacatcaggttagagatgtcttctgtactgccaaatttgccaatttactacacaagaacaaacagaacagggcttaggatatgaaagtgtcttggagaatcttggcgttttcctgggaggacacttctctcagattcagctttggcataatctctaaggtcccttctagctctaaaactgcatgattctttgtgacaccaggttagagatgtcttctgcactgctaaatttgttccaaatcaatgaagtgagttccctgggctttgagacacagcccctatcactgaatgagtggcctaggagaagccagaaagcctactttgacaccattaaccacactctcactgaagccgatcagctgtgctcccatatgctttagaccctggtgcatattcctgaagaatgtccttggttgccacagaacccattctgctccaccttctgaaaactccagttgtagtcctcaagcttgtt

SEQ ID NO: 144573 - DNA, 939 bp, Homo Sapiens
tcacggagggcgcctgtggaagcagtgatgtaagggctagataccaaatgttcgagtcacggtggagtaggaagcgaccaagaatgtcgaaagcaagaacccgtaggcgagctgcagagcggacatccatgatggtgagtactgtctcagagcaggaccgcatttcacggcattatcggctggtgtccgtgattcgtggccacctgggccagcaagtcattcatggtctcactgctctcctggtggttccggcccaggatccgaagacagacgaagtatctggacctgcaggaagggttcgctgactccagatatgctgtgttctgtggagtatcccattgtcaccagagtccggaggatgtgtaccagttggggtaccacctttcggaagtgcctgagggctgcagggcttcgttcgcagagctccgtgatcagcgtgatggtgcccagcaggatgccatggtgacgctcatgaagcagttgggcacagggtgggaggaagacactggagagttcagggaccttccggatcatgtgcactgcagtcagaatagccttcttgcgcacgtagggactgggctgcaggagcagtttctccacctctggggccaggtctcggcacatctcagcagagcccatggtgctcaaagtgcacaaggccaggccttgtactggctgaatcccctggctcaggtcactgtccaaagtgggcgggttagctcatcatgtggacgtagagcagtttggccagctgccggtgcttgtgcattgggtccctgttgcggaaggaggcccggatgtgggcacactctttttggatcacctcccgctcctgggcctgagtcttggccccgcgaatctcttcgatgaggtcctgaagcttcagcgaaggcaccaccatcctgactggcttctgcctcaactccgctcctctgcccc

SEQ ID NO: 144574 - DNA, 985 bp, Homo Sapiens
ggctgtactggtctgggattttagggatctcgggcggtggggtgggcgcggaatttggagacccacttcgggaaagtcaggatggtggtgccttcgctgaagcttcaggacctcatcgaagagattcgcggggccaagactcaggcccaggagcgggaggtgatccaaaaggagtgtgcccacatccgggcctccttccgcgacggggacccagtgcacaggcaccggcagctggccaaactgctctacgtccacatgttgggctaccccgcccactttggacagatggagtgcctgaaactgatcgcctcctccagattcacagacaagagggtgggctacctgggggccatgcttctattggatgagaggcacgatgcccacctgctcattaccaacagcatcaagaatgacctgagccaggggattcagccagtacaaggcctggccttgtgcactttgagcaccatgggctctgctgagatgtgccgagacctggccccagaggtggagaaactgctcctgcagcccagtccctacgtgcgcaagaaggctattctgactgcagtgcacatgatccggaaggtccctgaactctccagtgtcttcctcccaccctgtgcccaactgcttcatgagcgtcaccatggtaaggctgtggggccccccatcctttgcttcaggtctatggacagaagaattgaaaatcggatgggaaccccagctcacaggagaagggtagtgcacacacacaggcacacacgcaatagactctcttgcccctggcccccaccattcacttccccgacgctgaccccaggcatcctgctgggcaccatcacgctgatcacggagctctgcgaaacgagccctgcagccctcaggcacttcccgaaagtgggacccccagctgggtacacatccctccggactctgggtgaacatgggggatactccacagaaacaccagcatattctggggagc

SEQ ID NO: 144575 - DNA, 339 bp, Homo Sapiens
tcccccattttttctaatttggagtcactgaaaactaagctgtgtcttttgtaaaccctgcaaactgaagccagacaacttaaactttagaagaaaataacagcaacctgcttacatacataaggcactttcatccctgcctactgatatataaacttcagagtaatgtggcctatatcgattttccaggattgttcttttgtttgttgttgtttttatcccttcctcccccattttctcttcataggacatgagacttcacaacctgctaaaaatgaactttcctaataactggggacctacccgtctaggaataaaccatcctagccatgacagatc

SEQ ID NO: 144576 - DNA, 390 bp, Homo Sapiens
cgctgatcactctgcatgtttcttcgtgtggtggtcgcgtccatcttcaagaacagctcgttgtgctcatctgtgaagccttattaaacgtggacgttgttttctgccttcccaggattcttccttcagtgctgaggcaggttgggctcaggaactgcagggacgtgaacatgcgcttgcggtttgaggtagccgtgtctgttccttcgcggtttgctattttcatttcctgttcgtcaaagcagcagaggagatcaaaccccgttcgtgtgtctttcctccatggataagcttgggaggtcattgttttactgccctcacattttgtttgaaatttcagaactgtttttctatgtaaatattgaaaacttatgatttaagaaataaaaa

SEQ ID NO: 144577 - DNA, 1039 bp, Homo Sapiens
caaaggcaaagattgcccaataatggcaaaaatggaccttttttatgggccattccttttccccccccatttcagttgagacagaccaacagagggcacgtaagagactagggctgtcttccttgatattcagacatcctagtttcccataatttattatggacctgttccccagaaatcaatataaacctattcatattaggggattagtttccacaagtacaaagtggaattccctttatttgtcctaaaatgcttactttcaaactggaagggacttcaattattccatgtagttttcgataacattcttttatcttttcagaccagagtcaaaatattcgtacagtattcatactgcagcaccttccacccaccctttggtcgcttgaactgcccttctttggttctttttccgctttcagatctttcttgaagtgtagtaagcagaactgtactgggtattccagctgcagtttggtctatcattgtcggaatggcttctgctacgccgtggtcttccagtcggtctactgtttctaggactatacgatcttctatagttgtaatcaaaagaccgacttcttgatctcctcctttcataacttcggcttctagaacgtctgtatctgtcataatcatcatagcgtgaagaactgtacacattcctcccttccttggctttcatctgatttggtgtctttcgatccccctgggcaaactgtatttcaatctgccgtccacaaatccactttctgtccaaattatgtaaagcgtcttcagcatcacgaacatcctcaaattgaacataagcaaatcctcttggacggcgagtgtagaaatcaagtggaacatacacatcaactataggaccataacgaccaaattcacgccgcaagtcttcagacctggtgtcgtcggccacgttcctgacgaacagagacgtgttggggggacgcaggtagcgggacatggcggcggcgtgtctcggccgggcgcactaacgggctcagcaaaccgtccgcggctcatcccggga

SEQ ID NO: 144578 - DNA, 206 bp, Homo Sapiens
cttacaaagttgaatttccttttatttgtcctaaaatgcttactttcaaacttgaagggacttcaattattccatgtagttttcgataacattcttttatcttttcagaccagagtcaaaatattcgtacagtattcatactgcagcaccttccacccacccttctgtcgtcttctcgcagccgtatagtagtagtaggcggccgc

SEQ ID NO: 144579 - DNA, 478 bp, Homo Sapiens
ttttttccacatgtgggtttttatttctagtccttcacattgaccatagaatcgcctgtggcttccaaacctgtcgtaagcagtttgttgttgctcttctgtatgtgattaagtggatttaccttttgcatactcatagctaccatctctgtttatcgttcatttagggtccttagacaaggtgcaagacaaacagaagagggcatgtggggtcaaactcgctagctgcctgcctgatttttctgcacacaggtgagatattcctgcacatcctctggtgaccccagaatgagggggactcgctggtgaattgcctcgggcttcacgtccagtacaggctgggtccccgtggtcgccaagcctcctgcctgctcaatgatgtaggccacgggattgcattcatacaggagccggagcttgcccttagggctcttctggttggctggtacaggaagattcctccatagaccagggtgcg

SEQ ID NO: 144580 - DNA, 320 bp, Homo Sapiens
gagaggtaacgctttctttatctctcgaaggcgagtgagggcactcggcagagtcacttagtatttcgactggctcgggcctctgcgggaaagctttgaccgtattgtgccagctagaagtgggttgaaggcatacaaccagtcgttcatgtctttgtcattgagggcctgcaaaaggaccccacggtgctttgtgcagacagcaaaggtgtttggtgtcttcaccatggcctgctggtcctcactgtactccacctgtgctgtggacaggttaatgattccacgctccacagggtctttgtcactgttatagatgaaga

SEQ ID NO: 144581 - DNA, 414 bp, Homo Sapiens
  misc_feature (368)..(368): n is a, c, g, or t
gcggccgcagcccgccccctcagggtgtacccacgcgtgccgcgccgccctgcagcccgcaagccccagacgtggcggtcccgtcccgtaggccgcgtctggctctgagtacaaaggcagctcttcgcagccctctcggcgtctcggggcagctccggtgtccttgtcgatgtggggagcccggccctgcagccgggccgggccggggccggggtctgggtctgtgcgcctgtgcttgcgatgtcctggttttggtgcgttcctgtgaggcccgtggacagcctctacggccctgaacctacagagcatctagaaataagagaaagttgtggcatttctagaatctaagagaagacgacagagctggnagtgttttaagcgttttaactgtgggccaggtacatatttatgtat

SEQ ID NO: 144582 - DNA, 338 bp, Homo Sapiens
ccttacttatgtgaagtgaaaacaggccaagctctagtttgtcctgtttgtaacgtagaacaaaagacttcagatctaaccctgttcaatgtgcatgtggatgtttgcttaaataaaagttttatccaagaattaagaaaggataaatttaacccagttaatcaacccaaagaaagctccagaagtactggtagctcaagtggagtacagaaggctgtaacaagaacaaaaaggccaggattgatgacaaagtactcaacatcaaagaaaataaaaccaaacaatcccaaacatacccttgatatattttttaagtaaacattgaacattttatcatt

SEQ ID NO: 144583 - DNA, 651 bp, Homo Sapiens
tttgcagatttgaaaaggaatttttatttcatttggttgtgtctttctctgtcaaggatttgtgaaattgctggctgggcctgtgagcctgttagagaaccttgttagccatagctccttccacctgaggcagtggagccatcctctccatgtgcttttagggttctggtcggggaaccctaaaaacaatagggtcaaggagccagaattggtctcagaccagcctccccatcttactagtctgaccaaccctaagccagatacagtattttactagactttttcctggtgggaaaggaagacaccagggcttggcccctgagccagagggaaccgcgaaggggcccaccactggaatgggggcaggtcagctcgcctcccctgctgccatctcagtccccagcaagtcaggtcactcctcttcacccgcttcacactgagtgttttctgtggaagtgagtaaaccaaacacgatggcaaataaaatgaaaagcaggacagcggtgatgaataatataatcactgccaggcccccctggtcccaggggttctgccagaacgcatcattccagattgtctctttgaataccagttggtccatgaaaatctgattctgctggtagctgttctgggtcctacaagggcaattca

SEQ ID NO: 144584 - DNA, 661 bp, Homo Sapiens
cattgttaaatgaaagatttattgaagccaaccacacatatatgctacatttggtagaatgcagaaattcgtacagtaatcagattgcagagatactataatctcaaccaccacaaaagagaccaaagccaatcaatagtcaacaactcagatcagtccatttgagtccccagtcgagggtgcattcttcctttatcttgcttaagccacttgggtaatccattccagctctgcaccttctccagttttctcatgtcagaagtccctggagggaggaggctttctggaaataacctctgataagctagactggggccctttggctagcttaaactctgacctagaatgggtaaaactagtccagacactaagaaccaatatcaaaaaacctcatgcagggtgtatgaaagtgatgttagacatgaagttgcttgtccaaagcttctatacaactgaccaacttctccatatgctgaggctgtcaggtatgcttccactatccaccaaagaaggatccagggcctccgagtccttgcactatcattggtttgctactgttgagtcctcactcttgttattagataagttaatcatgactatcatttactgaattaatgggcagaattcaaacatctctttacattattcaaagaaagaagtt

SEQ ID NO: 144585 - DNA, 533 bp, Homo Sapiens
ttgaagccaaccacacatatatgctacatttggtagaatgcagaaattcgtacagtaatcagattgcagagatactataatctcaaccaccacaatagagaccaaagccaatcaatagtcaacaactcagatcagtccatttgagtccccagtcgagggtgcattcttcctttatcttgcttaagccacttgggtaatccattccagctctgcaccttctccagttttctcatgtcagaagtccctgaaaataggaaagctttgatgtcaccaccagccccaaggaccacagaaatcttcaccagttgcgttcccatttttctttttaaagagcttgcggaaggagctgcgaaagccccccttctggtcttgcctgggattttgatcgctgaaagatgtttgttcactttctctttcttctttgggacagaatctggtagtatcttctaaatgcatctcttccaaataggtctgtttttcgctttgggacctctgttgggggaagaaggtcctggatgcgccgcgggcggcga

SEQ ID NO: 144586 - DNA, 309 bp, Homo Sapiens
  misc_feature (118)..(126): n is a, c, g, or t
gatgagagggattctattttggaccacatgttggtgtggaggagtgtcattgacagtaagcaccccaggcgtgtgtctgggagagcattgggtatcgctcacttctgcaggtacttgnnnnnnnnnctcatggccgaagaggagagctctgtaagcattcttttaaagtatacggtactcacttgtgttctggatactcaactgccatgtttcctttgaaagagattgaatatgcacctgacatgcatttagtgcaaagcctgagaaagcttcaaacaatatataaaataaaacctttggaaataacaa

SEQ ID NO: 144587 - DNA, 571 bp, Homo Sapiens
ttttagaaatggaatacacattcattagcatgcaaggggaaatcagagtgactgccccaccacgaaatggggtacagatgagcaatggggaagtgtgggtaatttcagggggctagtaaatgattttcaggggaattcagtgggcttgaagaacatacagtggcctgggacaaagtctgttgggctcacagagcagacaacggtttgcaaaatctgtccaggtatgtgagcaggcttcagtctttcttcctgtgacagcagttcagtcagagaaaactccgggaagggaccagtggtcattgttttcttctttggtgggtccagacttaaggcagatgaggaacttcagagaacaacttcactgtatgctttggaagagacaaagggttggggggcctgtgggagtctggtcggagagaccttaaggcttcttcagttcagaatgtcacaccactatatttcggggtattggtttctgagccccaacaatgggtaactgaaactttaagtccccacctggcaaagaaggtccttagttcctccacctccagctctctcctccgtattctcc

SEQ ID NO: 144588 - DNA, 1021 bp, Homo Sapiens
  misc_feature (34)..(34): n is a, c, g, or t
  misc_feature (46)..(46): n is a, c, g, or t
  misc_feature (65)..(65): n is a, c, g, or t
  misc_feature (97)..(97): n is a, c, g, or t
ggttccttgttggccaggctgaccccacttcttntggaggtggttntccctggaaccttggcctncaaaatttggcaaccaagcttcctgggaagtncagcccctggccacggccactgtccttgactctggagatggcctggccggttggcctccacgtcaagagacaggtttcttatggcctgggtaaggctgtgcaggcttttggttaaagctcctccagatggggctgaaatgcacttgtaggaaggtgtccacgtggggtagcagcacctgctccaaggatctatcagggaactcgtgccctgtttgatttgcttccatcactgcagctgtgaggttaccaggcagggctttccacaggcctggcaggctgtctgccacccggtgcacatcattctggagatctcccagcagatgttcctgctgttcctgttgcacctcaacctcattgatcactgcagcaaggtggccaggtttgaagctgactggtccatcctgaggttcctggtggctgtcaccaggatctgcaggctcagggattgccatggaatcgtggtgctcgcagttggggcccgtgtagccagggcagcacctccaggccaaagaggtcagcaccttctgcttgacctggtacactggcttgtgggccatgcggtacatgactttgactttctggcagtctggagctccctgcggacacggctgctgcgagtggatgaggaatttctctgttttgcaaagagctagtaaggtgaccagcttggacattgggtaggggcaccagttacgtccaacggggtccttgctggtgtcctcagcctctgccttccagaccccaggtgtcctggagctctgcagatcagagaggctagtactggaagcctgggcccatgcccccagcagcccccagcccagggggcccccaaggctgaacagcaagctcaggatcatcttggtggtggggcaggctcagctcacactcagccttggcaagtagctccagaaactgctagtgacg

SEQ ID NO: 144589 - DNA, 548 bp, Homo Sapiens
tttctgctgactttttattcctgaaaaaatggtacaaatttacctatacctctacaaaataagtttgcaaagcatgtcgagcatttggtgcagcacttcttctgtttcttaccaggtcccgttgatcctcctgtaccagatccattttgtgtaccaagcaaaatattttggcatctggagaattctgcagaatggcctccaggcatgattggtaatagtgcatgtccttttccagttcgcggctctccacatcaaagacataaatcagaacctccacatttcggaagatgttgtcccgttggctagtgaaataattttccatgaaggtgtcttgcccaccacaatcccacaggttcaataccaggtttcccagaaatcgaacatgagaatgttctacatcaattgttgcgccaaggcgacgtgtgtctctggcaatataatttgcaaagataatagacctcatgctggtcttaccagacccacttttacccatcaacgagaactttatgcataatggctgtattgggtagcacccatccaagcgatcc

SEQ ID NO: 144590 - DNA, 845 bp, Homo Sapiens
  misc_feature (128)..(128): n is a, c, g, or t
  misc_feature (732)..(766): n is a, c, g, or t
tcttctcaaaaagaagttaccttcatcccacttcgataatttcagcaaattcccttagttcatttccagcttgctgaacattgggaatcacctgataaacctatgcctggaccaaccttatagaggtnttcatcccagatagatgttcggaaaacaagaacattccaatgggcgagacaaacgccctcaaatcttcttgctcgctctttaaaaatcaggtcccgttgatcctcctgtaccagatccattttgtgtaccaagcaaaatattttggcatctggagaattctgcagaaatggcctccaggcatgattggtaatagtgcatgtccttttccagttcgcggctctccacatcaaagacataaatcagaacctccacatttcggaagatgttgtcccgttggctagtgaaataattttccatgaaggtgtcttgcccaccacaatcccacaggttcaataccaggtttcccagaaatcgaacatgagaatgttctacatcaattgttgcgccaaggcgacgtgtgtctctggcaatataatttgcaaagataatagacctcatgctggtcttaccagacccacttttacccatcaacagcacctttttcttcatggctgtatttggtagcacccaccgcagccacccaactgcaggccaggatcacgtgggcatctccccggccgtaatggccgaattcccgggcatatgtccggtaccgtcgactgnnnnnnnnnnnnnnnnnnnnnnnnnnnnnnnnnnncgccgcttcctcgctcaatactcgctgcgctcgtcgttcgcatataacgaggtagcgccctatatatctataatctttt

SEQ ID NO: 144591 - DNA, 691 bp, Homo Sapiens
ctccgcaagttctcccagagccggcccacactgcagtcgctgcgggagaagggctacatcacagaccaggtgttcggctgcgcgctggccgcgctgtgtgagcgcgagaggagccgggtgccacgcttcgtgcagcagtgcatccgcgccgtcgaggcccgcgggctggacatcgacgggctgtaccgcatcagtggaaacctggccaccatccagaagctacgctataaggtggaccacgatgagcgccttgacctggatgacgggcgctgggaggacgtccacgttatcaccggagccctgaagctcttctttcgggagctgcccgagcccctcttccccttctcgcacttccgccagttcattgcggccaatcaagttgcaggaccaggcccggcgcagccgctgtgtgcgtgacttggtgcgctcgctgcccgctcccaaccacgacactctgcggatgctcttccagcacctctgccgggtgatcgagcacggcgagcagaaccgcatgtcggtgcagagcgtggccattgtgttcgggcccacgctgctgcggcccgaggtggaagagaccagcatgcccatgaccatggtgttccagaaccaggtggtggagctcatcctgcagcagtgcgcggacatcttcccgccgcactgactgctggcctgtgactggggcggcggccgc

SEQ ID NO: 144592 - DNA, 413 bp, Homo Sapiens
acgtcaacgtaatcaccgagcccctgaagctcttctttcgggagctgcccgagcccctcttccccttctcgcacttcggccagttcattgcggccatcaagttgcaggaccaggcccggcgcagccgctgtgtgcgtgacttggtgcgctcgctgcccgctcccaaccacgacactctgcggatgctcttccagcacctctgccgggtgatcgagcacggcgagcagaaccgcatgtcggtgcagagcgtggccattgtgttcgggcccacgctgctgcggcccgaggtggaagagaccagcatgcccatgaccatggtgttccagaaccaggtggtggagctcatcctgcagcagtgcgcggacatcttcccgccgcactgactgatagcctgtgactggggcggcggccgc

SEQ ID NO: 144593 - DNA, 413 bp, Homo Sapiens
ttttttctggaaaatgttctgtatttcctggatgaccctgaagtggtgaccactcctgcctgcccacctcccagacccggtgccgcctgggtccgacattgcctggctttccccgcgcccttccgctgtgtcccgtgaggctctctagctttgcgctttggggtcatcttgtccagtggacgacggcgtggtgtcgtctgcaccatccctgcagtgcctgacttgtgctcgctgaacagctgtagaattacccggagctcagccctttgctgcgccctaggaggggctggaagaggagcggcctgtgtccctctgcttgtttgtggagaagctgacctggagcagtgttggaggggtccctggatcctgagcgagtgttcggtcatttgcctttccatagacctgggcgaaga

SEQ ID NO: 144594 - DNA, 466 bp, Homo Sapiens
tcagatttgttcacaagtctgaaaaacaaataatagctctgttagctaagtgaagagaattccgtgacttaaaaatagcacacatgcatctgccctcagatttaaacatatctacctgggtcacctcttcaactggcttctgcctcactcctgcatttgcatttgatttctattttcggctgtgcattattaagaagccacttaccaaagcagagagaacatattttttggccaaacaataatataatacttggtcatccaagccctttaatatggcctgtacagctggaaatgctccctagaagagaccccttttagaaacgtccctcctcgctctccctaagagagatgctggtttaaggcattttggggttgattatgattgatctaacacctttagataaagccaggcagctttccttcgcaataaaacttaactaacttgtaggggttgctagtttatatc

SEQ ID NO: 144595 - DNA, 468 bp, Homo Sapiens
  misc_feature (74)..(88): n is a, c, g, or t
tttttcaatcttgcccttaaatgcaatatatttgttttcttgatgaaaagaatgcaatcttagtcctttggaannnnnnnnnnnnnnnaacctggagaagactgttcaatgcagctatctttcaggtcacctttcctagcttagtaatgcctcaaaaaccaaggagcatatgtccatatcctgatttcttacaggtttcacagttacctgctagtggaagtgctacagaagtcacgttgttagtaagatatccaataaccaaagaggcttttgtaatagccttatttttacccttcacaatatttattgacataaaaatctgtaatcatacatttgagtactatttgcataaggaggttaaccttttagtaataatcacaaagaggttagtgtttgttattcattgacataagatggtatttccagctgcaccttctgttgggtatctcataattggcatgagcagga

SEQ ID NO: 144596 - DNA, 344 bp, Homo Sapiens
cttcgccaggacccgacacaccaggcttcgctcgctcgcgcacccctccgccgcgtagccatccgccagcgcgggcgcccgccatccgccgcctacttacgcttcacctctgccgacccggcgcgctcggctgcgggcggcggcgcctccttcggctcctcctcggaatagctcgcggcctgtagcccctggcaggagggcccctcagccccccggtgtggacaggcagcggcggctggcgacgaacgccgggatttcggcggccccggcgctccctttcccggcctcgttttccggataaggaagcgcgggtcccgcatgagccccggcggtggcggcagcga

SEQ ID NO: 144597 - DNA, 456 bp, Homo Sapiens
tttttttaggtgagactcaaggtatgtttattctgagagaaattgctctccatctgtgattctgtgaatcaaataggtaaagagcttccaaaatgcaatggtgggacagacatagaatcgacattcccattccaaaagggagaagtaggaaggaatactacaacaacaacaacaaagtaaacgataaatcttaaggctccagaataatctccttttgatgccccatcttccaatcttccaggcacacttgggcaggcgttgggcccccaaggctctgggtgtcccagtcccagcccacatgacagcacttacatattagagccacatgccaggctggaaatgccctctagtggctctactggtctatggtcagagggtaggcctgctcctatgactctgccaagcacagccttagtggaggctttttgtggtggccccacccctatgtcaattctt

SEQ ID NO: 144598 - DNA, 900 bp, Homo Sapiens
tttttttgaattaccatgcactttattgcctcctcttggaaacatccttatgtcattgcgctatggccagagccccgaaggacatctgctctccttgggagctgctgagccagggtgcccgtgatgtcttcagaatccttcagtcccgactgcaggagaaacttggcacaggccaagtgctgacctgcacaggccagatgcagggctgatcgatttttttcatctttagaattgatgtcagctcccaaggataagagagtctgaattgtacttgtatgtccttccttagctgcataatgaagtgctgtgaggtgggttgatgtggctctcacatctacatcgacgccaagttcagagaccaagaatcggatggcttcgtcctgccctgtgacagctgccctgtgcagagcctgggcacccaggctgtcttctgctgaaaggcaagccccatgttcatcgaggagcagcctagcgacgtcgatgtgaccacactggattgcgtccatcaaggcggtgacgccacagttgtctctgtagtctggttcatattggcacctcttaagaagcaccttgactgcctccaaatggccatgcattgctgcagtatgcagaggagtccttctaattttgctctctgtcttccaggcacctgggcaaacagtgagcaggtactggaggatcagagggtcgccttctcgactggcaatgtggaaactgttccagccatctttgttcttcaggagtggattggcgccatgttccaccagctcctggatcacccccaggttcttccttgtgcaggccatcatcagaggagtcccgacgcgtgggtcgacgatatcccgggataccggaccggtaccagcctgcttttttacgcactgttcatatgtcaaccaa

SEQ ID NO: 144599 - DNA, 517 bp, Homo Sapiens
gcttcgggagctcaggcccgagtaggaacaggtgcagtagagcaggaggcctgcacaggtggcccccaggaggacgcccagtgagctcatggcgatgatggtgatgaggatgggatccagggtgtacagccagctcttttctttgtcggtcgagggggcgccagaccctgaggttgcagaagaagaattgctccagtccacctcgtattcatcatcaatttcatcttcatatccttctctctcatgtatttctgggatgtccactgcaaaagccgagatgggttccatgcagttctccagtgggacatcagtgcttatccgaatgtcatcaatggcaatctctccggaacgtcctttccctatcactccctcgaacacaatctggtactccatgtcgtagctgggcaggatgatccgcccgtgcttccactcgccgccctggtctcacggatgacccacagcaacttgctctcctggctggcttcccgcaccacctgcagcgccaccccgcgggcgc

SEQ ID NO: 144600 - DNA, 561 bp, Homo Sapiens
tgggtgctgttcttgcttcggccctcagcagtgcgagccacggtcttgctctagcttaatggttagggtgggctccaccgccagaggggccccgttggtgtagtgggaggttttgtaggtgatggagtgatcggtcttcttggccgcatagcggaaccggtggtagtggagcaccagggccagcgcgacggagaccagcaccagcacggcgcccccggcggccattacgtaataccagtaggctgggatgggctgcatgggcaccgtgtccactgtgggctcggtccctggcaggagggtgccccctgcaaaagccgagatgggttccatgcagttctccagtgggacatcagtgcttatccgaatgtcatcaatggcaatctctccggaacgtcctttccctatcactccctcgaacacaatctggtactccatgtcgtagctgggcaggatgatccgcccgtgcttccactcgccgccctggtcctcacggatgacccacagcaacttgctctcctggctggcttcccgcaccacctgcagcgccaccccgcggccgca

SEQ ID NO: 144601 - DNA, 289 bp, Homo Sapiens
gggagacacgttttgtcagttgcttcctctggagtccttttaaaagactactttttagagcagttttcattttaccgatacatcgatcagagagtacggagcttcccacattgcctcccgcaccccatagcaggcagaggcaccagccaggcgccatcctttacaagctgtttcagcaaaatgtccctgggaaggaaatgaccgcagaagggagtgcaccgtgggggcaggaggtgctgcggccaatgggcagtgctgggagatgaaaccaacagcggcgattgcccca

SEQ ID NO: 144602 - DNA, 524 bp, Homo Sapiens
agcattacacatgaactgtcagaaaggacctgagtgccttagtgtgaattaatagctgtctccatgtctaagaagttaccatcattgggttttttcctccaggctaaactcccatcttccagcaggctttgagtgtctctgtagagtgagcaaaaacatatcagtatacataactatttactactaagtctttggatctttagatggtgctttctcagctattgcctatggctgaacaactgctagaaaagatccagaaggagcccacagctgtgctgaaagatgaggccatggttctgcatctcactctgggaaagtataatgaattttcagtttcccttttaaatgaggatccgaagagtctagatatatttataaaagctgtgcacacaacaaaggaactttacgcgggaatgccaaccattcagatcacagcccttgaaaaggtcagtgatttctttcagaaactaaggcatagcatgttcaagcatttaaaggtagaaggcaacaggaacagcgttaaa

SEQ ID NO: 144603 - DNA, 420 bp, Homo Sapiens
  misc_feature (89)..(195): n is a, c, g, or t
ctttatcttaccattaagtaaaatgtttgccataggctttctggggctttctctttttaaagtcagactgttgaaggtttcttctattnnnnnnnnnnnnnnnnnnnnnnnnnnnnnnnnnnnnnnnnnnnnnnnnnnnnnnnnnnnnnnnnnnnnnnnnnnnnnnnnnnnnnnnnnnnnnnnnnnnnnnnnnnntcatttacataattataaattagattaagttttcaatgttaagctacccttgcatttatgaaataaaccacgcttgctcatgatggtttttgaacatttataatctgtctcacagatttgtttagaatttctgtatttatgtttatgtagagatggctctgttatttcacttttctctactgtccttgttagcttttacataaaacttagttttcctgaaaaaaa

SEQ ID NO: 144604 - DNA, 1001 bp, Homo Sapiens
aaacccccgcaccgggtgggcaattccggcacggccagaacgcccgactggacaacggccgccctgggcgcgatagcacgaccgcggccccgagtccagcgctgacacctcgagagtctgtcggacaggagtagtcccaggacaggcgcccgccacacctgctgccaacatcctccagggcggggccatggtgtgctctattcgatgatatcgtgcggctgccttgtgcttcctctcccagacgtcgtcttcttcctgtgctagaatcatgggatgtaccttgtctctcagaggcccctgctgggtttgaatcagagccggctcgtggtcttctcaccacgtccaaatccccatcctcatccagctgagcttcagccacttcctggccagtggtgtcagtcccggcctggagggagaaaccctcattaccatggccacttcctggaggggaccctgtgctgcctgtctcagcagaaggaggctcctttgtgtgaacatctctgtgactgccacccttggctcctgaatctgtcgaagagtcttggctccatagaagcttgaattgggacaggaaaactggctgccccacgctgttcagccgtaccatgagatgtctatggttcggggtatagaggtggacatctgacagcacagtgtcgctcctaaaggtgacctcgtccatggctgccgcaggagccagctgtaccatggcccaggctccaccttagtcctaggacaggagtccctcagaggtgagaatgggtcctcagcatggcaggtcccagaggagatactgcagacaggtccaagctggtagcgagtagctttgcatcgccctgggagaagatctcagagacttggccagggaagagaatccagccgccgcggggcccagcctgggatcccacccgactcccgtctctgtgggacttaggcgccgccataacagacggtctgcgcaggcctcgtgccgaattccaacccagcctcctacctagccc

SEQ ID NO: 144605 - DNA, 433 bp, Homo Sapiens
gggttgtatgaacactggtttattaggtagataggaaaagaagaatgaagtcaatagtctttagcaagccaactagctcaaggaatagacagcccctttccattctggagacaacacagaaatctattaatattaaatattgtcatgaggtatgcacctgcccacaggggtattatgatggaaatactggggtggtctgcagggccaggtacaaatgacgggaaacaaagccagagaaactgaaatacctcttggaccccagaagacagatgtactgatttctgggatgtcaggagcccagtgcagagcagctggataggtcgctaagagctttcccttctgcttatcgggtctcacacacctggataaaccagttattgaaagctgacctgctaatgagaagcttctggcacttgctggtgtttcctaattg

SEQ ID NO: 144606 - DNA, 1844 bp, Homo Sapiens
tatgacagggtcttcccttcgtggctgcccaggtagatcccgctctagcctaaatcaagagtaaggctccttcgtcaacaggagtcaaaaacagcagccttacgtgagctctcagcccagggagtattcccttggtccaaatgcagcccaagacccactactcacatggatttctagagttcagaggacgccccaccaccaccaccattgaggaatacactgtggtgaggatgatcttcaccctcagcccaagaaatccacagggcactgttcactactactcccagccactacttgtgaacctgctcccagcctctccctgtccccactgccttccaggggctcctccccagtaggacagaggaagcaaaggcgagagggtggccagaggctttgcagggtgatgtttatttgccaggttcagtaggcacacagttaacccaccgaccttcacacaccagagcagacccacaggcatgcagggagaagggcaggaccaccacggagtgccgagcaagggcgaggaccaatgtggctgcctatccaggctgtggtagggtctgacaaagggcacctgtcaggagcctccctcaggaaactggggagtttaaccctacttcctcatcccagaaaaagcaactcaatgtggctctgaggcacctgggcctctgatagaagtgagctgtagaaagagggagttcctcttcatttcattgttgaactgagcagaaaatctgcccctgtaaagggcaaacctccaaatcagattatgagttattgccatgcagcaagccccctagggtggagaggacttgtgggctgagattgtaggaggtgggcatctaggaagagcaaggaggtatcagccctccctgtttggcccaggttaaggacccagtaaggctgggacactgggtgctgggcttgtactctgccctgccaggtctcattgccacgtcctaattgttcctcctttcccttagaggctcatgaggttcaggttacagggcagcccactgcaggactcggaaaggcaggaaataacacaaataacagggtcttaggaaggacaaaaatggaagcttctgccctcctactcattctctccactcctgaggacctccacagctagtgagcagtatccctagccatgtgccaagtctggacttaaacatactgccctacctttctgcatcctctataccagcctgtatctgctcctagagcagcccacacaccacaggcacacaccttcatgtgcaggagcctaagaccgctgacagggcctcgctggaggaccagctctcagggcaaggccgcccaagtttagggcctgggagagtgtgggacctgcagggcctgcctaggggaatggtgaggcaagaagggaaggggaaggagagcaggagccccctgagtatccctagagcagcatcccacaaggaacagaaactggtgaagctagcaaaagacagaaaagccacaaggaatccatgcaggggctggggccggccctgccactggcctgcccaccactcacacacatacacacaggagacgagactgctctcccgtgacccctagttatgccccactgggatgtgggggcatgggggagcgagggcatcatgccagtgactctatgtacagtgagaagcccctcatccactctcccaccctcctgcccatccctgccccccctcaccaggctgcctactcagctggcctcctccctttgagactcctgggcataaccagcagcctcttcccctttactagagggtggagcctggcctgtggcgccctctggggctgtgctgtccggctgggccatcctcgtgcca

SEQ ID NO: 144607 - DNA, 1057 bp, Homo Sapiens
caaactgattcaaatctcattttattttcataacagtactactagataactagggcaggaatgactaggcttaccacacaagtaggaccctagaatcatctagaactgaggctggctaccttggtgaaaggcactgtccacactgtggcagcttcagccctgtctcacattgtctgcttcctcggctttacaggagttggtgacccaaacggcaggagaaagttccatgaactagcaacaccttacagctaatatcccgtctcctacccacagtgttatgtacataatcgatttcgatacctgggcaagtatgaggtcagtgtatggttatttatctggagatgtaggtgtatgttcgagaaggggaacgggggggttcagcttgggcagctggatcatttaggaagtcccagatgaggattgtgtcatcatgtgaactactgacaatctggaattcatcaaactgtagtcgaaaaactcttccggaatgctccaccagggtccgtagacagagtgtccgttgaggagcacggggggcccaagcagccacaagatcccacacttttaatttttcattcataggccccactggctatcctcttgttatcaaatcgaatacaacgcaccaattcctcatgggcttttaacactcgtaaacatgccccacattctatgtcccataatctgatagtgttgtcagatgagccactcactaccagcctgtccctgtactgcaaacaggcaatgcctcgtttgtgtccatttaaggtccttacaaattcacaagtacttgtgttccatacctttatagttctatccccagatgcagaaacaatgtacttgtcatcaaagtctacaacattgacagcagctcggtgtccgaccagcaccctccggagggtaatgtcagttggggaggccatatcccatacagcaatggaacgatctttggagcaggtcaccatcatgccattattgaaacgcaagtgcagaactgcttcacaatggtgaatcaacgtgtttagcatttcacctgtatttacatcccacactctga

SEQ ID NO: 144608 - DNA, 463 bp, Homo Sapiens
ttttcattttataagcacttggttttattgcacagaagcaattgaaagtgaactccagtggaaagtgcgccctggcataattcagtggccagtgcccggccccacctggaccgctcttccagaatagagagctctgggcaagggcttgaccactcctttggaaaacagaaggcatttgggaataggttaagacatctcaagcataatgtatttctaactgctcattcattattgcggtcatctgtcagttgcacatagaggcaataaatgcacttatttggaaaggaggggggcagtttttatagtcaagtgtttacgtgtggcattcggcatgtatcacattcagctacataagctatcataattgtccatcgcctggggagggcatgggggcaggggcctgggagtgccctctcttgctaacatattgctaacagaaattcctgtttgaagaaggaggccc

SEQ ID NO: 144609 - DNA, 528 bp, Homo Sapiens
ttcatcttcctattaacatttgccataataacccctcattgaccaccatcattcctccatccaccaccaactcagctccttctctaaagtgccctctaatgggcagtggctttggtctctgtttggcaaattatgtccagagggttaacattaatttctctttctcctattcctccctcatgctagattcagtccatcactcagcctcctgtcaggaaaaccatagcaaatcctactttctgctaaaatgaagttacaagacacttttccagagtagtcacactcaatgaagggacccagggtgtatctgagtgtgatgtaattgaaaccacatggaaagactagaaatcccttgctcccagtcagatatagtgaaacagcttactcaagactggactaagatttagaatataggggggctagggaggagaaagagaaagatcctcagaagtggattgtccctgaatacaggatgaaatcatctagatttttttctcccattaaatttgcatttcattcaaccacaaa

SEQ ID NO: 144610 - DNA, 575 bp, Homo Sapiens
ctcctagaattgatctgccttatcgagccttgttattggggagccataagagtcagttatccagaacacagttttgcataagcttgtttatgattcagtaatgcaggtgagagtgtctagcagttcttggtaagctactctggacatctttaaattatttatcctaatggattccattctggtttatgtataatcgtttcaagactttgggagtcttttatgaacaaatgctcattgcactatattatatgcaaattgttttgctgctaggttttcaaaatttgaataataaagccttttcatgttcttttacatctcttatagatatttttggatttgttaccaaacattacatttactctcacccttttattatttttaaataagttatttcattacttgctgatacatgagtattcctaagtgtttataaatatttctataatagtttcacatttatatttacattttaattaaacagtatcaaaattgcttgcttaaaacctaagcaatatgcattttgcttgaactgcttactgtaactttaacctaagattatagtgaccttattcagg

SEQ ID NO: 144611 - DNA, 379 bp, Homo Sapiens
atgggtcacagccaggccatcaccccggggccaccgtcgcaggcaggtggaggctggcagcccagaggcagacaggggcttggaggcagggtggggagcaatgccaaggccgctctctggcccccagtgtcacaggatgacctcagccctggcctggccccagagcaggttggttcactgctgggccctgtggacttgttctcatgctttgtcagtgtcgatgtcgaaagcccaaagtgtttcccaagtcctgctaccttggtaagactcaaccctcaatctcagtctcccctgcagatctctgtggggcttggtctgaactttcgttaggtgagtgtggagtaggcattattgtacattgtagtcctttctcctcaaa

SEQ ID NO: 144612 - DNA, 709 bp, Homo Sapiens
ctccttttctcactttcttcattgtcttgttcttccattggaatgaagagtccaccatcttctatctcttcctcaggttggtgaaacagagtcctgagtggcttttcttgaggagaggcacaaacatctggctgggttgatttcctgggctggcttactggttttgcagattggctgcctgatggcagggaaggtatctccccttcagaattcatttgaggtttccctccttcttccttgacttcttcactaggctctcctgaaaaaggctcctttagggtaagatgatcacatctgtcttcttgggtaactggcccaggcctgagtgtcatttttttccctctctttgagccagtagcgtggagttttcctttaccaatgtgtatattaagggggtgaaaagactccaaggaaggtagggtgattccctgagagatggccacatcaacaccttctagaattggtacatttgtgttctgggtgagcattccagagctcagagatgtatcctccataccaagctgatttcctgcatcctgcaaagactgtacttcgaagccagctactctgccatgacttggatcccaggatagtgacaccgaactcaagtccttaacctggtcagattctggtttaacggctgattctaggtctacgttgttttcctcttgattgcctttatgctgtagggactctgtcactgtagttc

SEQ ID NO: 144613 - DNA, 424 bp, Homo Sapiens
ttttttttaaagagagatcggaactttattgagactgatgaaatcagaaccaaaagaacactggaaaggttctgccactgtccaggcacagatccttccagacactcctcttgggggaatctctggatcattaagtttcccccagttcctaatcccccaccccaaagagtcagaattctgcttaaagccccctccacggagctggccagaaaccagacactgagtatctgtactgactgatgggcaggcctgtgagcagcagagacaagagaaatcagagaaggaacacgaaaaggaaaacatgacggaaagaaaagcccaaggcagggagagcatgctgataacgcagccccctgaaaatataaatattgcatgaatgtattagcctcatcccagccatttcccccaaagcagtggtgacacc

SEQ ID NO: 144614 - DNA, 412 bp, Homo Sapiens
gagacagcttgctttctctctctttgctctctgccatgtgagggagcaacaggaagacagccatctgcaaaccagcaagctgactttcagcagatgctgcttctcctggcaccttgatcttggacttcctggcctctagaactatgagaaagaaatgtttaagatttccagtctgcaaaccagcaaatgggccctcaccagacactgcctgtcctggcaccttgatcttggacttctcagcctccagaaatgtgagaaagaaatgttttaagtttcccagtctatgagaatttgttagaacagaacaaactgactaagacactcactaacatggtatattaccaatctcttaaattttgccagtctgataggtgaagttactcatctttatacagccatttcttcttcaaaa

SEQ ID NO: 144615 - DNA, 600 bp, Homo Sapiens
cctttttcctttttctttcctttcttcataataattttgaaatgtttatttcaaagagcgttggtaatttaaacgtcctatttaatccccaaaacagtcctgagggggagataaggcagttatcttcatagtacaggaaaggaaaaaagcgagggtccaaggccgactataccctcagctccattagcccccgaggcctccctgccaggcggggcggacaatcccagtgcagatgctctgtatcgatcgcatgctatcggttctttcaaggaacgtgtattgatcatcaattaagtggtgagtactcctctagatgtcgattcttagcaaactgcggaaactcctacagacaaaaactcaggtgtgggcgcagaagggccggggatgcgctcggtcaagacttgaaggcccggggcttgggccctgtgtcctcaccgagccccggggaggctccggctccgtccacacccggagcgcgactcagccgcggccggggctcttctggagaacggcgcggtcaggctctgccgcagctttcaggtcccctcggccccgtccgggtgcagcgcaaccaggctgcccgcggagccccccgccccc

SEQ ID NO: 144616 - DNA, 324 bp, Homo Sapiens
tttgtttatatgcaaacttgtagatttcagttactccctagtcacacagaggccagaccacacactagcccctgtatctcctaggcatcaagacattaaaatgctgctggccacagtgaccatccatgggaaatgaagggaatacctgatggaggcaaagtgcagttttctgaaatgtggagctgcaagtaatctaagcttttagcttgtcacaagttgaggatcaagaatcacatgtagtgaacagatttacctacaatggaacctaaagacagaataaggggagagggtggatgtgtccagcgcctgtcacaggagaaagga

SEQ ID NO: 144617 - DNA, 171 bp, Homo Sapiens
aattgtcctatgctttgttcggttcctgggttaagtacttgtttttaagagcttggaaaaagtgggcttgctacatctctgttcaaagagacatttgttcaatctctgtgtgtcaacgccttgttgaattggtgctttgtggttgcaataaagcattgcttcagttaaaaa

SEQ ID NO: 144618 - DNA, 383 bp, Homo Sapiens
gtgaacaacagtgttcatgggcttttagaatgcttttcacttttagtccttgtaactcagctgttcagtacctaaaacaaattcaaataatatgaacattatctcctactagaagtaacgttttcaagttttcatggcacattatgattgtaaatgtctctcatttttaacagtaagtctataggagtcccgtgaagattcctgaaatgtctgtagtaactgttagtcatgtttgaataagtgtagtatgaacaaagtattttattgcacagggttaacaaacagtatgttgccagctgaggctactgctgttttattacaacattacctcttgtttttataaagtgtaccaagatttaaattgataactttattttacttgt

SEQ ID NO: 144619 - DNA, 868 bp, Homo Sapiens
ttctttgataagacagtgtcaattttattgctttttgaaatgctgtgtaaagtgtggtacttaacaatttgcacattgggcaatttccatctgtaagtttaaatatatgtgataagaaaaagtacatgcatattaggaatatataaaatttttcaaaatcatcatctttacattagaaatttctttacacaaacatcttaacttttaaaaaaagtagcaaatggctataatgctctaagactgcagaaaatccagctttctgtttaagcagcctttcactgagagacacgagtgatggcagatgaaggcctcttaagaatagactcaacagaaaatgacagtggttcattcaccgagagttttgttccaacttgtttggctacaaaaaggtcttttgcacatctatctattgtaaatgtgtacttctggttgtccttaactaaacactctctgtgtttcttaggggtctcttcaaaggcctctttgacaaatggtgcttttcaactcaggacccgatttgtcagtaagctgtttgctgcaataatgagtggaatgcgattatgtctaagtggcagagggtgcctggtgttttctttgctgatcttcgttcaagacatgcccttgagctgccagggagtccgtgtcaacaatgggagagaaattccgtcggggtggggagaacgcggacctctctgggacagcctgatgaccctgaaggtcacttctcgtggtctggatctcaggactgtgaggcagcaccaggaaaccttccaatttcgatggcatcctgtcctgctctgcactgagtccatcctggactcgtgctcccttccagtcccagctggccccaggcttcagcggcttgacc

SEQ ID NO: 144620 - DNA, 509 bp, Homo Sapiens
gatagttgagttgtgtgtttatgtgcttatatgatagaggtgctttgttcctgcagcttagaaacagaagcagccattcactgagaagcttaagagaggaagtatcaacctcattttccaaaccagcattactttcaccgctcgtggatctgaaagattacatttagaacatttagtactattacactctcagaaactgtggtaaaaagtcacattttcaaaacttcatgcatattgtattcttgttggaaataagtcctgtagtttcttaattgtcttcatgccgtccatatttaacaaacattgcaagtcctttttatatttgggtaattatttgtaatttagtgaaggagactaggggatgttttcttccaaagggaatttaaaatcaattttatggtattttgaaagtaaaatactccttaacgtgtcaatatttttaaaatgttatctcgaagttttctattgctcaggtatataatctaataaaattttttgtttgctcaaaa

SEQ ID NO: 144621 - DNA, 470 bp, Homo Sapiens
cagaatgctatcttgtatgtatttttttcattacaagccccatgagctgcttttatgctgaaaatggtcatttccctgttcacttactgacatgtgaagaagggtttcttgctttcttaaacatttccgtaaggcaggctagaaatgtaatacttcaaatgtttgatgattatggtcttttgataggaatagattctgcttgggatatatatccaggcactctctaaggtctagggttgatattaacaaaggaatgtacttagaatagcagtacattttatgcaaatatggaaattattttaagaaacaatgacatatcaaaactgctttttacatgattttgaaatagactagaaagctttccctatagacatattaatattccaatcataactttaattcaagaatgcagttttaccaaaagaaaaatttgaaaatttctattcaggctactggaattggttataaaa

SEQ ID NO: 144622 - DNA, 485 bp, Homo Sapiens
  misc_feature (87)..(100): n is a, c, g, or t
cgaggatttgcagcattgaaactttccccagtagttcttggaaaagctgaccgcagaatttggtagtgtacacttagcatttgtgannnnnnnnnnnnnnttaaaccaaaaactaacagtgttgcaacattgttgaaagggctcgtgtttttcagtggtcatcaactgcactccatcaaactcacctccatttcaccaaggagctctaaagtaaggagagtgggctttatttaaatgaacagcattttaaccagatactttgtcctaatgtatgttccttttcttcatctgttttttcatactaaatgtatttgatagtggacatgttggatattatacaaaaaaatcattaattcatttctgttccaaaacctttgatcagaacgatctgtggaagagtaactccatttctatatgagtgagtgtctccttgctttagatttctggtgaaccctgtggttatgaatacaagagtgtgatttaaa

SEQ ID NO: 144623 - DNA, 393 bp, Homo Sapiens
tttttttagctataagaagggttttaatctgaagagtttgacagagaactaagaatccccaaataatcaaaaagaaaaactcatcacatctagtggtaacaaaattcggatatatatggttttcatatctgttcatgaataactcaacaatgggcagcaaaaacacacccacaatttcaagactctggccaggagtgctgaccagcctcaataaaatgtcagcttgctgccaaaggatccagatcagtggaattgtccagttctctaaggagacaatgcagagttgcctgcagactggttctgaaatcgaaccagaactagaacttaaaaacaaaaagcagatcaatctctaggcatcaaatttcttcttccctgacccggcaggggagtgac

SEQ ID NO: 144624 - DNA, 473 bp, Homo Sapiens
  misc_feature (383)..(383): n is a, c, g, or t
  misc_feature (391)..(391): n is a, c, g, or t
  misc_feature (401)..(401): n is a, c, g, or t
ttttacatttattgggcactttatttctattattattacattgtagcatataacaaaataattacataactcaccataatgtagaatgagtgggagtcttgaccttcttttcctgcaactagatggtcccatctgggggtgatgggagacaatgacagttcatcaggcattagattctcctaaggacagagcaagatagatcccttgcatgcacagttcacaatagggttcgtgctcacatgagaatctaatgttgccactgatctgacagaaggcagagatcaggtggtaatgtggggagcggctgtaaatacagatgaagcttcgctcacccacccttactcacctcctgttgtgtggctcagtacaggcctgtgacccanggatcaangggtccctgnctgaagtgcatccaaaaggaattcttcccacaccagtcttcattagtgggtccaagtgcagccagccacttt

SEQ ID NO: 144625 - DNA, 456 bp, Homo Sapiens
tttgaattccattttctgagaagaaaactagtattgcagcagagtcatttaatgaaaacttaacagtttcactgaggattcagatatccgttgacatgtacatgacaatctttagattaaatcataaaaagttgactgtctccaagaaattgttatttcacaaatttatctattttaaatataacactgaagttattacataaacactgacgtcaaaatcatgccagagcagtgttactatttttacatgtatatgagtattcatgatctttaatgtctggacacattctaggtcacagaacagaagcaaattttcacttttgtgtgtttttggtacagtgacatgtctggttccttttgagctagatatatctgcttaaataattaacactattggatattagtccctcaaagtaaatgtctattttacctggtattctaggaagagagagagaa

SEQ ID NO: 144626 - DNA, 379 bp, Homo Sapiens
  misc_feature (40)..(40): n is a, c, g, or t
  misc_feature (108)..(108): n is a, c, g, or t
atttattgcggcgacagtttgactatgaaatccaccccanaacatataattttagagtgtttgcttggatcgccgaggacggattcttgcaaaatgtgagcactacangtcattgttcgtgtctgggatgagaatgacaattcccccaccttcttgcatgatgtgttgtttttgaaagtcgaagagagccctgttccccaaggggtaataggcaaaattacagctattgacatggactctggaaagaatggacagctattatatttccttttgtctgatggaaaattcttcaagatgaatcctaatacaggtagcacttcatagtttccacctattcctttaaaatgagggttcagtactatcacactcgtctttaagt

SEQ ID NO: 144627 - DNA, 762 bp, Homo Sapiens
  misc_feature (72)..(72): n is a, c, g, or t
  misc_feature (163)..(163): n is a, c, g, or t
gcttgatcaatctctcgagccaactggccggcacgcagcttctcgctgacgaactcttctgagtgtcccttntctaagggcaccgataaagaagaaagactgctatcataggtagtcttcacaccgtagttctcctcattgaacttgaacatttcattgggtncccatccattggacatgtcagactcgaggtcatagtcgtcgctgttgctgtcacccccctcccagcgctgaagcaccttctctttgtgttccccattcactttcgagtttcatggcaatggctgaatcggtgaacttgtctttagtagcatagttgaagtcaacatttcggaagtgaacaagcatgacatcacttggcttaaacaccatggtgtccacaatgtcctcccgacgagggccacctgctggctcagatgctttccggtgcacagcatccacggctagttcaaactttgagcttagcgtcttgaagataccctcataagtggtaccatttttcacctttacatcacaagtggagcccacaacagctgtaaggaaatgcagcattctggaattgttgtagacgccttcaaacacaggtgactgtgggggtccctttcctgtgctctgtcccctggcgctgccgatggcggctgcccccggcctctcctggtgttgctgcggcggcggcggctgcggcgccaagatgccttcggctccccggcggagcccgctcccggcagcggccacaggccccaggcagggggaggcggccgc

SEQ ID NO: 144628 - DNA, 828 bp, Homo Sapiens
ttttacatttataggacttttaacctggatttttggttttttccagcactaatgaaattagtagggttgaggagctcaggatactttttcctctctaagggaaaagacttgtgaaaggaacttcagttgattcagcagtaagtgaaaatgaactcccacattagcccctgggaggttgtgaaatttccttaactcggtgaagaacacaggttctttttagaacaggactgaaggatatcactagaaagttcttttagacttctttttccaggctcttggttcaagcaaacagaaatgagggctagggtatgctttcaggtgtagctaggcttaaagtacctcaaagatcattctaaaagcatgctcagcactgttctcaaatctagaggcagctggtaataacaacatccaagggatatgttcagccagagagctgttcttcagattctcacttgtaggcccacttaatcagggtcaggtcttagagtctccaagttttatctagtttatcccctgcttttagctagaatatacttcaaagcatgatcctactttacagttcaaatcttaacactgttctgcttttataaacagctgcttgtcctaatcttaaaaggtcttcaggaaaaagacggtttgctggtttccttgataaaatatccccgagcatctcattccttctctttgtgcatctgtttctctttgggtaacataagcactcctggagaagttgcatccattttattttacgggtccacacggcaggggcctcctttcaagggtgcggcagttgctgctgttgctggaacagcagctgctctgtctccc

SEQ ID NO: 144629 - DNA, 674 bp, Homo Sapiens
caagtatatcacctttctgtgtttttccttcaactttattaggctttgaagaagttctaagacagagctccttacagggaagcatctctgtgcattcagaagagaagaacatttctgagtcctcacgaaactatttcagtatgtatactataataattgtggagcatgaggccactgttgccttcaactccatggcttccatcatgaaatgccatgtactattatgaaatagcacagagatcatgtttttcagggggcaatagcagatgaataaagaacctgtgtaatttagggaggtgtcacatatagcatgctatttcaacaatgtcctggcaactaaaaacggtgtggtggtgaaggtgtctaagaaggtatatagcagaacaaatgacacataaagctgttttgggtccccccccgttaagggaatgtaaaggatctttcttacttacactgtacaaagcagaagagactttgcaaactggacacaacgcagcaaaaattcgacagtggttattgttgggtcagagaattacaaggctgtttgttgatatacttcatgcttttttagtgttttcaagtttcttgtaactaacatgaattactattacataattattttgaagatgcttccgttttgaaatatgatatattaaattttccagtatataaaa

SEQ ID NO: 144630 - DNA, 471 bp, Homo Sapiens
aattccagacctctggaccagatggtgggtgaggtcttttctagttttatgatctgagccaccctggcactagaaagtagcactgaaggatgctgaaggatgtgaaagtagagcaatttgcaaagtcacatttagctatgcattattagaaaagctttaagtgtgaaaaaatttaacttgctttaagttatgctaattctaaaacaaaaaccaaatgaattccaatttaattagaattaaatctaggagtaatagatggcttttcacaaatttttaaacatacagaaaaaagtagtgctttgagaaaaatgtcaacgagataatactagcctctaggatcatttatcattttcaatacagctagttagagacctcacagacagtgcttcccttaatggtcactcagcagggcctcgatccatctgtctccattaaaaggaagaggaagtgttttatttatagaatgacaaa

SEQ ID NO: 144631 - DNA, 1103 bp, Homo Sapiens
taacttttcagtgtttgctgcttttattatcgttgtaattattaagagcgaggaagtcacatcccagtaactatgggggacctcaaggcacacatctgtttacagatccaggagaaattttggctttagggaattttatttgcctgggaaaaatgggggaaataattgaacatgaagaagggttggggcaaggtagcagagtgaggtgtggactcacttggggggctctgtggccaggacagggaaggacccctcgaggtgccactgcttgtcacgcaggcgacgcagggactgcatctgtggctggaaggctccccactcattccagtgccggaagtcaccaggctctaggaggtactggtacccgcggtagccaggatactgatagccaacccatgttccactggagaccttcacgctgcccacgcggtcactgaagccgtagacccagagactgggtgcgtcgtccccctggatctttaattgtgttgcctttgaagttggccccttcaaacagggagatttttgtgctcttgggcattcattttgatgggccggaaggacatgagccgatcactgcggtagctgctcgaccatgtgttccagcgagggtactcgcccttctccaggatgaacatctccccgcggaagttggactgctcaaaggcgacccagggtcccgcggagacaatgatgctgcgcacacggtcgaagccacggtctgccagatttgagcactcccccgagaattctgctcgacggccctggaagttttccagttcgaagaccaccagcctgtagttcccaggaggcagttccgccgccttggcgctggtaataggcacggttgttggggccagggtagtgccgggactaggggatgttcctgcaggtggggcccccttccccttggtgtcaggccctgggttcaccgccactgtggccgaggccgaggcctttgcagcctgagacatggttcccgcctgcaaaagtctggggacttgctacttcctgctggaggacaggcaggcgggcaggtgctatgggtgactagagtccgaccccccattttatagtctggcagacatcagatcccgggaatt

SEQ ID NO: 144632 - DNA, 662 bp, Homo Sapiens
ggcaagacggtcgtccacctcgggtcccggcgctcagtggccttcgacctcgacatgcacgacgggcgctggcaccacctggccctcgagctccgaggccgcacagtcactctggtgactgcctgcgggcagcgccgggtgcctgtcctgctgcctttccacagggaccctgcactcgaccctgggggctccttcctctttgggaagatgaacccgcatgcagtccagtttgaaggtgctctctgccagttcagtatctaccctgtgacgcaggtcgctcacaattactgtacccacctgaggaagcagtgtggacaggctgacacgtaccagtccccactgggacctctcttctcccaagactctggcagaccttttaccttccagtccgacctcgccctgctaggcctggagaacttgaccactgccacaccagccctggggtcactgccagcaggcaggggacccagggggactgtggcacccgccacgcccaccaagccccaaaggactagccccacaaaccctcaccagcatatggcggtgggaggcccagcccaaaccccgctgctacctgccaagctgtcagccagtaacgcacttgatcccatgctcccagcctctgttggcggctctaccagaacgcctcgccctgcggccgc

SEQ ID NO: 144633 - DNA, 921 bp, Homo Sapiens
cgcgcgctccgtcgctcgctccggccgccgccgcagcgccgggtaagtcttaggttcagggaacaaagcctggcttggtagggagcttttcgctctttcgctccgtgctgcttgcctgctttctttttcgtttcacggctctgggtcgtcgctcccgagccctccctctgcccgcactcccgtctcgggccccgggtccccgagtctccagccccctccgccaagtcttcgtctctgggtggattcttcagccccagggaaactttggagtggagaccgggggaaggggcgctaggaggaatgggagcgacgcgggccgttcgcccccgccccaccccgtgtctgggggtctttttggatggccgccctcgggccctttcctccgaggccactctggagggtagacgctctcacacgcagacatttattcattcaacatttatttattaaacgctcgttgccagtcgctgggatcgagtagagagcaaaacatattcctgccctcggggagcttcctgtcgggttcacagacacacacgcacgcacagggactcagagccccagagacacacaccgaggcacccacagacacgagctaactcccagcttcagtcacaccactgaccctcccagagacacgaacctccgctccagccccgcgggtgcgcttagagacccacgagagttagagacccgcaaccacgaggtgctcacgaacaccagttacacttgacctctaggcacgcacacagacacacaaggtaactcacacgcagcactccagaggactaaagtccctgcaattgggtctgggggagaagtgaggggcgtcggcccaaagtcttcttcccaacctgtgtgggcaagggggggtgagatctgacccccaaaaacttcctaaagggggacgactcgtgggga

SEQ ID NO: 144634 - DNA, 445 bp, Homo Sapiens
ctcgggcagcaccaccttccagtccgggccgtgacccagaacggaaagcatgcggttcccacgaacagtttagccggcaacgcttacgccctcaccagccctttgcagctccttgcgacccaagcgagttcatccgcgccggtggtggtcacccgggtgtgcgaggtggggcccaaggagccagcagcagccgtcgcggccacggccaccaccaccccagccactgccaccaccgcctctgcctccgcctcttccactggagagcccgaggtcaaaaggtcccgggtggaggagcccagtggggctgtgaccacaccggctggagtgatcgcagctgccggcccccaggggccaggcaccggggagtgaggtcacctgcaacgcgggggagtgggactcacccagcggcgaccccgaagctggagccggcagctcaggcggccgc

SEQ ID NO: 144635 - DNA, 665 bp, Homo Sapiens
acagtcaactttttcttttaaataatttcagattgacaaatattacatacaaataattcctatacattcttcacccagatttcccaaatgttaacattttatcacattctttatcaagcaaacattgggtactaacttatttatgaacatgtcaaaatctgcacaatgaatagtatattcatttataatgataaaaacacttcacatatttttgctggcagtaggaataagaacacaagttaaaatccaaatgtaatcttaattttattccctttattatctctttagtaaaaagttaggtcagttgtttccgtttatttatgtccctaccaaagtagaaacaaagtccaatcttgggaggatgtagcttgaataactggtttagaaatgtacttattaggggtacttattagggattagtggataagtgcttaaatggttgtggataacagtgcatataggactctcaagtatttctataacagacacttgtgcgttctactctatatttgacatttagacaaaaaaatcaaatgagttccttagactatcactttttcataataaaatttaaattatgaaggcccgtccaattctaaaatgatgtgaacttcaggcaggctgatggcacagcaggcagtgtggtagcatgtgtatgtgagtgt

SEQ ID NO: 144636 - DNA, 953 bp, Homo Sapiens
ttttcatgagcctcaacagtttaattctccagagcgatcttgcatgtgcttcataaattcaagtcagcaagttattttctcactactggtttctaaaaggttagaaactctcttgcaaagtgctaccctcccgagttgcagagctgtgaggcttcagccggccgctgctcccgtgcagtcctaaaaggccttccaaggcttctgccctctgaaggagacccccatctcctctgtgtggagatctctgggagccctgcatttagcttcacttgttaatgctacacggggtccccaagttaggtgtgtggcctccctgcccagctccgtgcaattccatgacatcacagtgccacggaggtcgggggagcacggcacctggaggatcctgaaacactcaccacatggcgtgcatgtacgtgggcggcagacgctggctgctgacgggagtgcagttatacgacctcataatcctttccgccaataaaaaatttcgaaacagactagccaccagcgagtcctgtctgaagagctttttgaagagatcccgggggagcacgttccacgcgatggtgtctgtgatggctgtgaagatccagttcagttcacccaggggcgtcctcctgtcgttcagcggccagggatcttttctatcaaatccagtgtgacgccaggcaccagactgacacatttctgcatgcaaaaccagcgcagggcgatcttgatgggggtggtgaggcaggaggtgaataggtcagccgggaggtcggggatcatgggcagcagctcggtggcctcgcaggctgccagctggatgcagtttttcatcgacggaggcaaaggcatctgagcaagagggtgatttgggttgattgcagctacctccagctcctgctcccgctgtagcccggccgtaatggccgaattcccgggcatatgtccggtaccgtcgactg

SEQ ID NO: 144637 - DNA, 1312 bp, Homo Sapiens
aacttaatttttaattttaattacaaaaaagatgagtctgagaatgcatgtacagaagttttaaatgaatcaacttgtcatcaacagctttagggatcagtggagtggtcttaacagtccttgagttcaggctggagctggcagggaagatggggagccgcagacagcgtcctgtgctctaggaacacgggtacctgcactcaagccttaggaggcacgggggtccactggagcctaagacagatgtcctgggctgcctgtcgctcgcagctagctattgtttcctcctgctttcctccggtcctcacctgagctctgatcgccaggggaaggagctggtgtgaagtactcctcagggagggagaagctgtctgtctccgtctctgcagagctccccccagttgggcccgtggagtgagggctccaggcctgctgcacggggatgttctgggtgctccggggccctccgcggggaaaggctgaatgtcgtcctttgctggtgctctcgctggggtagaggtcctgacccaggaggatgagggcaagcaggtcggccgggcgcagggagctggcactgtgggctagagtagaatgccagcagcttggagtgcacgagcaggaaggcatgcaggggcttctcgccttcccgctcggggctggtgttgacggcctggatgacgtgccgctccagcgcctctatgcacagctcacagagctgggggtgaatcagtcgctccagggcctccacggcgaagcactgctcctgctcccgcaggcggctgtaggtccacagcaggctctggaagtgctcccacagctggacacgctgcgccaggtctgggggccgcagccaggtgaaggacatacaggaagttgccattttccgtggagaagcaggtgtaggtgtccgagagcttctccagcatcgtcatggaggagatgatgaccggggctaggagggtgctgagctggtcctccagggcagggagctcttcttcctcattctctgactgcccgaacttcagccggagactctcttcaaactcctgatctgtccagtagaagaggacctctgcgccctcagtggccatcaagacgcacttcatcttggcaagcacagtggagcatccagacggccagaggttcagaaagggctgcagcagaccgactcggtgactggctcatgggagagcagcacagcatccctggtcctgcaaatactcacttccgggagggttgaaggggggctccggagggaggatcgccgcccccagaggggacagcccggaggcccacgtaccggatcccggga

SEQ ID NO: 144638 - DNA, 1368 bp, Homo Sapiens
ccacaggggcaggcagtacatggtgtggggcaatagggggcagtagctttccttcacgttggcatccaggaagatccttctggggccggaaggcacagggcagtggggaaccagtgtttggagggtgtcctctgctatctgaagggcatccatggggggggtgcccccctccagccagatggtgctacctgagctctgatcgccaggggaaggagctggtgtgaagtactcctcagggagggagaagctgtctgtctccgtctctgcagagctccccccagttggggcccgtggagtgagggctccaggcctgctgcacggggatgttctggctgctccgggccctccgcgggggaaggctgaatgtcgtcctctgctgtgctctcgctggggtagaggtcctgaaccaggaggatgagggcaagcaggtcggccgggcgcagggagctggcactgtggctagagtagaatgccagcagcttggagtgcacgagcaggaaggcatgcagggcctcctcgcctccccgctcggggctggtgttgacagcctggatgacgtgccgctccagcgcctctatgcacagctcacagagctgggggtgaatcagtcgctccagggcctccacggcgaagcactgctcctgctcccgcaggcggctgtaggtccacagcaggctctggaagtgctcccacagctggacacgctgcgccaggtctggggctcgcagctcctttcggataagatgaccgtccacagtcaccagcccaaagtgcacttcaaacaggtacttgagcacatacagcttccgccgcaggtccccctcgctctcggtgtggtcaccattgatggcaatgaacaggcattctccaaacaggtgaaggacatacaggaagttgccattttccgtggagaagcaggtgtaggtgtccgagagcttctccagcatcgtcatggaggagatgatgaccggggctaggagggtgctgagctggtcctccagggcagggagctcttcttcctcattctctgactgcccgaacttcagccggagactctcttcaaactcctgatctgtccagtagaagaggacctctgcgccctcagtggccaccaagacgcacttcatcttggcaagcacagtggagcatccagacggccagaggttcagaaagggctgcagcagaccgactcggtgactggctcatgggagagcagcacagcattcctggtcctgcaaatgctcacttccgggagggttgaaggggggctccggagggaggatcgccgcccccagaggggacagcccggaggcccacgtaccaggatcgcggcgcgcacagcgccccgcctgcaggagcccgggcgcg

SEQ ID NO: 144639 - DNA, 728 bp, Homo Sapiens
tttaatatttatagtttgttttttattgtttacccacatactttggagaaacaaagtataaactacagatgctgaatatattttagaatgtatagaaattagatgattattactaaatttaacttaatttttaattttaattacaaaaaagatgagtctgagaatgcatgtacagaagttttaaatgaatcaacttgtcatcaacagctttagggatcagtggagtggtcttaacagtccttgagttcaggctggagctggcagggaagatggggagccgcagacagcgtcctgtgctctaggaacacgggtacctgcactcaagccttaggaggcacgggggtccactggagcctaagacagatgtgctgggctgcctgtcgctcgcagctagctattgtttcctcctgctttcctccggtcctcacctgagctctgatcgccaggggaaggagctggtgtgaagtactcctcagggagggagaagctgtctgtctcctggaatggagaaggtggctcatgttgagatgctcttccagctggctcaaccctgtctctgctctcccaggatggatgtgaaaggacctggtcgcctgcagaggccgatgccctcctgcccgtgactccacgaagtgcacaggacacaccgtctctgcagagctccgcccagatagggcaggtgagtgagggctccagcctggtgcatgagatgttctgctgatgtgggg

SEQ ID NO: 144640 - DNA, 1629 bp, Homo Sapiens
ggaagaagaaggcaatccaggcaggcacctgtttccagggagattcagaaaagggttaaattgaatactcaagatttacaagcgtcaaaaggctatgttgaggataattcttatgactatgtaaagacaaggtagtgaaattgtgagggccctgggcccggccactcacagaatgactgaagcatgctgcagtggagaactggaaatgtatctcttgttgccctccatctccacccaccctcaagactgggacttagaattcccacgtccagcactgttgtagatgggaggtacgttgtgctgaactgctgcgctggccacatcaagacaccacatgtgttcccaagtggtattgcagctgtcctgaggcccatctcttctccctctcatattgggatctcattgggagaaagtctaggcagattcctgctctgctgggccttctcttacgccagtgtggacttcacgggatagggcagacagagtattcgttgcatttatttgttctatcactacagaagaagcatttcaaaatgtgtacaaaaggatactctattcctccagtggtacatcccttgttcacagctaaacagcaataatttaacatcatcatagaggcagactggaaatatgactgcatttctcatttacaatcctgtgcatgtactcgccagaagggcagctgaagacctaaagctgtactggatacaacagattcgacctgaacaatcaccacacacaacattataaaaaactgtattagaaagtattggaaacaatattgcatattaatatgtggttacacatgttcacagtgagtgccatcgcaccaaaagcattatgtgcttcttttttctgatgcctgtacatcttaaataagtctaataattttggttcatcttaaagtaaaaatacattgaaatgaatgagagagatctagattttaaaaaagttgaccattcattattgctggaactgaagaaaggaaggaatacactggcatcacgatttgtctacataagtccagttcatctcgcgtttgttttggcaagaagaggacactacaaaactcacagtgcagtctaaaacgagaccgatacaagaataaaagcgacatacaatggtcggtggggaaccatataactatactacatctcaggcagctctttctcaaggaagattctaagattttattatgtggctaattctaaattggaaatggaacatgctggtatgtgaagcaattggtgctaggactttaccctttgctgatatgcaatgataatgtgatgagttttagtgactcttgaattaggataatcacactctttaggtacaaattacagaagggatatggggcaaggagctgagatccaggctttccacatcctgggaagctggggtgtcagggagggggcggaacaagacacagcgattactagctgtaatcaacaggccaacctgttaccctccggtctccaatatttacttcaaacacaacgagagtgcatggaatctaggcacacagtagtacacagcggtacccaagacacacactcacgccatcatacaacagaagaaactacgcaaaaaaagtgtgaagtcatgcaaactcctactttaccagcc

SEQ ID NO: 144641 - DNA, 1172 bp, Homo Sapiens
ttttaattcaagaggcaatctttgcaccaatgttaggcttgtttatacagtccctgtctctaaagcaaatagcaaactgtgcatcctctcctactgactttggccagcagggaaacaagcttggtctcttctctgccagggtaccacagggacacacgccaaggtaacctgcgtgtgatgccagtacttctgaaactaagaaaagaagaatactttgggttggagaatttaaaggaatggtggacaaaggttcagggctgaagtttcaagcagcagaatttcccgacttaaatttgaggtgaccaagagtattcccgccagcagagtgcttctttcttctcttttctgtttcctacaggtacagtccctggaacccaccttgccagccttttccttctccatcaaggcagaggcatttggtgggtggggagggtcctgaggtgctctggccacaggtgccatctgtgtctcctacttgtgaccaaagtgaaccacggaggtgtggtccaggggaatctctatcttctgcccatgggcctcctcacttcagcagggagatgtcatcagcaaagtcatcatgctgctggcgcaggcagcggaggcagcgccactgacacaccatgaggcagagtggcagcatgaagagggcgcagatggcagccatgacataggctatggtcatgagggttgactcatctgtctgtggaatgttgtagccacagtcttccatgtccaaggtgacaaaagggccttccaccgctgccgtcctgaactcatcgtgcacatggcaagcgctgacagcaaagccaattcgttttcgggcccgatcaaagacaacgtagaagccctccatgataacagctcccataacagtgcccgtggatgactgtgagatggcaaacttgtaacagtcgtcttgggacgtggccacatcttccactggccgcaggtattgctgcggaaggatggtgatgcggaaggactggttggtaacctcacccattaggtagagtgagatgactgggaaaatgttccaaggggtggtgcctgcttgccagcacaccagctgctctcctagccagaaaccatcagggaacttctccgtggaggaggctgccttgatggatttgactgcagcttcaaaccctcgtgccgaattcgccacccaggcc

SEQ ID NO: 144642 - DNA, 472 bp, Homo Sapiens
aatcatatcctagtcctcaatagataattatgagaaaataacatgtaaatgcattttcattttgatattttcagtttacagatatagagcaatagtgttttagatctggattgggaagttaggaatctattttagtagtttctcatcacttagactgaaagaactatggagttggtattctgtttgaattacaaaagatgtttttatctcagcagcctgaaaacataactaattttatattaaatcagtttattatttatatttggtaaaattagtacaaaattttcagttaaatcaatttatcgtttgtattcggaaaattagtacaaaataatcattcagtaacttgttcttgtcttccagcgaggatgaactggaagaggcaaatggaaacaatcccattgacattgaggttgatcaaaacaaggaaagcaaaaaggaggttccccctactgagacagttcctcaggtc

SEQ ID NO: 144643 - DNA, 376 bp, Homo Sapiens
  misc_feature (360)..(360): n is a, c, g, or t
gatgttatggtgatgaagcttttaagaactgaagttataaggaaactcagtgatattagacagacaggggaagtacacacggggtgcatgtgcatcaagattgagactgggcataagcactatgtgagcccaggtgctgggtttttctgctgccacccacaacattcgtatctggaaaaagtcagcttaagatgaacatcacaagagggaaccatgtatgaagcattgtattagttgcttcagagcaaatatgagtaggatatcatctctatcattggcaaacttggctcatcctttggtgttttcactcagtttttgtatttaggtatccctctgattcatcagtcacttagataattncttggggagatgtcct

SEQ ID NO: 144644 - DNA, 502 bp, Homo Sapiens
ttttatggtccaagtagaaagactaaagccttctcttttattaaagtgtaaactgggaatgcaaagtgattggctccttctgtcaatcagaaaagcagggctggtatggtttttacacacagctctaattgcttcttcttcctcttcaattagctaataacttttaaatgcttcggctgggtttctctcgcactccccaggctgtaagaggctttggactgctggatcccttagcttgtcctcatatccttggagtagtccactgcggcagatctgggctactagacctctaataaaccctccaacacacaaagtatcagagtcctgggctttgcacaaatgaaaggccaaagcttggcgatgtaaacctctctgcaaacttgcaggtgaacttggccataagagttcagtacatagggccgtcttgccactgccaggccctcctaccaacaacacaccccaggcagctccctttccagagacaccactagcattattccca

SEQ ID NO: 144645 - DNA, 451 bp, Homo Sapiens
gcggccgcggcgtcgctgctgtcggcggacacggcttctgaggtgcccacacccaggccgctctcagagggctcctcgggccggccaggcccaggggccgcgtcgctgctgctctccacctcgttctcctccatctgatcggcgggctgcctgacagcggggcgtagggtctgggaacttcactctgagaagagaggtgaccgtggctggaacaagtgggccatctccccagccccggcaaccacggccacccatttgcacccctgcgcccattttgcagatgcgaagattgagtctccgacggggcggagcttcctggtgtattgcgaggggagctcgggaaaaacttgacggagaagctgtgcttcccaggctaaggcccttcccgggaggtggtcaatggctggtaatcttgaccctttccctcgcccccacgattctcgtggagcgt

SEQ ID NO: 144646 - DNA, 489 bp, Homo Sapiens
tttgtatattaactgcattgatttattagtatattgctactgcattattatacttttacagtaaatcctgtattagttcaccacaaataatagcaaaatgaagatatacatgtcagtcatgtgcatctgatatgtgtggcagtctatagtccagaacaacacaggagtaagtaaatcctaatatactatatattatcattctcactgtattacaacttcacctcagagagagtttaaagtcttatttcagacttagtgagttctaagttttgtacaagactgaggtacctcaactgtgtccgaggtaaaattttcttttaactttcctgagtatttgtgtggaagatgtgacatagctgataagttcttcaataacagtgtgtttttccctttcatattacatggctgtcgttaggaagatggcttctcagcttaggacggcattctttttgacccgttgtctttgatggtagtggatttctctccaca

SEQ ID NO: 144647 - DNA, 999 bp, Homo Sapiens
  misc_feature (227)..(280): n is a, c, g, or t
  misc_feature (326)..(363): n is a, c, g, or t
gtttagtgttcgtaacatgccgattacagtgccaacctggcagatcaatacacgaagaccctggaggaaggtgggcggtaacttgtccgaatctggcaaagaaaaggtaagaatggtgatcatcaaagccgctgacatttgaagggtcattgtgtgctggccattgctctgaggttcccttaattcgtcacaaccaccacctaaatgtttaacatcaaattctgacnnnnnnnnnnnnnnnnnnnnnnnnnnnnnnnnnnnnnnnnnnnnnnnnnnnnnnggggccctgaaatagtaagggagcacagcaggggtaccagacattnnnnnnnnnnnnnnnnnnnnnnnnnnnnnnnnnnnnnnaaggtcaccggctcaccctttccgggacgagtggtatagggtaggtggcctcaaagacagagcttggctcagaacccacagccccttcacatcagctttctcccctcccgtgggcagctatgaagtcacaggggaactgggaggggccgttaccatggagactcgaagcccattcagagaatagggtggaatctgcgagtcgccctcatctcccagggcaccactttggagccagcattttcggcctcggaaatgagacccagagcgcctcgcgcgagcagccccaacctccccgcagacgacatgcgacaccgcccgggtgacccaggctcgggaatctttaggcttcacggacgcagaaccagggaagacacgcctcaatgcgcgtgtgcaactctatcccgtcctttaaagaaggccatgtggcctcttcaccaatcggaatcctgctttttccctggtcccgccttattcccagacttccggcgtctcgctggccgcaaaacaaccctaaactacagggctcggcgactcccagagacttctgggtattgtagtcctaaaggttcagagcgacaagagcacgttttagtaaaaagcagcttagaataaaaatgcctgcactagtaaaaaaaa

SEQ ID NO: 144648 - DNA, 470 bp, Homo Sapiens
  misc_feature (351)..(352): n is a, c, g, or t
agttggaaaaagaaaagatttttggatatatattttatttgacagtgttttagaatatcatacagtaaacaagatttctgtaaaagttaatttatccatagtggtacgtttcataaaaatagttgctcacttacagtctttctgtgactattaatacatggaattatatttatagagatacagctgtacagggtaaattcacagctaacactacacaaatattatttggaatgggatttagatgatgtgctgtcttcacaggttatggattacagccgcataaagcaattactgcacaagtagtagctgtgaactgtgcaaactagagtttatgccagtgtaatctcaatnnttttttccttttgtaatacatggaaaataaagtcagaggatacagtaccaggacgtgcagctacactacagaagcattgtccaaaaccagattcaataaattaatggcaaactatact

SEQ ID NO: 144649 - DNA, 713 bp, Homo Sapiens
ttttttgataataagtaaaactatcttgttaaaggttcacattgattttaggatgcatttagattttctggatattaagacagaaaaaaaggcgttttgggttggaggacaggggacaggtttgtaagcagatcctttccaatccgggcttgtgaccattctgaaggcacagaaaccagcgtgggacctaaagatgagtcactgaggaagctctttattccagcagaatccccaccctggacgctaaggagacgagcattccactgactgtcaactgggagccgtgggtttgtgtggatgactctgtgtgagctgaaacagcctctgcagggtaaggagcccacagactgtattacagcccctgctcaccaagccccgacggccttccgcaactctgccctttggactacggaggaacaaaataatcgttcagttttctgggccacaaaatacaagatgggtctgggttgtacaaggagcttacacacggaggcaagaaagcgtgcaaacaggggcgggaatttttcaccccctgggtgagccagtgctcaagacatggaaggaggacctgagtcaccctcccggagtccacacgggtttgtgtttctggcttttatgaaccatgtccaactccagcttccgtcttctcctgagaggaagaagaatattctatgacgtcaatgatttttttccctatcacaatatcataaaga

SEQ ID NO: 144650 - DNA, 280 bp, Homo Sapiens
tgcggccgcggcggtggactcaggcggctggtgcattgtgttgggtaccgggggcgcggaggagacgagtgcaatttccttctgcaccgtaatctttgtattggagacgccggagaggaaaacgggacctgacgctccgcctggcgcgattcctccttctcctcctcctcagccaaaggcgccggtcgctcctgccttcgagagcgagcttcggaaaggaggatgaacgagggtgaacagggcggccggggacccgaaggggggatcccttcagtccttc

SEQ ID NO: 144651 - DNA, 972 bp, Homo Sapiens
  misc_feature (421)..(421): n is a, c, g, or t
  misc_feature (738)..(774): n is a, c, g, or t
gtcgaggtggccccattttcggcagggaagtccccctggggctagtcgaagcggtgggcatagggcggccgctcgaaggggtgccgtgtcgggaagtcgtcctgcatgaagcggggcgggaagcggttgaagttgtgggggtgcggaggctggttgaactgcgggtgctgctggtggggcgggaagggcccccggaagtgtgggggccgctgcatgcggaagggtggctcgcgctggcccccgccccagggcggctgctcgtgctggctgttccaggggccctcgaactggctgttccaggcggcgtcgggctggttgttccagggcgcgtcgcgctggccgttccagccggggtcaccgcgctgctcgccccacatgccctcatggctgttgttccagggggggcagtggggtgggccgnccctggtggtgcgggtagggtggctgctcttgcggctgctgcttgccccaaggagccacggggtgaggctggtcaaaccaagggggcttgtttggtgggatctggtcgtgtggcccggggccccgggggccggcagctgcaggatcctggacccctcctggagcttcgtactctgaagagccaggcatctggatgggaggcttgctgtcatcaggctgggtggtgggcgggatggcaggggcaggtgctggggccgggggtggagcaggcggtggaggcgtggccttgacttcagcctccatctgcggcatctggannnnnnnnnnnnnnnnnnnnnnnnnnnnnnnnnnnnnggccaggctggtgacaaactcctcgtgctgcgtcttgagggtctggatctgctgctggaaggccagctgcaccggctggaccactgaggagtactcgttgatgagggtggcctggtactgaccaagccccagggctgggctctgtagctgctcctcgtgccgaattcgcgcgcctcgacttcatactctctacacaaa

SEQ ID NO: 144652 - DNA, 988 bp, Homo Sapiens
aagacccaagagtatcagactgcctatttcatcatctgttacgcatgcggcagagagtggagacccaggctagctggaggaacggccctgtgagaagagattgtatagtcctagaataagaccaactggaagaccacggcgtagcagaagccattccggcaatgagagattcaaacaccaaagtggatctttttcaagatctaaatccaaatcaagatcacggtccaagtcccagcccaagaaagaaatgaaggctaaatcacgttgtaggtctgcatctcataccaaaactagaggcatctctaaaaacagattccaaagcacattataagtctggctcaagatatgaaaaggaatcaaggaaaaaagaaccacctagatccaaatctcagtcaagatcacagtctaggtctaggtcaaaatctagatcaaggtcttggactagtcctaagtccagtggccactgatagtataaaccatggtcatttttaggcatgtatcattcatttactcatagtttggtttacttaaattatcaggaatacaatgttgcaatgatgcttaaaaaacacttgttagttttccctgtaccaggcaatggttataattaaaatgatatgctgttgagaagccactcttaagagtccagtttgtttaatgttatgggcagctaccaatttgtggtgtctctgtatatttttgtaaagattctcattttttatgcttgaagtatttggtgaaaagatgttggttgaccataattttgcacattgtctcattaaaaataaactttcatattcatatttggtagaactgttaacctagaaatgtagccttgctaataagataggatggttccaaagtggagtagttagccccagtacaacactgactgctcagaccaatttaagttcaggttgggacctttatgtccttgtcaagatgtctaaggcccgcttgggccgtgtgggctcccacccggaatccc

SEQ ID NO: 144653 - DNA, 547 bp, Homo Sapiens
ttttttttggttttcaatgttttatttcacaaattgttcagatttgttcataaaagatatgttacaggaacattttagaaatcaaaccagttctactgaaacaattgcaacaacgtggcccctgttcatgcaaagcacaaaaaacatttacaataaaactttgtacacaggaagtagcaaaatacatcatttttcatagaaaaaagcacacacataaactgcgggctgagtgagcctacagacaatatgagaaaccagcacacgctttggaatacggtagggcaaaactcctaaggaagccgaaaatgttcatcctgtgggcaggagagccaggaacgccgttggcttggtacaagatctttttaaacacagggtaagtgttggtagcacgaggggcctctattccacacacaggagaggtggtgctagggacagggcttatcatttatagtcttgtttccattttctgaagacaaatattccagtttcaaaatgtttgtggggatgataaagacagccaggtccatggccgggcgcagtggctcat

SEQ ID NO: 144654 - DNA, 434 bp, Homo Sapiens
tttgtgtgtggaaatgtttaatgcccacagctaaagtagtgaggcagtggactgaaccctgctgaagatagtacctaatacggaggccagatgatgactggacccaaatccgacttcagtgttcttgggctcagtatactcctgagatgttcctgatccatgaagccgccttcaggaattctttctgcagcctttcaccactctcctggccttggctgactgagccaggggtgggccctggattcaagccaggcccgtcagtctttccctgaggtctttgaggtctttcaagcttcttcagtttcttgcgggccccactgtggttcccctgcgccaggtctgctcctcccaggagccggtatgtctctgccacctcgggactgaaatcgccaaatgcttccactttggcttccagggactctctcaggatcgag

SEQ ID NO: 144655 - DNA, 463 bp, Homo Sapiens
tttttttcccttggaaacagaaagttctattcaggcatatagtttacaaaactccacctcggacctgctttaatttctttacaggtcctactaaatgctcctgtcaaattccttagttatcgtttcaatctgcttcccaattaaaatgtcagcatcatgatgacaggaacgtcgtttgcaggcgtcactgctgcagccatatctccagcacgtttccagaaaatgtcattggttgaaagcaataactctcctatttcacaatgatttcatctctcttcacatcaaccctaggtgatgtttttattctcaccttatgaacgagaatactgcggctcaaaattcaagagtcttgcccagagttttttggcaagtacgaaagggttatggctccaaactggttagcttcgaagtccttgcaaaccctgtccgagaccatgcgcgaccccaaggagcgcctgagcag

SEQ ID NO: 144656 - DNA, 797 bp, Homo Sapiens
  misc_feature (615)..(662): n is a, c, g, or t
aagagattatataatatgaactttcacatttactgtgaaatgtctaactttgccagtgcttcagcaagtttttttggggggtgatggggaggggtagtattggttttagaggtttcaaatctgtgaactttggagaggggacagttgttggctctggtatttactagttttgtagtaacgttttgctagcctgactgacttttcttactggtttttatgcccacggtccgaggggactgttcttcttgttgggggtgtctgcggaatagcgtctcgtcttgtttgtataggcagtcaatgtgtgtgacatgtgtgtcctttcagtccggaagcccactgtgtgacaatggcgtggggtgtggctgggaggtggggtgctgaagcttgaagagcatttctttgctgattcataacagtatttcccatcttttgcctgcaggcagggaaagtgtacagtatttattttgtttctgttttactttaaatttgtaagtctttaagtagcttacattgattattataggggaggacaagtgacttgtttaaagttgtatttagtattctttccaatttctgtattttaaaatattgaaattaaaattgtattacttctgnnnnnnnnnnnnnnnnnnnnnnnnnnnnnnnnnnnnnnnnnnnnnnnnagtataaatgttgaaaattgtataaaatgcgtccttgaaagaaaaagaatctgaattctatatccaattctgactttgttccctttttctgctgattgaatcatgggaaattatttaaaagtatgaaaaactggg

SEQ ID NO: 144657 - DNA, 504 bp, Homo Sapiens
gccaccctccagctgtgtgaactttgagaagttgcttgactacactgagtctcgttgtcactatgagtggaggttgctacgttgctactgtgtggagcacctacccccaagcactcttataagctgcagcatatcatgagtgatgagatctgtgtacaggtgactgacctttacctggcagaaaataataatggggccaccggaggccagccgaacacacagaactcaagaagcctcctggagtcaacgtatccacagaaagccaagcagctaatgtcagatgagaaatgctttaaggtgagagttgctcatgtagtcaaagaccttgctggtgacaatgtaagttgttaggattctctgaatcggaagttatagccagggtactttgaccccgtgattctactcctggaactttttagagttcctaatgagttcaccagagaaatacaaagtggaagtaaccatcttcctggacaatctattttgtttctttcttgccttaaa

SEQ ID NO: 144658 - DNA, 383 bp, Homo Sapiens
aaatccatcttttacttctctgccttattctgccaactacttattgttatcagagaccccatcctttagtatcccctttttaactctcaaattctgagagtgttcgttttgtctgtgttctgtagcacccatttgttccctgttttaatatttattacactgctttgtaattacttgttagtgaatagactataattttggttagtactatttctgccttgtttattgttatctgaaagagcctggcatgtatgtattgtttgtatgctttcaacttactgttgaatgtgtgtatttaatagaattctataggaattcggcctagatctcatgtataatactttcaggtaataaaggatatattcttgagttggaaaatgaaa

SEQ ID NO: 144659 - DNA, 336 bp, Homo Sapiens
ttttgtaggggctaattgtttctccaaattaacagtctcatacttatttggtgacaacgtttctggaaaaacaggaatccgtgggaaataacatctgagcctcccctgacttttcagtggccctgcacgagtttccttttaaaacgctgctgaattggatcgggatcgttgcagagcctctcagaggatccggcgaacgcagctcctgtgagtgtcagcgctgagctcagcgagcaggcagcttggaggcccagggcagtgctagcgagtcgcccacagcctaggctcaggaaaaggccagactttggttggactttgagccattttgctgcagca

SEQ ID NO: 144660 - DNA, 392 bp, Homo Sapiens
ttttttaatgaataatactttataattttttcacaatgaccaacagacctcattgctgagtgctctgcaggggtaagctagagataagcctggtcaaatgccaacagcttcacctttttgctgagattcatgttcttcatcttagccttcagcagcttcatcttattcatagttattgaattttcaattatctgttgcccagaagaagaaggctcagtttcttcatcctcatctgtatctgaattatacatagaaccaccactgccatatcattcccaaagaggcaaaatccatttccatgagaatgtctgatttcattttatcagccaaggctgataattgtgcaacccagacaacaggctgatgagattccatgaatcagaattttttta

SEQ ID NO: 144661 - DNA, 503 bp, Homo Sapiens
ttttatctcttcataaataatttattgtcattaggatcctaagtgccgaagacaaaaggcctaaaccggccctcaggacatgaacattttagaaagttccattcttaatgttttaaattgggggaaaaaatctattataaaggggcaaaggacacgataaaaccacagaggactcagcatggggacctcattccccacgactgaagtgtcataagaaaaggatagagttggaggaagaatggctcgggaggagtcactacaagagatgatcctctttccagcgctgcatttggaaggctcaagagtggctgctcttcctgaagaaatatcgaaacgggaagagagagcttagaaacccaaagaagccggtggctgctcgctccttaggtggaggtgagttgtgctgcaggggtgggacaattcgccctggcaggctgtgtccccactcagaatcttgtttctggacatcagtgatatcagaggccagagtctcctgcaatcct

SEQ ID NO: 144662 - DNA, 787 bp, Homo Sapiens
tttttttagaaacataactgtccaatttattttctgaatattttccatctgctgttgctgaatctacagatgcagagctcctggatatgagagccaagtgtgctttgagagtagggtgggtgaggttgctaatgagtacaggggagcaggtgttgatcaggaggaccctgcactggggcatctggacgtcctgcctcaggacttgagactccagttggatggcacaggcagactcggcacaggcagactcagcccaggtcaaagccgtccccttggatgttcattttatcccaagctctttctggaccctggaatttggcatcccctaggccctcccagggtcccaggcacaggagcccaggttcacaccagcaggaggctaggactggaaattctgcagactttccaagcgtgtttattcacattcctgtgggcccccaggaccctgctgagcttcccaatattagttggtggacttggctaagtcacgtgatctctctgggcctccatttcttcatctataaaatggactaatactttcaacctcagctttgtttctcaaaggctttaacttttccgggaagagctgcaatcgtttcttggcaggagtagtttcaggtttgcattgctctgaaagagactctcagaaacacgggacctccattttggtgtcagcaccgcacgcacccccacccaagccagcaccgtggctggaaagcttacgtataggataagggatgtgggtggagtgggaattgacgtggaggatgttggagatcagatcaac

SEQ ID NO: 144663 - DNA, 403 bp, Homo Sapiens
ttttttactcagcgaacacgtacactatttatttaccgagcacctgctctgtgcccagcacagtgaggggttgtacttcatttctcaacatattttctctgtgagccaaagagatattttctttccttttgttctaaaggcacaacggaaagatatggtgatctgaccaaattcttactgtcttttccatccttgttgtttactgatcctaggttcaaggcacatgctgcctaggttcaaggtctccagttctttccagatgaaaaagctgcttttcctttcttgatataattcattttgagttggcatcacttgggaaattcttgcttgcttcacttaactgagttcttagtccagtcctgcaccctgagctaaaaagatagctctcaagtcttactctctc

SEQ ID NO: 144664 - DNA, 363 bp, Homo Sapiens
ttttttttactggcagagaggacacactttaaaccctgggaagatatcattacccagagagggggaaggatgaggacactgcagagcccaacatcatcgccagacccgagtcatgcggctcctttgttccaggaaccaaggctgaccctagaagcaatagcagcattttcactccgcaggtgcatctcttccacgctttggggtgcctgccctgcctccgacttctggggctgggatttaaggccctaccagggcacagctcgccagctcacaggcggtcaactactgattcagttcttcgtctccttcactcctttacatcggactcacgagggctgaggggcagctccctttcgttaagtg

SEQ ID NO: 144665 - DNA, 600 bp, Homo Sapiens
  misc_feature (166)..(166): n is a, c, g, or t
atttggtggggaattccccagccccttatttcatgaccccagggtttcccttagggaaaccagcctaggaccccggttccccctttccctaggggggcccgccccgccaaaccgaaatggtttaagaaagctttttggagggccgagggcgccgaccaagtttttngtttttttccctcccccgctttcgggtgggggttttttcacttgaaatgccctgtaattcagaaacagtggctgtccacagcagacagctatctggatttaagaccccaaattcacacaccacaccacaaattgtccacttacaagcaaaaaaataacaaacagccaagcccccaacccactctcattttattcccttggttccaggtctcctctgagcaggtcatgtctcctggtgtgtttgcgtacaggctgtggggctggggggaaggagtcctttttcctcttaccctaggcagggctggctccaggttgcagagctccacagagaaaactgctcactgcagagaagggcatagtccagcccaagctctactctgatgagctctgagatcgggggtggtgacttcatcttctatctatggcttggaaccc

SEQ ID NO: 144666 - DNA, 533 bp, Homo Sapiens
ttttttcacagcagaaatgtttattagtaacgcctactgcatacaaaaattatagcagaaattgtattaaaaatgtcaaatacgttcatagtatctctgtattctccctcaaattcccatctactcctcagcttgttgaacctcaacagtaagaaggctcccagtcaaaaaagatgtcctcagacccaggcccagaagtgccttcttaggaaaagtgaataaatgatggcagcagcaatggcagcagtagctgtaacccccaaacaggaatgggaagacaggtggccccattttcagtctttcgaggttgagtgagcagctgatgtgggcacgcttccctcacaaacatgggtcctactgctaagattccagacatcagcctgcagccaatcatggctgtacagcctttgacctccacagacgactcaatgccacctccagtgatctcaagttttccttgatagcatcgagttgtaccattgggacagggaagagaaggagcactgaaacaggtccccaaagccacacaggtt

SEQ ID NO: 144667 - DNA, 886 bp, Homo Sapiens
  misc_feature (547)..(620): n is a, c, g, or t
tttccaaatgcattttcatctacttacagtgctgtcgtttgtgacacaaggaacaagagtatgtcagggactcagaagatctgtcagaactgggtactaacccacagctgtgggcagtggcccatccaccagtgggcacattcaaatatctgccctgaactatacatagtgaaaggtccagagaccttcatgccctttggatgcaagacacagagtacagattcaatcatgaactgactgtcatttagatggaagaggtcttctcaaaccggctggcctttccctcaggagaagctgaatttccttagatgtattttcttgacacttcagtttacaaagacgcttcagttcatactccctttcgagtttgatagattctgcagaagggagcagtccatctttaatggtggtacattttgtgagctgcacagaaccaccaaatgaaatttcttccaagaaaggcaacttgatattggctaggtttgtgtaccaggtctttgcaagcaatgcaatatcccaaggttcctgtcgggcacagtggtgtgtnnnnnnnnnnnnnnnnnnnnnnnnnnnnnnnnnnnnnnnnnnnnnnnnnnnnnnnnnnnnnnnnnnnnnnnnnnacattataacaactgccccgcaaaatggttttcactgtgttctttcttggcactccatacgccatggtgagttattacggtatgatttcgttacataggtgcctgatggaatgtcacagataactctgttcactttacccgggctccaggggctcggagggtcgcggccggggtactgaggtaagagcgcgctgcgctaagcgcacatggccgcgcacacgcctcgggccgcgccgcaggcacacgcctccttcccgctcgccgcg

SEQ ID NO: 144668 - DNA, 404 bp, Homo Sapiens
ttttatcttttaaaaatttattttgctatatagtaaattatgaggagactgcttattactaaaaattgagtgtccgcaggctcgagtctgaaagctgagtcagaattagcaggatcaggtctgtgtaaggaccgtgggtgaagagcagttgggccatggcacccctcctgcatcagcccctgcccaccactggcccagttccacaatgagatacccttttctctccctctcctgctgcctcccctgatgtcagcctaaccatggtcagggctgaggtttggcagataatgcttcagggcttttgcatctttacagcaaacccacaggccagggctattcaatggatctgtaagagggaaattctgtctcgtggctggacaatgtgctggagcaatctgtgctgg

SEQ ID NO: 144669 - DNA, 435 bp, Homo Sapiens
ttgaaggttatttcttttattcaccaaaataggagcagaacagaagttgccattatgagaaaccaaaagacaaaatacattaggagaagttctaatttaattccataatttgtatatcacttattaaaatttattataatttttaaacaataacaaacctgcatctaatacttattacattgggggaattaccgaaacaattcatattctgcaaaatcttgaaataagaaaaatatattgtttctaaaagttttccaaatttaatacatagtttttgtagggtttagataagtggaaaatattcaacaaatagctagtattgcaactggtttacggcttatgtcagtataaagccacaaatacacaaggaaagtgtatttttaacatccttgattttgtacttgcatgtttgtcttggtaaattaaatagttcat

SEQ ID NO: 144670 - DNA, 891 bp, Homo Sapiens
cccccttttctatgtgtctgtgtctttccgtcctctctttctttacttgtatttgagtgacttgtttttctgtgttatcgatttattgcagctccaatatgagtccactcctactcaaaccctgattctcaggggcctggggaaggccaccccactaggggccctgtccccaccagagcctggacatgggactctctcccaagcaggggtgttgtccttcacaggggcttccacgtctctcccgggcctgtccgcactctgggcagggctggcacctggctattccctcaatctgggccctggggccatggcaatgtggaatggtccaggtgttcatgtcagtggggcttggggacatggccatccacgtagaagttcctggtgatcttgggcagggtgaattccgctccttccagctccggtgtcagcacaatctggcagcccagccgcgagttctcctggaggaggggggccatgtctagcatgtcgtcttccctctcctcgggaggaggcaggagatccaggtggtcttcactcacatacacatggcaggtggagcaggccagggaggcttcacaggccccttccaggtccaccccgtggcgctgggccaggtgaagaacattgtccccgactctgccactcactgggatccgctggcctgagcggtctacgaacaccacgttcaccacgtccccgggccgctccgggccgcccgcgtcctcctctccagccgggcgcgagcctgtcgcttgaaactttctggttgtccccagcgccaccccctcccccgacccggaagtgcccccaggtctgttccacacaggtgccactggcagcctgcagtagaacctggcactcacgcctccccgggccatggagcggccatac

SEQ ID NO: 144671 - DNA, 1091 bp, Homo Sapiens
aaacttaggctaggtacgaggcctggtgttgaattcggcacgagggcacaacctggcattgtgtttgggcccacgctcttccagacagatgggcaggactacaaggctggccgtgtggtggaagacctcattaaccactatgtggtggtgtttagtgtggatgaggaagagctcaggaagcagcgggaggagatcactgccattgtgaagatgcgcgtggctggcactgccagtgggacccagcatgccggtgacttcatctgcacagtgtatctggaagagaagaaggcagagactgagcagcatatcaaggtcccagcatccatgactgctgaggagctcaccctggagatcctggatcgccggaacgtgggcatcagggagaaggactattggacctgctttgaggtcaacgagagggaggaggcagagcgccccctgcactttgcggagaaggtgctgcccatcctgcgacgggctgggcacggatcagccagcctggtggtgacagaaagcaccaggcctatggaggccattgctgctgtacctggtccaggccgtgtcgggtgatcaccaagcattggcatgatcgaagttccgtgaggaccgcagtctcctgggcctgggcctgccctcaggtggcttccacgatcgctacttcttcctcaacagcagtgtgcttgcggctctactaggaggtccggagtcaccggctgagaaggcgtgctattgaggagtctcacagtcttatctgggagtgtaggaagtaaactccgggccacccagtctgttggggtttccagtgtgcctgagcacgagagcctgagcagcgcagtggtactctgtgggcacccggatgggctccggattgtcgtactttctgtttgtgacttgacggcggttgcctcaaagctcagtgtgcgggatgctgtggtcggtgggtctgtggctcgcctctggttgggaggatgtcgtggtggctcatgagcctgttctggcctggcgagcgctctgtgtgtcggtcttgtgcttccgtgtgtgggggtgccctctttctccgcgtgtggtcggtctttgcccggtttgcttcc

SEQ ID NO: 144672 - DNA, 407 bp, Homo Sapiens
ttttttttagaaactttattgaggacaaaagtgggcggctcccagtcccatgggcagaccgacaataaataagggctaaaaggaagaagtacggcagggcaggagtggttgtctcatcatggagagccctggggggcagcagaaccaactggaatgaaacacagggcattctgccattcgagtaatgtagccacagggttggtgcatacccgggtggggcctgatggaggggctcggctggtgttaaaggcacactcatcgtccagacgagcctcgtggaagcagtggatggcggttaaacacgatttgaggcgctccctcatggctagggttcaaggggccagattgctgaggcctgcctggcctgctgggggtctcaaagactggagtgagcatataggggggct

SEQ ID NO: 144673 - DNA, 359 bp, Homo Sapiens
ttttcaggaaaaaaataaagtttattatacttgcaggtcctagagacaagaggtacagcaggccatgcagagccacacagaaaagacactaggatggtcagaaggcagaagatgggaatgaggggaaggtttaggccagagcttattattggagtttccataggaaaggcaagacagggcagggtgaatagtctagaattggctagtttgaataattttggcaggctctaagacacaggagaggtaggtccctggttgcctagtacctgaccctgggacgatcaaagcagaggaccattgcctcctgatatataaaggccagacaggggagatatggctctggattagttcctcgtgcc

SEQ ID NO: 144674 - DNA, 423 bp, Homo Sapiens
tgcagtcaacacacatttattgagcatcgactctgtgccgggccctgggtgggcacagggggctcagagacaaatcacacgcagaccctacccttgaggcgctgacagcctggcagggcaattggtcacgtcaacggacactcacgatacagtgtggtcagtgtggtgttagaggtagcacaggtgaccgagggagcacagaggaggggcccctgccggcggggggtggcaaggagggcttcttggaggaggtgacccctgaagagggctttagggagtgagcaagagttagggtgtctcgtctgagcaagtggcctgtgcaagggctcattggtagggacagtggtggtggctgggagttgggcaagggccagtccaggaagggccatggagtccgcagcgacagggagcgctgaggggtgt

SEQ ID NO: 144675 - DNA, 499 bp, Homo Sapiens
ttttttttgtgttaaaatatttattcttaaagttcttaaagttggacatgttcaaggcttaaaaattaacttcaaaaagtcaagccaattcacaaacacctaaattaggtgaaggagaatctctcccaactttaaaatacacattaaataccttcccctcatgctgcttcattattttttataattatctccagttgggtgtaggctatgtcttcttagaccgacagaaaatttggcttttctcagaatttatgcagaatagcagaggttaagtgttagagtttggaagaggtcagttgttgtataagcagcttctggatcatcttccagcactctggagagaccaaaatcagaaactttgcatactaagttgctattgaccagtatattccgagccgctaggtctcgatgaacataacccatatcagagagatacttcatgcctgatgcaatgcctcgtagcattccgaccaactggatgacatgtgaagtggccatc

SEQ ID NO: 144676 - DNA, 413 bp, Homo Sapiens
ttttctttttttgacctctaggggcagggactacaatatgtacaactcaggctggtgtccctgggctggaggggtcccaaggcaagaggggcttggagtttggaggcccagttgttgcatggagagtccaggcagaggagagatatcagatgtaggggacagaagctctggcccttccaagtgcacagtgaccccaggccctctgtggtacctgctctgtgagcctgccctgcaagttgtaagcctgtgtctgttagtctgtctgcatctgtgatttcaggatcaggaccagagacatcaacaggcttatgaagacaataaaggctttgtacttccaatcaagcatcgcttaccccttggaacagctcttttatttctgaaacactggagggaccccaccctcacccttaccc

SEQ ID NO: 144677 - DNA, 535 bp, Homo Sapiens
ttcctcaaaatgggcctttttgactatagttctcatttctgcacttatattctcatcgcttcttcaaaaggattgtaaatcctctttttttcccaaagggatgtttcacattctttaaagtgtgtgtaaatgtttctcttaaggacttgttttttaatttttattattattggctttctaaatatattgcaatatcttacagatattgtattaatcacagctaagtaactggcaagttacttgcaagccggtaggcaatagctaagtttttcaccttaatttagttagtcataatcatgttattgatgtgccccacagtgatcactgagccaacagtcgattgctgagataccatttctgtttctaagtgcagttatccttcgctctgatttatccactgtaagtctgtcccctgtgtctgatgggcaatgaaataatatagaataatcatatcatatttcacttactgagagtttactatatgccagacattgcactaagcccttcacatatattttcatttgttcctcattta

SEQ ID NO: 144678 - DNA, 808 bp, Homo Sapiens
  misc_feature (316)..(348): n is a, c, g, or t
tgaaattgtatgcttcttcatcatgccaacaatgagttgcatttcaggataataaaatggttactttgaagcatttgttctaaacacagcgtgttaggtctgataggcttaagaagcactggtttgaaggatgttttttctcgtctgtatcaggaattctaaatagtcttggtatccattctcaacctagaattatttcatcacaaatgtaaaacatcttaagaagtttgcaatctagttgggaaggtaaaacaaagacatgtaacattagacaacaatgaggtactcatgacatactaacctaggctttctctannnnnnnnnnnnnnnnnnnnnnnnnnnnnnnnnacaagtgtgggcagatttaaatcttgacgatatttcagaactaagcatcagaagcacatagaatttgcaaaagtaaatttgacacgtacttaatcataatgcataatttttattgtcctgaatgataattaggaatctgtagtaagacattttttaatgactgcaattatattattgttataaaatcaaactgtttttctctcttttaaaaagttagttttcctgatatttttgaatataaatgataaatattaagtttatctgactctataggcagtttaaatttgatcacactcataccaactaacgcatttaaaaatccaaaatcttggatttctactttacagacttataaggattaaattgttcaagtttatattgttgaagatgaattatgtctctcaaaccttttctcttatttttgagccacaactcaggacaagcaagatcccgtttccac

SEQ ID NO: 144679 - DNA, 263 bp, Homo Sapiens
atccccattttccgtgtaaaggtagaagccaaccagtcccggacttcagatgggactgagtcagtctgaatgtcactgagctcatcttcagtatccagaagtctttctatatgatttttaactttctttctgatctgacatttggatggttttgatttacccctaaaacactgaactagaaaattaaagcaaaatagtttgtttatctttttgcccatttgaaattagattccctagcccatttcagcaagtcactaaacttc

SEQ ID NO: 144680 - DNA, 462 bp, Homo Sapiens
catcagtcgacggtgccgtcacatatgcccgggaattcggccattacggtcggggagatttatcggcagccatcttcttgggggtgctgggagccgggaagaccccctgaatcgttcccattgagctgcccttcgccttcgctttctttacttttgccttttcgacgtagccaacaagcacctggtcccgaggctgagagaaggctcgggtctaagcgcgtgtcgcgcttccggtctgggtagatttgctggggaagagggaagggggagggcccgggcaaaccgttgctgtttcagcccgggctgggggccggggacggggagctcctggcaccccgtgcacttgtggcctgcggcggtccttgcagagctgttcgccgaccggggcccgcgggaacctgccaccggcgcctcccaccgcggcccacgcgggcggcgcgaggaaaagggggcgggggcagc

SEQ ID NO: 144681 - DNA, 444 bp, Homo Sapiens
ggcacgacggtgggaggactgtgatttagccttctagaaaacttcttctctcgctcttcctccttagtgatctcttccttctttatatctttttcttggtgtggaaaaaattctaccttcaggcttcctgatgatggctgctctggaggaggtaggtaactctttgtattcacagcatcaaaaagtttttccacaaatatctgtgtctctttctgaagaaatacatccagctgatcaatacataatgcctttaactctttttcacttttgtctttctttaccaaagccagaacatattttgctagggcggatggatctgcatcacagatgggctcgagagtcttgctgagccaggacttgagtgcctcgaagttttcaatgatcattttagaaaccatccacagcggccctaaggcccgtcacactcctccgcccgcccaggtc

SEQ ID NO: 144682 - DNA, 431 bp, Homo Sapiens
tttttgtgacaagaaacctttttatttcaagcttacgtttactatgatagtaaaccgataaagtatcatgaaatgtgaaagatgcagtaacccgttttctgacccttttctatgatgcctgttttttcacagtgaagccgggcctgtgtgggtctgtgttttcctgcggctctaggtccccatatggaatgtatgtgggacgaggcagtgccaagggcatgcagcctggcaggggccagcgtgcgacatgaggggctacccgaggcctactgggacctcctgggctccgactttccctctagggcagcactcagtggtccaggcttatccagctaggtgacggctgaaatgggcaggggacccaggtggggtgaggaggagatttccacaccagctgtgggagctggaaccttccagatgctgagactgtc

SEQ ID NO: 144683 - DNA, 779 bp, Homo Sapiens
tctgtacacgtggactccaggcactttgctgcactatggaagagctgagctgaagacttctgaccacaggcctgtcgttgccctgattgatatagatatatttgaagttgaagctgaagagaggcaaaacatttataaagaagtaattgcagttcagggtccaccagatggtacagtattggtctcaatcaaaagtttctttaccagaaaataatttttttgatgatgccttgattgatgagcttctgcagcaagtttgcaagttctggtgaagttatacttataggatttgtagaagataaaatgtgggttacatttttggagggaagctctgccttgaatgttctgagcctaaatggtaaagagttattgaatcggactataactattgctttaaaaagtccagactggatcaaaaatttggaagaagaaatgagtttagagaaaattagcattgcattgccatcatcaacaagctctaccctgcttggtgaagatgcagaggttgcagcagattttgatatggaaggtgatgttgatgactatagtgctgaagtggaggaacttcttcctcagcatctccagccatcttcaagttccggccttggtacttcccccagctcttcaccccgaactagtccctgccagtcacctacaatatcagagggtcctgtaccttcccttcccatcagaccaagccgagcaccgtcaagaactcctgggcctcccagtgcacagagttctcctattgacgcgcagccagcaacgccgctgccgca

SEQ ID NO: 144684 - DNA, 500 bp, Homo Sapiens
  misc_feature (58)..(58): n is a, c, g, or t
gcgcacgcagtgggtatgtgattgctccactcaactattttatcacaaagtgttgtanacatgggagatgaaagcttaactctctctacacccagctacagacccgcaatggccctaaaaatctggggtattcattgggtgggctgccatggaggaatttttggttttgtttttatttttatttgttgttctgtttacaaatcaggagagcccctgtttttatatgctaggaaggtccttgggataggccgaagaggtgtgcaaacgagcagtggaaggcccgggccctgtctctcaggaccacggcggcctgccccacacacagttctgcttctccctatctagaacgaggttttcctggcagattcctgccagactctgagtggagcccccccatgaccctataaaaggggctgtttgtcctcctcccaccctcctgtgctcttcctccctccccttgagggcacatggccgctggtaccacatgttggagcggccgc

SEQ ID NO: 144685 - DNA, 879 bp, Homo Sapiens
  misc_feature (739)..(774): n is a, c, g, or t
ttttttttcagcttgtacacagatgctttattttggatgttaatatgtcaacattgtatgcaagattctcttacaatgaagttttccatatatcacaaaactcaatttagtcagggtaattgctgtattaatgtgaaaaccttacaataaaatgcagtattatgtatgtgtagtcagtttccatgcaagtatggctgctacatgttatgtctggcatttgtataacatactgaaagaaactcagaggaacaaaacagtataaaggtgacttaagatgcctgacatgtttaagataaaaaatcttgcaaaaagcaacaaagcagttaactgaaggattcaaccagtaccaacccaaatatgtattatgtccaataagcccagacttatccacaatatattaccatttaggataatttaatgctcaagaaaaaatatgctttaaaaaatatagccttacaagatattatactttggtgattgcagactatgtatatccaggtaagggctacattaaaaacacaacaacaaaaaaccattatgtgctattagttcaaggtaactgaaatgatccagtatgagtttgctacaatcattggtttcactaagtgaaatttctgtgagaagttcattaattagaaagcaatcaacatacttaaacatgctaagaggattcaaattggtttatctatttatcaataaggcataatcttagtaccatacattttcttcacttctcacnnnnnnnnnnnnnnnnnnnnnnnnnnnnnnnnnnnngcaaaaactagcaagtaacgatttaaatagccccacgcgtccgcggacgcgtggcgacgcgtgggtcgacgatatcccgggaatccgaccgtaccagcccctgcc

SEQ ID NO: 144686 - DNA, 484 bp, Homo Sapiens
tttataagtcaattataccatttattgatggaattatactggaaaacaatcactgaaaaaagagtagccttttgaatagaatagtctaccaagtgaaccatttacttgaaacacaacatgcaacagattgtgaaatatgtcagtatagaagcctgtgggtttatatatagacatctcagcagtgcttttcacaagttctactccatatcacatcaagcaactgtttggtgattttgggggactgttaatagtacctgtgtcttggaataattaaccatatcttagttgggcttcttagagtagatgtgttcacattgagatgtatgaaagaaaagagttatttttgttcaatgggtgagcagcacttatccttagcaataagggaaggcgacaaacagtttagcttctgaatagagaatggtctattcaacactatattttgtcggtaaagtttctttttggtcccaaagtttctcttcggtgc

SEQ ID NO: 144687 - DNA, 466 bp, Homo Sapiens
  misc_feature (48)..(48): n is a, c, g, or t
tgccctacgagtgcgccgaatgcgagatcagcttccggcacaagctanaagtcacgctgcaccagcgcatccatgcgtgcgcggaggctgcgtctcacccgaacgcgggcccacgttcaaccccaagcacgcgttcaagccgcgtcccaagtcacccagctctggtagcggcggcggtggccctaagccctacaagtgccccgagtgcgacagcagcttcagccacaagtccagcctgaccaaacaccagatcacgcacacgggtgagcggccctacacgtgccccgagtgcaagaagagcttccgcctgcacatcagcttggtgatccatcagcgcgtgcacgcgggcaagcatgaggtctccttcatctgcagcctgtgcggcaagagcttcagccgcccctcgcacctggtgcgccaccagcggactcacacaggcgagcggcccttcaagtgccccgagtgc

SEQ ID NO: 144688 - DNA, 806 bp, Homo Sapiens
tatgttttgaacaacttttactgctcgtaagtacaggagaaacagaagttaaaaaattaacaaatactgggaaagttacagagttacaataaatcataaaagcactagtaaatagttatccctggtcatcattcagttacatttggggcttaacctgctttcttttagcccctctccaaactcccttcttagatgttggttcctgggagcccctgtccagtcttatctgtgttgggtgatagactaggctactcagactctagcacgaggtagattcacgttggcaccactgctgtgtctgaatcccagattgttccctctggccctgggtggaactctacttctattctttagccaccctggatccataaccccctgagtaggaaggcactttcctatctggcctccaatatttctcctttgagctcgaggctatctggctttaacctttaattacctcctttatccctttgtgaggtttctctagttccatttccttgtaacttcgctttctctcctggtctgtttttctctccacttagatttggtctgaaatatgtccactagccagtaactaagctggctgtactcttaagtaaacgtaggtttatttacctttttctaaactagtatttggggcccaatcttaagggagtcctgtgggttctaccattgtctgggaaagatctggacttcattagttctgttccagttggcatcccctccagtttcaaaattccccctgctaatccaccgtccaagaatggcctggtgtattaagggagtgtactactgtgcagcttatt

SEQ ID NO: 144689 - DNA, 486 bp, Homo Sapiens
tggtatgagatgttcctagctaccagcatgtcagccccgggaaacggcaacatttcccacccttcttaccctgggtcctgagtaggaataaaagttagtgattcttaggggcatattgagagctggcaatgatacctctcacaaatccatcccccagagataaggggtcccccatgcctttgatgtatttgggagctgtgctgtatgtgttctctttggctccccagtggagaataataacaataacaacctcgtactaatacaacccagatgtcagcacagaccctctgttctctgtcttccctgagatatctgtatcttctcagggattactgtcggttcaggcctggctcctgctttcagcttgtgggaaaactcactccatcttcattccataacctcacatctcctatgccagttcccttctctgtgctccatgctgaaccaaatgccacactcatcccctttgctttgaaataaatgaaa

SEQ ID NO: 144690 - DNA, 481 bp, Homo Sapiens
cttgaagcacagagagattaaataacttgcaccaaggtcagatagctagtaagtctggagatgttaatttaatccaggcattctgatcccagaactcaggctcttaaacataacactataaaaagcccaaaatagaaagagatgtgtgtaaaaaaccttttgaacttagaaagcagggtcaatatacctgatcataaagaaagtttatcttgcagaaaacagaaataatgaacagaagcaatgccatttagaatgccttatataacaatgctaggttaaagttagcaatttttctgtatgaataatcaattgatccagcataatttatgaaaaagaccatcctactccattgcactgtgctggagcctttgtcactatttaagcgactgtgtaggtgtggataagtttctggactctttttctgttccattgttttatttaaccatcattaaaccaaatcatattgaataatctactgaaa

SEQ ID NO: 144691 - DNA, 527 bp, Homo Sapiens
tttttgatgaatacttaaaatataattgacaagtaatacaaagaagacaggctagtaagcataaattttcactttgtggacttctttgtcatcacattccctctgtttgttgtagtaatagaacgtattgtcccttctctgaagtttcttcacatatcctgtctccggccaacgatctacctttggcagggaaaggaggtgttctcaagactccattacagccctcttccctcctggggccaggagcagattatctgaaagccatctgatccggtgagaaaacagtacaaccaatgcctcttccgaacatctggagctgagctacttgatatgggacaatccttaggacagctaagttgctcctatgcttgttgacttctagacatttttccttttgatgtcccttggcatctctgaactttcttttcttcttgactttcaacttgatcatttccatttgatctgggaaactttcttgcccctgggtccggctctactgggttatcctcgttccgccgagcaggaga

SEQ ID NO: 144692 - DNA, 549 bp, Homo Sapiens
tttttgaccaagaaagtacaactttaatgcatctgcagccagttcttagaacaggacaaggtgattagcagataccaattctcatggcttttgtgtttcacaaaacattaaactgcagactgcatcttgaattatttcatcaaatgacaaacacatgatgtagaaggaaatgatgaatacttaaaatataattgacaagtaatacaaagaagacaggctagtaagcataaattttcactttgtggacttctttgtcatcacattccctctgtttgttgtagtaatagaacgtattgtcccttctctgaagtttcttcacatatcctgtctccggccaacgatctacccctgggtccggctctactgggttatcctcgttccgccgagcaggagaggccgggggcgcccgggagcttgcaggcgggcgtgggtgcttgcgttctctactcgggatccgcgagcagggccagcgagaggccaagtgttgtgcccttcgcgaccctcgcgtctcttagtaacgcgatgaagctgcaggagctcccggctcct

SEQ ID NO: 144693 - DNA, 346 bp, Homo Sapiens
ttttttagtttatgtttttctgactctattctttatcaagaactgcaagataataacccaatttttagaaatttcaagattacattggaaaaagaaaacatttttcagttattaacattaaaaaacactcaagtctgaagacagagccatttaagccaacaacaatagaaaatgttcaatgaattctgccccaatataccttcagattttgaagtgtttctagtttctctttgcctgtgcttaactgtggtgtttagaacacctggatgcaattagcaccaatataaatccacacatgctgaggagggaaaaactaaggcactaaacaactgtataattagtccac

SEQ ID NO: 144694 - DNA, 268 bp, Homo Sapiens
tttttcctgttaaagaatcagtctttatttggaggatgatgtaacttaaacagtgactttcatgggtggtgtgggtatatttaaccttttacaatctccctctacatctcagctgagctcaccaaaaggctcactcaatcagacaggtaaacacatttttgactattaaagtgctattccggggcaaagtttttctcagtttcgtttaacagcagcttcgttggaaacaaacaaaaaaagctatctatggaaataggcctggggaatg

SEQ ID NO: 144695 - DNA, 312 bp, Homo Sapiens
  misc_feature (153)..(238): n is a, c, g, or t
tttgatgttaatgacatctttattgtgggcttgttatggtaaatgaaatattacatagaagatgtctggtcaacagaaagtgctcaacacatcgaggcctttgttgttgttgacaaggtgatggtggctgaggtggactttgagtctgatagnnnnnnnnnnnnnnnnnnnnnnnnnnnnnnnnnnnnnnnnnnnnnnnnnnnnnnnnnnnnnnnnnnnnnnnnnnnnnnnnnnnnnnaagtcgggctggtcataaattattgagtaaaaacatgtatgtccgtgtatgtatatttcatgtaactgtagctg

SEQ ID NO: 144696 - DNA, 403 bp, Homo Sapiens
aataatttatggtcggagagttctggaaataaaatgaattataacaaggagctaattaaaaactttcgtaattgttgtcaagtcagctttacgggaggacgggcagccccccgattccctccccgaaatccggtggatctgcagggcggggcgcggatccggaggctgcaaacttcagcagcccagcgctgttccgactccgggagttattctggaggcctcctcgtggggcagctccctctccagctgcactccgcagctcgcaggtctccagggcataactttcagacttcggggcgggtgggtcggcgtgtgcagtttcaaaccatcggcagagctgattgggttgaatttgaagccaggaggggacccgccctcccctcactcactcaggcctcgtgcc

SEQ ID NO: 144697 - DNA, 515 bp, Homo Sapiens
tttttgatgatttttttgtcaatttaatgaacagagtaataaaaaagcagatatttaagaacatattcctgtaagcctgtgacaatgttcccatatgagccctcatgttattgattagatggagaagcttagggctacatcttgaaatatcttctgtgttggcaaagaagagtggcagtagggagaataattctgagccacatgagagcatgggcaaaagtggagatacctgtgccatgtggaaatacattacaaatggactatggcaaagggtctggccagagtcttgcctgacacacgtcgtacaaaagccttcagtagttcacctcaagaaatagggtgtccaggctgtaaatgagaggcactgggcagacagatccacacccacctcctgagtctcagaagtctggtgtgcatcgaacattaagcccctagcctactgagacttcacctcccagctggtcttctaccatctgattcttgagccccatcacgttagtgtcatctccatactg

SEQ ID NO: 144698 - DNA, 1100 bp, Homo Sapiens
aaggcctgccctggaggttgcagactcatggcacttcagccctgaaagaggtgagagagggctggatcttaactgtggtccaatgggcatattatgagtggtccttgtccctgcctgctatggggtaaccctgacccagctagcgtccctgacaacatgatacaaaaacacagaactctagcgggatacagagatgtgtgcacagctggcaggagcactggccacctcccaacctgttccccatagcttactcctggatgtagcctggagggactgctgggctggggagggactggccatggagcagggagctggatgccagcgggacctcagacctggactgcagcatctctttggttatcggttgtgtgtgtgctcagaagggaggaggccttccccttgttacatctctctctccatatattctcccggactcatcagtttggggggcgaaaagtccaccacatggtcttggcgacaaaccactggggatgtcaccccagctgcagagctggaagcttgtgccggaggggaaactgggtgagcaagggaggggcgaggcctgcctgtgctctcctcaccactgctgggaccagaaaagatgggcacctgatagctcagctgggcagtcccaacgcattcccactcagccaagggcctgagccccaggccattctggttgtgtcttttcagagcagtgagacccagcctcaggcctcctggggggcagcagccacactgcccgtggcgctctgcgccaagcactgtccagggatagtcccgctgatgttgtggatgggacctttggtgacattaaacttgtccatagtggacaggatgatggagggtgtggtgcaggaagataggcccaggaagagggtgaagtggatgcccgtgcactgaagcgcgcagcggaggcgcgtggatagagagagtcttgcagcagatgtccgtaggatcagcggcagaggtgactgtggacttggagtatagagctccctgctatgggaagacggctggggctcacctttgcactggaggctgtgacacgtgcaggcatgtcagatctgtcgagagtaggtagccgtgagactctcctg

SEQ ID NO: 144699 - DNA, 484 bp, Homo Sapiens
ttgaattatctatagcatgttcaaattcctttatttaatcctaaaatggaataaaggaatggcaggcactatatggaattaaatcctggagttgaaaatgaagatccataaagttggctatatatcctgatgtatttgtcctccagcaaatgaagtgttcatcatggatactccccaggggtccttctcaccctccttccactcgccacgatattcctccccactggagtaggtgaaggaaccttttgtcagggtcatggtgacagattacaggataaaaggatgaaactggggccggcctttcgggatgaccgtcacgcctggacgcagggttccagcgcctcggacttttcctctggtgggctcccggctgccaccttgctctccgccacctccaccagcgattgccccacttgacgccgccatcctgggcccccggccgtaatggccgaattcccgggcatatgtccggtaccgtcgactg

SEQ ID NO: 144700 - DNA, 386 bp, Homo Sapiens
tactaaatcaacatctctggagatggagtgtatatgtgttttgaaacagctgctcaagtggttctgttaaacactcctgcgttacaatcacttaaaatagagcaagcatccccttaggctcttaattgtagtttaaattccagtactgcctactcagacccaaaagttttgttttatgaaaaatttgtattgtgttcaatattgtttgaaatttggggttgttgcataaatgattatggaataacatttggttttaaaataatataaactgacatgttatgctacctgttacacaatttggttttcagttttaattatatgaagctggtaacaatcgtttttgttgtaaaagaattatttttcactaaacagtatgtttaaaactg

SEQ ID NO: 144701 - DNA, 238 bp, Homo Sapiens
agtgtgaaccaccacacccagcccaagtaatggatttttaagggcctcagttgcataggagttttttattcaggctgcaaaattcctgtgttttattatatattcctttttatctgtattttctattcacaattctcttgtttccatagaccgcctttttcacatatattcatatatttatacattttgttgtaaactctagtctataggtatttttaattcacattgtatattacat

SEQ ID NO: 144702 - DNA, 972 bp, Homo Sapiens
  misc_feature (55)..(70): n is a, c, g, or t
ccggaattcccgggatatcgtcgacccacgcgtccgggtctgtcgcgagcgcccnnnnnnnnnnnnnnnncactgcaaaaggcttttattttataggcaccactgcaaaatgaggaatcacatcaaaacatatcaaatagaaaataataatttattttaacttcattttactgtttgtaactaatcatgattttgtgaacttgcctgtataagtctgtaccttcaaatctacaaagcaaaagtttactacaatgagcacttaaaattccacaaaccgtctccatccacaactttcctgtacatgcaaattctttcaatgggctgcaatatttgcaaacatgctttaaacttccataaagatgcaagatattttgctttctgctaaaacctttacactctcttgggaaccttaaccaggaaaatgtttaaatgtatatcccaactctaaacgctgccggtttggttatatgtattaaatcgttaaccaccgggttgggtggttttgagttgaaaccttcacctaaatgataatatcttaacggtcacgcatatgaaacacattcagtaacgtaccattataaaatagggttccattaaaaatacatactggcagttgtatttcgtgttttaggcaggaaaacaaagcgtgtttaacttttttatatgaactatagtttaaacaagttattctgtgaaagtatgcttaataaaagatctttctgaaactttaaacactttatgtaaaagggtacaggtagaaaagtacaattgctatttgaaaaaagctctgtttgttactattgccttccaagatagtaagggtgtttttctctctcttcccttgaaatagacctatgacacccagagttgtagggtttgcaaatttggactataaacatgaagaccgtacttatcttatatacaaaaactttgccgcattgaacgaggcacggaaatttcgtacccccagtg

SEQ ID NO: 144703 - DNA, 277 bp, Homo Sapiens
tttgatgtgagacataatttattgtgtctgattatcattataatcataaaaagaactaagtgccaagtgctttacatgcattttctcgtttagttctcacaacattttgcctatgaggcaagtactattattatccccatttcacaaaaagaaaataaaggctgagagaggccaggcaacttgcccaaagtcagagaggtgatggggggtgggcagccaggaatctcaacaaggcttctcttgttctagagctaacacacataggaaggggagatag

SEQ ID NO: 144704 - DNA, 250 bp, Homo Sapiens
tgtcctaaaataaaatcataggttttaataaaggttgcatacatttctttgaaaatttacatttattttatactttttgatgctacctaaatgggatcaatgttttgaataaatggagacctctgaaaggtatcccacccaaaggaaaatagccaaactatatgaacaaaagattcaaggaagaggaagctcagcttccctcatagtaagcgaaaaccaaactgacatagtttttttccgtcagacttca

SEQ ID NO: 144705 - DNA, 635 bp, Homo Sapiens
  misc_feature (573)..(583): n is a, c, g, or t
tgatactgagcatccacctgtgtgattggcacaatgtgaaagaggggaaaagggtggaggaggaagagacaggagagctgatatgaaactcttgttatttatgaggatcacaatcaagagtttaaagacaaccggtctctgctccagccacacaggacttcttctagtacctttactacatcatgcctcccctgcctcaggcttctgctgggatggatcgagcacattcaccctaaaattctgattcagaagatctgagccttctgaaaaaaaagcattgagagcataaaccactcagaagatttatagcttaaagcagatcaccttaaggtactggaatcagtcagtgcttagatggaacattttttgaggcctacatcttcactgagtgcccttcttctctatttcctatacttccttgtttctttctgttcccactgcatcccttatggatttgtacaaataatgctgggttcttttcttcacccacatgcagcagttgctgctggatcataaccattccttctattggttttaaaatctgtttttctcagattccttacacttgaaggnnnnnnnnnnnggacatttagcctgtttttcttttaagcaataaaaattcttatatcacaaaa

SEQ ID NO: 144706 - DNA, 525 bp, Homo Sapiens
tgacataggctgattttacaccaatgtatttcacgtcgatagagcgaggcaaaaggatacacacagccaatccagaaaggagtagacagacacacacagaagccatcacatacagctttgttcttcttggccttaatctctgatcactatatggaatcaatgccaccagttggttttcttgccccctaggaattcttcctgttccctgacaagtagggcaggtgacactatctcttcctgtaaattccacatatggaaactgagagacatctccatttcttccatcttcattatggacttcactattaaccagtccattcctcatgttttcagatgtgactccatcataagcatcttctttgcttgaatgcaaaggcaaatgagaaagagactttcccatgtcggcacgcggggcgctgcgcagtcccgggctgcttcggcgcggacagggccgaggacagggtcgtggagtccacagtcccgggagccggggggaggagcgaccggcctggagcgcgcggccgc

SEQ ID NO: 144707 - DNA, 642 bp, Homo Sapiens
aacgcctatcgctgtgagggcgagtgtcctaatcttgttggggaggagtttcatccgaccaaccatgcatacatccagagtctgctgaaacgttaccagccccaccgagtcccttccacttgttgtgccccagtgaagaccaagccgctgagcatgctgtatgtggataatggcagagtgctcctagatcaccataaagacatgatcgtggaagaatgtgggtgcctctgatgacatcctggagggagactggatttgcctgcactctggaaggctgggaaactcctggaagacatgataaccatctaatccagtaaggagaaacagagaggggcaaagttgctctgcccaccagaactgaagaggaggggctgcccactctgtaaatgaagggctcagtggagtctggccaagcacagaggctgctgtcaggaagagggaggaagaagcctgtgcagggggctggctggatgttctctttactgaaaagacagtggcaaggaaaagcacaagtgcatgagttctttactggattttttaaaaacctgtgaaccccccgaaactgtatgtgaaagttgagacatatgtgcatgtattttggaggtgggatgaagtcacctatagctttcaagtaatctcaaa

SEQ ID NO: 144708 - DNA, 1130 bp, Homo Sapiens
tgtgcttcttatgtttctctgtgctgtattctggaagtggtcggataccatcgtctgagctgggactattctgataagatttctctgctatggaggagcctgactcactttcactgtccagattctggggggtatatgctggtgacttactatggctgggagagccacgctcatgctttggagtggaaccactgatgagtggagagccatagtttttagaagaagccatttgaggcctaagcccttctccactactttccccaggtttctgcaaagtcactttggctttaatgctaggggagcctccatcatgcttactgatgataatttttgccacacctgtgctccccacattttttgactctgaggtcttcttagaagaatccactgaactcccggaggtggaaacctttgatttgtctttatcacttttctcacgcttgccctgaaactctcctcctgacatgttatgtttggaggacataggatggctggaagaatttgtgctcacccccatctggccggtccagtgggttttcccccccagggccactggtgacaaccccatgcttcagtttatctatgacagctgtcaagggacggcttcttgtttctgctgggagatttttcctttagaactcccatgctggttctgagagggatgacatggaagagccacttgaggaaaaggaggaggaagatgccgtacaggaattagatgatgggggagttttctgggacaacgagcctgaggatcctaaccctgaagatgacttcatgccagagcttgaactagttccagacatatgagaaccaccagaacctgaactgataggggacttggctttagaggatggaggagttccaggaacaggcttcattggagaggcaagcttgtcagagcctccaggtggccttgaatgagaaggggatatgtttggtttacttaaagaaggattcataagtgatgatggctttccttgaggtttcatcttggtgctgctagagccactgctcagtccatgcttggttatgggagaggagcctggcttccccccagactgggatgaatttttggactggctagatccagaagacccctggctagaatacatactgctacttaaccc

SEQ ID NO: 144709 - DNA, 573 bp, Homo Sapiens
tttggtaagactttattttttagtcagttttagattcacagcaaaattgagaggaatgtaccaagatttcccagatactccttttctccacacatgcataactttcccccattatcaatacccctaccaaagtagtacatttgttacaatcaatgagcccacaatgacatcattattacccaaagtctatagtttacattagagttcagttttgtattgtacattttacgggtttggacaaatgtgtaatgagctgtatccaccattatagtatcacatagaatagttccactgccttcaaagtcctctctgctctgtctattcgccacttcttcccccagccttctcgcaactagtgatcttattactgtctacatagttttttactttcccagaatgtcatatagttgatatcagccttccccaactttgttcttctccttcaatactgtgatagctacctattctaggtcttttgcctctccatataaactttagaatcagtttgttaatatctacaaaataactttagctgggattttcattgggattttattgaatctatagataagt

SEQ ID NO: 144710 - DNA, 341 bp, Homo Sapiens
gcctctacagaaaatgcggttttaacgaaggcttcacctggagggtggtgaggagctggtgtgaaagagggcctgcccagttgtggtctgcagagagcaagacccagggcaacgaggcctggtgggatgggggcactggaaataggagggattgaggtaggggattcttgtggatgtcaggccagacgaagggctgagtgagaaacaagcaggatggagacatcaaagaagattctagaacctgacacagtgctgagacctgggttcccatttagtttcacaaacatttatcctgccccaccagtgccaggcactgctgggggaacctgggctccatcagc

SEQ ID NO: 144711 - DNA, 515 bp, Homo Sapiens
tttttctaaaacaatattttcttttgggaaatgcccgttttggcaggaatacattttggctccgctgtgctgtgaattcggaggaaaagtagggagggccggaaagcccagggcttcatgcagagtagacatcaagaacccacctgctctggagtcttggtgggcaaggggaacgaaccttccagtccatttctaccgtcaccataattcctgtgtctgaatctgaatcaccttcttcaaaaactgggggctgaggttgcctccacatgctaacgctgattcagggcggcagcagatgctggtgttctcagttccttcctgcttccgcttcctgttcaggaacagggccgcattttcccatcctcttcggctgtaggcgtggtcacgtgaccaggagggcggggcgcgcctgcctagcataagctggaggacggcgccctcaccctggcgggaggtggatccccagcgcggtgcagttacatcgcagacatgggctcgtctatacgctgctggac

SEQ ID NO: 144712 - DNA, 544 bp, Homo Sapiens
  misc_feature (363)..(363): n is a, c, g, or t
tttttcattttcataaacagatctttataatcatgtaaattaaacaattttgtctttaggagacgtgagaaagaacatagaggtaagagctagaataccagcaatcttaggaaggcaaaattaaatcatcttttgggagaagagagaaaattgtgaggagaaggtgccagtgtcaaagattggcttggcgaggttattttctctctgggagtctgggaggtgatgagctcctaccgctcactgcctcgttgtcttgcctattggttcctttctgggcaaggaagaacgttgtctctcttttagagttttgtaggcctctgtcagtaatccgtggaagacagctgtcctggggcccagaatggngctgtctgtagtgaatgctttctgttgggatgtcatcatggaaaggctcaggtgtagtctggaatttgggtggatgaacacttcatgcttaactcatacaattctcaaggggaggctttggatcaatctggatttccatttgtcttggttgacccctaagaagaaagttcgttataaaacg

SEQ ID NO: 144713 - DNA, 461 bp, Homo Sapiens
  misc_feature (427)..(427): n is a, c, g, or t
tttaggtttacatatgcttaaatcatttatttaattggtacacatcatcccatcacaaatttcaagtctgttgtctcttacaggcctgcttccaatcttcaaatctctgcgtggcctcggcgaactgcgcccgctggaagtcggccgccaaccgcctaatctcttcccaggcgtccgccatcacggcctgactcgcagtagacgcggaggaactgcagacacgtcagccgacaggcggtgggagaagagaggcggaacgggccgcgcagagggacaagaggctccgcccccgacgcagacacaccaaacgcttgcgcccgaggcgcggggggcgggcggaagtgccgtggttgtaccgcggcgctgggggttcctcccggcgagactggcgggtctgcggcggctaggagagtggtgcgtaggtgtnttctgggggggtcgtgggcaggatgcatggctca

SEQ ID NO: 144714 - DNA, 392 bp, Homo Sapiens
  misc_feature (80)..(159): n is a, c, g, or t
gtggcaggtctcttgtgcgttttagatgattagcaataatccctgacctgttatctactaaagactagtcgtttctcatnnnnnnnnnnnnnnnnnnnnnnnnnnnnnnnnnnnnnnnnnnnnnnnnnnnnnnnnnnnnnnnnnnnnnnnnnnnnnnnntcagtaaaactttaattactattttttcttttggtttataaaataatgatcctgaattaaattgatggaaccttgaagtcgataaagtatatttcttgctttaaagtccccatacgtgtcctactaattttctcatgctttagtgttttcacttttctcctgttatccttgtacctaagaatgccatcccaatccccagatgtccacctgcccaaagtctaggcatagctgaa

SEQ ID NO: 144715 - DNA, 359 bp, Homo Sapiens
tttaagatgatgcagcccggacacagcaagtttaatgtctctgctgtacatagaattaagaccctttccccctcctcatccttatgctggcaataggatatgcactagaaaatttgactcttagagtcaatgaataaaaggatgggctcatacaccttcatagctcttttcaaaaaggttgcttataatttaaaggatgtcctaatgggaaggaaaggtacagggcaagaggctgtttcacattttagtccattagtctttggcagagcccaaccaaggccaaattcacctaggatgcccaatggctgtggggatctccacagggtcaagtaagcaaacccaaatgaacatgttggatt

SEQ ID NO: 144716 - DNA, 575 bp, Homo Sapiens
ccttagtttacaaataatgtgattattcacttaagcaaaagccagtttcattcattacttcagcaaatgtttgttgaatgcttattattttgcccattactatgcaaagtattaggcatatagagatgaatctatggctcctgctctgccaggcacctttccaactactgttatacttattgcccttcattttgcagtggaattttattcatctctcaaaacatagctcagatacttggtcaagcttttcctgacccaatggactaccgcctatttggttcttcctaggattttgttcatattatataacagaatctagtaattttctccctgaattcagtcatcccttttaccttttagtaaaggaatcaaccccatatatctcccatccttgatatttagttagccagccacttggacactcaactggagactttatttctcagccttttttacagctaggtatggccatgtgatttcagtataatatgataagagtgaaagtgcttttgtgcaacttttgggtcatctcctcaaagatgaagtcaccagtctggtacttgctctttcctctt

SEQ ID NO: 144717 - DNA, 874 bp, Homo Sapiens
tttttgctatgccaatgggccaaagacaaaggcccttaagggatgggttggggtacattttcccaggtcccctgccaagtcccagatgggcagattatggggttctcgtcgtccatcctggcccctggctgttacaacttcaggacaagaggctacttgttctccctgtcctgctgggcttgttttcccttctgaggctcttgcatgtcctggggtggcttggctctgtattccaatcctgtgaccttggcaagagccacaattcctctgtctccattgtcataaaagctgaaaagaggctgtccgatcatacttcacttcacaggacaatgttcaggcttaaatgtgcagatcccaactgcagaagaggagacagggctgaggggagagatgctggtggctgtgcagggtgggacctgctgtctcggccattgtcttgcaagcaatgtttcatgttctcctcctttccagcttgaagctggggcaaagtggagccttgctaggacagtttcctactgcagtacaatccacaggctacagtcatccttcctgcttcagactcttgccaccggggcttctgcttctcttttcgctgtcttctgactccagagcatgtccggaagcctcgtttctccccagcagccacgacacgcacagccgggctcggcggctgcggctccggggaccgggcagccgcgacggagggtccggcgggctgtgggcaggaagacggcagccactctttcctctaggcctcgcggtaatgaataaccgggcatctgtctggggcgagcggacagggcgctctcgacgcgcgttccgcttctgtgggccgcgcggctctcctccggcgggccctcctactagtcagtgc

SEQ ID NO: 144718 - DNA, 632 bp, Homo Sapiens
catcttcatggttttcttgaagctgtaatttgatattttcaaattcttttacttttaattcagtgatttctctttgtctctccaaatcttgtgatactttctttagtttgaccaagagtgaggaaagagagtcatcttgttctgctactgtctgttccatctcagccagacgaataaaatgcttgttggtaggaactggagtgggagactgtttcattaaatcccaagccgtttgtttgaatttatttagtgaactatcagcctgtagttctaatctgtgatgaagaatatgaaggtcttcctcatgtttcttcacaatttctctttgctcctctctggctttttctagaagacgttgatacttctttaatacttcttctttttgatttaaccttgcttggatgtttgcaatggtttgatgagcaatttttcaatgtgtggtgagattttggttccatctcttttctgcctagctcagctatgagcttttctctttctgcagtggcaggcaatcgaagcctcagttcattgattactttggctcttgacagtgtattttggtctgctaaccttaaagcagattctttctctttttagttctcttctaatgatttgcaagtggcccgtggttc

SEQ ID NO: 144719 - DNA, 504 bp, Homo Sapiens
aattatttgttggcaggtttcctgctttgtgggcagagtaaattcagactccacactcaaattcggcacagagttgagacctttattttagatgagagtttttttcccctccatcccagagcttgggcggagagcaagcgtccttgtaacttctctgggcaggctggtgggattgttcagtctccttttgtagcctgtgcaaacctttaagaattccagcttgatgcaaatattttacttctcacatgggcacaaggcaattgtctctcatctctgcccagggattaaaatgacagccccttcccttgaggactttgctcaagtgtaagttcctttggctatgtgtcgtaagcagtagtctattgctgtgattttaaataccttttatgtttcaggtacctacaaatctttaattcaccatatttatgtatgtgtaatgggagaagattctgcacgtgctcagtcctccatgttgatggaattggaaatctgagcctttatctg

SEQ ID NO: 144720 - DNA, 970 bp, Homo Sapiens
ttttggagtgtaaactggtttaatgcataggacctgggggtccctccccacagggctggtggaggaagggcaccctccagactcacactaacaaccgccgtgagcagctcgcagctcccagtcccgatgatcgcgtactggatcttcgcttccggcactcctgccttccggaacacggaggaggcgtaggcgtacaccgagtcattcccgcagagctccatggcactgcccagaaccacgaggcttgtcacctgtctcctcagggcccgatgctggaacagctcccatgggcgccgggcacggcagccctggcaggcagcgcgctcctcctccagctcctccagctcccctgccaagtccccggagccccggagccgccgtagtgctgagtccgaccacctgtcccatcacgatccccagagccgtaaagatggctgagctcatggccacagctcctcggagctccttaggggcgctctcccccaggtacatgggctggatgttcatgctcacacctgcattgactcccacgagcagtcttcccagcatgatcatctcaaaggagcctgctttgcggctgaatccaaacaggattgctgctgacaccacaaagatgttattcaccaggagggacttcttccttcccagcgtgatggccaagggacctgcaagcagtgctccaaagaggcctcccaggggatacagagacacgatgagggaccacataagcaggactaggtgatcgggcagtggctctccagtacgcgcctgccatgtctcattggtgaattcctgaatgtgcaaggtcggggcattgatgatagagaggttatagccaaactgaaaagtcccaccaatgccggcagcgcagatggtcaggagcaggatcctgccctgaatcattctagatcgcaggagggcgtggagcattcgaaagaggggcctgagcggaggtcttgctgtccccagg

SEQ ID NO: 144721 - DNA, 550 bp, Homo Sapiens
ccgaccaggatgagcatgaccacatggcgcccgcagacatgcagcaagcaggcctgccatctggtcaaacagctctgtggccaggatccccgtcactcccggcagggccaatgccaaagctgaggatgaaggcaaagatgcaggccatggccaggtagagtgtccaggggaaggagctctgcaggcacagggccacagtgaagatgctcccccagcaggtcatcaggctgtacccaccgatgagcagcacgcgccgacccaccctctcgattaccacacaacttacaaccgccgtgagcagctcgcagctcccagtcccgatgatcgcgtactggatcttcgcttccagcactcctgccttccggaacacggaggaggcgtaggcgtacaccgagtcattcccgcagagctccatggcactgcccagaaccacgaggcttgtcaccatgtctccatcagggcccagatgctggacagctccaatggcgccgggcacgcagcatggcaagcaagcgcgctcctcctccaactgtgcatgggaccagggtac

SEQ ID NO: 144722 - DNA, 330 bp, Homo Sapiens
ttttgcttataagctatcattagtgttagtgcattttatgcgtgaccaagaaatttttctacttccaatgtggccagggaagccaaaagattggacacccctgttctagaggaactggcaagaacgctgtgggctggccatgagctgccaccttctgcaatgcctctcccacactggagacggggcactagcttttcttccccagtagttttcagaagttctgtggaaatcccagcaagtgtttctgcccctccttctccccagtcttctccgccagcaccacatacaacacatctgtcatgaggcttctagttaaagtgcggttctaac

SEQ ID NO: 144723 - DNA, 447 bp, Homo Sapiens
tttggaatggatgtaaagcagttttattcaaaggctagccattgagaagaatggctggacttaggtctcaaagaaccatctcaaattttcaggctaagcgaagggggttgggaagggaaacttggtatgggaagcttgtgggagtggtgcaggatggaggtcggcatatcttgctccaatggctattttgagttgttgtccacctgtagtatgaactggggccattttgacaatggttgggttgtagattaaccaccttgaggcaatttctaggtgggggagacttccacaactggatctctatgcctggtttatttcaagattagcccctggaacttctaagcaagtacatcattagacaagcaaatatggtgcaagggagtgtctggctggggtggcaactaggttcttctctcaagctgattctggtgtaggaaagtttaaatt

SEQ ID NO: 144724 - DNA, 950 bp, Homo Sapiens
ctgctcgtttctcgaggtttctgtgggaccccggcgtggaacttagtgtggcaaaaagaaagttgcggaaccatgttccacatgggtatggcgtaggacccggagatcttgccgtgctttcacgcggacgtgccatttgcagcaggttctgtctggtaattggtaaaacggctggaattgactcgtcaacaggttcactgttctgaaatctgatcggtttcgtccaggaacccacagatgatatcgtagcatagtattcaggaactttctcttcagaaaatccactactctttttgaagtcagccacacagtattctcttttcatttccatgagtacgctgtcggaggcagactggactggtatgtgcagaaaagcgtagactctggggtgattaaggatttttgccatttcctccagatgctctaaaatatagggcggatttgtcatgccaagcctcagcattgctccctcaggaatcacttcaaccagtttccacaggagtgtggggagattggtgccaatatctctgccataagcccccgtgtcttcactggtcaaccatatctcacaaacaccctcttgaaaagattgtttggctctatctactagttcatcaattggataactggccaaatttcctctggcgtgtttagttttgcagtaggtacaagcattgagacacccggtattgatggaaatgatttctatcagtggattcttcctaatcttcggcaaatccaatcgtgctcccccaagccgccttccattatcctttttctgacccagcagtctcacagagtgacctttaattgtctcctccacaacttctaccacacgatctatctgctgaaccccaatgatactcagtcccttaaggtagtcctggcgaggctgggcttgaggaacgcatccagccagtacgattttcttgttctcctcttgagctttt

SEQ ID NO: 144725 - DNA, 451 bp, Homo Sapiens
ttgcagacgtttcacacccttctttccctctgcttgtgcccacctaacctcagcagcagccaagctgttctggttgatagcaacatctagtgggcaacacagggaggaatatgattagttctgtttttcccccagcagcatcattctgttcttctgcctgagggcatttgccccctctttcttatctggagacattgtttcttagctactttcattcttatcttctctcttatacttagtgcctaggtagttggctccgattaatttttctttatgacctttatgcttccaaaagtgacagattattgactgttaaaatattagtgaatatatacacttggatatacatccaagcagataatattaaatttttgaaggaaaattacacatttttagagccagtaccatcatcttctaatgtaagtatctagaaacccgtgtctgcattaaa

SEQ ID NO: 144726 - DNA, 624 bp, Homo Sapiens
  misc_feature (434)..(434): n is a, c, g, or t
  misc_feature (452)..(452): n is a, c, g, or t
  misc_feature (493)..(495): n is a, c, g, or t
  misc_feature (508)..(508): n is a, c, g, or t
  misc_feature (510)..(511): n is a, c, g, or t
  misc_feature (539)..(539): n is a, c, g, or t
taggtcacatgtcttttcatgtggatttaatgaggaaggagtcagaatataacagttttattaatggtgttggattttacaaccaaataatcccttagctatattgttttattttctaacatgaaagagcttctaccgttaatcctctcttctgtctcctgaagccagggctccacaggccttcctctgggagacacacccaggtgtgccgccttcccctgccagatcctcaggcctttcttacccaactcacaacttccctttcacccttagtcccatacccaccatctcccgagaaaacctccgcaatgggctgccggggccccaggcccttccacccatcccgccagcacaccctttccgtgaaaatgagtgaccccaggccagcgtcttcctcagagagagcctgtctggatcccaaggcctctcctcgngaagagggatctacttgnctcaatgggtactcagagccaaaatggcctgtgcgctacannnaaagtgtaccacnanntattggaccggccgttggaaactaattngggcctcttttcatacagaacccccggtacctgctaagtcttctttgctgtctctaccgtagagctcgtactatcagaagagtat

SEQ ID NO: 144727 - DNA, 576 bp, Homo Sapiens
cgacggtctttacctttcaaagactatttatcttatacctaaatgaccttttggataataattcatggatttaaagcaaatcaagaaaacacatgaaatgatctgttaaaatctgggcttcttggccgggcgcggtggccttacattttttaaaatgagggaacaaatgaataaatgaccaccatgttaggggctggctctgaacagaattgtaaagtgggccaagcttgctctcaaggtcaccttaagcccacggttgctgtgtcctgccctctcagggtcatttcccagcctccaggcacctgttcacagaggctgcatctggcctcgcctccacccctccatcctaaggtgctccgctgacttagaacaggacagtcagggagagaatgtgtctcaggagggtggagtcagatgatcacggccttcctggcatctgaggggatacagcttcgggtagcaaagtgtgattttccctgagccccaggaaagcttggccttggtcagaatacattgaaccctgagggccagagagtccctggggcaagctctgagagggaggcctgggacagggca

SEQ ID NO: 144728 - DNA, 497 bp, Homo Sapiens
ttttattaatccaaagcaaatatattttatttaattggattattaatagttcactaacatcatactgtaggtatttttcttttctataaatgttttatattccagtctattcaaaaccttacgaaccaaatcctttaaaggacgtaagtcacacatattttcaaaccaacaaaatagtaaaattcagggaacattagatggaatagggaagatgaaataaagaagccactaagagatttacaagaatggagttcttctgccaccttgtggttgttctgtgttataacctagagctacattaaaatattcagggaattcttcagccagagtctctttagccaggtgtggcgcgtggctgagctctggtcaatggaatgtggccttggtctttattgactgtggttatcgtgtttccatttttttcttcctgaatatcatagctaattttggtattggcgacgaccgctttcttaaactttctcttctgctgggtttag

SEQ ID NO: 144729 - DNA, 493 bp, Homo Sapiens
  misc_feature (328)..(347): n is a, c, g, or t
tgaaccgagatgatgagtcttggtatggttcacaagttacctcaaccaatataccaacaaaagggatagaagcttcttcatatttcacacagaatacactgggattagtcttccagactccaagccatttgtctttcaactttaatttttctgataggtatttacccataacttcatcagcatcttctgccttacagtcctgcagcacttcgtcgcaatacagcgacaccttctcgtcccgccacatccccctcatacgggacacgcagactgggggcaggggctgcgcctcctcttcatcctcaggcactggcagcaggggctcctnnnnnnnnnnnnnnnnnnnntctcccgtgtcctcggcctgagccgcgggcaggcgctggagccgcagcctggccgtctcccggcccgctttccccttcaccgggcgaggggaggccaccaccgaccgcactgggaaagcggtgcccttcagggtggtcgcggccgc

SEQ ID NO: 144730 - DNA, 500 bp, Homo Sapiens
  misc_feature (1)..(1): n is a, c, g, or t
ngtactctgaatatcagaggcattttttttctatttctatatagacatagagatatgtacctatagcatttttttactgaccatgttgtataagcagttctgtatcttgcttcattttaccattacacatagcagttttccatgtcattaaaaattctttgtatacaatacatcatctccagcatatatacttggcataatttatctaatcattaacttacgatttgattagtaaattctgttacacctattttttttattaaagttatcctctttttatatgtatatgtatcttcttaactaattctgtaagacagttacaggaattgttggttcctcagggaaattccctaggagtagaactacaggtcaaagggtataaaagcttttaagcttcctcaggaaagcttgtaacaatttatattccaaaaggtatgtgacagtgccctggaagagaaattttctgaacagctgcaatttaattcaaggaaaaagagact

SEQ ID NO: 144731 - DNA, 435 bp, Homo Sapiens
tttttggtataaatttgtattccaaacagggtcaaaagcttccaggatcacagtggtctctacctgccctctctctgctaggcaaaatcctcacagtcctcaagggcctagtaaatgtcactgccacgaagcccttccagatttccccgctgggacaagcctactctgcaactgttttatatcatggctaccaaaagtcctagcaatgccagattagactcctgctcatgctgaagttctttccatagtagccaggctcattacagtgcctgagattctactatcaccatatccatcttgcaagtaaagcaccagcatccctagaagaagggatcacattcagttatggagactcacaaatattttggctgacaaaaaccaacaataaaaaacctgctaagagagagggtgtctggagaaggtaagactggctca

SEQ ID NO: 144732 - DNA, 469 bp, Homo Sapiens
ttttttttcaaattaagaatatattgtatatacactgaataaagatatttacacatacacaatgtgggtcaagtgatactctccaacttctgaggtaaaagtagcttgttaccagtgtccctggcaaagttatgctgaggattgatggaagggatggtatatgtttttcctccactctgaacaagaagagagatcaaggggaattagctctttcatctgaactttccgtagaggtgcacaactcctcagggatgtagttttggaacgggctggggaaaagaggtcaacagtttgacttcttatgtattcttcacagcatattgcagtgggcctctttctcttgccggctggtgcgcattctgggccagggcgagccaaaaggcagaagggccttcgtgctgcagtgtctggtgaagactcaggcttagcctggaagaagtttccaggccaacgtgaagttttcctgtct

SEQ ID NO: 144733 - DNA, 493 bp, Homo Sapiens
tttcaaaacttagcttttcaatatatggtcttattaatatattggatgttgctatttaaaaatcaccttgggcttcctgttacatgaattaccagaaccacagaagctgagagcccagcaggtggtaaactgaagtaagagagatactgctggagttccaaggacattcccttaagagaaatgcttatgagtttaggagcactcgtaagagagtcagggagaaaaagaaggaagtgaggcttgtgtgtgtatgccttagatatgataggtatacaccttacaggatcactcctcatttctaatttaacaagattgattctgtttgacaaagacaaaggctttaacattacctattactatcagcaatgcagttatgaatgtcactcctagtcattcattttatagccactttgaaaggtctatccgtttactctgtagaaacatcccattacacatggcagatacacatttaaatcactgaagaactttacaa

SEQ ID NO: 144734 - DNA, 406 bp, Homo Sapiens
attttttttgaaattttctcaagctcaaaccagttttctcttgccataatcgcagggttccgtgtggggagggggagcaaggatgacgcttgattgtctgaagtccccacttcgttctgcctccggagacgcagttgtgaggactctcagcgcatcttcttccttctgcttccaccggctcccttgcccaaaagtcccctggggttcggagactggcttgcagccgccttcttcaaagagctctatccgagcttcccaggctgcggagacgccaaggctcagtctagcttagaatagttgcttcttgagttcaggcccatccggatgggttagtcttttaaaaccaggacacgctgaaggagtgcgcgcaccccaggaagatcaggacaggcaagactagtgcaga

SEQ ID NO: 144735 - DNA, 375 bp, Homo Sapiens
caggttgtacttctcacaatggtaaggtttctctcctgtgtggattcgcaggtggctcttcagagtctgaaggtgccggaaacgggtgccacagatttcacagggatagggcttctcaccagtgtggataagcacatgggcacggaggtgggccacctgtacaaatctggctccgcaggtttcgcatttgtagggcttctctccagagtgaattcgagtgtgggttttcaggttggctggccggttgaactgggccccacagatgttgcaacgatagggtttctcaccacagctagaatctgagtactcagactgggtctctcccatctcctcagggaacgtggggcccagtacaacctgcggtggggtcggagt

SEQ ID NO: 144736 - DNA, 669 bp, Homo Sapiens
  misc_feature (482)..(491): n is a, c, g, or t
  misc_feature (561)..(563): n is a, c, g, or t
  misc_feature (605)..(605): n is a, c, g, or t
ttctgtgctcattaagccagaatactgtggtgtgcttataattttatcttttcttggcaacttgatgtcactgtggaaagcactgattactgaactgtgttgtgacttcttttgttctaggtgcctttgaacccttgtgcactttttagttagatctttattaacatgctatgccactgcagggagggagcaggaaaagcatgatacacaatttaagacaagtgccaccataggctactgttggcaaacaagagctccaccaaactttttaaagtgaagaagcaacagtctgagccatttttctcaccagtggcaggagggggagacttccaccagcaacatggaatcttcagtggatgcagctgaccaaccctcctgacttctcagtcttttcccaccactgctcaccctttatgttcagatgtattcagcactagataaccatacttattaactataagtgatgtgtgtgtgtgtatgtnnnnnnnnnnataattttgtactttaagaataaatatatataagctatatgtgtaacccctttcaaacaaaaaaactatnnntctgtgaaaaaaatcagcattatatttcggcaggctgtggtntttagattggtggagctcctgaccagctggaaatccctgtccccactttgaccgtattccctca

SEQ ID NO: 144737 - DNA, 465 bp, Homo Sapiens
gcaacaatacttgtgtttttttaagaaacatatccattttacattagggaggtaattgatataccaatcaaacccaaaaatatcagtggcttaacacaatgaagtttatttcccgctcttgacattgtccgtcgtgggctggggaagggctctgagagccagaactctcccatcttgtgggagcattaagagctcagagtcctccactggcgcttctgtatccagcattcttccctgcggacagcatgggggcgctgcggggttagcttttacaggctgggcctggaggtggtgaacttaactgccacccacatttcattagccagaacttaggcacctggctgcagatgaatccatgggagaatgggaagtgtaacagggctgtgtgcccagaaggaagggaaatcatttgggaatacacggcaggctttgccccaggtttcatctaggttttcacatttattg

SEQ ID NO: 144738 - DNA, 1148 bp, Homo Sapiens
  misc_feature (516)..(713): n is a, c, g, or t
  misc_feature (779)..(826): n is a, c, g, or t
  misc_feature (832)..(970): n is a, c, g, or t
  misc_feature (1021)..(1055): n is a, c, g, or t
tttattttaattaaggtttatttcaatagcaaaaatgacttcaagattttgcatgaattattttttaaacaaaactatatgaaaaatatgtacaaatcagtcatcaatgtcattgacatttttatgaacaagtttcaaatgaaaaatatcccatcataacaaaggtacataaataaataaatgctgacaatactggccctaaagtctaacacaactgttagactaatcaggataccgctttctactacgtgaggagcacataatcaatgtttccagcaaaaggcaagtactggtttgtgtaggtttatttaggccatgttgacagccacattattttgaggtgtggctacttgtttctcttcatagtgttgaatggcacagtgcaaggcattgggcaccagaagcatgagcataggcagagccatttccaccatgctgacggcaggcaagaagaagacaaaaatgaacccctttcatgcttgtttagaaatgtgacggctaggcgcagtggctcannnnnnnnnnnnnnnnnnnnnnnnnnnnnnnnnnnnnnnnnnnnnnnnnnnnnnnnnnnnnnnnnnnnnnnnnnnnnnnnnnnnnnnnnnnnnnnnnnnnnnnnnnnnnnnnnnnnnnnnnnnnnnnnnnnnnnnnnnnnnnnnnnnnnnnnnnnnnnnnnnnnnnnnnnnnnnnnnnnnnnnnnnnnnnnnnnnnnngtttcactgagccaaggctgcaccattgcactccagcctgggcaacaagagcgaaatttcatctcnnnnnnnnnnnnnnnnnnnnnnnnnnnnnnnnnnnnnnnnnnnnnnnnggctgnnnnnnnnnnnnnnnnnnnnnnnnnnnnnnnnnnnnnnnnnnnnnnnnnnnnnnnnnnnnnnnnnnnnnnnnnnnnnnnnnnnnnnnnnnnnnnnnnnnnnnnnnnnnnnnnnnnnnnnnnnnnnnnnnnnnnnnnnnncccggccgtaatggccgaattcccgggcatatgtccggtaccgtcgactgnnnnnnnnnnnnnnnnnnnnnnnnnnnnnnnnnnncggccgcttcctcgctcacaactccgctgcgctcggtcgttcgcaaaacaaaacggcgaattgccgcccacttatgggatgggtcagtatctg

SEQ ID NO: 144739 - DNA, 1491 bp, Homo Sapiens
aggcacccacgaaagctgagaaaattaagctattgaaaccaatttcagggaaattgagggcccagtgggaaatgggcattgttcaagcagaagaagctgcaagcatgtcagtggaggagcggaaagccaagttcacctttctctatgtgggggaccagcttcatctcaaccctcaagtagccaaggaggctggcattgctgcagagtctttgggagaaatggcagaatcctcaggagtcagtgaagaagctgctgaaaaccccaagtctgtgagagaagagtgcattcccatgaagagaaggcggagggccaaactgtgtagctctgcagagaccctggagagtcaccccgacatagggaagagtactcctcaaaagacggcagaggctgaccccagaagaggagtagggtctcctcctgggaggaagaagaccacagtctccatgccacgaagcaggaagggagatgcagcatcccagtttttggtcttctgtcaaaaacacagggatgaggtggtagctgagcacccagatgcttcaggtgaggagattgaagagctgctcaggtcacagtggagtctgctgagtgagaagcagagagcacgctacaacaccaagtttgccctggtggcccctgtccaggctgaagaagactctggtaatgtaaatgggaaaaaaagaaaccacacaaagaggatacaggaccctacagaagatgctgaagctgaggacacacccaggaaaagactcaggacggacaagcacagtcttcggaagagagacacaatcactgacaaaacggccagaacaagctcttacaaggccatggaggcagcctcctcgctcaagagccaggcagcaacgaaaaatctgtctgatgcatgtaaaccactgaagaagcgaaatcgggcttccacggcagcatcttcagctcttgggtttagcaaaagttcatctccttctgcatccttaactgagaatgagcttttgtgggagcccacaccagtcaagttggatttgaacccagctgctctgtactgcacttagaatgatgtaatattccaggatgctgctgcaggtggcgtatcatcgtacacactcagtgacatttctatcacaatcattttatggaagatgtgtgataatctgtttttactggtattaataaacacctacaatgaagaaaaccgataacaaatttttaagaccaagggtaagataactaatcaaggccatttaatcccgtcacattcatctcataatagaaacacgttcatatttccagtggtcaatgttagatttcaagttgaaaggcagtcccttttagttgggggctgtccagagctgcagcagggctttgcacggaaggggtggccctgttagagttgcttctcctctagtttgtaacttactggacttttgtggaaaatatcagcgtcgctaccctcagaaacaaactaacagcacacgttaggaggagtcctcatcagct

SEQ ID NO: 144740 - DNA, 485 bp, Homo Sapiens
ctggccattggaggaccccttccggccaattggtaacacgaaaaggtgccgcagggattcctttacaaggttgtcaaaaagctggcctccgaatccgtgcatccataacccgctagctcagctgacctggcatgcattgctcaacaacagcctctgaacctcttccgagacccaaaatgcgcggtctggagaggaaacaaagcagtgggcggggccttccggtgccgggaaaaagcgagtagggtaggagcgaccctcctgcgagttcggaaccctataggcccttgccccgccgagggtcctgaattcctcgcccccggggtgctgaatcccacagcccgcgtcccatcgcgtgtggggctgcgactgctcgcggggctggcagcagggcgcgagctccggcaaggctccccgggggcaggcggcggagcccatgggccgcggcctagacgtgccgggggcccgggctcgagtgtggcggccgc

SEQ ID NO: 144741 - DNA, 828 bp, Homo Sapiens
tttttttatgaggatttgacttagattttatccaatactgttttttaataaaagcaactttgagcttgacatttaaaagtaggtttaaatattaccactaacttacaaaagtagtaacccacttgcagaagtcactaactgctttgcatacattttcatgaagaccaggacgaggaccattttcatggagcaaatccattttatgtggcttttcttcataaagccattggcctgcgtttgacacagacgtcttcttggaaggtcccaggtagacttgggtagaatgtttttttaaaagcttcgtgggttccttcattcctttcctggtgtcctgacaataagcccatgtgtcctccagcttccggtcaggatcaagcacttccagcacctttgataagagctctatgggcatagcttcttccagattcaggtagagcgctaagggatgtggggtcaggtgggcctccacgtcctccaggaatgccttccgaacctgctgggctggcgagagcttggaaagcacgtctgcttccttgagcagcttgatctgcctcttctttggggccagttggggagctctgtgataaatctggggcagaaagccctccacagggacctgagtcaccagaccagtgcaaggcgggcagcccttcctgaagtcgtccagcccctttcttggaaataccaactgccggctgtgcagagaggtggggaacttcagcccgttcttgtgctttgtgaaacatctggacctgcagttcacgccctcgcgcaccggggccaacgtccccggccggagccgccgcctgcggtccgccatggtggccc

SEQ ID NO: 144742 - DNA, 491 bp, Homo Sapiens
cttcataactttggctttttcctaaaaatatatgtttatgctgataaaaactacttacatttatgggatattttgtatccatatagagtttttcagaattgttcattaaaatgctttttataagcttatattatttgtagaatatggcaaaagcatttacagctcatcatgtatctatctgctcctgttcacttccaaacctcttgtagttaggcaatgccatttgactacttcaagcagagggattgtaaacagaagtgattttctatttccatgttggactgtaaaaagttctgcatgaccctccagttttcttttgcctgtcatggtgacctgaaagcaagatgttccaaatggcatacttacaagacggatgcaacctgggtccttaggtcgctgtttagaagggacctgactggagtgctgatggacttgcagtaaactttttaagtgtaagaaataaactgttatgtgttcgacccctgtgaaaa

SEQ ID NO: 144743 - DNA, 537 bp, Homo Sapiens
gtgtgagccactgctcctgatcttctaattctatcctagggctggtgttgtcagttcaggcacccaaggcagggagtgaatggggatgtcacctgctttatttcctgaaggggagccacagcatgggatgcactggtcacgttgaccgcagtagggacagctgtatggggtcttccttctggtttgttggctcctgctgagaagccccagttgaggtatgagggccaggaggagtggctgctgggggcattgatcagcaaaggtttaggggtgggagtagtggatggcactgaaagaggtacctgctgcactttgactgctggggtctggagagtcagactgcagccaccaaaagtcagctggggttgggcctgcaggctggcgctcctctcgactggtgggctgagcctggcggaacctgtttatatacttggccaccacggagtccccgctgtcaatcagggtgggtgctggggaggcccacatctgtccctcattggtgctgggcagggagggggtccctgaactggatggcca

SEQ ID NO: 144744 - DNA, 613 bp, Homo Sapiens
tttacttggtcaggacacacgtctcttattaaatgtcatcaacacaatctgcctggaagaaacacgattactttctaccaagcacagaccctcctaaagggaccagacccagtccagcacctttagtctccccagagggtagcaactcaatcagcgagaccgcatttcagggttttagttacagatactgagggtgctcaaacatccatgcagtttgctgttcaccgtaacacgcaacccagaatggccgtttcggtccctcgtcggttacctgaaaaccagtcttactgagctccaaccccaaattaatttggtgagaactcgaactcggctattaaccttaattctgagagaagaatgacacccccctcccactgcgagggtccactgagggtgagtgcccgggctccttcattctccaggctcctctcagaacacagcaagggtggctgactccttcgaacgtccattaagcacaatgcaccggggcgaggcagtagggggtttgctgagcccggttccgcggcggtgggaagttattcaccggcgtctccgaggacggcccaggcctggagaatggctggggccgcgggctggggtaggggttaccgtg

SEQ ID NO: 144745 - DNA, 465 bp, Homo Sapiens
aggtttgtagatgcttacttaaccttaatggaaacgctggaaatctgcagggggaggactttccggtttgggaggaatagcttcaggcaacttcttttctgggacagctgcctttggcacctctgggacttttgtgggtggcacttcaggctttttaggaggaggcactggcactttcttttcaggaacaacttctttgggagcctcaggcactttaacaggtgggacttcaggctctttaggaggagccactggcgctttcttttcaggaactacttctttgggaggctctggtactttaacaggtgggacttcaggctctttaggaggagccaagggcactttctcttcgcggataacctctttggaagcttctggcactttaacaggtgggacttcaggctttttacgaggcaccaccgacactttcttttcagggataatctctttgggagcttcgtgcac

SEQ ID NO: 144746 - DNA, 506 bp, Homo Sapiens
  misc_feature (19)..(19): n is a, c, g, or t
cacaaccagattgcaatcnacactgttgcacaatgaacttctctgcacacatgtgagtctctgagggtactggaagatcataaggttatgttgctattcaactctggaaaacagtttaaaacacctagaaaagtggaggttcttgaaattcccacagtcctggaagaaccagaatcctaggagcatggaagacttaattcattcaacagtaaccacctctttttagcctaagactttggcagccgaacaacagaacaggaattatgtcagcttttctgcttagcatgagctctgccccagaaccaatgacataaaatacgtatgtttgctttccctgccacaaagttgcgacacattatcaaagctttacaaagtcactctatcttaggacacccctagacaacttgtttccatcttacttctgggacaaaaatatttactgtatcctgctttcattgtctttgtgaatattacattaaatgttgacatgtgcttggcaattcaaa

SEQ ID NO: 144747 - DNA, 486 bp, Homo Sapiens
taagggtcccattttataccagatcctggatcccaaaaagagggaatcagctcatccccatgggagtgttatctctcagtgggggatggggacatctccatacttcctaggtggctaagagcatgcttctctgatccaaacctgcagagcagagctgagtatttccccataactgccattagctgtcctcaaaagtatatttcctatatagttattacacaccaaagttctctcataatgcaaattaatttctgtcacccccccaaaagtaaaaaatatcagataatggaatgcaaaatggaacagagccttagattttgagaggaatcttatctactttttagtcctgaagtttcatgagtaaaacagaggtttattccaaaacgggatctgtggcacttcctcttttttcctaaggagtcccaggctgttagaactggaatatctgcttttaattaagctgacttttaaccacagtgctcttta

SEQ ID NO: 144748 - DNA, 646 bp, Homo Sapiens
tttttctgttcaaggcgttttttaaacatgagaacacgtgtgaaaaaggtttttaaaaatcagccaaagattggggtttccaaatattcagctgtttaacattcagataattgcctgccttccccccgctatcccccacatttcgtctgaatgctttggcacgggggagccccacagtctgaaagtaactctgtcccaactctccttactgcatttattaaagaggctgaaagacgcatctgcttttcaatagtttgcggttcttaagagaccaggaaagccagaggttctgactattcaggaagaaagttgggtttcccaaaacgggcaagcaagttcggtgtggtcacatctaggtattcttgacgtcatttttgttgagggaaacaggctgcagtttttggagccaggctagggcttaaggggcctcaggctggcactcgaaaccaggcgttctcatttccctttggcatcaccctgaacggctgtgcctggagctggcgcggggttgaaataaacaaataggagtcccgcagctggaaggacaaatcctttcacgtcgcgggtgatgtgggattggggcgattttgctctccctttgttctttcccctgccttccacgtttccagggtatttgattgatgtc

SEQ ID NO: 144749 - DNA, 498 bp, Homo Sapiens
tttttttaatcattgcagaaagtatctgtattagaattctagagtaagtcaagagctcacattcattaaaataatgacacaactccacgggggtggggagaacagcagtaaagcaaccacatactatactattagactggcaacattgagactgaaaatatccatgaggagaatactgacatcttagtggtaagcatttccttttaacccggtaattccagtagtaaggatcatacaaatgtaccgctaggaagaggtaacgtatatgatcatcaatgggagaacagtaaagttgttactgtggaattcccgacaggctttcacttggagggggaatatttgaacacaagtttaaacaacccagggtaagcacacaatgcactatgcactgaaaggtatacgtttccgctgggtgtttatacatttcaaagttaaaagcatacaccttacccaaagtttcagaaacctggtttgcaaatctgagttcatgtgtgtgtg

SEQ ID NO: 144750 - DNA, 750 bp, Homo Sapiens
  misc_feature (395)..(534): n is a, c, g, or t
ttttctagatcaataatttcctttattttattcttgttggaaataagaatgattttagtgcactctgcaaggtcatatattgtcacacaaaactgccacataccacaagactgtgcacattccaaccttaaagggaggtgttaacattgtagatactatggatttgtatatttatttcaataattttatggaatttgatagaaaattgtcttattctaacaaaatcattatattattataattactttgaaagacaaataataaattgtcctgaggaaaaatgccttttataacttgtacaaaagtattgtgtgaactggttatgattccaacactctgaagttataaactcgtggattattaaaaataatgacaatagtaataatgataacttnnnnnnnnnnnnnnnnnnnnnnnnnnnnnnnnnnnnnnnnnnnnnnnnnnnnnnnnnnnnnnnnnnnnnnnnnnnnnnnnnnnnnnnnnnnnnnnnnnnnnnnnnnnnnnnnnnnnnnnnnnnnnnnnnnnnnnnnnnnnagaaggaagccactgatgccttgtgctctaagttttgccctcacgaaatgtcaagaacttctggggatttctggagcagtggtggaggagtttggggaaacctctctcctgaagaggtatccaccaagctggtcaaaattagcaaagaaaaccattcaaagtctctggagagtgatcaaagggattacaacaaaccgagaagcatttattcagcaa

SEQ ID NO: 144751 - DNA, 563 bp, Homo Sapiens
tctttttccatgccaggcagttaatgtgctgacatagtaacaaggtttgaaggaggaacatctcatgcacgtgcgtggaaacccaattgtcacgtgtatgaactacaaaaggatcgggaaaagaacacatttcctcacaacaggaatacatgagattagaaagaaaaccggaatgaggtagatgcatgaatgcacagacaaggatatgtgacaggaagctgggtgacattttgcatctgacatagcagtacacctagagagcccaaggaaatccacccccaagttaccagaggcaagaaatgaacttggcgaaattacaggacacacgttaaagccacagactgcattgaaagagaacacgggtttcaccgcaaacaccatgaacagctgttctgtcaaccttgacggcaaagaccagatctttagtgttaactctaaaagagcatttgtttgggagaaaattatagaactgaagatgggaaagagtcaaggacggcaggaagggatgccaagacaccacgtcccagctgggagcagtgacgactttatgctacgttctgagt

SEQ ID NO: 144752 - DNA, 402 bp, Homo Sapiens
tttaggtctggattttataatttactctgttaataacatcatacaaacacattcatgagtctgtgaggcattctctccatctcccttttccagttgtgactaacactgagccagttggctcagagtggagatgtccaagtcatttgggctctgacaccatttttcaaagtactcagacattttgctccaactatatacacattgccaacaagtctcatttctaggcataaacattgctcaaataaatgacagtgacatccatataaggaaacattatgcatccacatacaaatcacatttgaaagacaacacatttgaaaattatattttgtggtgtagaaaagcattcaaatcatttgaaaaggcgggccaaacaatagatgttcaggatgattccaattt

SEQ ID NO: 144753 - DNA, 541 bp, Homo Sapiens
  misc_feature (478)..(478): n is a, c, g, or t
ttttttgcctttgagctgtagttcccgtttatttacacatgtggatcctcgttttccaagcatggcttgtttgttttgatttctgctgtgcttataaatcactttcggtgggcaagggagagaggggaaaatgggtgttgactgaggaatcccccttgcttgtcttcttttgaaaccgggcatctctgaagtcctggtgtcaaggggatcaagagatgacttctcagaggttctaggtgatgctgagaccttggtgtctctaaactctgggcatgtggacaggaggggcttgcggccgtgtctctgacctgtgtgatgtgcaggagggtctcattgactcagcgcctgcgcgttgtgcctggctgtgctctcttttatgccccctctattctcctctctcccccaggggattttcatctcaacaacagagtgtcctcacccaggcctgccttccggccagtatgggcttgtacatcangcaccttcctgcatgttggcctccggcctgccctcctctagccacattcaagcctcgtgcccg

SEQ ID NO: 144754 - DNA, 470 bp, Homo Sapiens
tagcttactttgcttgagctatttttcaatgagtcacctcttcctatgaaattgaaaactggtcactttcagaagctattctgcctatcaatgtagcaataagtttttaaaaaagaacaagaaatccacttaagtaattaattggatagtaaattgtacatacagaaactagacaaatggaaaactgccatattcttttcagtagttagggtactggtctactggtacagactgataatatatactgtacactgtaaccacggcaacctgaagttcaactcttcgaatcccaagaaatgtaaaaattgttttttggatttaaaaacgttaagctgagaaagagtaacactttcaagttttcattttgtggtctctagaattcattcccatgttttctccaccaactcttaggttgtgataacctgccccaaagttatctacccccatctgacatgcattgatacatcctg

SEQ ID NO: 144755 - DNA, 532 bp, Homo Sapiens
tttgttgctcttgtatagaaatatagttgattttgaatattaactttgtacctgcatcttgatgcagtcagtggttctagtagcttgtttgtagaatcctttggatttttctatgcacgtgatgatagagtctataattaaaaagttttactttccagtagatataccctaaatgtttttaaacagctttattgaggtataattgacatatgatagctggtcatatagatgaagtgtaaagtttgattagttttggcccacctgtaaaaccatcaccagtcaagataatgagcatatccctcatcccgaagtttccctgtcctccttggtaatccctccttccttcgtctctctttgcccacatcccatccctaggaaaccactaatattctctgtcattatggtttagtttgcattttctagaattttatagaaatagaaacagagttgttctgtgcctaggtcttaatttatgcggttgactgagtgatgacacagatcagtgccactgaaagaagaatttatgactaat

SEQ ID NO: 144756 - DNA, 534 bp, Homo Sapiens
tgggaagttggatttcgctttattcaggttctacttcctctgttttaggaacatgccatctttcagcaaacaattatgtgccaggtttgtagaagtctggagaggaaacacatgcactgtgccagctctcgggggcccttctcatgggagttgtgaacatccaaacacgaagctggaggacaaagtgtagggtacacagatctgagcatgtacctggggcgcaaaggaggaaccaccagctcagtgcacagggaggccagggagggcttctagcagaggtcacaaccaagctgaacctgctccatcagaggcactgttgagtgcaggcccagaggcaccactggttttatgccagggttggtgcccagaagagctccagccagggcttactggatgggagcagcatctcctgactccagggtccaggccttctaggctgcattccccttcaaagtccagtgtcctccccaggcccgggagaggcccaggtcccaggtcggcagtgctggtcttcacctttgccactgaacccga

SEQ ID NO: 144757 - DNA, 500 bp, Homo Sapiens
cttactgcatatttattgttgctgaggcagttagttatgatacaacaacacaatatccataataattttaaataaacaaaaacatttctcctggcaacaatataaagaatatatttttttctgaaatcaatgagaacattgctacatacagatttactcaaatactgaaaaacatgaccttaaggcatctgccagaaaaacagatgtacatatttatatgaactaagttatgcaagaaaaattattgcacgaaatcctattttcaaaataaaatattcttctgtctaaatgtatataattccttatttcttcatcaaatcacgttaactgacttgctcaaaaccactctgcctcttaaataaggtgtaacatcatacactaacaatattactgggtttgacccaggaacattagtactgacatagggtttgtaaaaactatttcctacattaagaagtgctttggaggaaactagatttggggattcattttacattctt

SEQ ID NO: 144758 - DNA, 819 bp, Homo Sapiens
  misc_feature (197)..(435): n is a, c, g, or t
  misc_feature (743)..(777): n is a, c, g, or t
  misc_feature (780)..(780): n is a, c, g, or t
cagagttgcatgagctggatcgcaccattgcatgctgcctgggcaatagagtaagcctccatctcaaataaataaagttggacccctaccttataccaatataaaatttactcaaaatggatcatagaccaaacataacactaaaatattaaaatcacagaagaaaatataagtatagccaggcacagtggctcatnnnnnnnnnnnnnnnnnnnnnnnnnnnnnnnnnnnnnnnnnnnnnnnnnnnnnnnnnnnnnnnnnnnnnnnnnnnnnnnnnnnnnnnnnnnnnnnnnnnnnnnnnnnnnnnnnnnnnnnnnnnnnnnnnnnnnnnnnnnnnnnnnnnnnnnnnnnnnnnnnnnnnnnnnnnnnnnnnnnnnnnnnnnnnnnnnnnnnnnnnnnnnnnnnnnnnnnnnnnnnnnnnnnnnnnnnnnnnnntgacaagagtgaaactccatttttctcatattccttccaataatttgttaggaggtggacctcagccagccccccagctcagtggtccagaggctcgggtcccgcgctgacgcccagcgcctccctcctccacagccgtcactgaccgctcgctcgcctctagcctggaccccgctgtccagcagtcccggctggcccgcgccgcgctcctcccgctctggcagtcctggcactggtaggacgcccgcagccttccccccggccgtaatggccgaattcccgggcatatgtccggtaccgtcgactgnnnnnnnnnnnnnnnnnnnnnnnnnnnnnnnnnnncgnccgcttcctcgctcacacactccgctgcgctcggtcgtt

SEQ ID NO: 144759 - DNA, 543 bp, Homo Sapiens
caatatgaggggtaagtattaggaatcagatcaagataaactggggcctggtaaagatgaaagtcaggtggtaaagttcggtcatgtttagctttttattctcttcattaagatcaactaactttatttaccataatgattgtagcataggtgatatctccattctgaatgaaatgttgacttgcaagttaggcgtaaattagagattgtacatttgccgtgttcagtattttaaagaaatttgccggtttagattctaccttgcattggtttagtattttttgagaaaatatttgctatttacttaagccaaatatttacttctgatttgtttgctgacttagcaaattagttgtggtttgttctggatttgggtttgtctttggattctattttaaatccctaagtcttatcattacattgaatgtagttgaatttaagtgtactatatcatagacacagatcccaaactactttaatagctatattatatgaaatggtaatgaaaacgtgatttaatacccaattatagtattatcttcc

SEQ ID NO: 144760 - DNA, 509 bp, Homo Sapiens
tgagagagtaccctctttattgtgcacccctggtgcaggcacttgacacccaggcttccctgggcccctcgaggcaagaggtcaccccctttccagggcagagccacacccccaactcagctctgggcagggtcccgtctccgaggttactggatcagctccatcctgggacaaggaaagaggactgacccacagaccagagcacctcagatctccggctgcagggccacaacggtgggcagaggtagagagcgggccagggtgcagggcagaagtgtccgagtccaagtccacatccaggtgtgctgcctgccctagcgtcctcaaggcgaaagcacaccacccacccacccccagccttcaggatgctgctgtgggtcccacatccaaggagaaagcccctgcccatgctcatgtggttgccctttggcccactggagccgccagtctgaaacacccctcaaggcatcaggaaccgaggagagggaaggcaacagcacacccacccc

SEQ ID NO: 144761 - DNA, 899 bp, Homo Sapiens
ttttttgagtatttatctttgtttttattaaattattatgcaacttaattcttaaaaatggctgtttgacaactcacaaaattcttgaaaatttaacaattggtcttgcaaaagaatacagccaactcacttcaaaacctctcagctgaagctcccacccttaattggaaattctttcctttttgtcttagttcaaaagacaataagccccactcatctttttaagctacagaaatcacaggttgctgaccagccaataaactggttgctttgggtgaggtgctctccctgcctgtggcttgcaggggaggttgacgtcaaatgatatcaaacatagatgtctcagcagcagttatgggaggtgggagagatacaagctaacctaggacaaaaagttactacagatgttaaaatcccttggccctatgattattccaactacaggccattatgaaaagagaagctcacagaaatgacaatgagccatcaagaatgggctaaattgtaattaatatactatgtttaagaagatgaagtgcctgggaaaggatcagctatcactcatgcgacttcctccttgtagtatgccttcctgacaacgcagaagttggaatactggaattctgtgttttccagactcctttatagctagtattctggatgcgaatctgattccaccagttaagaatgcaggaccacaagatatggaaggcagaagtaatgcagagccccagatggcctagtagcctattcagcagatttcagcgttgtacacaagtatcatgcacatgtcagtatcagtctccagctggtgactgctttctcaggtcgtgacacgagtgcctcgcaggattgacgatgcagcaggttgtgccttttggtgagcccctagcagcgtc

SEQ ID NO: 144762 - DNA, 672 bp, Homo Sapiens
tttgcaaattgatccacactcaatttattgtttctttcagctgtgaccacggaaggaaagacagaattttcatttcttagcgagactctcgatgttatccgttgccttctgaaggaatcactagttactactgctttgtgtttgggtactgtcctgtgatttggatctgctagtatatgcttcagcactatcttctgatttggatttgctagtatcagcttgactgctgctttctgatctggtttggctggcatatgtctgagtgctgccttctgagctggattggctggcatatgtctgtgtgctaccttccgatttagattcgctacttgggaattcctcttccttggcgaaccactttttcaactgtttccttgccaaaactattgcggttgttacaatgagaataggaagagcaatgaggaaacctagaagccaggtgttttcagtcttcccagatgctctttccatgattgaacccatatcttcctcaggaaatatggaaaatcctttggaacgtatttggcagtttggaggcttatagcctggcgaacaatggcacttgtttctggaatcacacactccatgtgcagaacactggtgtgaacaaacatgtgctgaacccttaattattcttgattctacacattcacaaggtacgcaagccctccc

SEQ ID NO: 144763 - DNA, 498 bp, Homo Sapiens
  misc_feature (71)..(71): n is a, c, g, or t
  misc_feature (81)..(81): n is a, c, g, or t
aatacctgcagcatggagccgagggcagccccaaggcccagccaaagccgctgaaacatgagcagaaacancaccctccangcagcaccaggaaacgccgaagaagaaaacaggctatggtgaactaaacggtaatgctggagaaagagaaatatctttaaagaacctgagttctgatgaagccaccaaccctatttccagggtcctcaatggcaaccagcaagttgtagacactagcctgaagcagactgtaaaggccaacacctttgggaaagcaggaattaaaaccaagaatttcattcagaaaaacagtatggacaaaaagaatgggaagtcttatgaaaataaatctggagagaatcagtctgtagataagtctgatactataccaattccaaatggtgtggtaacaaataattctggttatattactaatggttatatgggtaaaggagcagataatgatggtagtggatctgagagcggatatacaactcc

SEQ ID NO: 144764 - DNA, 854 bp, Homo Sapiens
  misc_feature (32)..(32): n is a, c, g, or t
aggggggcccagagggcggcccccacaaaggntttcggtttacgatcaccgtaatttattgggaacattcggccccgggttctaccggtgagggtgcgattgggggtggttgggggtgtccgggtttgcgcgctgggaggtaaagaaaggccgggtttattagataaagtatgaaaataccttgcaaagggtgcaacaggcaggtcagcaagagagaaggtgactgctaggaaacaaaaggcttgctggggattttgtagaatggtgcttatgttgtgggtggaagagggctttgtgcagtactaataatgccagggttgcagtgaactaacttccatttttctatcagctgagggtctggtgatggctgggcacaggcagattgtgagttatttgcacagcagggctatgtgtcctggaccacgaagaaaggcagacttatggcttgtctgctttctccttttgcttcccttcgtccagccagcctgactccttttccctaattaggactccacacgcaagggtttgttctgttccagaatagagacaggtcgatgtatctatctttataccagtactatagctgctacttcttgaccaattacagctttagtatctctctcacctgtcctccctatacaaaagatatataaaatatactcactgtactgagtatcttcctgcagcattcagtctggagcaaagcctgcttccttcaaccctttccaaaatccccaaataaaagcccaaaatctgtagaggatcttcctaacatcctcgtgctgagatgccctgaaattctcccccggccgtaatggccgaattcccgggcatatgtccggtaccgtcgactg

SEQ ID NO: 144765 - DNA, 326 bp, Homo Sapiens
ataataaaaactcacaaaaaaacacaaccacaaccttgcacaaaggccatcacagccttacacagaaaatactggcagtaagtgcctctccatcctgagactggcatcacccttgttactgattttgtggccaatcttatttcaaaacaattatgtaatccttctcatttttttctttaaaaacctctgtctttcctttacgtctcggagaacacacatagtttactttggcatgtacattctcattgcagtgcattatttccatataaacatcttttattttagagagcctgtctgttacttaggttgacaggtcctgttttatt

SEQ ID NO: 144766 - DNA, 380 bp, Homo Sapiens
acagtctctataagctggccaaaactggctggcttgaggtctatggctatttatcaggaaagaaagtaaggccaattctctgtcccatcagaattgtggcaggaccatggtgggcagccagcagatcggtcggctggtgtcaagtagtagtctatcagggtcaacaggaaatttccagctgtagtttctgtgatgtttttcaggacctggtttcagcctctctctgactctgtccttgcggagggaccgcctcacaggacagagccccactggccccaggagccttgcgagctggtcctgcggggctgctctgccaaaccaggtcggaaaggaggggccagccagagccctaagccagggcagccacagacacagcctgt

SEQ ID NO: 144767 - DNA, 749 bp, Homo Sapiens
  misc_feature (263)..(272): n is a, c, g, or t
gaactaacagtgaaattcattgatggccaacttggataaaaatgaagaatgatattttcccagtttactacacatggaccaatagtgattatttgggagagaacactgggtagtattgtttgacttaagaaccttaaatatattgaaaagtaatggcattcttgctcatgatttgcatttgttagtgaggtctcaccatagtattttaatgtagcttcttattaaaattttattcataaatagtttagcagtcacagaggtgnnnnnnnnnngatttgcaccatcatatccgagtctttactaataaaatgaggctgcttaagtacccaagtggagcaagggaagagttactacagttactgtaagtctgagttagaaaaaatacagagcatctagttattgagcaaagcccccttttacctgttcgcttattcaaagagaaacaatagaatttgcttctcagtacatgtttttaaaattgagaatctctgatgtgacaaaatcaatttttacaaaagttgaattaaaaacttttaaaaattgcttgtctttgggggtatgtctacatattcgtttaaatttagaaattcccacatgtttaagatatatgcccatcccctttttagagtaatcaaaatttctatcacagttcacatactggaatacatagtaaaattgagatgtgtccaagagattttcaatgttaattagctcattctaaatagccaatataaggtaaccttctgttt

SEQ ID NO: 144768 - DNA, 626 bp, Homo Sapiens
tttaaaaataatttattaatttgatctcttcatttaaagataatatccaatgcctccaagttcccacccaagaattctgttggatagggctggaaaagttctggagaacattcttccagactctctaggcatcatgtcacaggatgtcctcaccacagccagaagagtgactctgagtatatgaatgaggggctacagtggactgtgcagtaccttttccttggtcaccattgctaagcacatgctgcagcctctccctcaggcggtcattgagactgatggactcctccaggcgctggcgcaggttctgtatctcagcaagattcttttccagcaggtcggcccctacagaggtttcggagttgggttaactcttgagcctgatcctgaatcaaggaatgatacttctggttgccaggccgaggttgtccgccttgcctgctttggctgagactggagacggaaactccattcaacagcgactggaggactgaaacggcgcaagagggcggctgcccttcacctactggtccctccctgccttggcgccttcggagttcggactgacccgggatgttgctggagccgagcttcgctgcaggtcacaggaaaggggtgcagggttg

SEQ ID NO: 144769 - DNA, 389 bp, Homo Sapiens
tttgatgtgaccaaggactttaattggaggcggctcccccccacggtggctttttcagaagctggagtgactcttggtggtggcacagggatggctcagacgtcttctcctcctgcaggggagtttctgaatcagtcttcatgactcctgtccactgccctcttcctcatggaagcccagcagctgtgcagccgcagggaccacgtgggtgccgccggctagaatgctcatggcctcctaaggatgcacgccttgagcatcatgcggttgtcataggggaggcgtggatgtctttttggtacagcatgaaggaccgtggatgatgctgttcgaacattcttggattgtggaagccaacagtggtggaagacccctcgctggtcttgcgg

SEQ ID NO: 144770 - DNA, 704 bp, Homo Sapiens
  misc_feature (219)..(319): n is a, c, g, or t
ttgtctctgtctgcagcgtgctccctgtgccacccaggctctggcctgaatctgagggcttcagtcttatccagcacaggatgtatctgtaggtgggctctgtgtccccacagcctcttgagagggagggagcctggtagatagtctcccacccctggcagagtccctgcataggtcttgactagctgcctctgtcccaccattctgacagcccccgcnnnnnnnnnnnnnnnnnnnnnnnnnnnnnnnnnnnnnnnnnnnnnnnnnnnnnnnnnnnnnnnnnnnnnnnnnnnnnnnnnnnnnnnnnnnnnnnnnnnnntctgtataactcggagctcagaccctggctcctgcgagggccctgcctcccgcctgccctgccagcctgctcagggcatgggagaaccccccagtcttctgccccctagcggtcctgcagatccctgtgggaatctgggccagccccccgacccccaaccccatacatgcgcagggagctcctactcccactggaagccttcccgccagtgccccccaaccaccacaggccctagccttggctgttgtgccctgggagcccttggtgacctcggggggcaccttcatccctgtcttcactgcagctgtcccccgaggcagcctatgatgtgctgagcgtcgccgacatgtacctgctgccaggcctgaagaggctgtgcggccgc

SEQ ID NO: 144771 - DNA, 511 bp, Homo Sapiens
tttgcaaaattgtatgttttccttaatggtggtgggtgcgggtggggatattccagcagaggtgagaggggcgagtgagaagggagctaatattttgttgcttccatgagtcacatgcttcccttatgggtcctcacaacagtccagcgagttaggtttgtgtgtacggttatggaagcggagggtcaaagaggtgcagggccttgtccaaactcacatggcttgccagtttcagagcaagaatcgagctcatacctttggaagccaaagcctgtgctccgccgctgtccattgaagctcccgtgccaaaaagtgctcacaggccagctgcggacaccccagctcccagaagccttgccacaccagcctgccttctaagccttcttcccagtgttccatactcagcccatctcagagcctttgcatttgttgttccagctacctggagtgtcttggtcacaagatcgtggcatggctggctcctgtgtcacctcctcagtgatgctgttct

SEQ ID NO: 144772 - DNA, 415 bp, Homo Sapiens
agcagaatttctttaacagaacttctagcagttctagtggtatgccaggggttgcgctgctgggaagggctcatgagctacactacacccaacctggtgcccctctcaaaactggagcccggcaggcttctttccagctcaggcaggtggggaagaaaagagcacgggggctggccgggagcagccagggtcagccccttctcttggaaacaagggaggcagtttgtctcccttaccagctccctcccctaaccacttatccacagccatccgtcatgaccttttcatgctcccacttctgacagcttccagatacagtgagtcaaacttcactggaagcaaactatcacaccaactgtcaaaggcagaaaacattgcctgattgctgtcctacatcaacgccagcatataaatc

SEQ ID NO: 144773 - DNA, 545 bp, Homo Sapiens
ttttttttccgaaaatactttaatgcgaggtcctcgtgtgggtcgtgttttggagagataactggccttggactggagggtggctgccttcttcctttgccaggtcatgcgaggggctgctggccaccccatgcacatgcccctgcccctccatgtcagatgcgtgcccctcggggctggccgtgtccgatgcaggccccttccggctgttgatcttgatggcggcgcgcagcgccgacttgaccgccgtctccacccagccgtgcgggtaggcggtgtgctcgccggcaaagtagatgcggccataagggaccgtccagtcatccttttcggtttgccagagcgccggcggctgtaccacaaagccaccctggctgtgctggtcctccgcccaacgcttgacgactccggtgccgtcccagagctggcgccacgacaggcccgtgcattgccggcacgttgtcgagcgccaagcccacgctttttcctggttcaagcgggcaacgcttgccgccgggtccaacaccttgtccaggccagcaaca

SEQ ID NO: 144774 - DNA, 766 bp, Homo Sapiens
  misc_feature (244)..(244): n is a, c, g, or t
tacttttatctggcagtcaaaccccccctactgtgggcccgtcctcaggtcagctgccgtctttcagtgtcccttgcatggtcttaccatctccacctctgggcccttttcctgttctctattctcctgcaatgccgggcccggtttcttctactcttggtgctctcccaaacacaggacctgtgaatttcagcttgcctggccttggatcaatagcccagcttctcgtcggccccacagctgnggttaatccaaagtcgtccacactcccttctgcagaccctcagcttcagagtcagccctcactaaacctaagtccagtgatgtcaaggtcacacagtgtcgtccaacaacctgagtcccccgtttacgtgggacatccagtctcagtagtaaaattacatcagtcaccagttccagtgacccccaagagcatccaacgcacacatcgtgagacgtttttcaagacacccggcagccttggagaccctgtcctgaagagaagagaaaggaaccagtcacgaaacaccagctcggcccagaggagactagaaatccccagcggcggcgctgactaacctgccgctttgccaggtgggggtgggatcaaacgccctgagagtcccggatgtccgaggcgggatgcaaaccatcccgtcctgagcacgggtccttcctctctctttcatccacacttctgttaacttcccaccaccatcaatcatctgatttcctgaaagtaattaattgtgcatttaataccaaa

SEQ ID NO: 144775 - DNA, 407 bp, Homo Sapiens
tttacaacctaagtttttattctcaaactagttttactctgttttttccacgttccactttctggtaatttcaaatcatcctttcttcattcagtttctccctccacctttttttcttccattggggtattttcttgaagaaactgtagccaattctggttagtttatttggtgctttcatggagaatgttatctggtggatgttaatgagtgatccttttctttaccgcaaaggagatgtgagcacatgaccatggtacccactgtttctatcacaaaatgcaacattcagaagcttccagcatgacaagcaatgaaaggtaattctaaaggcatggctgagacaaccccttaaagatgataccatctgacgatagggtgccctgctccaggatgaggttataccc

SEQ ID NO: 144776 - DNA, 473 bp, Homo Sapiens
cttggagttgcctgacactgaactcctgtcccctgaagccggcccagaccatggggacttacccctcgacaaccagaggacttagggccagccctgcgtgaactgcaggggcaatggatggtaaagccctttggctcttggcaggcagactttccaggaagaggctccatgtggctcctgcttcactttcccacccatttagggagacaatcaagctcttagttataggtggctcccagggtctaattggaggcacctggctggggtccactctgaccctagacttgcctaaaagagctctctaaggggcagcctcttacgatgccctggtgtctttctcctgggcttctatccctgtgaggagaggtgctgtctgctggagcctctagtccaccctctccagtggtcactcttgagtcacatctgtcacttaattatttccttctttatcaaatatttattgctcatctaaa

SEQ ID NO: 144777 - DNA, 520 bp, Homo Sapiens
ttttttttagcagacctggtcattcttttaatggaaggggtatgcattgttgcaccttacaagcctgtaagcccaaagagatttcaagttgaatattaagttggttttctttgagttcatagtggccctcaataaagacacgggaatggcagctgtgccagcgccaatagacctggatgatgcggacagcgttgagcaaacgacagtaacgctggcggacacaccacatgcggacccaggactgcagcctgactgctgcccattcctgctgcacatagaactccaacaccatcctccgcctctttgccagcagcttctccagcacctgcctccaccagcactgaatgatccaagccctgagggctgcatgcagcagtgtgcgtcgcaccagcatgccccgccaccaggcctggatgaaaacagctggagaacttttttgtcatgatggtcttctcttctgggcccatggttaggggctagatggtcccatcaccctccggcccgcactcctccgatcagg

SEQ ID NO: 144778 - DNA, 477 bp, Homo Sapiens
aaagcaaagtatccaatttttattgattctataacatatatatgtgcatatattgtagtatctttatcaatcaggatttacttgctgataacagaaaccactgcaacctagtttagacacaatgtgcttttgttagtttctggccatgcacagaagcctcctgcttacaagatgaatggaaaggctgaaggagcagcctttagtctgacttccaggaatgactctcagaacactatcacataactggctgtccagaagagatgctatctctgcttacagcctggaagctggaaagtcatgaagatgctgcccattgctggctccagagccacattattttagccacaatccccaccagcaaaatggatgctcctcgtcctgccacaccacaccctggggtctctgttattgctcttctagaaaaataaaatgctctgtggctgtttgttggcagaaacattacctctatctcatttg

SEQ ID NO: 144779 - DNA, 382 bp, Homo Sapiens
tagcacatttgcccttgtttggtctctaaagatggagaccctttggttagcatcctttttatgagtcaagctaatatacccacagctcaactttttgttcttgagcttgaatcacatcactggcaatcggccgtagggttctgctgcttggaccccaaagacaatgacatggaaaaactccagcttaattatgttcttttttgtttgtatatgtaaatagtttttaggaatgtagattattattttgaaatctgtggtaacaaatgtgaaaaccactacattttatttattttcattgaatagcaaataatgttgaagcctgggatctaaaaagttaaatattattttattttgcttaataaagtattggaaaatttagaaa

SEQ ID NO: 144780 - DNA, 478 bp, Homo Sapiens
  misc_feature (366)..(429): n is a, c, g, or t
aaaggaaacacttgaacaagtcctaaatcagacaaattgcacaaaagagagagaagaaaattgtaagcttcctgggagaggaagagatgtccatgagaaaaccaactgggatgagcctacaaaagcatgtccctctctctcctaatttacttagtctcaactgagcccaacaggagctggcctctgtcccagctgcaggatgctcccaaggcagtgtccaagagcctggaaggcagcttttatcagcaggttcagtacagcaggaaaagccatcctggcaaagagtccagtggtcctattagcgtaggctgctgctgctgctggcctgggagctgcccatacctgggtggtctggactatgtcgannnnnnnnnnnnnnnnnnnnnnnnnnnnnnnnnnnnnnnnnnnnnnnnnnnnnnnnnnnnnnnntcttcttcttgtgatctgaatcagatggtgtttctggggggacaggatc

SEQ ID NO: 144781 - DNA, 1270 bp, Homo Sapiens
cggcgattcccaaacgaggctctgcacggctgtgtacacctgagcgagacgctcagtcgctctctaaagccgcttctgcggatgacagacacggagataaacgtgagaggtggcccaccacgacttgccctcctttgcccgggtttgcccctcgctgcggaggctgttctacatctggcccttggagcaggccggctgacagcgtggtaaaggaagatttctgcgggagggcggccagtgcaaaacaattccctgaccgggaatcgaacccgggccgtggcgctttcagcaccgaatcctagccactagacaaccatgcagatgcggaaagctgctttctctcccttcttcgacctgaagcgacactttcctgtgctctaggaggacttgggtcttgtgagagtcgccctttgctcctggagtcgtctcacaaggccgttcactccctgctttcttcaaaaaaagaacctgcaggcgacacaccaaggactccacgagggagtccctgagtactggagcgagttgcggccacgcggccgcagctcaccactggcctagagatgccctttgcgaggcggcagcaactgacaagatggtcgcgggtcgccgggtccggagccgcccaccaggttgccaggaggaggcgggagcggggaggcgcccgaggtgagacgggggcaccctctgcatcataaaggacccagaccccggcaccctcaacatcataaggaatcagacggatgcggaaaccgaggcgggctggataggaaactctttccaggaaggctccggggcactcaactggtctccaaccttcccctgcaacctgtgacgcctgccattttcccattttaggcgatggcaacgcaacccctccgtttgctctgggcaaaacttcgagagttccctctgaagctggagctttttcctcagatccaagatccaattggtcaccaattcgtgatttccgtcggccaagtgcgtgggcattgatctacacgcgagtctctccacctctgcggaatggctacttcggggtaggggaggggccctcccgtggattgtaaggtgtttagcagcagccgtcgcctccgctgactagatacatgccagggggttagcattctccctccccgcttcccccattcgtgacctagtgtcccagcgtggaggtgagaggcgtgtaagggcaaagttgccccctcttgagaaccactgatgcgcgttgtcctgctgtctgagcttgtgcagaggactctccagatgaagg

SEQ ID NO: 144782 - DNA, 345 bp, Homo Sapiens
  misc_feature (247)..(267): n is a, c, g, or t
tttgctggcgtcttcagagccctaggtcacagggccagcctggcgccctgccgcaagcttatcttaagctgggaccacaacatgcatacctgcagccgggcccggggccagagggctttgaggcagcatttctcagccttttagacacacactctgttaacccccatcctgtgtctctgataatcttcttgtgatcctcccaccagccaagaattgggttttatgtgaaccttgtattatgcaaagnnnnnnnnnnnnnnnnnnnnncactcaaatataatattgagaatagaaagaaagtcttttcaacaaatggtgctggaacagatggatttccatactgga

SEQ ID NO: 144783 - DNA, 546 bp, Homo Sapiens
  misc_feature (204)..(225): n is a, c, g, or t
tttttagagaggtgtttttattctttggggacaaagccgggttctgtgggtgtaggattctccaggttctccaggctgtagggcccagaggcttaatcagaattttcagacaaaactggaacctttcttttttcccgttggtttatttgtagtccttgggcaaaccaatgtctttgttcgaaagagggaaaataatccaaacgnnnnnnnnnnnnnnnnnnnnnnaggttcaggggcacatgtgtaggcttgctatataggtaaattgcatgtcaccagggtttgttgtacagattatttcatcatccagataaaaagcatagtaccagataggtagttttttgatcctcaccctcctttcatgctccgacctcaggtaggccccagtgtctgcggttcccttctttgtatccatgtgtactcaatgtttagcttctacttataagtgagaacatgtggtatttggttttctgtttctgagtgagttcatttaggataatggcttccagctccatccacgttgctgcacaggacatgatcctcgtg

SEQ ID NO: 144784 - DNA, 523 bp, Homo Sapiens
tagtaaaggattttattccataacagtttaaatatttatagcaaaatattgcccaagattggtttaacatacctcttttttatcacagatatccctgtgatcgtttcactattggaacatgcagcttttactcatgtattttgtacagatgtatgacagattttacagcatatgccattaaaacagtcacatataaatgttacaggtgaagtgtgtatagctcatgacatattctgaaaaatatcaactacttacatctgtgttttaaaaaactaataataaaaatagtacaactttacatctgtatagaagtttaggtttacaaactactttaaaagccttcatatgtattcaaaggtacctagaaaggggaagtaattgccctgaacataatacatgtgtgctcacatacatggtggttcacattcacaaggatctcctccagtagggcagacactgaatattttaaatgggaggccaaatttatgacacaggaaacaccataaaggcctgaaagaactca

SEQ ID NO: 144785 - DNA, 711 bp, Homo Sapiens
tttgcattttaatagctatttatttttgtgtataaagtttccaaacttttgcataaatcctcgaaacttgttctcattgggttgatatgagcgataaacaccagtgttgtaattaagcaatggactagacctgccataactgttgcccatagtcgcagattttatttctgggcgatttatactggtatttggcatgttgcttgttggctgaatagagctctcaatcttacaaaacggctcaaaacgactgtaaacacgccgatcagttgaatgagatcgtagaagctcactggacgttggccttggagaagaagtaggtcttctttcaggggtaacaactgcattaatctcccttgaatctcggtattggatctgttcagtgttaaatcttggggcagaggcatctccatgccctattccaagaacttgctttcaactggacctggagaaggtgttcttttattttcatctggatggagcatttatactcttgagatgggctaactggttacatcttccttactctagtggatgctgccattgagaattcgatgaggaagaatgctttcttatacggagatgaatcaacttttgtgtctcgatttcatgtggtttttgattttcttcaccctcagaaagtaatgtgtcagagatactacacaatctaataaaggcagatgccttcgcaatgacacagattaaggatcctct

SEQ ID NO: 144786 - DNA, 676 bp, Homo Sapiens
  misc_feature (542)..(542): n is a, c, g, or t
  misc_feature (646)..(646): n is a, c, g, or t
cagtgtgaccctgactgggcccgggccctggggcttccgtctgcaggggggcaaggacttcaacatgcccctcactatctcccggatcacaccaggcagcaaggcagcccagtcccagctcagccagggtgacctcgtggtggccattgacggcgtcaacacagacaccatgacccacctggaagcccagaacaagatcaagtctgccagctacaacttgagcctcaccctgcagaaatcaaagcgtcccattcccatctccacgacagcacctccagtccagacccctctgccggtgatccctcaccagaaggaccccgctctggacacgaacggcagcctggtggcacccagccccagccctgaggcgagggccagcccaggcaccccaggcaccccggagctcaggcccacctttagccctgccttctcccggccctccgccttctcctcactcgccgaggcctctgaccctggccctccgcgggccagcctgagggccaagaccagcccagagggggcccgggacctactcggcccanaagccctgccgggctcgagccagccgaggcaatataacaaccccatttgcctgtactcggcagagaccctgagggagatggctcagatgtaccagatgagcctncgagggaaggccctcggtgtcggactccca

SEQ ID NO: 144787 - DNA, 399 bp, Homo Sapiens
ttgttttagaaagctcttttattttcagttctggctgtgttcaacatcttagcttacgtttttcatgttgtaatgatctgccgtacggacgatcacctctaagttagagagttctgtaatttggcttggattaaagatgcttggttagtgaaagctgctgctttttttatagtcaaaggactggttctgagagccttgttgcagatggctgaggtcaccgtcccaagggtgtatgtcgtgtttggcatccattgcatcatggcgaaggcatcttcagatgtgcaggtttcaggctttcatcggaaaatccagcacgttaaaaatgaactttgccacatgttgagcttggaggaggtggccccagtgctgcagcagacattacttcaggacaacctcttg

SEQ ID NO: 144788 - DNA, 513 bp, Homo Sapiens
tttttttcttttactaatgctattttatcttcaaaggagaattatatataaccttgaggaggggatgaggtttatcttcatttttttctgtttctcctcctctcctcccttttttgcatttgataattgcttagaataaaggtatggaaagtagatcccaatttcagttccccttcacacgctgtgcaaacgtggacaaacaacctctgaacctgtcacctctcagtggaaaaagtggtgataacgtcccacctcagaattgatgctcaaaatgaagcagtatttgtgaaacgaaaatacacacgctcgtggtacgccagatcggtgtttacgtcctcgtcagtgaacgcgtcgatgtttaataagaagggcagccaatcaacacttttcttgtctttttctcgtctgccttcctccaaggactgtgagggtctcaagatgtgtcccatctcggttgtttgtcaacctagtcctgctatgtcgtggggactgagcaggccgactcctccccca

SEQ ID NO: 144789 - DNA, 655 bp, Homo Sapiens
tttagataatgacattatttaatcataggagttcactccagtataccttttctgcctttgaataaggtatgaaccttcacaaaaagctaccatcatcattaattgggaatgtctccagtgtgaattttttggggcagattaagtcatacttcttggctcaagaaccagatgggatcctgaggtagtttacagaagacacagttctggtgtacagagtataggagactttaataacttcataatgtctggtataaatgatatacctaaggctatggacgtctctccagcctaaattcccaaaggtacagtaagtctgcactgaacatcatcaataggttcttaggaactgcaactttaagtgaaatgatgtataacaaaaccaattttaccatagactaagggatacaaacaagagttaagttcctaaggcaaatgtctggtcacaacatcatcaaacttctaaagaccccaaacgcttccaatatcagacattaaaataaatctgagctatatacacatttaagacggattaataaaaacagataagataattatttaccctgttattccagtacagggccatgggtggacagagcgcatcctagcagctcagggcaatggtgggaacaaaccctgattaggagccattccactg

SEQ ID NO: 144790 - DNA, 486 bp, Homo Sapiens
ttttttaaataaagacatctttattgtctcttcccaaagcacacggtgtttctaacagagcttcattcattcccaggcaggctagagagaggacagaggtggagccaagacgacatagccaggagtagaaaggagccaggtggggcaggggtgccagggagggcagctggagggcgggtctcagggagccccagccacagtgacgaagatgtccttgtagcctttgatctccttgacctcgttgctgctgatgagaacctggagctggcggggtccagctttggtcgggtagaggtccagttgaatttggagggtgtgtccggccaccagagtcccaaggtcctttgctatctgcccattgatgaggccgcttccttccagcaccatcgtgcagctgctcagagccaccattaaggtgttggtgagggtgacatggactcttagcgccttgcccaccttagccctgtcaaacacctgtgtggagag

SEQ ID NO: 144791 - DNA, 660 bp, Homo Sapiens
  misc_feature (616)..(616): n is a, c, g, or t
tttgtagagggagggtgggagtgttgaatgaagcaattcaacttagaatcaaattttgtaaacaagagttagtagcacagtggcacagtagattgtcaaggaaaacaacaggagtgggcacagagtcatcggccttgcctgtgcggtcttgccggctaccgggggggactctgcagctcaggagtctactttcttgttaattaaaactgagcagcaggtgagcagcccatccaccttttccagttcagacatgctcacggggatcagcatatggtccttcagtttctcataaacctttgcactttctggatactcttccggggttcggtgcagcaagacgtgccctttgttggggatatttagatatatacagtttgctgctatgtcatcaggcacagtgagtttgtcgtagcggtggtcactcatctgttgcatgatcttaagggccttctgtgcagattcactagacccaattgcgatcaggttaggcccagccatgctgcagaaactctttcaaatgcacccatctgccactggcactgtggagactgcatattcctttaaagtatcagccaagatttcagcaccttcgttgattggcctttttgaaaggccncaaaaaattctctgcctgtgattaaactcttcgccttctaaagt

SEQ ID NO: 144792 - DNA, 441 bp, Homo Sapiens
ttcttaggtttttctgtactcttcaaaatgtctaaaatacttctgagctctttttacaagcagagcaacagtaataaatatcattttttaaaagggctgagtgcattggcaggagactggaattcttatcctggcttgactaccacttgctatttgaccacaggcttgtcaccttagatttcgtgagccttggtcctcatcggccaaatgcaataaccagctgttccatgtgctccatgggtactacgtgggcctaacaaggctaagcactctgtggcctctaaaaatgtcccaagtgacaccaagacacccacatggactcgtgcagccgagcccctccctccacccgccaccctcctcccggtctcacctgtggtgaagggcagggtcctggcaggggtctctgagctggagaggactcgggcctggctggcaggctct

SEQ ID NO: 144793 - DNA, 973 bp, Homo Sapiens
  misc_feature (38)..(38): n is a, c, g, or t
  misc_feature (167)..(167): n is a, c, g, or t
tgcagacccccagggacttaggtctggaggagaccttntcggggcgatgggcatcaggacttatcctgaaaggcagccaggtacttcaggatccccccatgggggggtccagacctccagcccaggccacattgacattgaagccctcaccgctgccagcccctacntcatccacagccccactcccggggaagaagttgccgtcgtcatggcgatgcagggagatgtagagcaccactggggtcttggtagaaggtttgctgggtgccgttgccatggtgcacgtcccagtctacaatgaggatcttgctggccttgctctgctgttgcagctgccggcaggcgatggccactgagttgaagaagcagaagcccatggctgttgaatgatctgcatggtgtcctgggggccgcaccacagcgaaaccattctttagctcacgagaagccactttgaaggcgaggtcagtgacactgccagcggcccagcgggctgcattggaggaatgaagctcattccagatggtgtcagtgtccaccccaaccccaccacagggcagcatcacaaacatccgctgtgccaggagccctgccagcttcccgttgtccagtttgaggcggctgagcgggttggtgccgtagaggagcacgtgccgctcagagtggaccgactgcagctcttccagggaggccttccggcctcggagacactcacactggctccggagcccccgctcctgcagccgggaccagatgctctggatgcggccggcgtgctccgggtgcctgctgttgtcaccgcaggagcactggtgcttcagcatgaccgagtcatagatcagccctgtggtgaagggcagggtcctggcaggggtctctgagctggagaggactcgggcctggctggcaggctctggggctgacagtgaggcaggtcctcgtgccgaattcgccacccaggctcgtacctaga

SEQ ID NO: 144794 - DNA, 428 bp, Homo Sapiens
ctgatatttaaagataatgaagttttccacatattgaagtattcaagacatcttccatccacaaaaatttatctttaagttttgtaaatatcaagtaagtatagatgatatttattttatatattcctatggaaaaaatgctactttaatgttctgacatttgtgattatttgccagtctttactttttaacttattaaaaagttaaatacttattaaggtttctctatgtaaaacaatttaaattgtcttttgatttttagggaaatatctaaacgtgggaaatttccaacgcaaccttaatattaggttgtgttatttatagagctaaagttaatgcatttttgaatttctcaggagcactgcaaggcaaaaaaatactccaaataaaaatgatatctgtaagttggcaatgtcttcagtcccaat

SEQ ID NO: 144795 - DNA, 437 bp, Homo Sapiens
actcttaaaaatttattaattatggcaccgatgcccatgaaatatttttaaaaggatgagtggtttgtgggttggtattcgcttattagagagatcaatgacatgtcaaattcataatctttttagggttaaagaaatacggactaaacataaagcagaatctaaatagttatcttgtaataagaaaagatattagagtaaattcaggtagaaatcggttgattgcgctgaaggaaggatggatcttattcccagacagaatgctgaaatcactgtacatttaggaatctggaaacagcctccagggtgaacacattgccttcctcaatagtttgatggcttgaaagaattgttgaagtcactgagctgaatactagagcttgaaatttcaagtcctgttatatctttagagtaggatcaggtgagcagccatacca

SEQ ID NO: 144796 - DNA, 549 bp, Homo Sapiens
tttgcttactaatagctttgttttattattcagttaattatttcatcttttataatcatacaataattctcttttaaacaacactgttatacctgaagatggtcatattatattctttcttccttctgcagtagtaaagtgtttttcttcatactcagtttttttaatagaacatttgaatatcaagaagtgtagttaactaaaaaataatgaacggaccaaactccatggaaaacgattgcacactcaattaaaagtctaatgctattacagtggttcatgtacattcaagaggaaactccagaggtcttggggacatgggagctgggagagtgttggtgggatataagcacctcccttaagacctgtttggcagcttgaaaactcaaggttgaataccggtccagtaccatcaccctttctagccaggatgggttccttcaggtaagcattaggaaaagtcagcaggttgagatcaatagtgtcttccaaggggaaaaaatcctccagtcaattgtacaaccatcctaagattttcccctgccctgt

SEQ ID NO: 144797 - DNA, 451 bp, Homo Sapiens
agtgtgagcttgcttcttttgtacacaaaatgaataccttgcttaagcttttcccatgctccacggtaagcctagaatgaaaatggattaccttctttgggatgaggtagttggtgagagccgtgtgaacttatgggagaggcagaggggagaaaacagctgtcccccgcactcactgaaggaattctccataaatgcgtcactttcatcactgctagaaagctcttcccattcgtcatcagagggatctgggaagcgggcaaaccacgcagaactggaatagttaagaaaatctccacgggagtttccctcttggctcagggggaaaatgtctaaatgtaaatgttaacaaaccttcattgcagcacatgttgacaataatttccagagcagtctgttgggctgtcagcaatgctatagtctctctcagttccttgtcagtgggcttaaa

SEQ ID NO: 144798 - DNA, 942 bp, Homo Sapiens
gaaaatagtttatctgatcctgagaatgaacagacagttcagaaaagaaaatctaatgttgttatacaggaggaagaattagaattggctgttttggaagctggaagttctgaagctgtgaaaccaaaatgcactctagaagaaagacagcaatttatgaaagcatttaggcagccagcatcagatgcacttaaaaatggagttaaaaagtcttctgataagcagaaagaccttaatgaaaaatgtctatatgaagtaggaagagatgataattctaaaaaaatcatggaaaattctggtatccaaatggtttcaaaaaatggcaatttacagttacacactgataaaggaagttttctgaaggagaaaaataaaaagctaaagaagaagaataagaaaacattagatactggggctattccaggcaaaaacagagagggaaacactcaaaagaaagaaacaacctttttcttaaaagagaaacaatatcaaaatagaatgagtttaagacaaaggaaaacagagtttttcaaaagcagcactttatttaacaatgaaagtcttgtttatgaagatatagcaaatgatgaccttctaaaggtttcctctctgtgtaacaataataaattgtcaagaaaaaccagcataccagttaaagatattaagcttacacagtctaaagctgaatctgaagccagcttgctaaatgtttccacgcccaagtcaactagaagatctggaagaattagcagcacacctactacagaaaccattagaggtattgattctgacgatgtacaagataatagtcaactaaaggcttccactcaaaaagcagccaacttatcggaaaagcacagcttatatacagcagaattaataacagtaccctttgattcagagagccctattagaatgaaattcaccagaattagtactccc

SEQ ID NO: 144799 - DNA, 495 bp, Homo Sapiens
tttgttgtaaatgcctgttaatacagtagttgtaaaattgtacgtgtattagcaaggaaacataaacctgcctggaataaactgtaaaccatggaatatcagacacctgcctgatattctcactacaaacatttcgtggtcaaaattgtcttctgacgatgatggtcatttggagaacaaaaacagcaaagcaagaggagagaacaagagtatcctgaggcggtctcctgcagtgctcatagctgttcctccttagccttccacctggtggccctggactagacctccagagaattccaggttgtgcaagatgggttgcctctgaaatgccatcctgctgaggcaccattgtcaagtctggtaatgagagggcagcaggacagccactttctaagatcttatgatcttggagccagttctcaatccctgtagactctagcttcttcatatgttaatggaaagagatgataactcctaaggcctctgtcaggtcta

SEQ ID NO: 144800 - DNA, 386 bp, Homo Sapiens
  misc_feature (88)..(101): n is a, c, g, or t
gtgagatgtgtttcatttccagggcccattcttaggccactgagtgggggctgaaaggctgtgcacacaagactccctttcgcaacannnnnnnnnnnnnngtctatggatgaatattcagttactacagaataatttgttgaaatcctttctccattgatttgcttctgcatttttgtccaaaattagttggccatatttgtgtgggtctgtttctgggtccttactccctcccgttgatctatgggtctccctctgtgacattgtcatgctgtcttggttatgatggttatatcgcaggccttaatattagagtcatccctcccaccttattcttccctttcaagattgttttagctgttctaaggtctgtcccactccatata

SEQ ID NO: 144801 - DNA, 508 bp, Homo Sapiens
cggtaaagggctaatagctaaaactgtggattgtgtctagattctttacctaacccaatggtttgctggcatttaggttagtgtctttataaagagctagctctcattgggagagttgagccagagcaaccatagtaaacatagcttactgataatagcaattacgtagggataagataacattctctcacttacctaaattttaatgtgtcctgttacataggttaatttgtgcttggaaatgaattttagttaagtgagaaatacctgttgtttgctttctgacattatagtaatatgtacagagaataatttaaaattataatttatgggtctttaaaaggttttgttcctaacaacatttataaaaatttattgtactattgtaaagttttttatatatgggtttttttccagcctcaaattcttttgtgacttggaagagtattatggacagaagcttgggtactgcttaaaatttatgtttttagaagtagaacttttattt

SEQ ID NO: 144802 - DNA, 261 bp, Homo Sapiens
taccctttgcattcacgcatgtgctgttccctcgtgccatctcactacctcctcgccccatgtactggctactgaattttccatttgcaccacttcactgctctatgtggttcatcacatgcgcgtggatccctaacacacatgcttccttttgctttaaagacgcctttaaaaggagatcatcttaaacccagtcacttgttgctctcgagttgtcacccgcaggttacagatactggctcatggcatttcattcccttt

SEQ ID NO: 144803 - DNA, 348 bp, Homo Sapiens
cacggctccatgcgagagatgcctgttccttctctgataaatttggcagcttcacgtaccctaagtttttgcatttctgacaaccacgtgtcctcacctggacccgccaacccatcctgtggcctccacccaggaactgactcagcatgagaggacagcctcaattccccatgatttcatctccaacccaaccaatcagcttgccccctaccgtggtcccctgcccaccaaactgtctttgaaaaacccataacctccatgccttcagggagataatttgagtactaacgccatctcccatggggcatggccgacctcgtgtctattaaactcattctttactgcaaa

SEQ ID NO: 144804 - DNA, 458 bp, Homo Sapiens
ttcttctaattaaaatacttatttatatgagctgttttacaaaattattgaaaacataacatcatagttggttatacatttagctatttgtttttattgaaaataaaaggattacatgaaattaggacttttccagaaagtggtatgacaggactcttctgtctataatcctggaacctggcagagatgctgagtccccaaaacgttagttccgcctcatagatcagtatttagacctacctcagaggaaggtcctagataacctgttattatacagggctggtacagaataaagtctcaaatttctaaaattaatattcatactttaatgtaagtaaactttaggtaactcagttttagggactcctctaacttaggagcttttatagtgctgagaaaggaggtatctagacctgcaattggtttaaaatagctccatagaatcatacagattctgg

SEQ ID NO: 144805 - DNA, 687 bp, Homo Sapiens
cagaatggtaactggtaccattctgatggtggcagtttctggtggactgtctctacacgctggtgaactaccaacacacaataccatcgcactctgtggtcaggctccttattctacagatatcaggcgaatcattatgtctttgctcatgaatgtgaaggcgaatgagcgatgccaggctgtcctcctagccttactgcttgctcctctacctttgtccaggtgtgacagaggtggcggctacactgatgacagaaggaaaagggcacatagtttgtttatctctgagaatttcaagggggaacaatgaaaaatgtggaagcagcttcttatgcatcttccactgagatgtttccatttgattcaattcatcccggaggctaaaaagtgctggcatgtaggagccaggagggaaccaggagccagttgtggacatgccaccctccaggaggtcagggtctgtgacagctgctctaacatgcagaatcctgctgagatgtcccatgacttcagaggtatgaccaaggcccatttctcaggaacaaccgggaaaagccagtgggagagtgacctgtgcagcatcttgcagagctaagaactgtgtgggccgcaagccggagtgtgcaggcatggagaccagctctgtcaaagacgagcattctgctcacttcctttctttgcagccgt

SEQ ID NO: 144806 - DNA, 660 bp, Homo Sapiens
cattctgcacaaatttgccatacagacagaagaaagacaaagaaagcagggcttttctaaaagggacacatttatttttggagaggcccgagataacagcccaatcggctgtgtgataacagaagagtcagtatgtgcggtgaaagataaacacttggtaacgaatgcccctgggaggcagattcatcctctgtgcatttctgattctgtgataatgatgccaaccacctctacagagtgacagggataactaaaattctgtaaaacactatgaaaattcaaagtgctaacgcagtaaccgtctggtaagctcaacaaattgttctgatttgtttcgtgtggatcatttgaggggtgtttggaagcatgccaattgaaacagacccttttcttcccatcactgacatctcatctgcttccctctccctgggccttagctgaggctttatttctgccatcagctttgccagcttataaatgctacctagacactaaagccccactgtattcctagcagatacccttcaaaggaaaggggcccatctcatttcttcctggtaatatgaaagaaaaccagtggtctcaaatttccctcatatcaacaatggaaacccctgggccgaattttggcctcagggcaaattcccctatgggagcgtt

SEQ ID NO: 144807 - DNA, 767 bp, Homo Sapiens
cggatctccgtgtcgccgccgccgccctggcatcgtggagctggggcccccttttgcctgggagttgagtagtcgcctagggtcagcggtgacatcccaaagggcaggcccggcagccgccatggtggccaaggattaccccttctacctcacggtcaagagagcgaactgcagcctggagactacccccggccagcggtccggccaaggacgctgaggagcctagtaataaacgggtcaaacccctttcccgagtcacgtcgctagcaaacctcatcccgcccgtgaaggccacgcctttaaagcgcttcagtcaaaccctgcagccgctccattagcttccgcagtgagagccgccctgacatcttggccccccgaccctggtccagaaatgccgccccctcgagcacgaaacggagagatagcaagctgtggagtgagaccttcgatgtgtgcgtcaatcaggatgcttacatccaaggaaatccaacgtcaggaggcgatctttgagctttcccaaggagaagaagacttgatagacagacttgaaattagcacaaaaggcctatcatgaccccatgctgaaaactctccataatgacagaacaagagttgaatcaaatttttggaacactggactctctaattcctctacatgaagagctccttagtcagcttcgagatgttaggcaagcctgatggctcgactgaacatgttggatcccatcctcgtgggctgggaaagagccagagtacatggaagcaaa

SEQ ID NO: 144808 - DNA, 777 bp, Homo Sapiens
  misc_feature (146)..(159): n is a, c, g, or t
  misc_feature (243)..(243): n is a, c, g, or t
  misc_feature (273)..(309): n is a, c, g, or t
  misc_feature (313)..(313): n is a, c, g, or t
  misc_feature (363)..(373): n is a, c, g, or t
ggtggagggagctcaccacccccctttttttataccgggcgggtgttctttgtgtgggaaaccaggcgttatgcccccgttggcttcttctctttgtggggcgcgccggcgcccccccaggaaaggttttggagaaaatttttttnnnnnnnnnnnnnncggcccacaaagaaataatattgttttggtgtgtaacgagagggggtcggaggggaaaagaaatggtttaaggatggtataatnttatattttgtgaataggagggtgtgtggnnnnnnnnnnnnnnnnnnnnnnnnnnnnnnnnnnnnntgtnttttactttgaaattactttaatttagaaatagaaaacatcttgaaaggnnnnnnnnnnncccacaaaacatacaggcaaatttgtattctgtgagtttctcacaccctcacacttgttcaccaatctctaagatgaaaaactctcttccaaaatgtattcagccaccaacaatgatgttattaataggaatatggatcaatttcacaaagaagccaatgaatcccattatagcaaatcctattgctgttgccatggcaatcttctggaattcttttctatcaggtttagtgcatcttttaaccagccgaatggagtcctttacaaactgccgacttggctcaacaaactgcattacctgatccatgactgcctacccaaccgacacctaaaatgccagggacacgtagcactggagcttgctgatggaggcccaccggaaccggaatccgggtttctgccccc

SEQ ID NO: 144809 - DNA, 367 bp, Homo Sapiens
atgctgatgccgtcctagaatccattcctaggagattagcccatttttgtggtgtaaatattcccaatcatggcagagttcaagctaccaaagtgatgtgagccaggtagcaacagtcccgaaaatgtaacgatgtactctgatgagctacacccattttgagtcagaatgagtgaaaagaagatgccgttttctctgtttccaattttggataaattgctagtctccttgcaagtagtaatctttactcatccagttgtctttcacaaatagagcaaagcagaatctgcttctttggagctcgagaggctttttaattttacatccctgtgtcttgcaaatcatcctgtcatttactttctgattt

SEQ ID NO: 144810 - DNA, 306 bp, Homo Sapiens
tttcttgtatgaagcctcttttatttgtgcctcagaatcagtctggtgcccctggcatcagggaagggggtgggaggaacagtttctctttgttcttttcttccatccctctttgtgtcccttctgagcctcactggctgagccgggaaggccagtcccagacaggcccgggacaagggtgtgcggtgggcccctgcccctggcggggtctgtgcttctctgggtgggtgaggtggggcaggggagagccgggggttagcaccattggatgaagggttttagagtcagtctccgtgtgggggcaag

SEQ ID NO: 144811 - DNA, 426 bp, Homo Sapiens
cacttgacattttaggaaattttgatgtgatttatcaaaacctttacttgatggttagagttcctgcatttatgaaatcaaatctgtaataacagaaatcctggaatactcttaatatatacttctattttgtgtttgttactgtgattaatatttgcagttgtatattttacatttaaattattttaaggtttgcatttgtatgcttaagacattgatttcctgttggtagatgtattttatcctcacaatttagatgtagctgctttaaatttattgatgtatttcgacagagtcgtctggaatgctttatcttctgaagcttaaaaatgtactgtttgtgcaaatcatgatctgtttcacattccttggagtcccttgttagtgatgaagtaataaagcctctaagatgtttttgttgtaaaa

SEQ ID NO: 144812 - DNA, 431 bp, Homo Sapiens
tttaatctttattggtatagtctgctttgtcagaaactaggagtgcaacacctgcttttttctattttccatttccttgaaatatttttctccattcctttattttgagcctatgtagggcactgcatgtgagatgggtttcttgaagacggcatactccaatgggtcttggttctttatccagcttgccccctgtgtctttcaattggagcatttagcccatttccatttaaggttagtaatggtatgtgtggatttggtcctctcgtcatgctgtcagctggcttttttgcagacttatgtatgtggttggtttttagcatcacttgtctgtgtacttcagtgtgtttttgtagtggctggtggtggtcttttctttccatatttagtgcttccttcacttatgatgcttaattttgctggacatgaaa

SEQ ID NO: 144813 - DNA, 381 bp, Homo Sapiens
cagcctaaaagatgtttatttaaaatttttcttacggtttatgctttggatttttaaatcatattttcaataagggtctctaaactcctttcaaattacctaaaatcctgaaaaaagtttaagctactggtcagtctaaaaaacttgacagatgcattcttgagacattcatcaggatacattttaaaaacatcaatctaagtaagctctttaatacaacatgatactttataactgttatacattaatccccctaatttattttcatacttggaccttcaaaccaccttggaataaataagaaaaattttaagtgcaaaaatgagtaatacatgattttatcactttggagacaatgaaatcaatattttcctgtgattt

SEQ ID NO: 144814 - DNA, 435 bp, Homo Sapiens
tttttaatgtttcactctttatatataattgaatacttagttattgtgacaaaaagttagtatggctaaagaaaataatgcaagtacatcacctgaaataacacctgtatcccacgatacatgaatccaattccaatgctgttttctttctatttcagcaacactatacgtagtttaatagtcaagataccacttgaatactatccaagaataatcagatctgctcaagttaggtttatataatttaccaaggtgatagattctgactttgaagattactgaccactgatcactaagaactaatattagctgaccatatgatcactaagaactaactttgactgataaatttgactgataaatttgaatttcatcttttgtacactgaggaaagagattaacaattttctccacatcaagatgcttgttttgaag

SEQ ID NO: 144815 - DNA, 464 bp, Homo Sapiens
tttactctttttcttttactatattaatttcactatttttctgtccccttagagaatccagggggcagaaattatttctgtgttttcccctcattaccagcatctgattggctgaccagcaatttgtctccaagaaatggaagcctggttgagggaaggcaattttaacatttcaaagggttacccgtttcaaaataagagtacaccggaagattcccctcagccccagaatatccacttgctcccttgagaggatacactccatacctcaggtcatcttatgggagaaaataaaccagaagctgagatccaatggacactctagctaacataaccatggcagttatcttggtttatccccagatagtactgaaacccatgaccaggaaaaaaccaaagggtggctgaggacacatcaccccatagattttccaaaggagaacttcgacccaaaaacattctgg

SEQ ID NO: 144816 - DNA, 753 bp, Homo Sapiens
  misc_feature (131)..(167): n is a, c, g, or t
tttgtgatacattatcgcatttattctaggttgtgctctgacttttcccaaactctggacaaacaggcatggactctatgtagggtaacaacttctatggcaggcttggatttgtacatggtctgttttcnnnnnnnnnnnnnnnnnnnnnnnnnnnnnnnnnnnnnggataaattcagtagtaccgttcagagaagaccaaagactttttaatccatccctcaggcaagtacatcatctctacacttcttcttttctcaaggttaaatactggccagagcagatgacatgagatgcctacttttggatggaaacaccttgcatgatctctgcttcttcattcctgatcactcagaaaaagcctctcttccctgctaacagattttaaggctgtatttgtagcttcccaaaggacagtcagctcctctagaagtccatggcaagaacaacttcatggtggactttttgcttccaggagatcaaataattttccagtgtgattgatgcctctcctcacttcaactcagaagaatagtcttcagtttatgtaaattgaatcccacagatggagtggcatcttcaaagcacgtaacagatggatggtacctgaaccctaattccagaccctctcagaggtcccacaggtgctggtttctacaatcttaatatgtcatacatgtaagccttttctctacagttaggctatgagagccttggagagaatgggcatccccaaagtactagacatgcagt

SEQ ID NO: 144817 - DNA, 1142 bp, Homo Sapiens
gtgggttttttatagaaaagaatatgacattttattttcacttatggacatacagtacatgaatttagaaataaaatcgtcgcaggattctgaaatactgataccttaagatctaacacactgatattagtccattccctacaaagcagccacattagcagttcagatttggtctttgttgtagctgttgacattaagttctttaagtgaaatgcccagcagcatttaaataatattttacagcagacatgaactaagtttcaatattccatctttggaacaaattatgcttatttacatgttaacaggtggctatatttacttaccctattgtgagtttaatgactgattttaaactacagagggttttccagctattatttcctttagtttctaaaagtaacgacttatattaatgttttataaaagatagtgatgaaaaaaaggtaatgctgaaataaaggcgcttttagaaatatttaaggacaacataaggtattaatattggaaaaaaactgtacatattttcaagcacaacactgaaatattgcagcagtgtttaactgaattgttttaaaatagtggtaattatactaccttacataccgttctaatatttaaatctcttaattacaatttgaatataccatctgacttaccattagaactatgcaccagtttccgaagcatatttttcaggtttgtttttgcacaaaaattaacgtttaagttggtccttgatttggagtactataactacctggaagcactaagttttagacacattcattgatagccaacaaaatccttgacagagtgaaaaacatcaagagtaccatgcgtgaaaaagcagctgttaccctccaagtgcaatatgaaatctagaacaagaccctctcagaggcctgcgtgtctcaatgagtgaccctcaaagaaaccaaaatgtataggaggaagtagctgaccagtcatgggcatcttccacattgggataatctttaaaacagaggcagctttggacctctagcgtaagagatagactttacattctttgattttatttacacttttttaaaaagataaagtatatctcccggccgtaatggccgaattcccgggcatatgtccggtaccgtcgactg

SEQ ID NO: 144818 - DNA, 508 bp, Homo Sapiens
aggatgtcttgttcagatggcagtgcaggccattgtggataatggaatggaagttttctaggcggctaccatgaaatgcatagattaggtctcgttctcctttggtctcataaaatttggcgttggctgggtcaaagtactcaatttcaaacaggaagtccggtgcaggaacaggcgtgtgaggagccccagtcagcttttggatcttttcaaactctgccttccctgcactgtggattgtcaggacctttgaggataaaatccagctcaccaggtcccaggcccgtttgtggttgtctccggaggactggagaagttctttcaggttaggtaacttgctggcatctgcaagcagggcttcaaagtccttacagtcgccgcgggcgtaggacgcggggaagggccgcagcaccgagtcgcgcttgtagctctgcagggccgaggcgaagaggctgcaccggaggtcggcggccagcatgtcgcggcccgccgcctccctggcggccgc

SEQ ID NO: 144819 - DNA, 421 bp, Homo Sapiens
tttttgtttagtaaatatcagctatttttatttctttttgttattgtgacactgagtggcagcaaaacttctgagaatttgcagaaactcattgaaaccttactctgatttttccttcctgtcttctcttgctccagctgtgaaatgagtcttcaaatctgagtgccggttgacaaatgctgatagttgtcaaataagtgtagcttgtaatgcgagcccatttgtgatgatgagggcacgctatgccagactttcagctgtccacagttgagtacgccataatttctcagattctttctctcttcttaatacctggaacagtcagatgccatcatcaatgagttgaagatttgtgtcagctgctctgcatgaagagaacttaaaatttgttattagaaatagttattctgagtcataagct

SEQ ID NO: 144820 - DNA, 454 bp, Homo Sapiens
tttcagttttgtaatatttatcaatgcatttttcttactccaaccaatctacttcatcaaattctgaatcatcttccgaatcactatattcaacagcaatacggcgagacaggatggtggcaacatcgttttcaatgcgttcatgcttagcttcctgttcacgctgctcttctactttgcgtaggtgaataccttttcgtattgcttccagtagcacactcctggcatcactgattacaggtagggttgatggatggcgctttggctcagaagcaggtataacttgtgatggaggagatggaggcattaatggaacatggggacctggggcagtagatggagttggatgtatcccatagggaggatgagcaagagctgtaactgtgacaggtgatgatggtcgaatgccaggtggaggcagaggaggcggtggtgggggtggatgcgatccctg

SEQ ID NO: 144821 - DNA, 596 bp, Homo Sapiens
cattaatgaggtcagatgcatcactcgaccaacctgtacctgaagacccgctccccgaggctgaagggcagaagtatgcagcgctgatggttcccgtgggggaggtcagagggctgatgaggtgtgccatggtgtctggaatgttgatggtcatgggcgagatgtgtgactgtacggccttcactggagactcagacgcctcctgcttctctctcttctcgctggacagggcagtgaacgttatcttgatgtttgtgctcgggaacctgaatgtgcacacgcgcggcagctgcagcggcggcgccccgcgcctctggaacacgccgtccacgaataccccgttcttgcccaagcagcgcaggtagaagtcgccgccggcgtcgggcctgggctgcgcgggcggcagctccggagcggccccgccatggccgccgccgcccgggggcgtgaagatctcgaggtggcgccgggagatgaagctcgagtggcccatgctcacgtccaccgagccctgcgacgagttgcggccgatggtcaccgagcgcttcttcatcagatactcgaactcgcggccctccaggcgcgccacggcccag

SEQ ID NO: 144822 - DNA, 421 bp, Homo Sapiens
taaaagtcatacttaacccagtttatgtcatttcccaagaccttctgaagctttctgcttttgctttacaacctataaaaaggattgtgagctgcaagaaagaaaatgaaataggtttattctgctagctaagcacttcagcaacagcttaagatttactttgttattcttgaaacttgactgatttttgtgaagtctttgcagaattcccttgcttttcagaattctttcttggttcttatttttaatggaactttactatttacatgtctatctttttgtggattcttgacattttctgcttgctgcattgtggtacctgagggggatgtttttctcctccatatcctgattctgcctagtggtttttcatcacttctaaattccatttcaaattaacagattgtgtcgcttgaaccca

SEQ ID NO: 144823 - DNA, 495 bp, Homo Sapiens
cagttttaccactgtttaatatcatgatcatatacagaatagtcattcaggagtatggcatagagccagcatactacgccttctagatcctcgtggactcttggtacaggatttgagcagataggcttacagaagaactaattccagatagtctccccatgatttctgcatcaaacactagaggtggaacactccaaatggatttcctgagggtcatgatctatattccttggggtaaagtacagctcggtttgaaaaaggagagtttcctcagaaactacccttgtcctgatgccacaatcacgaacaagatatataaactcatatacatatgtatgtatccgatttgcagggcagcccattcccagatgtaattcatccgcaaatatatacagatttctgctttctgcaactgggataactgagaccatcaaccagtccagagagcaacttattttcacatggaggttctcagcaccggtccaaatcaagaca

SEQ ID NO: 144824 - DNA, 512 bp, Homo Sapiens
ttttttttatttaagagtaaatatttatttatttattgacttaaaactttaaactctaggtctccagaggcattcaaccagtacatatttacttattgccttttatttgctaagtattagtggagaaatgaggcaatataaagatgacaattgtattctctgttctcaagacatttacaactgacttggagacgcatgcacacaaatatatcttactgctatataacaacaattatattagcctttataacaatggttagaaacaaaagcttactttttggtatttcttaaatgacttttagtacaatttattatattaagttgttcggatttgtgactgaacagcaatgttgtgtgtgtgcaccaagatagcatctgagtgcccaaacatctaagggaaaacagacataacaaattactaatcctgggtcagcacagcctggccagttttagaaatgacaaatattgcttctcacttccagtagtctcacatatggagaagtacaacctgt

SEQ ID NO: 144825 - DNA, 574 bp, Homo Sapiens
ctttttacaatgattttacatgaccaataaaatttattaaacgtatttacatatattcacaggttctttcataggtgaatattaaaatagacatttacaatttcagaattttcattcaaaggcatttatttttttcctggggaaataggctttactgtgagatgaaaaaagagctaagtttctttgtatgactaagtctaaataatatgtccaacacagtaagtcacaggtctactagaggagactagtatgaaatgccttacactactgcaggcatcaattatggagagttaaattataggaagcatgcaatacaactaagccacatctttgcagttatggtgatgaaaacaagctaactgaaacacctgcatgctgtatttaaaagttttctacctgtacacactactactacactccatacaaaccacaactttggtccaataaaacatgagacaaaacagttttacaggtatttctttgtacatgttttgactaccaatccctttatacagtttgaccattaattacaagatttacatctgcacaatatgtataaaataagttattaaaa

SEQ ID NO: 144826 - DNA, 352 bp, Homo Sapiens
  misc_feature (142)..(158): n is a, c, g, or t
ttttttcgttgaattaaaaagtctttatttcagcctaacatcttctccatccacccacacttgagcacagaacattccaggcaggcaaagccacccttgccctcctctccttggccacgtcctcaggggtgggcgagcttcnnnnnnnnnnnnnnnnntgaagactccgtgccaacgcaaaatactctgccaaaaggcttctcagacatgagtttcccagggcaatgcccaccttccgttccccgccttcccgagtctcttctcccagtttatgctggaaccctggaatggtctggggaccaatgagatggcagcggttaacgcttggatcacggtgagggggcgatttcca

SEQ ID NO: 144827 - DNA, 627 bp, Homo Sapiens
gattaatagtagtctggatccaaagatttgaagagcgacctgttgcaccatccatgaatgggaacgagacacaacgatccttggggtcttctcattgtaggaagagcgggctttcacatttgaaccaccatctaccattgcccaagctgtatattcggaaaatggcttatgtataactcctagcatgggtttaccatttacagccacacacaccatagtagtgacgtactttcgaagatcctctgtatattcctgtgtagcatcaagtgggtcaatccagacagtaacactttctgctggtacctctttaggagtagttacttcctttaggatatcctcaggaatcttatgatcccacaagataacctcctgatcagctgcatccacgtgttcctcagtattaatctggacgctggggaaggcggtcttgagcaggtagaacatcttgcggttggacagcacgtcgccgctggtcatcttgtcctcggctccctcgcgcgtcttccccttggacttctcgtggaggacgttgctctcgcggacgcgcctcacctcgtcgccgccgcggactgcggccagcactgacacagccagcatctcgcgcaagtccacggtgcccccatcggc

SEQ ID NO: 144828 - DNA, 748 bp, Homo Sapiens
gagtatgaagtcgacggcgcgccgaattcggcacgaggaggaggaggctgctgccctgcggcaagccctaaccctctccctgctggagcagcccccgttggaggcagaagagcccccagatggggggactgatggcaaggcccagctggtggtgcactcggcctttgagcaggatgtggaggagctggaccgggcgctcagggctgccttggaggtccacgtccaggaggagacggtggggccctggcgccgcacactgcctgcagagctgcgtgctcgcctggagcggtgccatggtgtgagtgttgccctgcgtggtgactgcaccatcctccgtggcttcggggcccaccctgcccgtgctgcccgccacttggtggcacttctggctggcccctgggatcagagtttggcctttcccttggcagcttcaggccctaccttggcggggcagacgctgaaggggccctggaacaacctggagcgtctggcagagaacaccggggagttccaggaggtggtgcgggccttctacgacaccctggacgctgcccgcagcagcatccgcgtcgttcgtgtggagcgcgtgtcgcacccgctgctgcagcagcagtatgagctgtaccgggagcgcctgctgcagcgatgcgagcggcgcccggtggagcaggtgctgtaccacggcacgacggcaccggcagtgcctgacatctgcgcccacggcttcaaccgcagcttctgcggccgc

SEQ ID NO: 144829 - DNA, 530 bp, Homo Sapiens
ctttcagcactgagaggtctgtggcatctcctcgtgttggagtcaagtcctgtagccagcatagggccctggctcagcttttctctgcagaggcctcgcttgagtgggtggggtttgcccgcccgcagacctccacgggagggggaggggtcaggcctccccagcggccctctgaagtcacttgcttcacggaggtgttactgtctgctgctggacagagcatgatgggggctgcaagggctccctcaaaccctggactcctccaacagagggctcctggttgccaggctcagctctgccctgcgtcggccccagggcgtagggagggtgtttaatcctggcccgggccttccccgcaggtggagcgcgtgtcgcacccgctgctgcagcagcagtatgagctgtaccgggagcgcctgctgcagcgatgcgagcggcgcccggtggagcaggtgctgtaccacggcacgacggcaccggcagtgcctgacatctgcgcccacggcttcaaccgcagcttctgcggccgc

SEQ ID NO: 144830 - DNA, 588 bp, Homo Sapiens
tttgttctcaaatattttttaataaatagacgaaaccacgaaaccactagactgatggcagcaaactaaggtcagatgagaggggaaactagagaaggagcagcctgagtcagtgacacaacctcctccccgaccctctaggttaaggcacttccggggaggcaggtccttggggtcctgttacacagggtgaatgggagaggaagggattaggatcccttctccccacctttgcatcaggacacccctgcccttctcaccctaccccatggccctgtccctgatttacccactctcatctcacagcactctaaggggaagttgggtgggaggagttcttgtgggtgggagaggtctgtgcccctgaggaagccgatcctgccaaattttgatgcgacaccagcagcccactctaccctcttcatcccaaggagccatctctggggaagggatggagggcagccacaggccatgctgggacatgggaacctatgcggtgcctggccctggatgcctatcggggcccagctcgggatgcccgtcagcagccatgatggggtgtgcatcctggccctaccgcctagggct

SEQ ID NO: 144831 - DNA, 807 bp, Homo Sapiens
tttttttattttgctgaagctgatttgtaatgattggcactcttcagccaggggagtgggtaggccatagccaaggatcgattccccaaccacagcaaaggcaacactcttcctccagagatcaccaagcccctcttacctccctccctccttcccaaggctggcactaaccaggtaccacattcattgttaaggaatggctgatgactgctacacgtgttgggaacctggttggggctgtgcagtttgggctggaaggagagatgccagccctcgtgctgcctctggtccctgaagtgtcacctctctcaggacctctcctctggcctgtggggttataagtgatggatagcagaaagggagaactgactcctgtcccaaatagctcctctgccacctgtcctgcagtgggcctgtgtgggttatgattctagatcctagacagaggctgggtcagctgtggatggggtggtgccttggtctctcttgactacctcgtccaaagagagcactgcccttagaaaagagttgcttgtcctgctgtgggctgggcttccagctgcagacctccagttgcttggtgttcactttgctcctcttgccctctgtcttctggtccaggcagatcaggggctctggggaaactgctggaactcgaggtgaggatcagccttttccagcatcccaatcagaacagccgggatgagcaggaggccagctcccaggaggaaggggaaccccttcataaagttcagagcccggccgtaatggccgaattcccgggcatatgtccggtaccgtcgactg

SEQ ID NO: 144832 - DNA, 475 bp, Homo Sapiens
acttttaagagaaagggctccattatgagcatgggttcagggccctgcattacccaatcagaacagccgggatgagcaggaggccagctcccaggaggaaggggaaccccttcataaagttcagagtggctgggtagagtgagttgaagatgccggaggccgtcagcatggccaggctattcacacaggccacagcagaaaagagagcacctgtgaagaaataaataccatactctggagtccgaaagggccatattccaactctggcaccaccacctcacagctgtgtgaccgggagtagtcacttaacctatgtctccccttcctcaccagtaaatcctgctacatcatgtactgtgacaaggattcagtaaggtcatatgtggacagtagctggcacagaggggctactaaacaaatggctgctattaaatccacattaaaagtacatgtgatctgacagaacccagcacat

SEQ ID NO: 144833 - DNA, 384 bp, Homo Sapiens
gtatagtgagttccacaagggcatatggaagggagttttctggtgtcaacagtggagaagaggtagatgcacttgaattaaacttgaaaactaagtgatacatgatcattcaagctgaaagtgtcgatggtttgctgtaggattaaacatcacgtggtgttaggtgttcctaggccgatggatacacccaaggatgaaagatggttaggagcctggaccaagtcctattattcatggaatttgttctgcaaagttccagcttaatgtctgtcatccagttgcagtttgacgtgtctggagatgggacagtgggggggctgaagcagctggaagcaggtcaggcatctttctgtctttctgtagccaccaagcctcttcctgtga

SEQ ID NO: 144834 - DNA, 453 bp, Homo Sapiens
ttttttgcactttcttatcagatttatagagacgtgaaactatgtaaataccagaacaagtaggggacaaaccccaacaagtaaaatgaacagcccttactgttcctgccatctatatcttcttgctcacggtggcctcagttccttatcattcgtcctcacctcacctctcagggctctcctgaaaggtctcagaggagcctgaccagctgccgctttcctccgaagggcgatgtggaggtgatcgcaagcaaagcatgctgggcgcaaagggtccggatcctcccatgcacctttcatgaccccgtgcctgtgaaggcttgtgaaatgccactgactccatcaaattcatcaactgtcctagtggctgtttaatacctcgaagctataaacggcttgatttgggcagattccaggttttctcaggtttgagctcatctgtttttgttgttg

SEQ ID NO: 144835 - DNA, 372 bp, Homo Sapiens
tttagcccttattttatgaatgttctttattatattgatattttaaacaaggccatagtccaggagtttgttcatggtagtggtttcatctgaagagtgaggtctttttgtcagttgacagaggatgttttagaaatcagaaccgacagggttggatctgaatagattggatgaggaagtttgtcttggtggattctgttacttaagttgtgccaatctttggggttctgctgtagacatctgaaaagtgcatggggtgccagcctttcccctatcctcagcatatagtaggcactcagatatttgctgaataggaaaagtgtgcatgtaaatgagatagtgcctatgtgtttatagaacaatctaggatca

SEQ ID NO: 144836 - DNA, 466 bp, Homo Sapiens
caatgcgtcctgcagggcagcgcccacgctacgcccaaagtagctcctcgtccgacgacggcagcgagtcctcgtccaagtgccgcgccaggctcagcccatcgaaagccagcgggtcctcgaagggcggcgggccattcatggagcgcatggacttggagtcggcctccaggagccggttctgctcttcgagcttggccagcagctccagctcatcggggctgaggttctcggagtcagaggttggggagcaggtgggggccgacagggcctcctgggatgaggagtcggggctcagagtggggctcgccatggtgggtgggcttgttagccgtgagcggggttggttcacagctctgtctgcgccgagcgcgccgccatctccgtgccgagcctcgccgccccgggctgagccgccggatcctagccgcgccgttcgccccgcagccccggcccggccccctca

SEQ ID NO: 144837 - DNA, 1287 bp, Homo Sapiens
  misc_feature (134)..(134): n is a, c, g, or t
  misc_feature (180)..(180): n is a, c, g, or t
  misc_feature (190)..(190): n is a, c, g, or t
  misc_feature (216)..(216): n is a, c, g, or t
  misc_feature (228)..(228): n is a, c, g, or t
  misc_feature (246)..(246): n is a, c, g, or t
ggtgttccgagatcttctgcagctgcagtttaagctctcgcgtcgaggccaccgcctggccttcccgcaccttgagcgccttcagctcctcctgcagctgcgccacattgttgtcgtccggcagcgagctgttnctgttttaacatggcggagaacttgtactgactatcgcccgaaggncccccatgtntacctatacccgcagcttcaatggtnccaataggtctnccagtgggaacacgaatnttactgtgagcgggggttatcctgctgctcctgtagctgccggatggtgctctgtgccttctgcaggtcctcggccgccgagctgcactgctgccgcaccaccgccagctcccgcttgatgacgtagttctcctccgactcctgcgcccgtgtcacttgccccttctctagggtttcaatccgctgtttcaggagccggttctccgtccgaagtcttttgatctcgatctgctcctccatctccttgctcttcatggctgcgtactccttctccagcctcttcatcttcttggggttgtacttgacctggtaggctttgaggaccagcttgtccgggcagctgtcgaactggtgggggatcactctctggaagtactgggacatcccctccatgtccagctgcatcagctccgcctggttcacctgcagcagggcgaggcccactcggaacacgatctccagcccctcatacatgaagatgtcaaagacccgggtggcgacggggagtgggaaggtggtcaggaacagtgtgaggaaccaggacgaggcatacatggatgtgtggaagctttgggaacggaagtgggtgttgaggtctgggagctgctcctgcagcatgtactcgaactgatagatgcagagcccgagctcggccatgctgggtttgaagagctcccgcagccggtactcctgcatcagccgcacgaacacacagaaggcctcctcctcaggcatctgcatgaggagcaggcccacgatgaaggcgcttccctggcagtagcccacctcccggtctaccagcgagtatgccttcatgacgttgaagaggacctcctggcccaggctgtcctggcccttgaagaactcgtgttccgggtaggtgcgggcgatgtccctgcggatcagcttctcgcacggcgaggacatcttgagcagctcggagtactggttcttgacgggcatgtccgtggcgctgcacagaagctgccacacgatggcccggaagtggtgggggatgcccttgcggatcagctccttgag

SEQ ID NO: 144838 - DNA, 318 bp, Homo Sapiens
tttattatttgggatacaagtacaaaagtttattttgattgtataccaggagtggaattgctgggttgtaggggaggcacaggttctactttgctaggtaataccaaactgttttccagggacgttgcatcaattttcattccaactagcagaggatgagagtttctgttttcctcatcttggccaacatttagtattctctggctttttagtttttacctttggcctggaggcagccaaaatgagcatttgtggtggaaattggctagatgctcaccaatcccatctgtttcttcttcctgagcacacagaagccat

SEQ ID NO: 144839 - DNA, 425 bp, Homo Sapiens
ttttataaaaatgttcagtatgctctaagaattaaatgaaaaacataaggagagaactggaaaacataaaaagcaccaaacagaatttctagagctaaaaaacaggattcctaaaacacaattctattggataagtgtggtggccatgaaaatgtgctctgccaagctcctactgcagggaggaaagtgtgctcctctgcaacgctcctgctgctcctgaccctgcatctgctgaccctcaggatctgctgcctgttcatgccacggccacgcacgttacagaatgtgcctggtcagtgatggagcacagaagagcttctggtgccagctgttcctgtggacatgggactccctgacaggcatctttggctctaggacactcatcagcctggccaaatctttcctggttctttcttctgtctctt

SEQ ID NO: 144840 - DNA, 677 bp, Homo Sapiens
tgagcacctcatcagtcactacttctgtgacatcctccctctcatgaagctgtcctgctctagcacctatgatgttgagatgacagtcttctttttggctggattcaacatcatagtcacgagcttaccagttcttgtttcttacaccttcattctctccagcatcttcggcatcagcaccacagaggggagatccaaagccttcagcacctgcagctcccaccttgcagccgtgggaatgttctatggatcaactgcattcatgtacttaaaaccctccacaatcagttccttgacccaggagaatgtggcctctgtgttctacaccacggtaatccccatgttgaatcccctaatctacagcctgaggaacaaggaagtaaaggctgccgtgcagaaaacgctgagggggttgtctctgcactgccatgctcatcagaatcttgttgcttgtgcacatggctgcagaccctatgatctcagaagccctgctgccaacaaaatgggcaagttcatagctgtgggcttgccgctgctgctgatgtccctggcccaggagttttccagtgtgttgctgccactacccggtgcagcaggggtagactacactaccttattcctctcattgcatgggatctggagtaagacagctactctttctgttggtacagtaaggc

SEQ ID NO: 144841 - DNA, 403 bp, Homo Sapiens
  misc_feature (39)..(39): n is a, c, g, or t
cctggcattttgtgaagagtgtcttcatctctgcatccntagtgcaacagagcatgacaaaaattcaacaaatatttattgaagagtcttgatgtcttttgggaaaggaactctatggttacctttactctaagattagatgggtgttactgattcttacctcagagaagagaatgtcatggagacaaaatgacctgcttagagttctgcaccccccagcatggagagcagagtgcaaagatttcttccggactcccacattccccttggaatccaagaactggtctactgtcacaacactttagtaccctcttgtaagcctgtggacaaatcctctgatgccttgatacctcggttttcccccactataaatgggaagataaattcactagaaacagtaaaa

SEQ ID NO: 144842 - DNA, 503 bp, Homo Sapiens
  misc_feature (323)..(350): n is a, c, g, or t
tttttagtttactgtttctagtgaatttatcttcccatttatagtgggggaaaaccgaggtatcaaggcatcagaggatttgtccacaggcttacaagagggtactaaagtgttgtgacagtagaccagttcttggattccaaggggaatgtgggagtccggaagaaatctttgcgctctgctctccatgctggggggtgcagaactctaagcaggtcattttgtctccatgacattctcttctctgaggtaagaatcagtaacacccatctaataagcacagtgatcttcagcaaatatttatcttctgagcctcagggttnnnnnnnnnnnnnnnnnnnnnnnnnnnntttaacttagagtaaaggtaaccatagagttcctttcccaaaagacatcaagactcttcaataaatatttgttgaatttttgtcatgctctgttgcactagggatgcagagatgaagacactcttcctgcaatctcagcgctttgggaagcca

SEQ ID NO: 144843 - DNA, 413 bp, Homo Sapiens
taatttttgcgggtatattgtaggtgtatatatttagtgttgcaagagtttaaaacgctgaccaggtaattacggttggtggactatatcccataaaaataatctaaaatgtcaccacaaggaagtttttacaaaagatgctccacagcacctgtatatagagcccattcagattatggtacggtaaggaagagtaacagaatgaaatatgaaaggatggacagagggaaactatctgatgaaaccatttggtgaagtcatgttaagtgacaaaatcagcaccaaaaaatatgtcaggtgaacttataagctgtgttaaaactgcaaaggaatattagaagcaatcagaagagaattctatataggtgtcatgtttattctgttaagttgatcaagatgatttatataacagt

SEQ ID NO: 144844 - DNA, 1113 bp, Homo Sapiens
catgctggctctacacttaatcctttacttgtatgtttctgtaattcttacataaattctattaagagggtggcatactgtagtggatgaagctgaggcttatagtaggtaaggcacaaagttaaaaagtaacatcactgggtttcaaacctactggtctctgtgactaaagaacactttcagaaccacttcttgattctgccaccacttgatcccataacaggctaccccttggcctcatgctggagttgtgtgtgtctgtcttcatcccaggctgagctccttgaggtgaggatgttgtgctgtttgcctccctcacagtgccttggtcttagtggatgcccagttgttttgtgaatgacttttaagacgtgtacttaagagaaaaatcctaccttatttgaataattacaagtcatgtttttgttgcttaaaggtgataaatcagtgtatattatttgttaatgtccattaaagccagtttttaaaaaaatcactggactttgtgtttaccatttaaaacaaccattttaaacaaacttagaacgatgccttagctgtttataggtaacagaatgtaaactcccaccacctggagactaggccatatccaggacctcacactgactttcctaaaggagagaagcagctacgctgttcatactgatagagaagagggcaagaaaagatccagagtggctgttactttgaaaattaaacgaaagatgaaattctgaacttaaaacacttctgtttggccttctataactgatcacccttctttgctctgttttccagataaatggagacaccagatctccctaacctctgacttctgccgttagccatactctgtgtagttagatctcagtctgggaatggcattccaggccaattgtgaacatgaggctagatttttcctttgatttagcacattcctaggcagacttttgcaagctcaaaaaatgaaaataatatctgttaaccaaaaacataatcataggaagaagaaaaatttctcaaatgattgatttttgactctacattcttttatctaccatactgctcttttcctttttagaaatattactaacactttcagtatagataatg

SEQ ID NO: 144845 - DNA, 565 bp, Homo Sapiens
  misc_feature (488)..(488): n is a, c, g, or t
  misc_feature (499)..(499): n is a, c, g, or t
gtgcgtttggtttgcttttttgggacttgcctgtgctcaaagcccagtgtctcatggcagaaacaagcaggaccgggctttgtctcttgggcccagtactgtaagagctgagtttcctttcctcagcacttaagaccatggttagctatggatgtagtaggacctcggaggtccccactctctcatctctgggacttgatacttcctcattagtttaagatatgtttgcatgagttgctagactattcatattacatattacctattacatatcctcaagatgaattcagaaccagaatcttcttttaaaaatttgactacggagttaaggaggcaggagaagtttttattttcttgcctactgttttgctagagaattagcattgaaagttctggtgctatggttctctctgacgcacacacagaggccgttggagggcttctgaaaactcctgtgcatgcctgatgagttcctgctggcgacccanggaccacactntgagaaccactgttctagtataaaccagacatttaaaactccacttttaatctgtgactgtaattg

SEQ ID NO: 144846 - DNA, 582 bp, Homo Sapiens
aaaagtattgaaatgtttgcataagctgtctatactaaaactacactttcatgtgactggagtcatcctgtccaaactgcctgtgaatatatcttctctcaattggaatattgtagataacttctgctttaaaaaagtcgtctccaaatatacctactcatttttgtgggaatggttaagcagtttaaataattcctgttgtatatgtctattcacattgggtcttacagaaccatctggcttcattcttcttggacttgatcctgctgattcttgcatttccacattaaggtggctctcaaacccaaaacacagatcgatataagattttaggaggtggggtgaggcacaattatgaagtgcatattattcagatgtatagtaaatactttgcattgcttttataaagggttctttaaggattttttaagatttttacacttccaaagtacatttactttttgtcttgataatgaatcacttttgccagtaattggcctcttccaaaggtgatccttctgacttacagatgtttaaaatgtgacatgagtttaactacatcttgatacaaacatgatataa

SEQ ID NO: 144847 - DNA, 353 bp, Homo Sapiens
ttttcaaagatgccctgcccaaagaggaggaacctggagatacagtctggtcttgctagctgcggtgggctccacccagttcaatcttctgggtggctttatagggtaaagctgcctactcaagcctcagcaatggcagacgcccttcccccaccaagctcgagcttcccaggtcaagcttagactgctgtgcttgcagccagaatttcaagccagtgggtcctagtttgctgggctccatggtgtgggacccactgagccaggccacttgactccctggcttcagcgttctttccaggggagtgaatggttctgtctcactggccttctgggcactatactggggtatgggg

SEQ ID NO: 144848 - DNA, 726 bp, Homo Sapiens
ttttggttcaacagatacacactgattatctaacttatcatcaattggaaggtctagttcctcattaaacatgcttttcttatctcccatgtcaagttctggatctgtatatgcaatgatatcaaactctcctgaccttaagaggtcatccaggttgggatcattagtttccaaattatctaaagtatccaattcaactaccttgccatcctctgtatctaaatttaagttttcaagatcttcatcatctaagtctttgacttcaaccccctcaaggtctttaacatccagttccttcacagaagggtcatcagaatcaagtttttcctctagaccatcagaaggctgggtggttatctgtaaattatcagacgttgtttcagacggtacagatgttgacaaaggagcttctgaaaattcaccacctagtggatggttcagagtcctcatgaccatagaagatgaatggacagaatgaccttgctcttgttgagatggtggcacttgttccaaatctgggtgcacaggtagctgattaggtagaccctggggaggtcgtcgcatggggtctgtgtgtctagggcccggaaagtctggccggggaatgaagtttccatgtctcagattagaagatgcctctacaacgctgccaggtggagcactgaaaggcagccgttgccttccgtcaggagccctatgtctcagttcaatatatgcttggccccc

SEQ ID NO: 144849 - DNA, 254 bp, Homo Sapiens
  misc_feature (240)..(240): n is a, c, g, or t
ttttatctgttactttccactttttttaaggtgaccactagacagtgtaaagttatgcaggtggctgacacggtgtttctcttggatagcactgggtgagcccactcttgaccttgtcatatacagatcttcagtcttttccacaaagggggatgaagatgatttacggggagtccctgtgctggcatggtggagggagggaggctggcatggtggaggaaggaggttggcatggtggangaagggaggttggc

SEQ ID NO: 144850 - DNA, 577 bp, Homo Sapiens
tttttggacacggatatttttactactgtggcaataatgttttacatttcgacagtgctttccaaatcacagcatcttccaaagcaccagaggtggtgataacttgatgcactgttgaaatacaccaagtactttggcactccagcatcacatataaccttttacaccaggaagcaaaggatggagggtttttgctgcattgagcaaaataacaaaacacatttctgtgatggttatgtccaagagcttagagcacttttcatggttttctctgcaaatctttattgttctcgatcagaactcaacaaacaactgctattagctaccctttacaagctcagaaatagggacagagaaagctttggattctgaaaatattaccaagtcaggcagtgacggggtcagatacgggccctgtcacctctcatccttggctcgtctgtccccacctgcctgtgtacaggatggccagctgaccctggacacaccaattcgcattattttccatcattactttttgtgcttatatttgaaatagagaaagacttcacattgagaaacgtccctcctttaagct

SEQ ID NO: 144851 - DNA, 468 bp, Homo Sapiens
tgctcaaatcttaagtacctttacaaaaaggagaagattcattatgtaggagaggttgtactgctgagttgcctatggttctgagttaattgcacccacagtcactgcactgtgttgaaaaatcaccaatttaattagcagatttcctagacagtgactagactgaccttttatatgttaagctttgtaaacacatttaagccgtgatggaatcgaagtgctagctcagatttattgaaataaatatagctcttgctgttggcaacaggaattatgagaagcagtcttcataagaagaattacatttttatatgtctgttaagaaattaaaaaaaatttttttaaccataagatcttagtaagtgttctcgctttggcagatggattaaccttgttcttttggagccagatcaatatctagtttatctctagagcagtggacagtctaactatgttttgattatatta

SEQ ID NO: 144852 - DNA, 264 bp, Homo Sapiens
ctctcctaccttggggaaccaagcctatatgtacaggtcccactcgtagggagtgtcagtcggatgatgccagagagaatcgggttctccgccggcatcggtctgggtgtcaccatccttgccgtctccgtacaattgcttgcattcgcaactgctcatcaaactcatcgttcccatccaagttggtgccgctcatgtttcctacctagctcaggagcagggttcagaagaactaagaggccgaaatgacgctggagctgagca

SEQ ID NO: 144853 - DNA, 500 bp, Homo Sapiens
tttttttgaaagtttaaagatcaggagattttatttaaaagctcagatgttcaatttctcatgagaaatcagaagatctggtgtctctgggcccacattctgcctgtccgctgtggactggagtggaggacagctgcccttccagcggggcccatccaggtgtttgacccaggtgctatacccgccagtccctgacagcagttggctttttgctcttagtacctgtatctgcatcctaaatttgccacgacaaactaccacaaacttaaaacagcagaagtgtattctctcctggttctcaaggccagaagttagaaattaaggtgtcggcagggtcacgcttcctccaaaggctctagagagaatcagtccttgaccgtcccagtttctggagtcgctaggcattcggtggcttgtggcagcataactccagcctctgcctccatctgcatgtggcctcctcctctctgtctcaaatgtccctctgcctttctcttgta

SEQ ID NO: 144854 - DNA, 810 bp, Homo Sapiens
tttctttgaaaattaagcatttttatttctgaaaaagtgtaaaaatcttacatttagaatagtacaataataattgccagtaaaatttacaatactccttgtaaagaatacgcagtaagtacaaaaaaatccacacgtctgttatgatacaaaacacaggttgaaataaatgataattttgactttttttcttgtgtaaacatgttaaccatttttccttttcatgaaaaagtacaccagacaagtgtcctcaaataaaaaagaattgcttcgctggcattcttcaagacctttactatttttgtattattcttttgaccattattttttaacgcctggacctgagaatctctacacctcaaaaaggcttagttgtttttcatctgccaaacgtcaagggagcctctagtgcctggacagggcggactcccttccccggcaccctcttcctccctaccccaggtcgggggttggggggctgtagcataggtcggctttgcataaatagagggacccgcagagccaaaaggcgcgcccgggctgttgacagttttgtccgagaattcgcagcggcgaaaatgggcgcgcgaggtcgagaggggccgcgcctggaggagcgaacaaaacaccgaaccaccaagacgagaaaaggagccgggattcctaccttcttcctcgagcgcgctaacatagcgttattaacaattggaaatcctagcagtaaagttctcgacactggacagggcagtcccttggtgcagagtccccaaggcggcggacgaggagaccgaggaggcggcggcggccgca

SEQ ID NO: 144855 - DNA, 665 bp, Homo Sapiens
attccaagctttcttgtcgatgcttgcacatctttagaagaacatattcataccgaagggctttttcggaaatcaggatctgtgattcgcctaaaagcactaaagaataaagtggatcatggtgaaggttgcctatcttctgcacctccttgtgatattgcgggacttcttaagcagttttttagggaactgccagagcccattctcccagctgatttgcatgaagcacttttgaaagctcaacagttaggcacagaggaaaagaataaagctatactgttgctctcctgtcttctggctgaccacacagttcatgtattaagatacttctttaactttctcaggaatgtttctcttagatccagtgagaataagatggatagcagcaatcttgcagtaatatttgcaccaaatcttcttcagacaagtgaaggacatgaaaagatgtcttctaacgcagaaaagaaggtacgattacaggctgcagtagtacagactcttatcgattatgcatcagatattggtaagatgtagttgcattattaacagaatttgtttaaatgaggaaaatctctgtttctttcaaaggaactatgaaggcaactgttagaaagttggtatattactgacctcacccccaccctacagtaccggcccctcctgca

SEQ ID NO: 144856 - DNA, 691 bp, Homo Sapiens
ttgttgtaggcaattaattttttaaagattttactatttgttagaaagatatacaagagcatttctatcctcaaagaaaatccttggatttctgcagacagcagagggcttctcaaaagttactacaaaattaatcacctccacataaatgtatacataacctggcatgacacctgacagggtaaatgacagacaaataattatatgctgaggaaatgttgttgacctaattcaactttattagaaaaacctactttttcctctagtttcttcttctcttcactaaataggcttagtctttgtttgagaaactcattaagctgtaaaacttctttctcagtagatgcaagcttttgctcaaattccccttgttgggaatgggaaactgattcctctgaaattggtgtctggagtgaagtgttctcatattgtggctgcaaactagccacataagaatcctcacaatttacataatgtcctaacatggcatgttgagcccgtaattcattatcccttatcctctcatgcaggtgggtaatttgttgcttctgccgatcgattacaatttctttctgccttagaagtccttcttttattttcaacattgattcccacttactgaaatcctgatagccaggtgaataactttgacgagatgatccagtcaaaacctgcattggtgtttcacttc

SEQ ID NO: 144857 - DNA, 829 bp, Homo Sapiens
tttttttgctgctgctacagtctctttttaatgagtttctcgagcttgcggatgcgtgacgactcttgctctggtgttggcgccgtcagggacagtgagccggagctttctgcccccgagggcggtgcggggagccgctggcgcaggagttccagcatgctgctctgctcactcctcttcagccccttcatgtccagtatcttctgaaaggtttctgtgttgcagtctgtgagaagtttgatgtagttgtcaacaaacaccaccaacggttcatgaggggccatcactaccttgaggatcatctcagcccggttcatgcctttgacaacgatcttggtgtagctggcgggtgccttcctcaccacctgcgagctgatggaggggagatcgagcaggaccatcttcagcgagtgggtgtccagcagcagctgttctgctcccaccatgctaattggcttgcacttgaagaggtgggtgatgaatttgggaatgaaggagtttgcgactttaacgcagaactgagtgaagtacttgcgtgtggaagccaggttgtcacggatgatggggacgttctgcttgatgtgcagaatgacagaggtgacgtaggggctctggtcaccaacgtgctccacgttctgccactgcatcttgctcatggcagtcagggcaggatcacaggcagcatccagatcctgaaccagcagctgaatactgctggagatgacggtgctgaacgtgtccatctctccagtcagattgattcgttcaatcagacttacatccactttttctttgagtttttcttctagctcggcctcccaaagtgctg

SEQ ID NO: 144858 - DNA, 842 bp, Homo Sapiens
  misc_feature (81)..(105): n is a, c, g, or t
ggcctgggtggcgaattcggcacgaggcggggccgtggcggctggaggtagcggcggcggcgacgcgtccgggccggtgannnnnnnnnnnnnnnnnnnnnnnnncccaagcgtcagcggcccgcgcctgtcgggctgaactgaggaccgagtctcctgccattccgagcaggcctggtatgggtaatggtgtgaaggaaggcccggtgcgattgcatgaggatgctgaggctgtcctgtcctcgtccgtctcatcaaagcgtgaccacaggcaagtgctcagctccctgctgtctggggccctggctggtgcccttgccaaaacagcggtagctcccctggacggaaccaatatcatcttccaagtgtcttcaaaaagattttctgccaaggaggccttccgggtcctctactacacctacctcaacgagggatttctcagcttgtggcgcgggaactcggccaccatggtgcgcgtggtgccctacgccgccatccagttcagcgcacacgaggagtacaagcgcatcctgggcagctactatggcttccgtggagaagccctgcccccttggcctcgcctcttcgccggcgcactggctggaacgacagccgcttcactgacctaccccctggacctggtcagagcgcggatggccgtaaccccgaaggaaatgtacagcaacatctttcatgtcttcatccgcatctcgagagaagaggggctgaagactctctaccatggatttatgcccaccgtgctgggggtcattccctacgctggcctgagcttcttcacctatgagacgctcaagagcttgcacagagagtacagcggccgc

SEQ ID NO: 144859 - DNA, 567 bp, Homo Sapiens
atggttcttataaatttatgttttgaagacagcatagcactcaagaggaattcgactgttaaggtcggtgaaaccttgttaagtgtctactcaattcatgaacttccatctcagtgcttttgaattcattgagctcctttcggatggcagctttgtctgcagcggtgaggcgggtccacggcttatcttccctgcggtcatagtcctgagcgtcagccacctccacgtagtcactgaagcggatgaggatctttctttcccgaagctcttccaccgtgggcctttgactgatctttcgggttagcctcctcttgatctctctcttctcctcctgttcctcttgttcattccgaggtttcaaaatgttcctctgttccagttcctctacagttggcctctggctcagccgcctacggaaaaaatccaggaaaagtttttggaccatatcatagcctccttgggtcattaatttcctcggcccttgcagatacatgagacagtcagtggctgggagtcttgtgcatcctgtgctctggaagactgaccctcgtgccgaaatcttgggct

SEQ ID NO: 144860 - DNA, 464 bp, Homo Sapiens
  misc_feature (99)..(136): n is a, c, g, or t
cattccgtgctgagcagcagcatggagaccacaccaggagcctctatgagacactcggctctccgggatgcggtgacttaactccgctgggcagattcnnnnnnnnnnnnnnnnnnnnnnnnnnnnnnnnnnnnnnacatacagccagcatgtgccattgctgggttccagcctcagtctgctgattccagggccccagatgaaccgccaagtggggtgtgggttgtcattttgacgccgaggctccgaagcatgccatggcctcccaaggttcatctcctaatttaatgtcccttctcttgggccccgcacacaggaaccttcaataaatgtctgttaagtggaaggatttgaggggcacgtttgcctaacatggcatgagttaatccaattcaaatgtggagtgaaactcagtgggaaggagagagacatctaagaccccgcaggcaggggaggcggggatg

SEQ ID NO: 144861 - DNA, 468 bp, Homo Sapiens
  misc_feature (243)..(265): n is a, c, g, or t
atttaaactgcttgaagtttgaatatgccttattacacatgcaaatttgattgttttaacaaggcaaataaaccataatcttatttatttccaagaatgcatattttaatacaattaaaaatgaattttcctgaatttaaatgtaagctttaacttaactttaagtggtttgagtgaagtcttctaaattacacataatcactggttctaaacctccagaaccattctgtttaattaaacatnnnnnnnnnnnnnnnnnnnnnnngacatggttcagggttaccactgccagagcattgattcatgttaacttcatcctattaatactgtatcaccctgtattagcagaagccaatatttattatagtattcaactggtaaaaataatacatgatatccatgttgcagtttctcatataaagatatgttttctttagcctctgtaataaagataatcattttcccatc

SEQ ID NO: 144862 - DNA, 439 bp, Homo Sapiens
gacgataacagagctctgccgggggctggaggcactgaccgggtgaccagagacccagagaccagaccccctccacggcgcccgggatttcggggacggcttctcccatcgcaagtttcaacagaaaatgagaaatatcgcccgacgattggctgaaaacatgcagcaaccactattttcttcctgcccctcgttgatgagagcattcgaagtgacctcagcagggcattccaggtcagtttctggaagacttgtgtgtgtgatgaatgaatatctggttttgtctctgctgggcctgtgtgcctggaaaggaattgttttggcctgggatcatccagggtttgtttggtttagttcttgaccacatattttttgaatgttgactgcttaagaccctgttgtgtatggctataaatagatacacgccaaggtgaccaca

SEQ ID NO: 144863 - DNA, 477 bp, Homo Sapiens
cagggctgaacgcacgctgctttagctccttgcctcgttccttcctcccgggcgcgacgcgaggtgaaaatgatgcgcacgtagatttgtagagtgtatttttgagaatttctttgggatgaattgggaggagcggtggagactctggagacaggtgccgtgctggtttgggctgctggctaaaagttgtcctccgcgcggtgggcggtggggtccccggccagggccaaggaccccggctccctgccccccggcgtcgcccacttgtcacgccaggctgctgcgtgcactcggctgcaggggaggtggcgtagtttctcttcctcccacctcttctcactcacttgtttttgtagccgtgggctcccctaatgctttcctctccacaatgttgtttcattatatcatgtccatcatgtgacaccagagaggcctctctatggaaacttaaaggggctcccacgtgactgcagcagc

SEQ ID NO: 144864 - DNA, 543 bp, Homo Sapiens
tttcttccccaaaatgaactgttttaattttaaaaagtttaaaaacacaatgacaatgaagcactgatatgccttaggaacagtcccaaatcagtgctgacttaaagctaagtcctctctttccaagaaaaagaaagcagagaacaaagttcaatctacaatgggagggaacagaatgaaaacaaccaaaagggtgctttccagcagcctaggttattctttgttttcaggccacaccactggaaatgcttttcttcttatataagtcttttcctcacaacctttattttttaaaaactgccatctgctgaacaagagatgtccacatttccaccagcaggtgatccacttctgtgcacagtttttgcttcctcactgtgagtcctccttccccgaaagtgcaaagagagcaagctgatacctgcaggccccagagccccaggactattccagctccacttataaagcagggtgaaggatttgctgcatttgtgcttcaaagatccagctcactttggttgtccttctcagttgcctcgtgcc

SEQ ID NO: 144865 - DNA, 515 bp, Homo Sapiens
  misc_feature (499)..(499): n is a, c, g, or t
tttttttaacttttctataaaattttattcagtgagatcagacacgccttataaacattacacagagccaagaatgattccgtttttacagctataaaaagagatctacaagaccctattgtaatttggggtggcgtcacggttaatctttttcaaccctgtttagattggcccattaataaaaatggctgctagttacagcacatttaaaaatacaatcaccgcgtacaaatggtaacctgtccactccatacttccatgtcctgtgccgcttctattaacttgtctttggaagtagtaaattctcccagtctggacgtggctattttttctcacacacgggccaacacagttcttgctcaacttgggtgcgtttatgacttttcaacagtgtcatcagccgtacctaactcttccaggccttcagtatctcaggtgttagcttcagttgttcctaggtctttcacaaatatcataaatgacaggcaggacgcttttnctggagtcaagatctg

SEQ ID NO: 144866 - DNA, 488 bp, Homo Sapiens
ttttaaaggagacagtaatattttaataggatagtgaaaaatatagcagattgacagtgacagcagaaaaagagcaggaatacagatattttcagaagattaaaatggtactgtgtaccctcaaaccaggcaagtttttctgagaggtctctaaacatatctcctgcatagagtagatgatttttcttggagctgtcataaatgctttatagttctctacattaattcatgtcgaatattttccatggttggtcagactcagacttaaaatagatctgagaaaggtcttcaggtttactttcagtaccattattcacttcatagccagctgggtgacaacatggtgtgtggccaattcaagtttacaaggtaaccttgcctgaattatcctggtccatcgaatacaaatagtaaagtgaaggtgagagaatagaattgcaaggaacgtgggagaagcagttgtcaaaaagcaagacaaacacaagaaa

SEQ ID NO: 144867 - DNA, 368 bp, Homo Sapiens
tttatttttcagttcatttattgctttagtatttgtcatgccatttgttatgtccccagcagagaagtatgaacacctggcttgctttttgcttcctaagctgtgagtacgagaaggcagcaagatgttccaggcctgcgtcaggcacccatcagggttgggcaggccctggaggagtaggttggctcagccagtcagctaggccttagcatgaagacaggtgtctatcagcagcctaaacagaggccagcctcagagcttggcagagtgcaggagcaaagctccacaggaccaaggagcagccagtagacagggatcctggctggcaggtacggattccaaagagaacccctgtcaagaaggagcca

SEQ ID NO: 144868 - DNA, 444 bp, Homo Sapiens
cctacctccggcccactctggttgctccttcccaggtgctccaagctctccagagtttctggtggtttaaagtttccgcttcacgcccagactgctctaagggcaaacacgacccctttcctcttctaggaccccttccgtgaagtctgttccaaccctgagcctctccaccttcgagattggccgcagatgccccgacgggatggcctggggagccgaaagctgtccccagccccggacagctactgcccacgccgcgcaggccagcctcacacagtagcgaatctccttcacgcgacttcctcgcaggcctgtgaacccgcaggaggaggcggaggtcggttcaaaccctgcgagagcccctgcccagcgcggagtcctgcacacggtggaaagtccttacgcattagcgggcaggattaaacgacttcacaccacgaggtg

SEQ ID NO: 144869 - DNA, 438 bp, Homo Sapiens
ttttaaaaaggaaaatggaaataaacagatcacaggttagggtaaccagaagacagggttgttacgcctttaaaaattttagcacatttcctaatgctgctgtcatttcttaagtcatgctatgtgtgagacttgaatactcggtgctcccgtactggcctcagtgttgttaccaagaagtgcatttgccagtcttatcaaactggcatcagaaatcaagctctgagctcagaggttagataccgcttatttttatcaagtaggcaattttcctctccccttagcatatgcgctttgggttctagacttgttcgaacatgccaaagaaaccgctggttaatttaatgcctagaggccatgttcctactgtgtctgtaggaaaatgtcctcccccacccccgccaccccagcctgagtatgttgaggagccagttgaca

SEQ ID NO: 144870 - DNA, 720 bp, Homo Sapiens
  misc_feature (483)..(506): n is a, c, g, or t
tacttcatctaattctacaaatttatcatctgtaatttccacattttcattgaaaggaatatataaccaggaggagaaataacaaaaatatgaaatacctttcaagttctccaagttcttatcacaacagtgaagaagtgaacatttaaatctagtcaccattgagaccactggacccttctgattacaggctctcaggaaagtaaatatcatcataagaggataactatactttgtcttttctttttgccacaatatcctgttgcagcagttgtttagaatgactatccaatttatcatcttccccaagaagtttgagttatcaaggctggaagaatttatgttaaagagaaagaatttctttgtaagaaattcttccgtttttacaattattagggtaatgggtttcttgacagtggcattgcaatgaagcccagaattatatttgattaattcaagtcatcttaaatctgtagatgtttnnnnnnnnnnnnnnnnnnnnnnnntctatggaaattccagatctggttataaccttctgtctttgaaaagttgtcatatttggaatattatcaccttcagtgtatgaacgatagaagtattattgccataatatcattattaattaaaatatcgttacttctaaggctcagtggactctggtcagcattgatataccatgggtgcctggctggcaataaacaagacatcatattcaga

SEQ ID NO: 144871 - DNA, 484 bp, Homo Sapiens
tttgtaagaaaggaagtttatttttgagaacatgctttagcctaatgcctgccagatgctgccaaccttcatgcacaggtgggaagaacctataattaggaacacattagtcaattgcaggaaggctcactcggtgtctctccagcgtggccgccctgaatctggacagacccttgttgacactgtatcccagtggcccgattattatgaattcggaattaaaactcatgttccagagaagggcaaagcaaacagcaaacgaggagatgaggctctgggagcaaaagcagacccacaggaggaaggtgccaggtgcagggcatggggaagggcttactccgtaagtagctcacaacgtggcttgccagctctgagtagtcgaaagtctcgcctgtgatggtggtgacaggtcctgggggaccaggtgggcctgggggaccctgaactccggataggtaagatttaatactgtcacctgccgacc

SEQ ID NO: 144872 - DNA, 455 bp, Homo Sapiens
tttgttttttataatcacatttattgaggcttaattttcatacaataaattttatatatattttaagtttacaatttgccactcagatcaagatacggaaaattctcatctattggagaaagtttcctcatacttctttgcagccatcctccccaacctgccacttggcccaggcaatcactaatctaatttttaacactacagattagtttgccacttcatctaaatagaaacatattttatgtagttgtttgtctggcttttttccttcaacaatgtctgccaataatattgcatttattgaaagttacttcatttttattgctgagtagtaagtagtctattgtgtaatggataccacagtttatccattcgtctgtggatggaccattggggtttttacgcttttaagttgcaatgaacatgcatacaagtattgctggatcattgttttc

SEQ ID NO: 144873 - DNA, 821 bp, Homo Sapiens
  misc_feature (629)..(637): n is a, c, g, or t
caaaatgtattgatttatttttttaaaatcatattttacaagtaactgaagagatgggtaatcctctctccttacattgtacccaataccagtggtatatatcaccagtgtatgagtgaaatctgctgattttttttcactgaattgattagttgtttcaactttatgtgaatacagactgagaagccttgatgtcacaaaagaccagagcaagcttggttagactatactttaaagatctataccatcataactaactctaatttggacccctccaaaatactggcgcatgcctgaattacctaggtaaggatgtagagctgctgtcttggcttgaagacggaaattatagttcgaaacactaagatataccagagttagaagaatgttttagtggaaaatgtcacatcaaggactccactgaagatcatttctaaatatatccaggttcacagccatgctgcttgcatccatgtatgtcagattacctatctttttgctacataccacgatgcagtatcatacttgttaatattccttaaacagtttaggcaaattatcacagacataatatatatttggagtaaataaatatggccattttctcatcaaaatctggctgttggtgnnnnnnnnngagttttgcagttaaatttttgttataaagtgtcatgttgggaagaatattcagaaaagggggactaccagtgaactattaagagttcgttccatgggaattctgttctcgatgtagtttccaaagagataatgcgaccttggcctaacactttcatttgacagaataaacagaggacctaaaa

SEQ ID NO: 144874 - DNA, 606 bp, Homo Sapiens
  misc_feature (419)..(419): n is a, c, g, or t
ttttttacttctaacgtattttctttatttcaggtcacaagtctagggttttcatgggtcatgtagcaagtggtttataaacaaaatcagagtctataatagtgtcattatattaagaggcagaactgctatatgctttcattatgtaaaatgtttacatcttgggactccatagctggtattattatggcacacccgagatatatcttgctccaattagcattaccatgctactcactataaaaaatcccaaaggcagactagagaagatagaaggatcaccaccttcaggagactgactggtaacccaacccattgacttcattacggctttcttccatgtggcataacgaatttcactttctgtggcctggatctgtggttcaaatcgttccatcctgagaactgacaaagcctgnggttcaaggctccaaacgcttactccctctgcagcccctgctgccatggcagctcctagtgcagttgtttcaggcataaagggttttattactggaatatgaagaatatctgcttgtagctgcataagaaactttgtggtggtcattcctccatctacctgcaaatgacgaagtggattccacagtc

SEQ ID NO: 144875 - DNA, 1079 bp, Homo Sapiens
  misc_feature (737)..(737): n is a, c, g, or t
  misc_feature (804)..(804): n is a, c, g, or t
  misc_feature (871)..(871): n is a, c, g, or t
gcggccgctgcttccgcgagccgcgcttcctgctcaaccaccagcgcacccacgcgcgcatgcccgcgccgcacccgcgccgccccggcgtcttcggggagcggcggccctacttctgcccccgctgcggcaagagcttcgcgcgcgagggctcgctcaagacccatcagcgcagccacggccacgggcccgagggccaggcggcccacttaggacgcgtgctatgatgcgcccggggcctgctgccgacggctgcttcccgccccgcacgtgcgtccccgacccctggagatggccctgggccgcagctccctctctagatgggatcccgggagaggggcagcgctggcttgggctcttgaaggtgtgggccgccgccaggctccggccgcccgctcgcgttcctccctcgggaccctctggctggctgcgcacagctgcttccggctcctgccatggttctccttctctggcccatccggcctagagcagttgcagagtgggcaggatcttaagacccgataggtgcagaacccatctggacacggagaccaggaatggagttccatggaggcctggctggcactgcacccgggcatgaggacacatccagtaagaagacctgcctcaagaggtgcactgcggtgacccagtggaggttgactggttggagcctggaattggaagcagattccaagctctggtggacaaactctccagggcctggtgggaatcancagctggggcagacctcctcctggctgcctggccacaggcccccactctctggcaactggtgggtangacgatgccctgtgttggagagctggcttctctgctcccgcctggtccaccctttggctagagttcnaagacagggaagtgatttggtctaagctaacacaggcaagtttggtgggcagaccctggttctagaggcaaaaccttcttcccagatgtgaatggaaacctgcagggcttcattttcccttttctgaacagtggcttcctaacctctttgggagacacgaagccccttgggaaaatccggatggaggggtacgggaccttcccctagg

SEQ ID NO: 144876 - DNA, 443 bp, Homo Sapiens
tttgtcagttctctttattgttttatctgtggtacctagaatggtgcctgatacagaaaggttctatataaatgtatgttaaatgaatgatttgaccaaggagtatcatcaaatttcctgttgcctgagccagtagctgacttctctgttgccccttgctttcaagcagctggttgagtaattgtattatacacattgggtggccaactgccattctgagacctaattttctagttctaaagaaactataaaattgatctgaagaaactactagagccaacaataattcaggaattcatcccaccatctgagcactaatttcttgactttcctctgaagataggtgctagacctttggcaaacaatggcagcaaatgacaggaaaagtcaagttaagacctattttgccttagcactgctatattcctatggtcacaagtgtt

SEQ ID NO: 144877 - DNA, 1101 bp, Homo Sapiens
cagtcgacggtaccggacatatgcccgggaattcggccattacggccgggggggtacttttattgatggatatgttttccttttattcacataaccccttgaaaccctgtctgtcctcctgttatttgcttctgctgtacaagatgtagcaccttttctcctctttgaacatggtctagtgacacggtagcaccagttgcaggaaggagccagacttgttctcagagcactgtgttcacacttttcagcaaaaatagctatggttgtgacatatgtattcccttcctctgatttgaaggcaaaaatctacagtgtttcttcacttcttttctgatctggggcatgaaaaaagcaagattgaaatttgaactatgagtctcctgcatggcaacaaaatgtgtgtcaccatcaggccaacaggccagcccttgaatggggatttattactgttgtatctatgttgcatgataaacattcatcaccttcctcctgtagtcctgcctcgtactccccttcccctatgattgacaaagtaaacaaaagccacatttcctatcctggttagaagaaaattaatgttctgacagttgtgatcgcctggagtacttttagacttttagcattcgttttttacctgtttgtggatgtgtgtttgtatgtgcatacgtatgagataggcacatgcatcttctgtatggacaaaggtggggtacctacaggagagcaaaggttaattttgtgcttttagtaaaaacatttaaatacaaagttctttattgggtggaattatatttgatgcaaatatttgatcacttaaaacttttaaaacttctaggtaatttgccacgctttttgactgctcaccaataccctgtaaaaatacgtaattcttcctgtttgtgtaataagatattcatatttgtagttgcattaataatagttatttcttagtccatcagatgttcccgtgtgcctcttttatgccaaattgattgtcatatttcatgttgggaccaagtagtttgcccatggcaaacctaaatttatgacctgctgaggcctctcagaaaactgagcatactagcaagacagctcttcttg

SEQ ID NO: 144878 - DNA, 442 bp, Homo Sapiens
tgctgtagaagtttggatccactgcacataagaaagaaaaaatgatctcagaggaaacagtgttgcttttatttttaaaggtttgtttctgaggtctaaatttcaataaatttgtgtggtcaataagtgattagactaatgggaattctcttttgttcaactgtttatatctcaaacaaatatttgtaaaataataattaccaatgaataaacatctacaaatgtgctaggcactgcattatacacatttctcattttcacaactttgtaagtaggtatctccattttatagatgagaagctgaagctcccgatagaatgtatgctatttgaggacagcaatactctttttaatctctttagttccctatggtaccccacgtgcctacaacagtgtgtgaacataacatacattcagtgtacatcggctgaataagtgaatg

SEQ ID NO: 144879 - DNA, 386 bp, Homo Sapiens
tttgttattaatatggatttatttcatttttaatgtatttcatccaggaatgccaatgcattcactaagacccatgcagaagtttctcatccatgccaataccacctgccacagctctgcgaggctctccttatggtagcacatgggagatctggctgagggaaggagccaacctcttggctggattgcatccagtctttgaagtgttcttgacttggcccctgtggttgcaactctgaggacgtttttcaagggggcagcttgcatttctcctgtgtgaggggcacccgcagacttctagtgtctcaacaagagaattgaggtttcagtgtgtggagagctctgatgagcagttaaacgacacaaaacccttcaaaatccaggtg

SEQ ID NO: 144880 - DNA, 759 bp, Homo Sapiens
agtatgactcaatgaatttattatttgattgtaagagaaaagaggttcaacataaagtccttttctaagccaggcatggtggcgcacacccgtagtcgaaataatcagaaggttgaggcagaaggattgcttgagcccaggaattcgagtccagcacggtcaacatagtaagacatttactgcagtggccgggaaccaaacttgcaatatctccaaggtaagcctgtcttttctgcagctgaaaggatcagaaggcagcatgccagctggtccataaaatatgatcaaatgaggattaaaattgtcacagatggtcaagatattgagaagataccaagcagatatccaagaacgactccagaacacttttagcagattccatccccctacaggtacagagctgggcctatggaagccctggctcctggctgcctgattgtgatggtgtctttggcttccttgaggaggaagggaggcctgcgccatctgcaactccctaaaagcagctccagattcagtaacctctccaggaacacacttgccttcatcacaggaagagtaagcaccacagggttgtctaaagcgaagaagacaatattgcgacaagcagccatccaaaaagatgaaaagcgagaaagccatggtctttccgatgacagactcaaaagggctgagcagcacctattcaaatggtgagacaattctagagtgctgaatcctatccgcctcccagggacacgatcccgagggatacttgaa

SEQ ID NO: 144881 - DNA, 477 bp, Homo Sapiens
  misc_feature (376)..(384): n is a, c, g, or t
ttttcagcattcaaagcatttttacttggaaaactacacgatgtaagagctaaaaacggtatggttgttcatcaaagtccttttcttttattattttaaattaaattccacgattagctcttctctgaatctgacctgcactttcacagctttgtccctttgtttgggaggtccacctctgagtcctcaatcatggaattctcctcatcctcttaggctcaattcaagagaagctctcacagccttgcccagccccatcttgcatatgggaagttgtattcttgtagtaaactccttatttaccctgggttttacaaactcattcatctttcttatcatagcacctgttatagtacattaggaggcatctaaattnnnnnnnnntcgagttaagctcatttaccataaaatatgatcaaatgaggattaaaattgtcacagatggtcaagatattgagaagataccaagcagatatc

SEQ ID NO: 144882 - DNA, 306 bp, Homo Sapiens
atagatttcagtgctatagggttatacattatagtagaattccggcttcgtccactgaccttaagaaatatatccagaaatctctttctgaaaataagatgtttatatcctatagcttagcatttaatgtgcaaaatacttttcaatagtctttttgtacttcatcttcaagggactcatttttgcctatctgccgggtgaatgactttgagactgctgatattctatgtccaagtaagtgagaatttaaaacagttttaatgtctggcttcgatctaccatttcacctttccatcagtaaatgta

SEQ ID NO: 144883 - DNA, 670 bp, Homo Sapiens
  misc_feature (447)..(455): n is a, c, g, or t
tttttatttacttcaaattaactgtactttactcaaatagaaaagaataattttcacattatgaagctacacaattccaaaatacacatgctgaggctctttttaagtccgaattgtctagtaattacaaaaaagtgaagagtttacagatatacaaggaaataaaggcgaattattgcaaagaaaacaagtttaatttcactttgaatgacaacgatttttctggaaagcagatacttcactcctttaagtttccacccaagccacaataatttcaaacggtcttgcggatgacccagctggtcactcttgtttatgtggggactggaggtaatgagagccaaaaaaagtgctataaacctaatttggctagagcaagttcacacgacacgaccgtgctttaaaaacttgctctccattatgtacttccttccatcaggttggggnnnnnnnnntggtggggatggtgagtaaacacaccagtggtttcatcagaggggaactcactactcaggaggtgacggtgacgtggtgccggtccctgaagtacgcgcacaagctccggaggttgcgggagcattcatcgcccctggaccccgcagtccccctcggactcagggccagagccttctgcgaagcaacctagccccagggaaacggtagcggccgc

SEQ ID NO: 144884 - DNA, 435 bp, Homo Sapiens
atcttctgtaatctgatgtgagcgtggccgggttggcccggctcccctggtgcggctcctagtgccaggaggccgcgggctctagcaccggtctcctcagtccagccgacgtgccccgtttcgggaaggcctcccaaaaaacacggctacagctggcgaaactggcacaagttcccttcccatcttttcccaactcgtgcttcccacggcatgttgctggccggagcggggcttgccctggggcgctctcctgaagaaggaggtcctggcggtgaagaagaagtcctcggcgtcctcctccaggctgctgtagccgctgctcatgctgccggtcccgtcgcgcgcgggcggcctccccggggcgcaggcggccagggagggggtgcggcgcccgccagccccgcgaggttcccggcgcgcagccccgggcaatcc

SEQ ID NO: 144885 - DNA, 198 bp, Homo Sapiens
tttactacagaagactcaggagtttattcatttctgtaagtctagctacaagtggcagtatctctcctattggctgttttgtggcgtaagtgtcatcatcacaaccatgagctgtgctaaagtgtatgtcacaatccaacatcatctaggtgtagggcccagcaatacgtcacaatgtcttacatgggcaggaccaag

SEQ ID NO: 144886 - DNA, 692 bp, Homo Sapiens
ttttttctttcatttccaagttttaattaaatatctctaatggttagaaaatcaatgtcaaatacgaacattggtatacagcttaaaatacaaatgtcagcaattattaaagaacatgattaatcattgttccaagtaaatgctagatcattatttcccaggaggcaagttaagcatcaggtgcctgaggggtaagggacagggcttcagtcggctctgatagctgcatggctgtcccaatgagctttccactcagatagtgccaggggcagctctcatcacaggctggctcactggcctttatccccagctccaaggaaacaccagggctttttctgccatgagaatcgtgtttcagagtcaaatgatccactttaagatgaaatttggacagctcagttccagaatattctagtttaacctgggaagttaagacttcccaaaggctgaagataggctactaggggctgatggacaagagtcaggccagagtcactctaaacacatctttgttttgttctgtataattaattatactgtatcttctttaagtaactcaagttcaagctctctatatttcacttatgtttaaaagatgccaatttgattgtgtctaaactgaactttacccagtgtgctgaatactaaagacccctcgtgccgaaatcgccacccaggcctcgctaccttgg

SEQ ID NO: 144887 - DNA, 1374 bp, Homo Sapiens
ggtttccccacccgttggggaacttgggcacgtagaggggccccttggggttcccgggggcccttcggaacggggccgcaatccagctttttccccagtgagttcccccaggggacatttccttaggggaccagtgggccgcgcaggaagtccacggcatctcgggagagcagtggcaggagacggagcgtgcgatgtctgggccactgcaggtgttgacgatcaggtccagaggcccgaagaggaagtgcacgagctccgcggcgctggggttctggatgtgcttctgcagctttgccagcaagttaatcgccagcttgattttctggaagcagtcgatgaactcgccctcagaggggggccgtgcccgcagtgtgaggacgccctctgctggcgccttcttgcccttcttcttcccctttttccgctggttcagctgcttgaaagcctcggctgccttctgcagccgggccacaaaccactcgatgtcgtccagggcgcagttgaggatttgcgtctccttctctatcttctgagccagcacggcccgcggctcctcctgcgactcccgacggcggaaacctggctcgctgagtggcacctgcgggcccacgcgattcttggcctccggggaatccccgccgcggtgctggaaggggatgggcgccgggccctggggaggaggcaggatggactgccgctgccgaatcttctcctggtgtcccttcagggtctgcggccgcatcttcttgcccagccggcagtcggccaacgcgctctcgatgtcctcgtgcaccagctctgcctccacctcatcgcagtggaagaagtggacatccggcttgctctgctccgagtcctggcacacgagcagcagcacagacgggtagcgcagctggttgaggaccgtctggctgcgctgcaccgtgggcagcgggaagtcttccagctcctcctgtgactcgatgtccagcagccgcagcgactggtcgttcacctgcagcagcatctcctgggtccagatcttctccttggagctcagctgcaccagcttccggatggccgtcgtccacagacgtgatggcttcgctcttgtccatgatgaatgtggccaggtgctggacgtggtactgcgaggtctcgtgcatgatgacgttggagttggaatacttcttcctctgctcaaacaggtccttggggctcatcttggccacaccgtcggaccggcccaggctgccattggtggcacccgggcagcagctcacggccccggactggctcatggtgtcctgggtggcggccagcgggagaagggcagacctcagtgtggccccggtctgaggcaagtgcctgtcccacacctgatgctggaaa

SEQ ID NO: 144888 - DNA, 428 bp, Homo Sapiens
  misc_feature (116)..(116): n is a, c, g, or t
gccctcttcgcgctgaagctgcggagggtctttttcttcagcccccaaatcctctgctctgtggcttaagattcccaggcttaaacccataactgctagggtcatcactcctcaancttctccctcacttgttttgctgatgacggacacaggggcctcacagactcagaagcatctggagtcatttcgaaggacagaactgtggcaatatcctctttcccccttctaatctctgagaacagtgtctgtatatggcacgggggtccctagtgtcatataaaaggactcggagatgtcctcatgggctgtaacggcccccggtgctattcagggatctctgttctttaaagaaatatcatttccccttatttttctacctttgtgccctcacctcgccctgaattgttttttaaactgggctttttggg

SEQ ID NO: 144889 - DNA, 564 bp, Homo Sapiens
tcaacgagactcagttttccgcctttcggggccaggaatgcatcttttccaaagtgagcggtggccctcagggcgccgacctaagcgtctacgcggtcaccgcgctgccagcgctctgcgaacccggcgacctgctggagctgctgtggctgcagcccgcgccggagccgcccgcgcccgccccgcactgggccgtctacgtgggcggcgggcagatcatccacctgcaccaaggcgagatccgccaggacagcctgtatgaggcgggcgcggccaacgtgggccgggtggtgaatagctggtaccgctaccgcccgctggtggccgagctggtggtgcagaacgcctgcggccacctgggcctcaagagcgaggagatctgctggacgaactcggagagcttcgccgcctggtgccgctttggcaagcgggagttcaaggcgggaggggaggtgccggcaggcacgcagcccccgcagcagcagtactatctcaaggtgcacctgggagagaacaaggtccacaccgccaggtttcacagcctggaagacctcatccgcgaga

SEQ ID NO: 144890 - DNA, 1231 bp, Homo Sapiens
ggaaaaatggggggtttttttcctaaagccctttttccattcccctgaaaacctttgtggaaagggggttccccccgggtttttttgaaggaaccaccccccactacccaggggttccaactggcaatttctttgccaaacactttggaatcaacacaaagggcttcaagggctgcttgcagaaatgggtagactgatgtaaaagaaatcacagaacaatctgaattctggaacgtgaaagaaacctctttgaaaggatgggaggtagggcaggtgcgaagacgtgaagtgtaaagcaaaaagaatgtgaaaggaggaaaagccgaaatgcaatctacagtgcgaatgttatttcagaggaggcagaactctctggcaatgtataaaactcgtcatactacgaccatatttggtcgtgcaaagtatataaaatcattagcttcctctaggttttcactttagcataaccataatttacattttaaaacaattaaaaaacacagcttgcatatcactcatattctacaaggtatcacagttgctgtcgtatccccacatacacaactgaataggctttgaaatctttccagcacttctccaaaccagaaatctggtagctgaggaagttccaatatggagaaattgaaatggattaattttaatcagctccattgcatgtaagggaatattacttatgaaatataccatcataaaataagatgaacaggtctgaaacacatggagacatggccgactcactgacacacctttcaaacactaagaaatgggactacaatgttttatttattaaaatataaaaggttaaaaagtttccgccatagttaaggctttctagaggggaaaaatttaatttattaatggcagagtgcacaagttgctgaagaagcctcatgttctagaatagtagttttcgagtgcatttgctttccatatgctagatgtgtacaatagctcaaacatcactttcacaattactttcttttcacttctgtcactgatctgacattaaacaaatttgactttactctttaaatacgtatctgacatgaaatcctatcttaatggcagttttgaatacctgccaaattagtaaggtctatagctttacgtgagacaattagtccaacagaaaacacaagaagaaggctatttgtcacagatatcacacaagagggattcggatacaatggggggaaaggtgcttgaaaat

SEQ ID NO: 144891 - DNA, 543 bp, Homo Sapiens
tatattctccctttaaaaaagataaattcacatcattctcccagtactaggatttctgctttctggaattcattttggttaggttttttatcctattcaacagactcttgaaagcctctgagagttcttactttcttatacatctcactcaaagctcttgatctaccagtatgtggtttgtatttaaaaccttggctttcagtggtgctctctcttttaccctccacctaaaaaagagagtgatatctccctccagtctccccacccctcaagactgctagaaaaggagtgattctgtacatgtaattgtaaagttagccactaaagttaaaaagattcttaatttgtagttttggtgcaattttatcagaagtacctttccattttgccagaatccttgaatcattctttaaaccaaagcatttttttatagtttctagctaggtttatagaaactagtggagctatgggcagtcagttaaaaacaggccatagatagcataatgaattataacacccctgtccaagtcctatagagaaaaa

SEQ ID NO: 144892 - DNA, 658 bp, Homo Sapiens
  misc_feature (386)..(402): n is a, c, g, or t
  misc_feature (646)..(646): n is a, c, g, or t
aagattttcactgtatcactggtttgacaattttgattatggtattccttggcacagttttttccatgtaccttaactggtttgggtatgggcttatcatttttagtttggaaagttttcagccattatttttctctacatctccttcagggattccaagttttcatttactgggccacttacagtcccacagctcagtaatggtcttttcaaatatttttctctttttttccctctctgtgactcattttgtacagtatctactagtatggcttcacctatattaatcttccatccagcaaagtctaatctgctattattttgatcaagtatatttttcacaccatactttgaagtttttatctctaggagtttgattcaggtannnnnnnnnnnnnnnnncatctttctacttgactttttgaacatatagaatacagttataatgactgttttaatgcccttctctgccaattttaacatctatgtaatttctgggttggtttgactgaatatcctcctcattatgggtcctgttttcctacttccatgcatgcctttaatatttgattagctgctagacattgtgacttttaccttgttgggtgctggatattttgatatttcttaaaattttgagtctttntttgggatgctg

SEQ ID NO: 144893 - DNA, 389 bp, Homo Sapiens
tttagtttgtaggaaaagtttatttaatggggagactaagacgatgcaagatggttactagaaaaacatctttcagtctggataaatacacaacaaaggatcatagctgaaataccagtgaccatcacaataggaaaggtggtcagcttgtggaattttccttttggtaaccttaagaagtcattttagcagtactaaccatacagtatatgtcaggcactgtaataaactctttacaagtggtacttcatttagtcttcacgacactgaggtagatactattaaatgtccccattttacaagtaaaaaaattgaggttagagaggccacagaaggtacctgaggtttgggaagtgtagaaccaggatttaaatctggaactcctaggc

SEQ ID NO: 144894 - DNA, 522 bp, Homo Sapiens
tttttaaatcaagactcctttattggtggttatgccgcattctctctacgttcttcacaaaggaccagctgattgaagcaggtggtgcagagggtatttctaaaggtggttatttaagcttgacagatgcaatgaaaaagacaaatctgtgctcagcctcagtatggcggcagtcttcctctgaagatatttctcctttcctcagcatcagcaatacacccaggtgtggtcttggtcgtagttgtaagaagttgcacaccacacaaggttctcctttgatcctttgttagtgcagttaaaataattcttgtttttatagttgaacggaaagtgacaaggaaagccagggaccaacgcggaaattctggtgtcggcacagaaactccactttccatccttatccatgttctctgtggttgggcaccagagcttgttgctttcatcctccatgcaatcagagaccacattatttctgtagatggagggggaagatgcagggcttccttgagagaatttcccccc

SEQ ID NO: 144895 - DNA, 399 bp, Homo Sapiens
  misc_feature (315)..(315): n is a, c, g, or t
  misc_feature (385)..(385): n is a, c, g, or t
tttaaattctctctttttctataaattttaatgatgacttgagtataaaacaagatgatccactctgcagcaccaaaggtgggcaagagaagagatcagaatctggtatgagactgaaaatcactgtggcaaccagcttcagtggggcagctggggttggctctgaagaaagtctgttccatttgtatagcagacaggagcccatggggttcccatcagctagcactgggagtggacttcagaggctgcacgggctgctgttggactggtctaggggacgggggaggggggaaagatgcctgtgaggcaaggcanaagggcttctagacctcagactgagggtcagggaagacctatcttcctaaaggtgttggggaatagttangctagcagatcaga

SEQ ID NO: 144896 - DNA, 614 bp, Homo Sapiens
tgctaagggaatacgtgaacagacccttcttctcaggcgtggagggctgcagctgcggtcctcagtctgcgggtcctgcaccttctcgatgccggcacccagcagctcattcttgagcagggcagagtaggccaggccgtctttgccgttgtctgaggtggcgtccttggctttccggttctgactgggagacttctcattctcgttaatcctgtggaagttcacgctccagttggctccggctctggaggggatgaagcggtctccgtgcttgctgggcgaggacactggggagctggcaggcgtcagggtccgccgcatctctgtgacgcgtggcatcgtgttctcattctggatgacgatctggcgaagcaggcgccgctcatagtcctggtccatggcgaggcagggctcggcccgcggcaaggttagcctggctcgctcccgtggctcgctggctcccgccgaccccgcctctcctggcaccgcacagcgcccgcctccggcctccgcagctcccgcaggcccggccgcggccgccgctgacgggatcccgggctccgcggtccccctcgtgccgaattcggcgcgccgtcgacttcatactcttcccc

SEQ ID NO: 144897 - DNA, 456 bp, Homo Sapiens
ctgcttcttggaggttttgttatttaatcctcatagtaacccaagaagggaggtgttgccatttttgtctctgaggagatgagggcagatgcaccaagtcacacaactagaaagtggccaagccaggatttgaatccacagctgctcctctccatcacagtgttgctttccttcaacagaggtgggggtgaaccaagcagggttttggatactagattggtggacacccacctgcttcgtgcccagccctgcgcagggcccctgcagtgggcaaggccgggcctcttgcagcccatggtctgcagagggacctacccgtgcttgtgttggaagctggcccccacacctgtgctggccacctgtaccccaggccaggatgcagtgggctattagccaggctggaaagtgttcaaagggagtgagaaccaggggctctagaaggcccagggaggacct

SEQ ID NO: 144898 - DNA, 523 bp, Homo Sapiens
tttcgtttcaatattttttatttgagtgtgaaaccattcatatcttgcacaactgtacagataaaactatttccattttagctgtagacacaattatcacactgagtggtgtgatcaaagattttatttacagaacagttgctgaaacatccgatgtcatatttccatttatttcttacccatagggtaataggtccaccataattgcttggtgcattttataatacagaaagaaaacctatattaatctctaacaaacctcacaaattactacaaatctgacagaaaaatgcctacaaaaaattctccaaaagtacaatacatttttatttccacacatacacagtatagtataggctcaaaggcacagctttgaatttttttctatcaaagtgtcggatattattatagttttatgaaggaaccgtgaaagtcactttcacacttggtgcttggtaagttaaagtttgttccatccagtttcacaaagttaacacagcagagctgagtgtgatactcaatg

SEQ ID NO: 144899 - DNA, 845 bp, Homo Sapiens
  misc_feature (212)..(212): n is a, c, g, or t
  misc_feature (261)..(261): n is a, c, g, or t
ggattctcccttcttttggttatgtgtttgttactatgtcatccggacaatccctttactcctattcgagagtaggagtcttctgacagggagtggttctgtacatggagtaagagtctgtctgtgtcgtgggacaggccatcttgtacaagctggggtcaaaggctctgctctcacacccatggggcgctcctcagtggcaggttgttctnccaccacctcatcgacccctgataggtccatgatgtcttggtggcatcnagcatccggtctgttgaggaactcttcacgaggaggcttgatggcagaaaccatctctgcttcactggccttaataaacttccggcaagtgtccacaacatgctccatctgcaggtacatagccgtggccatcatcagccatgatgtttgccctcccgcaaattgagccgagatgtgtacatgaagtccaggaggatgcagaatccctcagggttgatctcaggatctagattgatcacactaaggttgcatttcaactggtctgtaaagatgctatagaacaggccactgcaggccatgaggaccgttttatgggctctaaactgctcacggctcacaacaatgactacatcagtcaagatgtctcgactccggagacgattaaggttgagaagaacatcactggcatggcgggtgaactggatacagctgtcagccggcgaggccattttgtcttcaccaatgccttgcttcacagtccaaaattttgctcaaaacctggtgtccggcctttcctagaaacttcttgcatcacctcgtgccgaattcggcgcgccgtcgacttcatactctctcccccagta

SEQ ID NO: 144900 - DNA, 619 bp, Homo Sapiens
caataatgcactaaggaaagagacagaacgtaatgggcgctgagctggaaacgcagggagaaaagaagatttaattgctctaaactgaatgacacaaagtaaaagaaagaagtgtaactaaaaaggaacccttgtatttctaaggagcaagagtaaatttatttttgttcactcttgccaaatattgtattggttgttgctgattatgcatgatacagaaaagtggaaaaaacattttttagtctttctcccttttgtttgataaattattttgtcagacaacaataaaaatcaacagcacgccctaagaaaaaacagggaaaagtgaagtgtacctatttgctatgtagaagaggcagcttacttgaaaatcagcagcaatgttgtttttagagtctgtaataagtaataaactcaaaaagacacattctataggaataagggcttcacagatagagctcattttttaaaaatccaatttgtacattagactaaacgtgaaattatctcttattgtaatggtggaaaggtggttattcccaaaagctcaatctcaaagaaatgtgtttaaatgaaaaaaagtaaataattgcattttttaatgaccgtgggtctgtga

SEQ ID NO: 144901 - DNA, 472 bp, Homo Sapiens
tgcaaataactggttatccctcaggtcctgctaccccatctttcctgatcccccgatccctccaaatacgaagcacctcgcatttgggtcagcagctgtttcccctgcctggtgacaaggccggtgtgcagagggcagaggagggagcttcttccgccacacggtggcgcgcgcgagcctcccaaagaccgggcggccacagctcctcaccttctccccattccagccccacccgcgcccgggcgcagaaagagccgcgcccccagccctcccgggcaggacagccgggagcgcacctcgagggcccgggcagcggtcgagtggcagctgcgtccagcccacgcgggagctgctgcgggttacgggtggccccagctccaggctcctcctccagccggtcccccaccctccaccccttctcgactccgctctgcaaatcgaaggcttcccggagcagcctaggagcggccgc

SEQ ID NO: 144902 - DNA, 327 bp, Homo Sapiens
acctcttgcagaaaagtaaaagatcatttattcattctgtttctagatagcaaaactaagtgtcaaaagcaccttctgcacacagtctgcacacactggccggtggtcctgttcccgcaaggttgagctgtgttccagagacatgggtcctccgggtgatgaggagccgctggagggccctgagctgcacgtgctaatgattaacgccccgtccgtgctggccggtttctcaaatgcctcctgacgattgcgcacagccggacatcatttgtactgagagacaaaaggaaatcactgaggctttctgaggtgagctgggcggccgca

SEQ ID NO: 144903 - DNA, 326 bp, Homo Sapiens
caccccaccaagtgagaaccccctgagttagtgttatttcccttttgtgtgatatcattcctgttcatattcaattttatggaatttttcacaagatgatgcctttaatttggcaatttaggtttaaaatttatttttatcttccaaaataatcagaaaccctctgacagtaattgcatcaaatcattaagactgagccctataggatacaacatgatcgaagctcctctcattttattaaggtttcttgcagggaaagttactgacttattttgaacctgcttaatagtaataaagttggctggacatggtggctcaggcctgta

SEQ ID NO: 144904 - DNA, 943 bp, Homo Sapiens
aaggtgggctttcattgtgatttttgttctgttgcagtaatataggagcacattttggccattgtaattacagggaacaaagggattgcggacacatatctggacttcttttcctcccttattgttgtggaagagacactagaaatgctcaaacacctgcaatatacagaatatacacaattttattccagtatttccctaacatatggtttaaaattattccaggtatacagtgtatgcaattctgcattatcacagaggaacaacttcttttttaaaaaataaataggtcagccatttttattaacgtgcaaaaactttatcactctaacatgctctaggtagttgaggaaaagaggtctgatcactgtttgtattttattttctttgtgggaacatttcacctgctgagtgtacatgaatttgctttctataaaaggcttttatgagtttacagtagaatcagtggaaggaagagttaataagggctgtttttaaaaaaacaaacaaacgaacaaagacgaataattaaaaaagaattttacattccttcctattctctaactacacttgggaagtgcacttcagataagtttgcagtgtgactgagagatgaaggaaatccatagaaaaggtcctcttagtgaacaaaatttagttattaactttatagctatgaaatttccccgggcatttgtttttgttcaaacagactttaacctctgcatcatacttaaccctgcgacatgcgtacagtatgcatattttgttttgaaaaaaaatgtttcgttccagtctgttaagaatattcaaaaataataaaggtattgcttaataaaattgctagaattgtttagcagtacatgcacaatattttactagattctttgttttaatagtgttttgttgagactgaaaatcttaaaatggtctgcgcaaaccc

SEQ ID NO: 144905 - DNA, 343 bp, Homo Sapiens
tttttttttgaataatatacaacatttatggataactcagcactttacattcaattcctcttatccttaaagcagtcttgaagagtagatgctgtatgtctgtcttgcagatgaacttagcattcttctcatataggcctcgcatggcctggccaagtacttcctaagctcggaacaaatactggtcaactttaattgaaccaaatcgggcggggtttgcggagtctgagagtgcaacgttggggagagggggatgaaaacactggaggacgggctgaaagcgtcgagtccgacacaaaagaggcgtcagacaaaacgccaagaggctggggactgggaacga

SEQ ID NO: 144906 - DNA, 820 bp, Homo Sapiens
ttatctcaattctaaatctatgctcatttacgctttatacaacttattccctattttatatcaaattatacaatcatttctattttataagacaaacatattctactcttaattactcatggatatcatcctgtacgaagtgactaaagataggagtcctgttcccaattaagaacacctcctggtagcacagataaacctgtttggttcctcttgctctgcagcttttcagcatgtaaaatttaaaccatttcacattaacatttaaatttaatacagtgcaaatatttgagaataacttgtttcccccagtgaaacaagagccagcattatgctgaatattctccagatctatttacacattgagttaaaagttcaccataaacttagaaatttgctgaatagtcagcagaaatgtaactgaactagcagcaattgcatttacaatatttgatagttacttgagagaatgcataaaattttccaggctgtactctgaatcatgactgctcttgatcccaaagatcactcaggttttcaagaattgatttcatacttgctttcccagaagtagaggtgtcagctttttctgctttgccatccttatcaagagtaaacagatcaagaagctgatccagtccccatgctctgcaaactagaattctcttggctaataacagtattcgctatgttcatcttgaatttctgcaaccccattattttttcttccaatgttcctctggttatcaatcggtatacgttaaccacaccccggccgtaatggccgaattcccgggcatatgtccggtaccgtcgactg

SEQ ID NO: 144907 - DNA, 407 bp, Homo Sapiens
atcagaatattttatttcaagagttaacacttttttcaaaaagtaaaaacaatataattacttccctgagtataaagaaccaattctacaataaaagaccattacaaaattaagcaattagaggtacataattctctgcattcagttatactctatttcaaatttattcttaaaaatgtcatgttttggaactttaatgtttcaaaaaaacctcagaacaactcattttgcacctatggtgttaaggttatcagtctgatctgtctttatcaaattcaagggcaatcttcaaagcggtgctattgaggccaacagattgcatgttacatatgatagaaacaatgattcctcttgggggaaccttgttatttatagtctctgtatccagttcttcaggaaggaccagc

SEQ ID NO: 144908 - DNA, 483 bp, Homo Sapiens
cactttgaatgttttcagtgcggcaaagcttttctccagaatgtgcatcttcttcaacatctcaaagcccatgaggcagcaagagtccttcctcctgggttgtcccacagcaagacatacttaattcgttatcagcggaaacatgactacgttggagagagagcctgccagtgttgtgactgtggcagagtcttcagtcggaattcatatctcattcagcattatagaactcacactcaagagaggccttaccagtgtcagctatgtgggaaatgtttcggccgaccctcatacctcactcaacattatcaactccattctcaagagaaaactgttgagtgcgatcactgttgagaaacctttagtcacagcacacacttttctcaacattattggcttcctcctagagtgttgtgagtgtgagaaggcctttcactagccccaccttgttaacaacttgaacattcatcaaagtgtggtaaa

SEQ ID NO: 144909 - DNA, 961 bp, Homo Sapiens
  misc_feature (729)..(741): n is a, c, g, or t
gcttcggtccattttttaaggtattaaagggctactccttttaggttaagtactttgaagctgttataaagtggctattttccctaccacagagttacccaaatgagcatctctggaaggaggattattccccgggatttccaaaagatgtactttaccaggaatgcccaggcaaaagggtgacccgggggaggagtcttttataacacttgggacccacatggtctcaagccacttcagaacttggggaaatcattttgtaccggatcctcagaaagcatttatggaaatacacatcctttagaagagagatgcttcacgcacgactgactttaatggctctttcaggcaacagagaaaccaccacatgcccatgacatgagctcagttgttcagcaggcacccagaggaagcctttaattccgagcaggtttcactgattggtcctggagcaggtgtagttatgacatttactaagtgagtggttaacagctgactgcctagaaaacctaggaaggcctggtccctctgggttactgacagcgtctaccctcacgttgtaaaacagcaccgggggggtgtgacaaggctgtccattttacagccttggacaacagaagagaaccattatgtgctacattcagactttctgatttagttttagtataacctgacattggtaacccgtctccagtattcatcctccaactacaggtatgagtgtttccnnnnnnnnnnnnnaaaggcccattaacttaatttaaatgttcccatccttatgaatttactcactaaggaaaactataagctcagattttacaaacaaaagcaacttacaaggtattattgctggtcctttatcccttctctttaatgcaatctcaaaggttttttggctattagttttcataattttcttatgcggacgcgtgggtcgacgatatcccgggaattccggacc

SEQ ID NO: 144910 - DNA, 345 bp, Homo Sapiens
cacttataaggcctgattggtcctacccagcttaacggggtggggtttttttgtttgttcagacagtctgttcttttgtaaacatttttagttggaaaaacagcatctgcattttccccatcctctacgttttagagaggaatcttgtttttgtgtgcaacataagaaaattatgaaaactaatagccaaaaaacctttgagattgcattaaagagaagggataaaggaccagcaataataccttgtaagttgcttttgtttgtaaaatctgagcttatagttttccttagtgagtaaattcataaggatgggaacatttaaattaagttaatgggcctttaaaa

SEQ ID NO: 144911 - DNA, 385 bp, Homo Sapiens
ttttagcttgacattgtttattaaagtgaaaaattggaaatcaactaaatgtttatcatctggataaaatacatttgtggtacttttatacaaataaaaaagtaacatgtagcataatcacttcctttgattgaatgcttttacaggtgctgagcgcaattcaaaattgttttcatgtattattttattttatcctcatcatacctctaggagtactaatcatcatcattatcattatcattgtcctcattttacagagaagtgagtgagagagctgggatatgacttcaggaatccatattcttactaactacattatactggttttggagaattgtagaggacctctgaggaatcttcctgaggaatgctctttgcaaagctc

SEQ ID NO: 144912 - DNA, 469 bp, Homo Sapiens
ttttttttaaattcttctcatatttttatttaacatccacaatgtgatttaagatgtaatcaacataaagcttgattgcattattttgcatgctaagttttccaaatccagcttcgtgtcacacctacagcacatctcactcaagctggccacatccccgccatccagacgtaaaacagtcacaagacagggcaggcagggccgcggaggaggctggctggggccatcacggagtgcccatcctgcactgtggtcccagcaagtttctttctcctggcaagaagcctgtcccaggctggcaggggacagcgtgaggtgcagcctatggactgggaaaggggtgtggaagggccacacctaagtcctaaaatccaggcccaaaagtggcccaactcacttctctgactttaatcacacagccatacctggtggcaaaggagtattggaaatgagtcaggctggtagccac

SEQ ID NO: 144913 - DNA, 547 bp, Homo Sapiens
tttttgatcttggagcaaagctttaatagcaggcactggacaaacccaggaggcctcctcagtgaggggctgcagaaagtagatacagaaagacaacaggtcatggaccagtgcccagacggacactcggggcgtggcagtagcatgctgggagctggagctgatggctgtgccatgaccctcgaggtggggctgtcacaggcagaaaggggcctcagtgggtggagagatggacctgcttacagaagaccacctctccaacctggacttcctccacgatggcacacctggtggctggtcactgtggcttcccgggtgggctgcgaggccagggacaaggagtactgagtggccagcctgcagggagaggagcacccatcgacccagggatgccagccagcccaggcccctgcaagcactgctggggagaagcaggccctggcagaggaggttcccctaaattggtgaaaaatcacagttgggaatgcacagaaattagcacaggcccaagaatgaaagggcaggggttcagtgcagcaggaagaag

SEQ ID NO: 144914 - DNA, 1376 bp, Homo Sapiens
  misc_feature (1250)..(1284): n is a, c, g, or t
aggaggatactttcatttttattttatatcgtgaggtattgtttggattgttacaatgaacttgcatttcttttgtaatgaagaaaataatacagaggaaataacaacaactaaacctttggcctggattatcatcggctggaaattcatgttggatgcaagtttttattgataacaagttattttttgttttatatgcaaaaaatgttcattgaatgcctcctatttggctggcactgcctaggcactttcacaggtatttcatcctaatcctcacaacagccctatgaggtaatcattggtcccagtttacagaagccttgggtgggagattattgcttgatatacttctatttgccacacatttttgttggcaagacgttcgtatcggctggtgattcactggtcaagagctctcattggccaggagttcctatttgttgctgtaagattcaaataatcaaaatactagaatttttcccccacaagaatgatgggaccaatggcataagagtaaaggaaggagagtcagtgggtctctccctttgaagcaccatttgagtttgcattggtcagccccacacaggtgggcgggatgaggtggtggaggaggagacgcggtggttataagtcttctcgcttcagtaggatgagcttcctcacgagcgctgtgatctggggtctgacctcctccactgacacagttgggtcccaagcccctaccacctttccatctggggctactaggtacttccagaagttccaggtgggctccttcccagaagtctgggccaggtacttgaaggcaggatgggcaccagtaccggtgactgcaatcttgctaaacatggggaatgagacactgtaggtgcggcgggcaaagctctcaatctccttgttgctgtcaggctcctgttggccaaactggttgcaggggaaggcgagcacgttgaagtggtgggggcccaggtctcgctgcagctgctgcagggctcggtagtgctggtctgtgaagccgcactcgctggccacattcaccaccagggacaccgatccgcggtacttctccagcgacaccagtttgccccggatgttgaccgccttgaagtcgtagaagtcctgctcctgctgcgcgcaggccgcagcccacaggagcagccacgccgctgccaccgtcgccgccaccatggcttgttccccccggccgtaatggccgaattcccgggcatatgtccggtaccgtcgactgnnnnnnnnnnnnnnnnnnnnnnnnnnnnnnnnnnncggccgcttcctcgctcatctactcgctgcgctcggtcgttcggctagcaaagcgagggcgccatatgaggtatatatgttataaaagacga

SEQ ID NO: 144915 - DNA, 570 bp, Homo Sapiens
  misc_feature (400)..(521): n is a, c, g, or t
tttcatgaataattttatttttattttggtcatgactttttaaaattaatggaaagtctcagtctgctcaaatgataaaccaaaaaatggggtcatgaagcaaattcagtctttgcatttcttcaacaaccaactcacatttctctgctccttgactcagaggctggacatgtgctaacagcttttttgcttctgtatatccttaataggatggcagaatcccggtgttaaaagaatcttaaagtcagccgtgtcaccatgggacctcgattagcaaacagatgtagacattccttccaaattcagtcaaagaaaaaactctaataccagcagccatgttcagggtgtgcacgacatgctgagcgcttgggatacatccccttgtttaattctcacagannnnnnnnnnnnnnnnnnnnnnnnnnnnnnnnnnnnnnnnnnnnnnnnnnnnnnnnnnnnnnnnnnnnnnnnnnnnnnnnnnnnnnnnnnnnnnnnnnnnnnnnnnnnnnnnnnnnnnnnnntgtcctcaaggctgaagtctttgtttgtttgttttgagacggagtcttg

SEQ ID NO: 144916 - DNA, 249 bp, Homo Sapiens
ctcagagacatttttaaggatatcaattgcctggttactaagaacgttcctcattgcaccactgatggaataaagactgatttgacattattagaactgattttgaaagagaaagtaattaggtttgtggatatgatcagatggtttcataggcaactgtgggagcatttagtgaatgtgtataggtggttagggcagaattattacaaacaaaggccttatcatcaaactctgggtttaagttctcgc

SEQ ID NO: 144917 - DNA, 708 bp, Homo Sapiens
  misc_feature (415)..(424): n is a, c, g, or t
  misc_feature (694)..(694): n is a, c, g, or t
tttatatatatgtatatttaattccaaggcatgaattagctccgagttcaatttattttctctttatttccaggttcacttttccaatgacactagacccactcctacgcacatgcatgcttatcaaatcttcaatcaactctttcttctttaggaaggaggtccttaggagctgagaatatgtacccaagggtctgggtgcctcctcctgggtcttgcacttgttgcttcctgtgccttgaatacgtttcccattttgttagactggtgaattcttgtcatgtttcaatatagttcaaaactcacttcttttggaaaggcttctgcatccctcgcccacctgcccatcagtgctcttctttttactcccagcacaagagtagctttgtttactcatcaccttgggtctagaaannnnnnnnnnaaacatgtctcttcctgctaaattgtgagcaactttaagccaagaatttacttttgttccttcagtacctaggagttcctggcatagcatagagacataataaatatgctgaatgaataaatgagtgaatggaactccctaacctttgcacattaaactaaagggcacctattttacattttaaaagttacttgggaattccagcataagcatatggattatctacttattcacatcaaattttaactctaggtttgctgctctattatnctagggagtttctg

SEQ ID NO: 144918 - DNA, 881 bp, Homo Sapiens
ttgttggctttcaatacttttgaattttaaaagaatactgtactggaatgggttaacatcatcatctttagcatcctggtagcattattcagtagttaataaacagacattaaaacctctgcctggctggtttttgaaaaaggaacctgagggaccccaaactcagccactcttgtagtttccatctccggttcttttaatcctggccaagatggcggccttggagactttcttccggtcataggccagaccgagggcggccatgcaatcaatgaagaatgtggtgaagttgatgtgccagcggtactcactggcagagtagtcatagggaaaggagtggtggtagttgtggaagccctcacccacagctccaagtgaaaccaggatattctcccgggggctaatgttcttgtcataaggacgatatccgaagaggtgggcagcactgttcaccagccaggtggcattaagcaccacagcatatcgcaagaaagtggcaacgaacacactgttttgaaaagtctcaccccagaaataccagggcacaagcgtgggcaggatgaagcacatcatcagcaagccaggtttgtagtacctcctctggaacatcaccagtttctcagcttctaggtcagacaagtctagcgtactccccttctctttgacagctgggtgtttgcgcacaagcagccaacccacgtgagagaagaaaaagccacgtcgggaattatgaggatcagcatgtgtttctgaaaacttgtggtgggcacggtggtcacgagcccattcatagacatcattctggaatgccattgtgttggcaatgatcagaaagagccgtaggggcagccgagctttgtaagagcggtggctccacagac

SEQ ID NO: 144919 - DNA, 531 bp, Homo Sapiens
ttttgtcttttctagcttattgttggtagaaaaacaggctaacactttgaataaacatctcacaaactgctgctcctagattacaaaaagtcaaagccaattatctttgacactgagcccttgaatcctgacattcaagtcacaataatagaaaccggagctgctgtaccttacattctggaagatgcctcaacaaaagcacgttaaggactgtttaaaacttctattatttaaaaagatccacctttcctcccattgcctatggaaaataataaaaggagaatctcagagatctgctattgagtttgagaaggccaagtttaatgattccaaaatgtagccttaaaaacttctggagagactcagataaatgacctccccctcctctcctctcccactggcctcttcaagtacagatgatgcatgtatttccggaacccaggtaggactagtcaaacagtctcatgcttctctaaaaggcttctggtgtaagcagttttaatttattttagtttttgccaatcttcagtc

SEQ ID NO: 144920 - DNA, 171 bp, Homo Sapiens
acgcccggcgcaacggccaggagaagcactttaaggacgaggacgaggacgaggacgtggccagccccgacggcttgggccggttgaatgtagcgggcgccggtggaggaggtgacagcggaggtggccccggggccgccaccgacggtaacttcacagccggactcgcct

SEQ ID NO: 144921 - DNA, 1049 bp, Homo Sapiens
  misc_feature (464)..(512): n is a, c, g, or t
cgggataactgttgacagcactactcccccgggcgcgctttcctcgcgcgcgccgctaacgcgcgcgtggttgacccggctctactaccccggccgttttgtattggctccccgcggggcggcgtgttactctctcggcgggggtggttgtgccgccagttttggtccccgccccgcagatagttgtgggctcttttcctcccccatgagtgcccctcgcgtgatctagcgcgtgtttctctcccgatcagacagctgtgttttttataaagccgccgccgcgcgcgctacgctcgcttttttattataacggcgcgctcccttcatttgggggccccctcgtttctcaacaaaagaacgctggctggctgctgccgctaacgttgggggcccctccctcggcggatgaattttttctgcgcgggcgcgccgcccgcccctgttgtttttggtcgtttttgtcnnnnnnnnnnnnnnnnnnnnnnnnnnnnnnnnnnnnnnnnnnnnnnnnncacttgaccaaacctttattgaggtcctcaggggcagatatttgttggggagaaatatagtacagaggtggaacagaaaaagccctaccctttatgacctttttggacaaggtaagtaataaacaatgaagagaaaaacaggttcagatgttaaataacttgcccaaattaattgaatcttctcacttggctttcctcagccttttatggaagggcagtgatcaccctcccttgggagccctctggaagggttcaaggactcacaggctgacacccataacacaggtgtggtagtggggaaacagaaaacggtggtagggtgtttcagccaattctatgggaggctaaagggaagcacacatactgggaatggcacagtaggagttgccagttaattcccatctaggaggccatgctagggatacccattagtccccttcaactctttaaagtcttgaacagtttaattgttagcaccacagtcccctgcagccctgaggaactccattctgggccttaaagatcttaaagggaatc

SEQ ID NO: 144922 - DNA, 429 bp, Homo Sapiens
ttttacttgtaatgaatccccttaatagcttcctcaggggctgaggaacacaggttgaaattttatttctccctctagcacagaaggatcttcccaaacagtagacgggctaaggtttatttacttacttaacatttaaaaataattcatttgcttcaacaacatggcagacaatcaagagtactattgaaacataattcagagagggtcaggacaggaaagatcacaacctcattcctgaggtggaatgaaagatctaagccaggcctccatcctaggccaggctcctccattaagcagagacaaccaaaagataagaaagccttggcctcatccccatcaggagatagcctgaactgctcacaaataagaaacaacttgaccagactgaggactggttcctgatgagtcaataggaaagtcaggttg

SEQ ID NO: 144923 - DNA, 453 bp, Homo Sapiens
agttgagaagttgaatgaggcttttgacattttgctagcttttttcatcttagcttgtgttttaatcatttttttgatctacaaagttgttcagtttaaacaaaaactaaaggcatcagaaaactcaagggaaaatagacttgaatactacagcttttatcagtcagcaaggtataatgtaactgcctcaatttgtaacacttccccaaattctctagaaagtcctggcttggagcagattcgacttcataaacaaattgttcctgaaaatgaggcacaggtcattctttttgaacattctgctttataactcaactaaatattgtctataagaaacttcagtgccatggacatgatttaaactgaaacctccttatataattatatactttagttggaaatataatgaattatatgaggttagcattattaaaatatgtttttaataaaaaa

SEQ ID NO: 144924 - DNA, 555 bp, Homo Sapiens
tttttggattctgccagctttatttttcagttgaaaactcaaaggaaaaagttacattcccaaaagaaagtaaaacacttccaatgatgtagcctggaggcctgagttcacaggtgcccctaccaaaacagaggccctccccagggtcccctaaagcattcagtcccagtgtgtctaccccaaagagagaagctgcctacctgggcttctgattaagaggcttggggccatcacttcccttcaaggaaactcctgcctgaaaagacccctggatcaggcagggaaagccagtaccaagcagctgaggacctggcttcgtgtcccccaccacgcagtcagcgttctgaagcagtggcttcccaaatggctgttgaataagtgaataaatctcttgggcatgaacaggggccaggtggagttttctctgcagagctggtacttgctggccgcactgtctcctggtttgcagtggaagtgtggaggaagggggagaattactcagaccagtgggagagtttcatgtcccccggaagtattttgagcccagtggcaatg

SEQ ID NO: 144925 - DNA, 371 bp, Homo Sapiens
tttatgttccaatacaactttatttgcaaaaacaggtggatttggcctccagagccagagttttccaacccctgagataaagcaaacattgctttcataaatgttcacaattgtaaaaatataaagttcaattaaattttacatttacttagatttattagccagaatttttataaaaggattgatttttataacttcatataatgctgcaattatgtgactctatagattttaccttatttaaaaattttaaatgtctatcaattttaaaaatcaacagtaattgtattgctatttaaggatcactttaaattataagatctccaattcacttagacaaaatgatcttgagagttactaataaataattt

SEQ ID NO: 144926 - DNA, 493 bp, Homo Sapiens
gaccttctgatccgagcgcttcagctcctcccaggccttagccgcctgctgctgcagctcccgtatcctctgggccttcttgagacgggtcagcaccagggccacaatctgctggtcctgggaggacaccaccacctcttccagcttgctcttcaggacctgggtgtgcgggctccgcatctctttgctggaggccaagggctgggagtcccggctggctaatgactcaacctggtcgctgctgtctctcttctgggcgcacacgcaggctgagtgcctcttgaacttttgcgagggcacagaagaccgctccgagggaactgaggaaggggaccagcgacctagatgtctgccgagtggcactgcccactggtctccaccctgtgccttttctaccctgaatgtgccactcaggggagtgccagctcctccggggcaaggcgggggcgagtctccctgggccagagggtaatgcgggcagggctgcggccgc

SEQ ID NO: 144927 - DNA, 461 bp, Homo Sapiens
  misc_feature (347)..(356): n is a, c, g, or t
gctgtattaaattatactttttattttgatatcattgttgattcacagacacttttaagaaatgttacagagatatctcatgtacattttacccagtttcccccaaggataacatcttgtaaactacagtaaattatcacagtctggatattgacattgatataattaaaataaagaacactttcatcactataatatccctcattttgcccttttgtagccacagccacttccctcccatttccacttcttcattaacacagcaattattaattttcatctctatagttttggcattccaggagtgttatataagtggaatcatttagtagacaacattttgcaannnnnnnnnncactcagcctaattccctggtgattcatccaggtcgtggtgcctgtacccagtttgttcgtttttattgctaagtagtatttcctagtatggataaaccacagtt

SEQ ID NO: 144928 - DNA, 594 bp, Homo Sapiens
  misc_feature (493)..(524): n is a, c, g, or t
cagaaaaattgatgcttttataaagtgtgttataaactttctccgacggcatttggtataaaacacaatgagggagtgaattgttacccaattaggcttgtcgggtttgctaataacctgaccgttaataaaactgtggaggtaattggatctgaatttgtgaaagaccccatttccaggactgaacctaggtcagagctctaaattggtccttctatttttcaacaaatttaaagtaatatttctttgtaatataatattgcatcctttgtgggaatgactataggtaaaatgtagtaagtaacgcagaaccagggttggctttatttaaaagctagtgacctaaatagaaagcgaacttcaagagaagttgtaagtacagtggcaaatgcttattacttacttcaaactgtttcccaaaataagtgcatttattttgacaataaaacttaaggctgttcatgagaaggccttgtaaagttactctagaggnnnnnnnnnnnnnnnnnnnnnnnnnnnnnnnngtttacattaattattcagtgttgtgagtaaataaaaatgtgtgctctttactgtttttcatttttaaag

SEQ ID NO: 144929 - DNA, 2166 bp, Homo Sapiens
ggccagcttctaggtgggctgctccagctttctggagttctcattagactgggttctaggcgggctgctccagctccataaggaagcactcgatgtcgtcatagaggctgttggcgctggacaggcagaggctgaggctgctgctatccagggaagacacaccctcacgctgcgtgccctctaggtgcactcggcacagccagggttccagcttcaccaggaccaggctcttctccttgggcctcccagctgacaggtcctgcccgaagcccaggtagatggtatagcgtggggagccacggcgctgccgtgcccggaattccaccagctcttggaagaagactctgaagtcgaagatgggggtgtcacagttccgaggcagcaggcaggctggggtggaggggctggcggagcctgggggtccgcccacctcccagtacaccttgcacttgcccatgcgccgggcccacagctgtggcccccgaagctccaggtgcaacccaggggccacgtgccgcagcagttcctccgtgtagcgcagctgcttctggtccgggagctcggcagggctggggaatgctacctgctgggggtctgtggcccggacagctgggtctggggggccgtataggaacgtgcagctcgggtgtcccaccaccttctgcagcaccgtgcggcccttgtacatgatggtcacgtccagcgcccctgggctgggctcttgcaccgcggtgcaggcgcttggggagggtgacaggtacggctctgcctggtgcggggactctggggccgcggcctcgcctgtcgttagtgccgcgggctggggcccggggctgggggtcgtctctactgcccacccgtacagctccccagcagggagccctgggcctccagcacaggcacccagtcaggggaagcccttcttgtccctctcacaggagccttggttgggactggatctgccccccatgacgctgtcagcagatggtctgccaggcagctctgttgcactgcctggagcaggaggtccccctcgtcaccagctggggcagggagggggcctggggcttggagtccagcatgtgtgtgtgccaggaatggccctgggggcccaccctgtggtggtgggacagctgcgggggcctctgcctcagtctggtccgtgcctgggccttctcgccagcacagctcccggctgagcgcgtacaccttgtgcgggtcggccgggtcccccgagtttctcgcagcatcacgaagcgacgcgtgctgcgcagtgcgcaggggcctggggctcttggagtccagcatgtgtttgtgccaggaatggcccctgggggccccaccctgtggtggtgggacagctgcgggggcctctgcctcagtctggtccgtgcctgggccttctcgccagcacagctcccggctgagcgcgtacaccttgtgcgggtcggccgggtcccccgagttatctcgcagcatcacgaagcgacgcgtgctgcgcagtgcgcagcggaagttggttttccagccggcgcgctccgcagtctcagcctcggggggcgggccacctcccctgctgctaggcggccacctgccgcgggccacagcccaggccttgaagatgcgcgcgtcggcctcgctcaggtccttgcgcgcgaagtgcttccagggcacgcggaaacaggtgcgggcctcgtccagccactgcagcccctcatagcagccgctgctgatctctccaaggagccactctccgaacagcacgcgtggggctgccctctcaggagccaaggccattgctccttctgcaggggcagttaggtggcggtcaggtgttataacaggggaggtaagggctcctgtcgcagcagacgccaggccgcggccacaggtcgtgtggccaggtgtcacaggtgtccacaggtgtggactgagggcttgtagccaccgacgctgcctcggtatggatctcttggcagagggggctacaggtgtgactgcaggtgtggccggcgcgcacacatgaagtcacaggtgttgaaccagtgtccaggcctggcgggaaggcgcaggccggaccctgggtgccagagccgccgggacgggaagtttcgtctcgcggggaagcggagggccggcgcttttatatcccgggaattccggacc

SEQ ID NO: 144930 - DNA, 840 bp, Homo Sapiens
tggggcccaccctgcagggaaagtcagggtgaacgtaagcagctccgcggcctgcaaggaggagaggcaggcagagagaaagggtacctgtgttgttggacagactgcgggggcctctgcctcaagtctggtccgtgcctgggccttctcgccagcacagctcccggctgagcgcgtacaccttgtgcgggtcggccgggtcccccgagttatctcgcagcatcacgaagcgacgcgtgctgcgcagtgcgcagcggaagttggttttccagccggcgcgctccgcagtctcagcctcggggggcgggccacctcccctgctgctaggcggccacctgccgcgggccacagcccaggccttgaagatgcgcgcgtcggcctcgctcaggtccttgcgcgcgaagtgcttccagggcacgcggaaacaggtgcgggcctcgtccagccactgcagcccctcatagcagccgctgctgatctctccaaggagccactctccgaacagcacgcgtggggctgccctctcaggagccaaggccattgctccttctgcaggggcagttaggtggcggtcaggtgttataacaggggaggtaagggctcctgtcgcagcagacgccaggccgcggccacaggtcgtgtggccaggtgtcacaggtgtccacaggtgtggactgagggcttgtagccaccgacgctgcctcggtatggatctcttggcagagggggctacaggtgtgactgcaggtgtggccggcgcgcacacatgaagtcacaggtgttgaaccagtgtccaggcctggcgggaaggcgcaggccggaccctgggtgccagagccg

SEQ ID NO: 144931 - DNA, 843 bp, Homo Sapiens
gctgggacagctcgggggcctctgcctcagtctggtccgtgcctgggcctttttcgccagcacagctcccggctgagcgcgtacaccttgtgcgggtcgcccgggtcccccgagttatctcgcagcatcacgaagcgacgcgtgctgcgcagtgcgcagcggaagttggttttccagccggcgcgctccgcagtctcagcctcggggggcgggccacctcccctgctgctaggcggccacctgccgcgggccacagcccaggccttgaagatgcgcgcgtcggcctcgctcaggtccttgcgcgcgaagtgcttccagggcacgcggaaacaggtgcgggcctcgtccagccactgcagcccctcatagcagccgctgctgatctctccaaggagccactctccgaacagcacgcgtggggctgccctgcgggtgcccggccgcggagagtcagggccggctgcagggcgctcggggactggcatctggagagggtgggccgggctcttacctctcaggagccaaggccattgctccttctgcaggggcagttaggtggcggtcaggtgttataacaggggaggtaagggctcctgtcgcagcagacgccaggccgcggccacaggtcgtgtggccaggtgtcacaggtgtccacaggtgtggactgagggcttgtagccaccgacgctgcctcggtatggatctcttggcagagggggctacaggtgtgactgcaggtgtggccggcgcgcacacatgaagtcacaggtgttgaaccagtgtccaggcctggcgggaaggcgcaggccggacctgggtgccagagccgccgggacgggaagt

SEQ ID NO: 144932 - DNA, 904 bp, Homo Sapiens
gggaggtacaagtacggctctgcctgtgcggggactctgggaaccgcggctcgcctgtcgttaggccgcggctgggcccgggctgggggtcgttctttactgcccacccgtacagctccccagcagggagccctgggcctgtggtgtgggacagctgcgggggcctctgcctcagtctggtccgtgcctgggccttctcgccagcacagctcccggctgagcgcgtacaccttgtgcgggtcggccgggtcccccgagttatctcgcagcatcacgaagcgacgcgtgctgcgcagtgcgcagcggaagttggttttccagccggcgcgctccgcagtctcagcctcggggggcgggccacctcccctgctgctaggcggccacctgccgcgggccacagcccaggccttgaagatgcgcgcgtcggcctcgctcaggtccttgcgcgcgaagtgcttccagggcacgcggaaacaggtgcgggcctcgtccagccactgcagcccctcatagcagccgctgctgatctctccaaggagccactctccgaacagcacgcgtggggctgccctctcaggagccaaggccattgctccttctgcaggggcagttaggtggcggtcaggtgttataacaggggaggtaagggctcctgtcgcagcagacgccaggccgcggccacaggtcgtgtggccaggtgtcacaggtgtccacaggtgtggactgagggcttgtagccaccgacgctgcctcggtatggatctcttggcagagggggctacaggtgtgactgcaggtgtggccggcgcgcacacatgaagtcacaggtgttgaaccagtgtccaggcctggcgggaaggcgcaggccggaccctgggtgccagagccgccgggacgggaagtt

SEQ ID NO: 144933 - DNA, 419 bp, Homo Sapiens
tacatttttaaataatgatcaaggaatttttttattcattaagtttcagtatcattacagaaaatgttatggtacagaattgtttaacattattttgtctttgctcttgatttccacatgaatgctggtaacactaatatctgtacaagatcagtctttgattttatttttttgttctgtacaattttaaatgtattggttaaaaaggctgtcagcacttaaggaagcattttttcttcagtttgtttcttcaaataaaaggtgtccagttactgcccaagagtactgtgccgtgaggctattggggcgagaaacctccctggatgctctgcaggggatggttcttgaggcaaggcagagcctccacccagtcagtcttcttttggcatgttctgtctttggaggtagcatcaacaatc

SEQ ID NO: 144934 - DNA, 839 bp, Homo Sapiens
ttttttagttctaatacatttttattagaaacattttctttctacgaaaggtctacttgagagtacaaagtcagttttgtagtatatgtaactaaaagtctactggatacccaaatcccttgaatgatatttcaagtctctatatgactgcctatgtggagatgtccaggccaatagtgaagaggaatacatgtttggggctcctgttggtctctgtcgactcttctctttcttttttaacccattttccatttaggaaggaaagtgcagctcgctgccaggtgcagttttctgttttcatattggaattttgccaatatgtctttggcttttggtttgattgttgagttgaatggccatggacaccttggagagaagtggagcatggacccgtatgactccttccggcacgtcagacattcgtcttgccgagggtgatttttgcagtacctttgaagtcttggggcttgcagtctcccgctcgagggtcttcctcctgagcagcttcctgacacttgggagctgcttcttcaatagcatcgtggcttcattcattcttcttacttgagtgattaagaaagatggaaccttccacaaaatcttctggtacttaagcattaggcggatgatgtgggccgcagtgtttgctaacagtaattcttcataatcagagtgtttgcttctactgaagaaaaggtttggtgccatcactgtagaaatgttccacagactcattcggttttttgattcattggcaatcactttattgaagaatgtcatgagggcctgagctgcatctctgttggcatcaggcagcgccatgaccatgaggtgtaagg

SEQ ID NO: 144935 - DNA, 415 bp, Homo Sapiens
catcatacatcatctatttatttgcccttcctataatggaaaagtctcaagggaaatattcagggctgctttgatggttccacacagtcttcagaaactcaggcttctagtagccctctgtagcctttagcttcatgatttcagtatgacagcagtcatcaatgacgaacttttcttctgtgctctggggagtaaaatcggtagcatctggaagggaaggctttgtagcatctggagtgatgagagcttttgatccccatttccctgtaggtctctgactttgcaattacatttgaaggacttctctcatccagggccccacagtttgggttaaaagtccacctgccatcttttctctctctgacacatacaatggaaaaggctttgtcagatcgggtaaccccacggctgaagc

SEQ ID NO: 144936 - DNA, 385 bp, Homo Sapiens
tttactcaaacacagttttttatattctgttttgtttttaaagtaataattctcatggaaccacaagatctcaggacatcttggaatcaggattttcttcgtggaatttatatccagttaaaaggagccagtcaagttgttcccttggttttgcaatgaaacaagcaaatcaatcttttcgatgttctggttggtgtttatagaggatgccagtggagaattctctggcatttgctgagaaagaagtgttgtcacaggtggctggccctcgttttgtggttggcctggctgacttatggccatcaactgatcaggcaatgtagctggtccagaggttaaaagctgactacagtctgatgctggagataagaagagagttacttgc

SEQ ID NO: 144937 - DNA, 739 bp, Homo Sapiens
  misc_feature (69)..(69): n is a, c, g, or t
  misc_feature (96)..(96): n is a, c, g, or t
  misc_feature (114)..(115): n is a, c, g, or t
  misc_feature (125)..(125): n is a, c, g, or t
  misc_feature (154)..(154): n is a, c, g, or t
  misc_feature (198)..(198): n is a, c, g, or t
catccctgccatccgcatgcatgcatgcggatcagcattagccctagttgtaatgactgaattccctcntgcagatgtgacctcagcacagggctnttctagtcagcctgtgcnntgtacacaantgtgctcattaacacgtgtggatactgcntgagtggtgcagtgctgcctaccagcagtcttgtttcccatctngtcaggagcagaggcctgcccatgagcatccagggtcagcattgcagctgtgtttctgcaggggcttgaggggtccaaaggtctgaatcaaaggagctgggtgggcctgagtagggggtgggttgccctctgcagtagagaactgacttccgagagctgtaggtgaagtgaggaccaggcagcagtccagagctgtgaggccccaggcccagaggaatggaatgaagaaagacctgttccacacaaggagggttttctagtggaagctgagcttggaagctcctggagccaagtttaccacaggataggcaggtacagccgcccagtgtgtgcagtgtgtgcccactctggtgcttggacaagaagttcaagtccctttcaggtttacaattgtgaaaacaacaaaacaataccttcctggaaagtaggaagacaaagcagaaatgtgaattggaaatacagccaactattttaggaaaaactaattagcaagcatctgattaaacttattcagaaactggccgggagcagtgtctcacac

SEQ ID NO: 144938 - DNA, 346 bp, Homo Sapiens
tttcaaggttccatggcaagcagcttgcccttttattaataacagttattcacagtgcaggagtcaaaggcatttctgcttgggtgctcattaaagctggccccataaagaatgggagtaaagcagtaaatcagccgtgggtccaaccatcttgtgtcactgggagtagggggtctgtcatcttcagatactctccagccatcacaggtggcaaaagccggggaaaatctagagtcagcccagaaaccgtgactccagcccagttctgctcttcccaaaagccctgctgagatcccaggaatgcgccgctcctgcgtttttccaggggtgggtaaatgctgattca

SEQ ID NO: 144939 - DNA, 416 bp, Homo Sapiens
tttagttttttaaaaaatttaattttcttgtggcacataacaatgaactctggtgtcaccagcctattgtataattaacttctcgtcttttgttccttatgaatttacatatttaattatctttccatttaatttcccatggttttgctacgttgactaaactctgtaatgagaaagtcttttaatttaatagactttgcaggtcatgtgtaaccagctttggaaatcattttaggattactgagtgctgtttcataatgctgtatatttttcctgccaggatttggagtacctaggttatttgtccaccagaacaatggctgtaaaggagaaaattgagcagtggtcagaagctgctgagaagatgcggtaaaacaggttacataaaaaacaatgctggtttgaaataacctatg

SEQ ID NO: 144940 - DNA, 661 bp, Homo Sapiens
  misc_feature (643)..(643): n is a, c, g, or t
tttaaccacaaacgtctgtcggtgaagtgtgctttaattcagcaaaaatacagcattcaatacatatacataacacaatatgtatacggggctgcttttaaacaacgccaaacctttaagtcaaagccttgttccagttgcttgtatattccttctgagcttgtcatccacacacttttttaacctaggtcaagttactgctacgggtgtttttgattgcagaagtttggcagttagcagtaaagaactacctttttatacaaattatcttcccctgaacctgtccaatttagcacacggcaagacagaatatctcatccattcgcctagaaacacgggtccaggctgtaccaggctcaggggacttgcaacgctttcgaatcacttaatgggtgtgatcaagatttccctagccccgtctcagccatttgctaaagaagaggcctgacttgtgttgagacgaaagctcttacagcttgatggaacccaaactgggacttctggggggattaactttcagtcacatacgttcaggactgtgcgtatgcgtgtcgggagacgcgtgaaccaaagaagccacagagcccgaaaaagacctgcaacaggaggtagagaccgaggaatcggccccaagctgcagacnccggagaggccagaccca

SEQ ID NO: 144941 - DNA, 181 bp, Homo Sapiens
gcgcagtttaggttgagcagcgaaagggatagggcccagtgctttctctgcgaggttcagttggcctgtccctgtcctatcaccgtttgtcaccgtttggggagcgccacggaatgccctgtctccaatcgagaggtgcactcgtcgccctggcaacggagtccggaagaaccacagagac

SEQ ID NO: 144942 - DNA, 693 bp, Homo Sapiens
aacttaacccctccttttctccccctgtccctgcactggtccctggaaaggcacgatgggaaattgaagaaatgtctctaaactcagtccaagggttataataagtttgctttgctttggcattcggcggacaaattagatgcggttttgctgatttggaggggtgagtgggtgcatacacaaatgtgggatttatttttttccttctttaatgggattccttatatgacaaaaagcgacaagaagaggacaccgtctgggtgggatgcacgtcagcctggcaggctcctgggctcagcgtcctgggtgcgtcctggaagctcttctcagtgggctgtgctggggcggctcctccgagggtgccgtgagctccgcttctgtagtctgcgtttgtaggtggtggggtctgtgcaggtgatctgaggctcctcccagtgcccgctgggctggcaccggatggtgggcatgtggcgctggacaaacccctctgtgcactggtaccgcaccagggaattgatctcataccggtccttcttctgcccgaaggtcctggcatgctccaccacagggggctctccgcaggccactgtgccctttttacacgtgaaaggggaggtggtaattgcagggaacatcatttcactcgcccttctcgtgccagatcatcaccacacagtcctctccaccggcaaa

SEQ ID NO: 144943 - DNA, 458 bp, Homo Sapiens
  misc_feature (93)..(166): n is a, c, g, or t
atttacgaagttggctgacttttaatgagaaacaatggaaccagaagacaattgaacagcaactctaaaatgctgggggctgggaggagcccnnnnnnnnnnnnnnnnnnnnnnnnnnnnnnnnnnnnnnnnnnnnnnnnnnnnnnnnnnnnnnnnnnnnnnnnnnagacagagataattcatcgctagttgatctgtcttacaagaaatctaaagcaagtccttcagcctgaaagaaaatgacaccagaagatgattcaaatctgcatctgagtcttccaggcagctgtcttaactttgtctcaagcaaactctttaaattatattttgtgcctcagcctcttccttttaggtcaacactttttatagctgaagagtagtctgtgatatgcatgtaccacaggttgtctatccattcacccatttgggttggttcacttttttggctattctaaaga

SEQ ID NO: 144944 - DNA, 543 bp, Homo Sapiens
ggggccgcccgggcctgctccttccagcactttcgccgcagcctccgccacatcttccgccgccgctcggccggggagctgccagcggcccacaccgctgccgcccccgggacccccggggagggtgctgagacccccgcccgtcctggcctggccaagaagttcctgccctggagcctggcccgggagccgccacccgaggcgctgaaggaggcggtgctgcgctacagcctggccgacgaggcgtccatggacagcggggcacgctggcagcgcgggaggctggcgctgcgccgggccccgggcccggattggcccgaccgcgtgctggagctcttcgacccacccaagagttcaaggcccaagctacaagcagcttgctccagcatccaggaggtccggcggtgcacacggcttgagatgcctgacaacctttacacctttgtgctgaaggtgaaggaccggacagacatcatctttgaggtgggagacgagcagcagctgaattcatggatggctgagctctcggagtgcacaggccga

SEQ ID NO: 144945 - DNA, 1389 bp, Homo Sapiens
agctccctccagggccaggcagggaagcaccaagccctggcgtgcacctgcacccactcaaacgccgaagccttcgtgtcatcactgtcacacgggccactcagcacccatgaagtccaccacgggtctctggggcaatccttctctgaacgcaaaaccctgccctggctctcccaggtctgccagccacgcatgccgggtctgagactcccccggaccgctgggtgctgcttggagcccctcgtggcgcaggactgatgggcaggtcccgctggagcctcttcagcggtgtccccgacccaggaaaccccgaggccaaggaaccagcctggctttgccgcccgacgctcttagcgaacacagtccctcattgaaccaaacggttctatctcaggagaagtcatccagtccttatggtattaagacaagaggaaaactttggtcttgaactacccggcagccttgcaaaatgtctgcatctgacaaatccccgcctctgcggagctcccgggcacagggccgctcccagccccggccctcggcccctcacaagacctgcaggctgcgctcatgcccgtccagctggaccttgagcttgtggagctcctcgatctcgcggttgtggcgctccgttttgtggcgcaccagggacggtagaagtggatggtgaagaccacgaagatgaggcccacgggcaccatgatgatggtggacaccaggcggcctgccagcccgtgtgactcccagggccaggtggggggccaggctggcgccgggcatccacggggaggaacttgatccagcagagcagcaccacctcggccaggaagagtaggatgccaagcacggtggagaagccccaggccagctcgatgtaggggtgcatgcgctcatgcggggactcgctgatggagttcaggttgtggatgttgctcacggcctccacattgggcaggatgcaggtgctgatgaggagggcgaacaggtgcacggccgccagcaccgtggtgcaggcgctgaaggcaatcagcagcggccgcgggtactggtactgcgtctccagctgcacctccaccatggccaccatggcaaagccggagaggagggcggaggtcctgctggaggccttcagcttggccctgctcaggtagagcttccgccacgacagggcctgtaccgagtggtggttagaggtgaccagttccaggtagctgcggcggacccagtcccggtaatccatgcccttatggccgggctcagggcaggcaggagcagaggggtcgataggcacgttaagctcagcactcatggtgggagccaggcaggtcatttatacgaatgccaactcaggctctccatcccatctccttgcgcacatccgcagccagc

SEQ ID NO: 144946 - DNA, 462 bp, Homo Sapiens
gagaatatccatgaaatgtgggacagtcacaaaaggtgtaacatatgcataatggaaattccagaaggagaagaaagagagaaagaaataaaagaaatatctgcagcaataataattgagaattcccccaaatgaatgtcagataccaaaccacagatccagagagctcagagaacgccgaaaagaataaacgcacgcacaaaaaaacgcaaaaatctacacctaagcttataatttttaaactacagaaaatcacaagtaaagggaaaaatcataaaagaagccagaaggaaaaaacaccttacctataaaaaaacaaagataagaattacatgcaacttctcctcagaaaatgtgtagtatatactccacaagtaggttcttgccaagaattgaatttactctaaaatgcaacactttgcttaagtgttgtttgtccagcagatgtcagccttgcacaag

SEQ ID NO: 144947 - DNA, 390 bp, Homo Sapiens
tttttgatgtttaaagagttattgggctttaaaacagaaatcagcattcagaacctctgctttcatgaggaaaggccttgagggcagtggaggaggaggctggactttagatccttacttggggtggccagagtaggttcctggttatatcggctcttctttttgtcatccagttcctgtaatactgctggtgtcctggcttgggaggatttctggaggtggtgcacaggaagcatttagcagagggtctcatgcatgaggaatgggagttattcttcttatggaatctgctctctggctctcgggcctccctggagcagaggctgcccagtgctctgtctgcagccccatcttccacttcagtgtggctccacttcagtgtgctccagc

SEQ ID NO: 144948 - DNA, 427 bp, Homo Sapiens
tttctcattttaaaatttattttggatgtttaatccacatctgtgtttatttactgaggggagcaggtagaattgtagagtcacagagaaacaaattagagctaggggttcagggttactcataccaaacttctcatcaccctgcatccccctgccagccatgttttaaaagcaaacgtgttattggagtataacatgcctgcagaaaagcacgtatatgtgtgtatggtatgacagtttttacaaagcgaacatacccaagaaatcacccctcaggtcaagaagcagcacacggccagcaccatggaatgccttttccagacgccagcagaacagagctgccggatgttctagtgagcgcgtttctgctggtgaacctgactgtgcccttctttgtgggatctgcccaggatggcgtcgctgggtc

SEQ ID NO: 144949 - DNA, 194 bp, Homo Sapiens
tatctagcatccacttgaaatctatttttaaattgttggattttaaacaatcttagtttgtaaggtataaaattgactatgcttaccactgtataatatatttacagattaatttaataagcctttactaaatgcatgtacagacaggtgtcagaggtgtattatagtttacataaactggtaacttccaactt

SEQ ID NO: 144950 - DNA, 546 bp, Homo Sapiens
ttaacaattattttttcctcatttctctcagtaaccgcactaatgacttttaagtgccagcaagctgcaagtgctgccaatgagcccctgccctagaagggctacagttgggcaccatgtgctcaggggagggccccatggcagtcagtggagggtgggaagctggatggccctggccactcagcccagatagcaaggagggccttctcctcccaaggactcaaagtctcagaggccggagaaaggtgggggatggtctcccaggaagcagaatgctagaaggccttgcagggcaaacctgacgggccttcagggcacctgacagggctgggactgccggcttccctcacttctctcccgagcacaagaaaaccttccagcaggagccaggtgggcctgaggctgtgaggctgtcactcacttaccaggggattcaggcaccttgaacatggctttttcttgaagcagctgctcaggttggttcttgttgggtaggtccctcatcatctgcagctcctcgttccagtactggggccggtttggtaa

SEQ ID NO: 144951 - DNA, 418 bp, Homo Sapiens
tttgtttcaagtggtttattaaggaggtgcagagaacactggcaggggattcaagaagtgatggagaatacagccaactactatatttagctaccactatgggtaactagggcttaatctcagaaatagcatagtacacaccttttcaggattatccaaactgagaggcaagggagctggggtatttgtgcaccaactctcatccatcactggtagactgctgctgagcagtggtcatccttcagcgtttccagcctcccgcatgtggcatcaaggcagcttctgaacatagacatgtaggtgttcccacatctttaagatctctgcttagttgtcacttactctggaaccttccgtctcggatcaaacatgtctatgatatacttttttatggtactgattgtagtctttgtcttac

SEQ ID NO: 144952 - DNA, 557 bp, Homo Sapiens
aaaggacccgggcctggaggtgcatcaaggtggagatcagaagacccccacgccctcgaaacggcagagcagggcggcctggggctaggggcatcaggcagctgcttcctgcttaagcactacgactcgcacccagagcctcgaactccaggctgcacaaatacgattcctgcttggttcccagttggccgtggacgctgccaaggggccctctctccacacccctagaacaaaagcctatcctgccggcccaagaaacagtcacggttgagggggaaaacgaaaaccttcctttgactacaggaaacttcccaaaggtttccctgtttcttcatctaaacccatctaagtgttgtgacacatgtgccggtgtgctgtgtgcgttcacttacaacagccccattcatgtatatgtcacacgtcaggggatgcaggcaccaaggggctaaggaactttctggggtcacacagctccggagttgggatctgaaccagccaccgcttaccgtggtctccgaggttcctgggctggtcctggcaccctcccccgcggccgc

SEQ ID NO: 144953 - DNA, 784 bp, Homo Sapiens
  misc_feature (126)..(160): n is a, c, g, or t
  misc_feature (395)..(472): n is a, c, g, or t
tcttgtagatctgtacacccggtatatgaggatataagtattactggtaattgttgtagctgtgataataagttggttgtaaaaagagaatattacactttcagagaatgatgtgtctgtatgctnnnnnnnnnnnnnnnnnnnnnnnnnnnnnnnnnnngtcagcctcctatgtccatgggttcaactgaccttggaatgaaaatattccacacacaaaaaaattgcgtctgtactgaacatgtacatttttcttgttgttattccttaatacagtataacagttatttacatggcatttacattgtattacgtattataagtgatctagggatgatttaaataatacgggatgtacacaggttatatgcaaatagtccaccattttatatcannnnnnnnnnnnnnnnnnnnnnnnnnnnnnnnnnnnnnnnnnnnnnnnnnnnnnnnnnnnnnnnnnnnnnnnnnnnnntgcatgtgtgtaaagattggtcacaatttggtaattgttgaagctggtttatgggacactgaagtcaattataacattttattttcatatatatatttttgatttccacaataaaaaatgtagaagttagtaattacttctacaactaataatatctcttccctaaccaagaaaataaatagctaattattcctccataattcctatagcatttattgtctcatgtcatcatttggttgtcttatataacaatccttcccaccccggccgtaatggccgaattcccgggcatatgtccggtaccgtcgactg

SEQ ID NO: 144954 - DNA, 446 bp, Homo Sapiens
  misc_feature (263)..(263): n is a, c, g, or t
tcgcctcgccggtagggctcgcccaccgagtgaagccggccgcggccaatcgcggcgcccgcctgctcccagtggcacggcctgggggccggcgtccgccggggctggggaagccgttccaagttccaagggtcgcgggtgtaactcatgcccctcccagcacgcgccggcgtctccccttggcccccggtctgggtgcgtttgccaccctctcctccttgttccctaagaagcgggggaggggaaggaggcgggcagcctgngcagggcgccagagccgtggtcgggcaccaggtgaaacgcccgggtcagtctgtgtaggccggacccttggcgctcggctgcggatgtgatcccggggactggcggccgaggtagctcagaagagcgaggtggctttcgctcgtttctgacccgctactgtctgaaactttgggacatattgc

SEQ ID NO: 144955 - DNA, 506 bp, Homo Sapiens
attgaacattaatttttatttacgtaataaaagagtagccaaagttaagtttactgttctctccattattttatccacaagctaagcatatggcagtggccagaattcccaaatagcatctcctgtcccccacaacaaatggcacagagaacactcactccattcatatctgaataaatagtaataatggccatcaaaaccataattccacaatcataagattaaaagggattaaaaacttttttcataccattatatataattaagaagggttacttgaatagcatacattcaaaacatcaatccatctaaacaaaatattggtctataaagtactaactctccaatccttacttttgggcaaattcacaagaaataagcatagaaattacatataacaataaattccctatataaatgactttacagacttaacaggtctataagaaaaaccttattttttattgtctatatattacataaaactgctttcaggatttattatg

SEQ ID NO: 144956 - DNA, 773 bp, Homo Sapiens
  misc_feature (237)..(252): n is a, c, g, or t
  misc_feature (708)..(708): n is a, c, g, or t
tttctgggggtagatttattgagcaagtgctttctttaagatgggagaagaaagatttgggtactcagggaaagaggggcacagaaaggtgggaggggtagacaccacaaaagggaaggaagggctagggagaaaacagcagatgaggtctgggcaccaagtttatttgctctaagacagaggctggtcgagtccataaaacaggcactgctagagcccatgttctttggaatgcannnnnnnnnnnnnnnngcgcttccatccctgacagagcactgaactgaactaaacttccccgcatatagggatcggagggttgtccagattgtcacacatgaatagcttgtgtgagtctagagaaggaacactgattagcttccaatctgcaggtcttgtgttcagcaagcctctttctttcagaaggaacaaaagcatggtgctagatgagaaggttatagaatggaagaaaagtttcccagtcactgggtgaaaggccaagcacgttcccttgattatagactattgggcagcgtttctgaaaatgagtattgccaggtggttgaatgacgaaatctaggccagctacagaaatcatctcccatgcaattgcccaaatgccttctaggagctctgatgccagctgctgatgcaaataagcccataatgaaacaggcaacaggagtggacaaacctagcatgctctgcccnctaaatgacttttcaggtagaatgtagttagatgcctcagatccctcagccattcaagcatgttc

SEQ ID NO: 144957 - DNA, 753 bp, Homo Sapiens
ccccttgttagtgttgtcatcgtgtttttttgttaacagaaacctcagaggatctgggaaagaacatcttgccatccgcaagcacagagcaaagcggagatttgaaaccatcccctgctgacccaggctctgtgagagaagactcaggcttcatctgctggaagaaggggtgcaaccaggttttcaaaacttctgctgcccttcagacgcattttaatgaagtgcatgccaagaggcctcagctgccggtgtcagatcgccatgtgtacaagtaccgctgtaatcagtgtagcctggccttcaagaccattgaaaagttgcagctccattctcagtaccatgtgatcagagctgccaccatgtgctgtctttgtcagcgcagtttccgaactttccaggctctgaagaagcaccttgagacaagccacctggagctgagtgaggctgacatccaacagctttatggtggcctgctggccaatggggacctcctggcaatgggagaccccactctggctgaggaccataccataattgttgaggaagacaaggaggaagagagtgacttggaagataaacagagcccaacgggcagtgactctgggtcagtacaagaagactcgggctcagagccaaagagagctctgcctttcagaaaaggtcccaattttactatggaaaagttcctagacccttctcgcccttacaagtgtaccgtctgcaaggaatctttcactcaaaagaatatcctgc

SEQ ID NO: 144958 - DNA, 899 bp, Homo Sapiens
ctggggctggaattcattcaacagactgtgatgccatccctgcctcggctttagaaacctgaattaaattggtgcaaaaaagtatttctcttgaaccagaaaccggtatattttaagagaatttcagttctcctgcagtatttcaaacaacagaaaagcaagcttgctttagggagctggcactgttcacaacgccaaccaaaagcttacccccaagtccccatcactgatgcagaggttgtgaagacaatcgcctggtaacatttctatgatttgttcttggaagatgtgtctacctcagctgttttcaaaggacagcccttagcactggatgtgactgtaacatctgaattaacagtgcatgaattttgtctgctgcttgaggattccttgcacagatgaaggggtgctttctccgcatgcctgaggagggcatggttggagagtgtggcagggttgcctcactgtctctgctgcccgcagctgtttgcatgtcttggagcaatactgtgccatcccccagaaggtgaggcagaggctcacagacacagagctggtttctgtcacccgcgttgctgctgctgacctgcagtgtgagccgaggcgtgcacaggactcgggggagctctgcagttacctgccctggaatcttggcggattctgagagacacagcctggggtcacgggcacggcagacgcactggggccggacgggagcctgatccaggcctagctgcacatctggccacaagccctgaaccccccgtaaaacgggggtggctccttcttgcagggcccacgtggagaccgacaggggcacactgaacacccagtctgttgctgggctcccaggaacacctcaaagaatgctccatcctggcctgtgtgctgggcccgtg

SEQ ID NO: 144959 - DNA, 434 bp, Homo Sapiens
tttgcagcagaaatggcctcgatgccttcgggattctttagcctggagagaagagggctcaggggagtcaatgtgtgacctcaacactccaggaaggagagtgggcaagtgggatgccatggacagagccacagaaaaacagaaacctcttctgtgtattaagctgatgctaaagtcagagcagtccaaaggcaggaggctgccttgggaggtagtaagctctctgtccctggaggtatgcaagagggtggagaagtcttggcaaggatgttgaagaagatatccaagcctcagttctgggtgtggagagggagacccagatgatcttggggatttcttccactcttggagctggggagttggggaaggacagggaagggggtggcattgtgggagaggcgggcagtgtggacaagggaatgtgatgtgcacct

SEQ ID NO: 144960 - DNA, 471 bp, Homo Sapiens
ttcattgtcagctaagtatatatacttttgtgttttcctggacagagtgcaagtggctcttatcagccaaggtggtgaaggttcaggaaagctgggcagcactgggccctgctcctctctgcacctgtgtgcgccatgacacacccacatgcagattcccaagtctgtctcccctcccccttagcaagtacaaggctgtgcattaactcacctcggtcctagaggagtatcctagtactgcttggcaacttctaagaccctaacttgtgaaactagggaagtaagaaaccgttcaaatttaacatctgtcttcagtcatctttaaatcgtctctctttataaacactctgctcacttagcagaaggactgaaggaactaaggaacttgctaaagagaagaagaaaacaaaagctagacttagttccagttaattctgttattcttctgaaataaaaatgaaataaaaggaa

SEQ ID NO: 144961 - DNA, 476 bp, Homo Sapiens
ttttttttaaacaggaggaaaaaaattttaataacatatgtttgcacaggagtcccacaaaatatgagactccgagaagagtcagatgatggacactcatgcaccaccgtgagctatcgaaagaatgtgggcttagggcttctgcatggaggtggccacggaagtgggaaagtgaaggcaagaagtgtgtcctgaataaagcttggctggttttcagacaaaaggtcttctgggtaataaatgttgtctggagcagccctcaggagaagaggtaagagcctgtatgggatggtgtcgctgccaacatccttccctgtgatcccacttactcttccctggctgatgagatacttggggttgtgattcatgatgattgaatttccttttgaggatttgtctttgggcagatgaaggaggctcagagaaaagcccctccctgcatgtgctgtgcccaagtgacctcattttgaagtcag

SEQ ID NO: 144962 - DNA, 1194 bp, Homo Sapiens
  misc_feature (480)..(523): n is a, c, g, or t
  misc_feature (825)..(825): n is a, c, g, or t
ttttaatgtggatagatttttattcagaaatcctttcatattcactaactgcaattaaaagtttaaaattacatggctcttaggaatgacgccaaacatgcaacattttaagagtaatattaaacagtaattttgccctcagaagtttacttatcaaattattacaacaggaacacaaatagaccacatattactctttaattagatttgttttacaatatgttcttgtcaacgagctatgtcaaactgtttgtttaaacctgacagaaaagcattttcacaaaaacgtaccatggagagggagggggaggggaagaagcactttttctagagatggaaaatagttccagtaaaaagttcttattcctttcttctaaggagctcgttctgaatattttcacttagttctactgttctttaaacaggactttaaaaagaattttgtatttacaaaatttacattttgttcctacaaaatgnnnnnnnnnnnnnnnnnnnnnnnnnnnnnnnnnnnnnnnnnnnngttcctacatgagaagtgtgcgtactttcaattagttttcattaatatcttctgagttttcctcttaggtggttggtttctgggtaaggcagagttaggctggtgcacacactatttaggaagtcctgtctcgtggctgacaacatacatgtagtgctcaaggaagtgagttaaggagtgacatgggaatcaaaatgatgcctagaatagtgtaatttgggaaacagccctagatttgacattttggaagttcactgtaagaagagaccccaaaaagaaggaaaagggaaagggttcctcangctaaatatcccactcatccatgcctactcagcggtcactgtgacaaggccatcttaatcgggggcagagatgacactctccccctgtaactcagcctggctctgtctattgggatgtgcctaaatgggatgggtgagggggcactaaacagctaacactggccagggaattaaggagctaaaatgcaagtacctcttgaataccacagcaatctctgtgcacaaatttggactgtactttttgggagaagaggtgaaaactattattaactattcccttccttcaaccaaaaggaaaaatacgcctctttaaggcttcttttaatgatactataatgctgaatttatttatgaaaaagaaacaataca

SEQ ID NO: 144963 - DNA, 392 bp, Homo Sapiens
ttttttgaggtttgtattaatgccagtttttattgtattagacaaatgctctctgagaatcgaagacttctaaaggtagacaggcccagtttcccattagagttctggaagcagagcctggggaaggtctgtcacttgcccatcactggaccagccagaagccagcgggggccaggcggggtctgcaggctgcaggtcccttccagtcctgtccctgctgccctctgtgaccatctctgctaagaaacatcgacagttcgtcctgcagcctccaagcacactaacctcagccatcagatgttcctgaagcccagggtaagtcctgttctcagaagccaacccagctgcttgtctgggccatgctctctcacaccgcagctaggtcatctgcg

SEQ ID NO: 144964 - DNA, 419 bp, Homo Sapiens
gcagcagacaatatcattcagcttgtgctcagtttccctataagggtaagaaaagtttccatcaggtagccacttgtttttatactgaaagactaatctgctccaaaatgctcccaagtagaaatgacaggactcaaaatccctttctaaagcccaacagctaactttttctgactaatctctagcttcattgaaactggctaccaagattgcatttcaggctaacaattggcttcttagttaaggcatcacaactgaaaatggttatttcaacaatggatgctgtggatgaaggaataccaacaaacttctaagaactctcatcaaaaactaaagcaatttgctttgccccagtggcaggcagaaggaatttagcccattatctcacaaactaggaaaggatttttgaattctgaact

SEQ ID NO: 144965 - DNA, 319 bp, Homo Sapiens
tggtgggtgagccacactttgtggtgtatttttcagaagctttgtgaggtgattctgatacataacattggttaaaaaaccactggcttcaattatccaaaattatcccttattcaaaatatcactcattctataaacactaaataactaagactagtatttctagaattatctggttccctctgtgatctagtctctgctgtgtcataatcaacttcccacaaaactgcagtaatacatatagcatatttcacctgcgaattctttgcacaaaaacaatctattaactctcaacacggctcaaattatgaggtggctc

SEQ ID NO: 144966 - DNA, 454 bp, Homo Sapiens
ttttttactgagccaagcgatttattacaatgcttccttttggcagaacccaaaaaggagaatcacatcgtctgtgtgcagtaccttgttatgtgtcacaatgcactgtaagtgcagggccaaggcagtagaagggactgacatcacttacatgacgggcctaggtatacgacacaactctctttgtagacaggtttcaggaagataattaacatcacctggttgatggtcccagtgatatataaaagtgccctttgtagacagagccaaggaaggtgttatatattgtttaggtgtttgttccacatattgcacaatttcatctgtggtctgggcctgggtatagcctcaaatagtaggtcaccaagctggctatatacggggtagaagaaaaagatgagagtcactccacctaggtgctgggctctgcaatatgtaataatcccctctcttg

SEQ ID NO: 144967 - DNA, 352 bp, Homo Sapiens
gtgtatgaattttttattttattatttgttgaaataagaaaaacttcacagggaggtctaagaaactgcttttctcaattctactctatttcatctcctctctctgtctccctaaagaggataaatgtttaatgctgaccttattcctcaaaaccaccctgtaaaataggtatcatgtccactttacagacaagaaaagcaaaagcatggcaagtaaaatgacttggccacatctaggaagtagccaacccaggatccaaacttttatctggctgcttccaaagtccaggtgctaataatcttacacttgagtgtacatgagaatcacctgggatctcaatactgattctgt

SEQ ID NO: 144968 - DNA, 1158 bp, Homo Sapiens
  misc_feature (44)..(44): n is a, c, g, or t
  misc_feature (114)..(115): n is a, c, g, or t
  misc_feature (128)..(128): n is a, c, g, or t
  misc_feature (294)..(294): n is a, c, g, or t
  misc_feature (314)..(314): n is a, c, g, or t
aaaattccataactttttttcaaaaggcttatttcccacacccnttattcccaataatcccctgccattttagtttttaatatgccctaattctgaaaaaccattattttacannccagggagttctncctatctatctcccagagtaaaatgtcttctatgtcaaaaacttcaagaggccattcaaaaagaccagatccaaataatccctatgcatactgcttcatcgggcttggataaaaccagagccatctggtggtgtagcaccatcctcctttccagttacagtctctnatggccccagaagccagacnacaataaccatttgttttatttgctgaaactgtttctctttctcagcaatagctgcacaaacagcaacaatctcatcactttcaaagtcatagtctggaattgactttggtgaaaagtgtgttacttcagctggtgcttcactttttttaatcctctgtgctaccttctgctgctcctggagcgttcttgcccaagagaggtcttctttccatatttcagggttcattggatagatgtgaagggctacttgaaaacttcgaattgccaggattatctctcctaaaccaagttgagcacgtcccaaagtctgccaagactcccatgaatgtggattttgctggacggccatttctgctgcatgtactgctgggaacatttcatgaagagacattagcacctgtgatttcatctcgtatagggtagcatcatttggagttaactgtagtgcttcatcccacttctgaattgcctcccgatatcttttattttcagccaaactggctccttcatccttcagctgtttacttttctcagcacagccttcaagaagaatttctttcctacgtttaatggcatgaagccagttcccttcatcgttgtcaactacatccttctcatcagcagcttcagcttcaaactgctgggaagtgacctttgagaccttctcaccaattttcctcttccacccaaaggaagccattctgccttccctggattcctggtttcctaagaaacgggtttggcccacccctgggcgttcgaacagtccacagaagcgggcaaaggaaagacgactcagtctttcccctccgccaatctcttctccgggacatcccgggaatt

SEQ ID NO: 144969 - DNA, 599 bp, Homo Sapiens
  misc_feature (15)..(15): n is a, c, g, or t
ctaccaacgctgtgnccgccttcgacactccctccctcccaggagccactgaagcggcgactgcgatcgtcactgactctatccccgaagtcactagttcgcgggtcccgaatgtcactgactccctcccaaggaccactgaggcggaggcctcggtcttctctggctgttcccctggagtcggtagtttggtggcctccaacttcactaaaattcacgtcgctgctgcagaaggtgctgtctcccctaactctctcccaagagcagctgtgactgtggccactatctcccctaactctctccctagagacgctgcggcagtggccgaggttttcactgacccttctcaagtcactgcgggagaagccggcgtctgcacttaggcttcctgcagcgaccctggagcggcggtcgctctcttcacattttctttccccgtcgtcgctaactctttccctagactcggcgccggaatggccgtgtagaccgtttatcctccacacgtggtggctagtgcggcggccaccgtcttcgtctgctactccctgcgaatcgccgtagcggcggccgccttccgctggtactttctcggagtctct

SEQ ID NO: 144970 - DNA, 474 bp, Homo Sapiens
ttactatgtacagtgatttatttttattgaaaatacaaagtaatattaaagaaaagatttaaataaataaagtcattccatatcccgctacactaacacaatgaatttgttttgcagattaccttccacatgcataaagattttacaaagtcacaatcatagtatgcatactattttgtattgtgctcattttacttaccatatcaaacatgtccacgtttctacagtcttccaaataattattttaatggcagtataatacttcactatttttcttatcccactttcttgacatggagtttttttccccaatttttgttattataaagaatgcagacataaatgtcttcatgcatttatcttttttctgaattatttttaaggttaaaagtatagaagtagaatttatggggcaaaggatatggtcatttttacagcccttgctatgtagtaccatattgtgtttccaaaggg

SEQ ID NO: 144971 - DNA, 388 bp, Homo Sapiens
cccaaatgaccaatttattagaggctttgcagggatcaggacactctcaaagcttttctgatatgtcctgaggactctgggcctgagtctactttttaaagccattctggaagagaaaaaaattcagatgcttcataatactaaactttttggaggctcgtgtattctgtggagccccatttgggttcccaggtgcctcctggccctggggactctctgtcttaagaagggtggccccagtacagcagtgaccttgcagctgaagatccctctgtgaagcagtgtgatctccgatgctgtcctcccctgcacgaggatcacccactttgggaggcagagtacaatcaggttccctcatgctcaggttatgggccaagtgcttgcgctt

SEQ ID NO: 144972 - DNA, 925 bp, Homo Sapiens
  misc_feature (808)..(842): n is a, c, g, or t
ttcctgtggaggcattaggtcctgcatttaaacgggttccagctattagtaaatcaaatggaaagttataagtaatcccttgaccatggggtacaataaatttttcttagtagatgggaatgtactgatgatagtctcttatttcttctccccagatatgcccagtgatataactaaatacttacctagagccagatctatctcaaaagtttaggtcatttttttgttcctttttgatagtattcaatgagaaataacactttaaataaaactttttccatgaggaaggtacagtaattatccaccttggtaaaaggagaatttacaaacattttgttccttgcagtacacctttcaaaagacatcttcatcaaataggtaagaaaggtaagaattgctgagctaagtagaggtctcttttattgtggtcttcattctatcattattaaaccttaatctcatgtcatgttccaatgcattatgtaagtattcaatcaaagaagtgaggctgttctccagaattggttctctgctacaggtcaaaaccgactgcgccagccttggcgaagctccgccgactgccctttgctccaagtaatttttggcgatttttaaagtaatttttccggcggagtcatagtggcgctatactctcggacaggttatcctgtctctcccgctagattgatgagatcaggcatcactcgaaaatggcgccgaaagcgctgaggctcctcattcaaattcgttagagccccccggccgtaatggccgaattcccgggcatatgtccggtaccgtcgactgnnnnnnnnnnnnnnnnnnnnnnnnnnnnnnnnnnncggccgcttcctcgctcactactcgctgcgctcgtcgttcggctacaaacgaggctagcgccctaatagtgagtctatacatt

SEQ ID NO: 144973 - DNA, 598 bp, Homo Sapiens
ttaatttataaagaaaaggagtttatttcttactgttatggaggaatacaaggtcgagggggcacatctggtgggggcacagccttcttgaaggtggggactctacagagacctgaggcggcacatggcatcatgtgacaagggggctgggtgtgctagctcaggtctctcttcctcttataaagccaccagtcctgctctcataataacccattaatctattagtccacacgtggattaatcaattcatgagggcagaggccttaggatccaatcacctcttaaaggccccatctttcaatactgctaagttgggcattcagtttccaacacatgaaatacggggaacacattcaaaccacagcaggtgcagacccttgtaagaacatgggctcctccatcagggctctggcagtcagtgacagctgggttaggactatggtgaagcaagtgatgcacatatttaatgaggcatccaaaaactcaataatccaaaaaatatcttaatgggatgggtttaataatcaaattggcaaactatcgcccacgggccgactgtctgatttgtaaataaagttttattggaaccatggtcatg

SEQ ID NO: 144974 - DNA, 1215 bp, Homo Sapiens
  misc_feature (106)..(136): n is a, c, g, or t
ggccttgctttgtatatacatgctatagttaaagaccaaatgtggattaagtattatatttgggaaatagatatttattgcaactaattagctgtgtgtgtgtatnnnnnnnnnnnnnnnnnnnnnnnnnnnnnnngttatttttcagcttaaataagactgtaacttcctgagaactctctctaattgggtaaaatactgattgagatattcagtctccttaccaggaattgtaagaaagtctactttgtacattcatgagaagctgaaatagattattgtgtaataaccgaatggaacatctgtttaaccagatgttttagttgagagaagtgtaaacatgattctaaatgtataaatatgttggttattcttccttttctgggaggttgtgccaaagtttacatagattagaggaaaggctgggtctggaaaaattcaaaaatattacataaatgcagagaaagtaatacaataaggtcagttggcaatgattttaacaattatttacagggccttcctttgcttcacctcatggctcacatacaagtgacctgagtcactccatcttcctgatcaaactgtccgtcgtctaattcccggaggacgttgtcactgctgctgaacccagagaagctgttgtgctgtgccagccttccctcctttgtccagcattcccgggagggagaaaggcggcactcctcaggcaggtgtctgctctctgcaggttgtgacgaggttgtgtctaatccgatgcttctactagtggctttattcttgtcttcaccttttatgtggcggctggctttcttatctggtgtttgagcagctgaattccacataactggcctctgaaggaatacgatctgctttgtagccaaattcccttcactgtcatgtctcaatacaggtgtgggcaacacgcttgtcagaagccatccgaattcagccagagtgtgcagcagagggccataatctgttttgatttcacatccctcaataacagtccattgttctactacgatggcatcatttcctttcctactagaacctggaactccagaaccttcttcttcatagataaaaaatccttccaaagatttaggcaaatgttcccctgtgaggaagagggtacaattaagaagggttgtaaatactaagtggctcataaaaccatctaaatccttaaataactcatataggaaactgaaggaa

SEQ ID NO: 144975 - DNA, 418 bp, Homo Sapiens
  misc_feature (141)..(295): n is a, c, g, or t
gctaccaaggctggtttattatgattggagaaaggaggaggcctccttgacagagtgaagtgcataaagcataggaaatggactactggacatgagaagttgggaacatcctccctacgattaacaaaatacaagccagannnnnnnnnnnnnnnnnnnnnnnnnnnnnnnnnnnnnnnnnnnnnnnnnnnnnnnnnnnnnnnnnnnnnnnnnnnnnnnnnnnnnnnnnnnnnnnnnnnnnnnnnnnnnnnnnnnnnnnnnnnnnnnnnnnnnnnnnnnnnnnnnnnnnnnnnnngcatattctctggggtcctgctctaaactgagagtgaaagcatactctgctgctagttgctagagttcttgctcagaaagttgttcagagatacagtatttcagattccacagcatctaaaga

SEQ ID NO: 144976 - DNA, 494 bp, Homo Sapiens
ttgttttttacaagacttaaaaaggatattttattgtcatcacaaaagaaacatcaaagacaattaatgagctttagaaaatttaaaagaagaagaaaagctaccaaagctgaaatggtggcacctccttcgagtgagcccgggagtcctccctgacggccgaggcaggcgctggccgcagtcccgctcgagcctcccttcctgtctgtggattctgcgtgacagtcacggaacggcgtgatgggggcagcagagcgtgggggcctctgtccagcactcgtggccagcagccccgctttcgcaagaacacgggcaccctctttgtcgtcttgcctctccacctggtgcccccagagtggctgcttgttcctgctgcacgtgacccgggactggacgccagcctctggtgatgagttctgctgtgtccacgctcctggctctcccggtgtccctccacctctctccccgatgctcctgggcctcctctgtcctca

SEQ ID NO: 144977 - DNA, 822 bp, Homo Sapiens
ttgataataacacggtttcatttgaggagcacattaagtcagaacacaatatgtggcatcatgtgtacttcatagtcctggtgaaagttaaagaccccacagaatacactgaacctgaaagttatgtggctcaaatgattgtggagaagaatttggattggtttcgtgggatgcgagccatgtccctcgttagcaatgaaggcgacagtgagcacaatgaaattcggagccttcaggagaagttggaatcgcccatgagtttggtcaaacagttgtcgggtcagttgttggagctcaaggagcagatggctgatcaaaggcaggataagcagagtttgggcttcttcggatcaagcacaccccatgtggatcatcgcatgccaccacactgataccatggggggaagccgtgactagcctttcatcagtgtcctgcctgatcactgaataaagaactgagatggaggggagtgaacagtgcctattgttgaaaagttaaaaacaaccaagtgccaagatgttgagtgggttagctccgagaacaatttataactgtgttttcatggttgcgaagacctaacctcaaatgcatctgctagaaagcgtacatcacacattcgcaatgcatcaggaagaaaaggcttgcccaaaaggctggagagggcagggagcggcaggatggaaggagacacggggcagggagaactctcttctgctaaatcgataggagtcagttttgtcttaaatgctgactacagccactgacatggttggctggaatttctttcttttaattgtggcatataggtttgtgacacaatt

SEQ ID NO: 144978 - DNA, 381 bp, Homo Sapiens
ttttcaggctgatacatgtgggggattttatttcaggcacttgctcttcagtttttcttacacgatgttccacaaatataaaaatgagaaactctttcagattatctgtatatccatatacctggattattctggctaaagcgacaggaaatcccagcagtctggcttccccgagtaaccctgtactgcctggtttaatcccgccgtctgagggtggggtgggcgtcaggcatggctggacacaggagtgccagtggtggggtcagaatccagcttctccctctcccggccccagtgggtctattccccgaagtccttgctcctgtctgcagggctgtgcccactgccggtggggcagggagtggagaaggggggctgact

SEQ ID NO: 144979 - DNA, 566 bp, Homo Sapiens
  misc_feature (488)..(488): n is a, c, g, or t
  misc_feature (503)..(503): n is a, c, g, or t
tttggagcaacatgctgttttaatcagtgcctgggtgcaggcgggctgaggcctaaaatggcgtccacatcaagtgatgataggacaaaggttttatagtctcctgtaaacaggaagtgtcctggtctgacgtaactgctacattgttcccagatagcttctttcttgatcttcaggggtacgtgtcttccagccagagtaggtgtcttctggccggcccttttcatgcttctgctatcttgccggcgcacgctgctggtgcacactgctgacacaagtggcccttgcgccttgggactgggccatgtcgctgtagcagaagcatcatctggattgtctggaaacacgtctgtgcctgtaagacagttacgttcagaggacaaaaaggtgttaacagggagaggcatggccttatttgctgcttcacgaatgaaagaccatgtctggattaaagaggagagtaatatctgagtggctcagagtctggnagggtgagaccccangacaaagtttgccatattgattcaaaggactataaaaagaggtgcttttgtgtgggtgagtct

SEQ ID NO: 144980 - DNA, 485 bp, Homo Sapiens
tttaaaacaatagtaatctaatttactatctgttacaatttctctgggtcaggaatttggaagtttctggcttgagtgtttctggattgaaatctctcatgagtttgtagtcagatgtgagctgaggctgcaattatctgaaggcttgactgaggctagaaaattcacttccaggtgacataatcccatagataatgagttgttgctggaaagttgcttcctcaccacagaactgctggagtagtctcataacgtggctgatggtatctcccaggatgagtgatctttagtgatccactagaaaaatttctgcttcccatcctcatgaccttatgctgtgttggctcagaggtcttggttccaaaggaagacatgtatccacccagcgacacaacaatgtttctactgaactggaaggtaccactgcccatcactactttgggctcctcttgctctccttctgaacgttacaaccaatctctgtt

SEQ ID NO: 144981 - DNA, 515 bp, Homo Sapiens
ttttttttctgataaagcaggattttaataggtggcctaattcagatactgaagttattctgtacaacgatgacaaattaattaggggtaattcagaaacaactgtgcttgaagctctgtcttcccttgatttttttgactgaaagggatgtgccatcaatcatgagaaaattcaggcgccctccaagatgcagtttggctctgcctctgcccgctagaggaattcaccctggaccagatagaggcttttgtttttcaagccccctaccactaaaaagcaggcatagatattaatgggcatcttggatccacatctgggtattagattattagaagggcatcagaatttgcatgcggtccgaaccagccactgcctccgaagccttgcagaccacagtgcctgctgcccttcctctgggtccatatcaccaatcagaatatgaagtgtgtctccttaactgctgatgaccggagccttctgggaaattctgagggaggggaaggacttagcctgt

SEQ ID NO: 144982 - DNA, 375 bp, Homo Sapiens
  misc_feature (65)..(65): n is a, c, g, or t
  misc_feature (79)..(79): n is a, c, g, or t
  misc_feature (110)..(110): n is a, c, g, or t
gaccaagggggagcaggaagggctggggtcctggggcccagcacggcgactccggagtgcacggngaggggggcctcgntagaggacccagaagggcccgggagcccccncccagcctgccaccgagcgactccccgtgcgcaaggcccagcagccaccgacgcgccctcccgccccggcagactcgcaggcagggtccaagcgtccaggtttattgacccggctgggtctcactcctccttctcctccccgtgggtgatcacgtagctgagcgccttgtagtccaggttgcccgccacatcgatggaggcgaactggaacatctggtccaccccttctgtcgtcttctcgcagccgtatagtagtagtaggcga

SEQ ID NO: 144983 - DNA, 542 bp, Homo Sapiens
ttttttggctctctggactttaaaactcagcatcttctgaaccagaggcatttctgattagcccttccctacctattttcctagtatcactctttaatcagcttggggaggtggcagcatttcatggcctccgtagtaactcacaatgcttcctggggtatttaaattctactctctcatcagcactgagcacctactttgggccctttcccgtgctagccatttgggggaaatataggtgaagagtggctggggtttgaacctttaggatttcacagccatgctggatgggataaaaccagctcacatggagaatcagagaatgggacagtgccacaaaacagtctactgaggcacaagttctgagtgcctgggaagtggtagagagaccccagagagggctgctgcagtctggaacagcttcctagcaagctgtaccaaacagggccttgaaggatgagaaagatctggctgagatgatacccgaccctctagggaaattcttagagtaacttctaggaaatgtcattgctcctttaaaa

SEQ ID NO: 144984 - DNA, 960 bp, Homo Sapiens
ctctcgttcttgtctttcttgcctctcgcgatacaggcgttcctgccgctccaggcgttcctgccgctccaggcgttcctgccgctccaggcgttcctgccgttcccgttcttgtctctctctctccagctgttcttgttccagtcgctccctctccagcctttccctttctaacctctctctctccaacctttctctttccattctttctcgctccagcctttcccgctccagctccttttgccgttgctgttcttgtagttgtcttctttgaatttccattcttcttgggatgggccattttgaacttgagcaggtagttgtgagttttgtctaggcaatgttggccctgtttcctgtgaatttaacacttctaaggcatgcatcatggcacttgcgaagacattggcatcctctttgctgccaaagttgagaccatacacctgtctagcatctcgccactggtggaaggtctgtgtagcttgattgtacttcaaccctttaggaatggcacagtttatcacgacctgatggtcctgaatcttcctgcccaccactctgaatgtgttgttgcctgtatggtgatagatatgaactctgctgaatccagttgagccaccagctggcacccacttcttattggcatcatcataaaccatcacagcagctcttgcctgacagatactctgttcactcatggtgccggcggcgcagaggcttccccaccagccgggagacgcagaaggcgccgagccgaggggggggtctctcctccaggggtggggagcagctcggagacgggagacaagtgtccggctcctccttcggcggccagggggctacaccatctcctcgcacaaagccgaggcgccggccgggagtgtgggagaagagggcgagagaaaggctggggagggggcggagaggccgaggcgcggagctggtccccaggcggccgca

SEQ ID NO: 144985 - DNA, 670 bp, Homo Sapiens
tttttttcaactacaacataataaatttaattttgcttaaatatgatggaagaaaaagaaaatgaaatgggattgaagaaactgtggaacatcacacgaatgcttctggtcgcctgtgacgaagcggctgtccctttctctctgtgcctctccttccctctgctcatggacatcacagcacgttgcactctgccatctattttgttctctatttttaattttgttgtctgtctcccatgcagtccttaaaggtgagtccttgagagcagggactctgcctgcctttcctgttacacatcagagtgctgcacagggcctgggcgtggcgggtgctcacaggggtctctgcaatgggaaagcagagcccagatgccagtcgtggaccacagggtccgctctgcgtgatgaggaccggaggtgggaggaacagtggacgaacatgtgcatcgacattcttcccatgtcatttcctcccttgttggtggcccccaaggtgttcagggatctgcagtgtcctagggatctgcagtgtcctagggtctgtgaggagggcaggatgcaggagatgattgcccgaggaatggtaccgttgctccaggtcgcctttcagagttaagccaatggactcaagggcaagaactgcatctctccgggctggctccaacatcag

SEQ ID NO: 144986 - DNA, 1227 bp, Homo Sapiens
  misc_feature (1134)..(1142): n is a, c, g, or t
ttttggtctgcatgtagaggtttattgtcctgaattcctggaggttcagtgaaaagcagaagattgtcttttacacatgttgagttatgcccccatatatgtggttgtggtaaagaaagagggtgtgttgatgagaggtcctgaaatgcattttcctaatactcagcaggggcttctcaagaaggatcttccctaagaaagaagctcagagaacaaaaatggaaaaggattagatatggcactttcactggaaaaagtcatgttattcattgattgttttgtcatctcccgccttaagtgttgtttttaggatgtggtaatctctgaccctgcctaacacatttcccaactcacccatagccttcccttaacgtcctcccatcttcacgctatcacactgtgacccagtgaattcgaacttgtgaagttccattcgggggatcatatgggaagggcttcacacccagacatagattatagatgggaagtgggccacatggtgtcagtgaggcaagtatgggtcgtttagggacaatgcactgtcagatcttgttgaccatgattagagaaactgtgcatattagtagtgaattaatgtcaggaatatctgacaaatcctggaaaagaagattgatgagaggaaatgtgttctgcccaactgtataatgcatttgaagcttaaaacaatgaatcagtattgatctggccacaaaatattaatgatttgaattaaaaagaaaagtttagaaaatgatagctttgacaaattaaggtagcatttcatccacacgatggagtgtgttttattcagtaattgatttaaaaatggaatcaacctaagtgtctaacaggagggagttttataaattgttcacagagcatctgttccaaggagaccttgatgttcatagatttgtaaagaatgctgcttactagcacactgactgctctgcaaatgtctgagggttcctccacttggggcaagttgggggtttgatcgcagagtaaataaatggtgcattttataatgtaatatattctagcaagatgcagcccacaaactgtatagatactcttatgtaccacgtaaagttcatctactactttaaccagaacttgatactgtatgtatgnnnnnnnnnagatttggataaaatgacaactcattgttatttccagttcacaaagtaattgtgaggctgaataaattttattaatttatagaaa

SEQ ID NO: 144987 - DNA, 447 bp, Homo Sapiens
tttaatgcacaccctgtctctttattaaagcactttcattcctggtggtatccttgctggctgaggctggagggtcctgtgatgaatccagaacactttgaaggcttcgggatgatgctgctcatgaccaggaggtccccacaaacggaagtggttaacgagtggcaaaagagtagttttgaggcatgttcttttcaccaggagttggcaggaggtatgccttgctgcaggtacggtttctgtccgagcaggagatggtggaagagaggggagagggctctctcccaggacaaagagcatctcccttgaagcctcactcaccaggcgtctgtgcctcaggtcttggtgaagaatgcgcgtttggatatctgagtcgcttggtcttgtgactgcttttttttgatgggcacagggttcaagtggcagcaagcagtgcacaaagcctcc

SEQ ID NO: 144988 - DNA, 918 bp, Homo Sapiens
  misc_feature (61)..(104): n is a, c, g, or t
  misc_feature (598)..(598): n is a, c, g, or t
  misc_feature (620)..(620): n is a, c, g, or t
  misc_feature (663)..(663): n is a, c, g, or t
  misc_feature (755)..(755): n is a, c, g, or t
gtgccaagctaaaattaaccctcaactaaagggaataagcttgcggccgcatacgcggtcnnnnnnnnnnnnnnnnnnnnnnnnnnnnnnnnnnnnnnnnnnnnaaaattccccaacaaagggcacagctttatttagacatgaaattcaaaataactcatggtaggtcagcagccattagctgtgtactagggccacggctgggctattcaataagagcagccattttcccccagctaactgatccttttcacactgtgatgtatttttattttgttcattcattcattttggcaaatactgaacacataacatgtgccaggtgctgttctggatgctggggaaacagcagtgaacaagagggacaaggtctctcctctccaggagctgacatttagttggagaaggaagacaaagcataaggaagcagaagtaagaagcgctaggaagatccgacagggcaatgtgacaagtgtgggcagggctgccagggagggtggctgggcctcttacttcttacggtccttgtccttcctcaggttgctgcctgttgccagaaaggactggctgtgaaatatctcggaggtagctttctttnttagagaaagcaattatttctntcttccaaaagtcttctcttttcttcaagcttcattctctctntcttggtgaagtctcttaaggtgctcaaatttggcctgtagctgactggctggtttttctgggcccacatctgtaaagcccatttcctccantttgcagcgcctgtgaagctcatagtgcctggtatggggtctgctctcgcaggtcctccatatttgtacaaatgagcatttcccgcagctttacaagtcacagtgggttcattttcacctggtcaacacccaggggactggcagcttggcacttgtttcgatt

SEQ ID NO: 144989 - DNA, 350 bp, Homo Sapiens
gcggccgctccaacatcagaatggtaacaccaaaatgtcccagatccttgaagttgactcccaggggcatggctgcacttggctatgtgtgtcttgtctgatgtctgtcttctgtagctttgcctctatcagggctggagtggtgcagcccctggcatctcagacatggttcctgcctcacttgtgggagctggaccagcctgggtttcatctcccacagtaaagctaagtaagccccacagaccttactgctactgctgctgccattaatgctgtgctcactatcttgtccaggattttaaggatgtcagactgctgtagatgactcaataaatgttttgccatttaaa

SEQ ID NO: 144990 - DNA, 399 bp, Homo Sapiens
gcctcccaacaggaagtaggcacgtgaagcctcccaacaggaggtgcatctgctgagaaatgctggcgatgaagttaccatcaccgttgagtatctcagggaagcgccggcatttctgaagcggccgttagggtccccagggccatccagcgaccacagcagtggggcctcctctcccctctttgacagcggtttgcatctgaacggaaactccagtaccacagcactcaccttatttcagaagaagaaggcagatgggctctatagtagtcataatggaaacagacctactacagataagcagattttgaaaagtgatactgcaagtcagaattatactgctaaatactctaatttgttttgcaaaggagagtatcatgtttaaatagtcataccaaa

SEQ ID NO: 144991 - DNA, 494 bp, Homo Sapiens
ttttcttcagaatagttttattagtttgcatacagtttgtcaacactcaacttttttctctcctgacacacaaatccattcagctagagctttcttctccccatattttacagattgtgacatggtatggatctgcaggcatctctgaccttcgaagcttgaggttactgccactgcctgttgccatggcacctttaagattttgcacttcggacacaaatttcaaaagctccacttcaagttcgtttaaggtattgaatacacagtctttgtaaagagaagcattttgatttttctttagtggagtgcgaaatgggaagcctcgaaggccaggaggactctgctccttattcttctcactgtctctttgacacttcagtatcacaaacggcacaacagcaaacaaaagccagagccatttgctccccaagccagccttgggtgtgctctggtaggttctgccgaatccgaaagtgctctccacacggcacctt

SEQ ID NO: 144992 - DNA, 718 bp, Homo Sapiens
  misc_feature (86)..(98): n is a, c, g, or t
  misc_feature (126)..(140): n is a, c, g, or t
  misc_feature (151)..(154): n is a, c, g, or t
  misc_feature (156)..(156): n is a, c, g, or t
  misc_feature (162)..(335): n is a, c, g, or t
ggggggaaaaaccccccccttgttttttccccggggtttttttggggaaaaacaattgtgcctcttttttcttctccctttggggnnnnnnnnnnnnnacaaagggtgtttaaaaaattttttgannnnnnnnnnnnnnncgcccacgggnnnncnctcccnnnnnnnnnnnnnnnnnnnnnnnnnnnnnnnnnnnnnnnnnnnnnnnnnnnnnnnnnnnnnnnnnnnnnnnnnnnnnnnnnnnnnnnnnnnnnnnnnnnnnnnnnnnnnnnnnnnnnnnnnnnnnnnnnnnnnnnnnnnnnnnnnnnnnnnnnnnnnnnnnnnnnnnnnnnnnnctgtgttccaataaaactttatttggcctgacctgatcaagtttaataatgtttaataaattttttaaaaacattagtagttataacaattcctctgtaataacagttatatatgaactcctggtcaaggccagcagcttgttcctttaccaaaaaagtaaagccgccctctgaggacaaaatggcacatgaggagtggtgtacatttctttttcttaaagaaaaaacaaaacccaaacacttcctatttacatattttccatttaaaagttggtcagtgtgattaattctgtttttaaatataagtttctaatgtgttgcaggtttcaacgtacaaattatagtttgctgattagatttaaggggctgtgatgtgagggtga

SEQ ID NO: 144993 - DNA, 449 bp, Homo Sapiens
  misc_feature (163)..(191): n is a, c, g, or t
gcgcgtgacaaggtcggctgctttcagccgggagctagatcggtggcccggctcttcggagccttagcaggcgttcgccaaggggtgactggctgtcattgggagcaatatttggccttgaggagaccctggggaggaagtggcggggagctcgtgtttgctnnnnnnnnnnnnnnnnnnnnnnnnnnnnnacacgcgcgtgggcagggtccctctgcgctttcctttttaagtgcctctcggtggtgaggctttgggcgggtgagactttcccgacctcgctcccggccccacttaagccgggttcgagctgggagacgcagtcccttcagtgcgccccaaatcctctggcttcaggtggcccggcgcgggggcccagcacgacgcaccgcgccgagaaccgggttctccgtgcgctgcgccagtagccctgggagcgcggcggccgc

SEQ ID NO: 144994 - DNA, 503 bp, Homo Sapiens
tttttacaccaaaggtcttaacgtttattaggagatgaacacaaagcttggcatactgctgtcatagtggcatgcattctcctctatagtgcagctctggagttcaaggttactgcagattgcacataagaaccactcttcagaggggagaaaaggggaaactgcagatccttgttctcccgaatatcagcagactcaaggtgcttcaccaccacagcagcctaagatcttgtaagttgggtgggtgtgctttaaacagtaacacaggtatgacaagggatccaggtcggggaaagttcctaaaacttagggccaagagtacttttggggaagtatatacttcccaaacaggtatcactgaatgggggcggggcatgcttagcactgcaactgagctaggttaagctgccaggagtccacgattaatcctggtttcacagggaagaataagacatgatggcactgtcacaataaggccactaaactcacagcgaacgatgact

SEQ ID NO: 144995 - DNA, 393 bp, Homo Sapiens
tttcaactattggggaattattttaatatttcacaatattaacatgaaattcataaaaggatattttgcattaaattatagtttatagttcataaaataagctctataatctttatacttgttgaatgtaactaggaattaccactaaaatcctagccaggaccctctcctaatctagatagaatatatgggcagttgtccacactgtgtgttctggttcttttttgcgtaagatccagtgcaagtagtgtcttggtaggcagaaactgtaccctcatgtccagaccacttgtgtgtctgcataataaagctgcgactggcctccatacatacatagcttaaggcggaggttgatgtcttcactaggacatagtctattcaaaggctgctctg

SEQ ID NO: 144996 - DNA, 249 bp, Homo Sapiens
actttaaccagttatttaaggaaggtattagtggcaaattataggttataatagtattagtgaattttctttataatagtttttgtgtctgtgtgtgacatccataaaaactggatactctatttttgcattttatttggttgtaagattattttagagtattgttgactttggggacaagaagcttaaggatgaaatcagcaaatgtttattatgagtagtttgtgctaggaagtatgtaggatccaa

SEQ ID NO: 144997 - DNA, 533 bp, Homo Sapiens
gcggccgcagcgacgccggttaggatgtcggccctgtgggaggggcgcccttcctggtgccgggccctaacccacgacctggaacagcagctggcccgtggcaaatgctgagcatatctcctgaaagaatggcttcgccggtccctagagaatgcacccgagttttgtggtatatacacatacgtacttttccaagtatattttatttcttggcaaacatggccctttgtgatcgctgtgtttctctcctcccatccattatacaacactaagtgattcatcattctttgaacaaatcaaactgtttcacacctgccatgcatttgtaccgaccgtgctcttccctctactgccgcagccccccaggtagaagtcctttttatacttcaaaaattcccacccaggcaaatttcaagcaccttacccctaccccatcccactctgcccatctctaattgcgctggtctgaacccgcacaaatgtctgtgtagtttctgcacttcataacagcttatatgacagttgctccagcc

SEQ ID NO: 144998 - DNA, 542 bp, Homo Sapiens
tttcatttcatgtttcaaagtaaggagtgaggtaaatttattctatgcaataaagagcaagtatagggatttgatatctgcatataggacttaaaggagccaattataacccttctttgtgcctggtgggccaaatatgacatttactagtttatctcctacgctcacttgcaatttttcctgagtaaatccaatccccctttaaatttatggcaatgaaactctctccgaaaccatctccagattttggaagatagctcacccaatacttttgtttccagctttgctgtggagtagtcacaagtattagttaagaaaatcgtcccaccccatgtgtaagtacgttctgaaacagtgtatcataggcccagtgatgtagaggtacccaggagcttcagattttatgactggattcaaccgctggtcataaatgaatgacactgactggaagagaaagattttctggtcctgcactttttttcccccaaggtgtcacagttcagtgccaagagagacctccttagcccgtttccaaattactg

SEQ ID NO: 144999 - DNA, 427 bp, Homo Sapiens
gtggcgcttgagccaaagtcacaatggtcctccacgtccccccgtctcgttccggaagaggatgaagagcgtcttcaagctggacttgctccgccccagcaccaccaaagttctcccagcagtcctcctgctcccgcttctcctcgtagacgcgtaggaacagggccagcttctccgctgagcggaagctcacgtcgaattcgcggctgcccgggatctggatgaccgcgtagatgtcgctcgggtccatgccgatggagcgcaggataagcgctcctaccacgaagtcccgggtcgggcaggcgccctcgtctccctggaaacagatgcggacgaggaagcgacccttgcccgggcctgccgccgccgccggctcatcctggaggggccgctcggccgcgtcctcggcctcgccgggccaggccgg

SEQ ID NO: 145000 - DNA, 1410 bp, Homo Sapiens
  misc_feature (133)..(145): n is a, c, g, or t
  misc_feature (304)..(365): n is a, c, g, or t
  misc_feature (371)..(429): n is a, c, g, or t
  misc_feature (577)..(605): n is a, c, g, or t
ccccatttcacgagcgcttttatttgactcccgagaattaattatccctcttttttaaccaccccaatgggtttcccacaaaattctctcaggctccccgtgtagtttaaaagcgccaggccaatttaaattnnnnnnnnnnnnnaagaagtcggccaaaagggttggccccttgtggatggaagcccacagttcaccaagttttttcaattcaggcaaaccctgaatgggagggccttaccccgggttttgggccccggtccctagtgggtgggccataaagaggagccaaggcagccccaannnnnnnnnnnnnnnnnnnnnnnnnnnnnnnnnnnnnnnnnnnnnnnnnnnnnnnnnnnnnnagagannnnnnnnnnnnnnnnnnnnnnnnnnnnnnnnnnnnnnnnnnnnnnnnnnnnnnnnnnngggaggggcaacacatctgcacgttacagttctccgcagtcgttattggtgacagagtcaccaattcagaacaggctgaaatggagtaaactcggtttaagaaggcatagagagatgtctcttgtaggttttaaaaagatctccttcnnnnnnnnnnnnnnnnnnnnnnnnnnnnngttttggcacttaagaggggtaagctggctgtgtgttcaccctggcaggcaggcgggtgtttagtgcccggccacgccggttagctgagctgccacggaattgtgcactgctttgggacactgggcaaagggggtgtcctgcgcttgccacagaggttggcccacgatgccctttccggcagtaagggctccaggtgcccctccctccgcggcacttgaaggcacctgtcctgcgtgcagctgccgctcatgtgggtccgggaaccacatttaaagcatgtcttgggctgcgccttgtaccagctgtagcccctctcggcccccaggaagaaggcccctggcaagtgcctgaccccgccctccccctggcgcagctcgatctcgcatttgtactccccggtccagatcccaaacctgtcggtcactttcaccggcacggccagcacgtcgcagtggcgcttgagccaagtcacaatgtcctccacgtccaccgtatcgttccggaagaggatgaagagcgtcttcaagctggacttgctccgccccagcaccacaaagttctcccagcagtcctcctgctcccgcttctcctcgtagacgcgtaggaacagggccagcttctccgctgagcggaagctcacgtcggctagattcttcaccacctgggcccagcccatcttctcgcggccgccgtcggcctcctcgccccgggccgcgggccgcgcggggggcagaagctgcggccgcccccgtttcctctcttcctccgcgccgccgccggtggccattttacctccttcccccc

SEQ ID NO: 145001 - DNA, 518 bp, Homo Sapiens
tctgactctggcataacattacgtgacaaaaagaaagtcaaaatattttaccccaaaacatgtttctttgccctattttgcaatttcttccataaaggacagcattttcccccaaaagctatcctttgtggggtaaaatgtgcatctgtaaagaacatctattaacatagctagatgtttttcttccaggccctccccaatcctaaacggattaactaaaagtctaacaccttttgaagatctgaataggaaacatttgtcatctattatctctaagagcagccaccataagacttcaaaagaaccttagtctccactatcttttatcttaacctgaacacttcctttctatcaatcccaggtcttcagacaaactcaaccaattgtcaactagaaaatatttaaatttacctatagcctggaagcccccacgctcacccctttgcgttgtcccgccttcctggaccaaaccaatgtatttaatgtatttgactgatgtctcatgccaacctaaaaca

SEQ ID NO: 145002 - DNA, 552 bp, Homo Sapiens
acatgtttctttgccatatcttgatatggcctggcaaagatgttctttctgggggaaattttgcatctgtaaagaatctctgttaacatagctagatttttttcttccaggtcctctcaatcctgaagagattaattaaaactccagcaccttttaaacatctaaataggaaacacttgtcatctattgtgtctaagggcagccactataagacttcagaagaaccctgatctccacaattttttattctaacctgaatatttcatttctatcgatctcaggtctttagacaaactccaccaattgtcaatcagaaaacgtttaaatttacctatagcctgagagcacctgctttgagttgtcccgcctttctgcactaaactaatgtatttcttgaatgtatttgattgatgtctcatgccttcctaaaatgtataaaaccaaactgctcccccaccaccttgggcacatgttctcaggacctcctgagggctgtgtcacgggccatggtcactcatatttggttcagaataaatcccttcaaatattaaa

SEQ ID NO: 145003 - DNA, 450 bp, Homo Sapiens
ttttttttctcttttatatacatggtttattcctccccagccccagacaagccccaggcacgctttataggggcatggagatgcccacaccctgtctctcagaagctgggtctctggagaccgggatggggagaagggggaagccctagcaagacgcagctccccctcagcctcagcgcccccccgcagagaggggacagagaaggaaaaaggaaggtgacacaggactggggttcaaatactcagaaagccacacaatagaagacaaaaagtagcaagcccccaagaaagcggggacaaggaggaaccagtgcccgatcccgccctcttcccagctggggcactgcgtccccaggactccgtggggcaaggggtgggactgggaggagaggaaggatttgggggtggaggggctcaaggctggacccaccctgccgttgcactcctggc

SEQ ID NO: 145004 - DNA, 907 bp, Homo Sapiens
ggcctgggtggcgaattcggcacgaggctgaaggagggggcgctctcgcagaaggctttcaagtgaggatgtttgagtttcagaattttgagaggagatttgaggagtgcatctcccagtctgcagtgaagaccaagtttgagcagcacacggtccgggccaagcagattgcagaggcggttcgactcatcatggactccctgcacatggcggctcgggagcagcaggtttactgcgaggaaatgcgtgaagagcggcaagaccgactgaaatttattgacaaacagctggagctcttggctcaagactataagctgcgaattaagcagattacggaggaagtggagaggcaggtgtcgactgcaatggccgaggagatcaggcgcctctctgtactggtggacgattaccagatggacttccacccttctccagtagtcctcaaggtttataagaatgagctgcaccgccacatagaggaaggactgggtcgaaacatgtctgaccgctgctccacggccatcaccaactccctgcagaccatgcagcaggacatgatagatggcttgaaacccctccttcctgtgtctgtgcggagtcagatagacatgctggtcccacgccagtgcttctccctcaactatgacctaaactgtgacaagctgtgtgctgacttccaggaagacattgagttccatttctctctcggatggaccatgctggtgaataggttcctgggccccaagaacagccgtcgggccttgatgggctacaatgaccaggtccagcgtcccatccctctgacgccagccaaccccagcatgcccccactgccacaggggctcgctcaccccaggaaggagttcatgggttttccatgggttacccggccctggggcctcccttg

SEQ ID NO: 145005 - DNA, 981 bp, Homo Sapiens
  misc_feature (72)..(85): n is a, c, g, or t
  misc_feature (452)..(460): n is a, c, g, or t
ggtgcactttgaacatgtgtgtttttttgttgtggaacctgagattccttatttattaacaggaagtctgannnnnnnnnnnnnnggagtctttgttgctatattttgtggggctgggagagagagattagattattttgacatgggatcccttccataacaggtactttgaaggcaagacatagggttgaagaagcacagccagcctctgaaatcatagctctccagtggcttttaaagaaagctggtcctcagcactaacaaaatcactacaatagcctagtgcttttttggaagcctttttagggaagaatgttaggttcatggtaactagtatgctctttgagatttttacagtgttgaaacttaagaattttgagagggtgaggagggttgttcagaatctaaattacagatagatgattgtttcttgtgaatttgtttcttttccnnnnnnnnngtccctaccatttccttacatttcccttggggcccatctctggctccttgctttttgtttcttgctttgctttatcagttcattccagctccctgttagtgaaggacactgctgttagtgaaggaacaaagtctatgagtcctaaaattttaagtcaaagaaaactgctctgtttcccctttagtaacacttctgaagaggaaaaacttcaatagccaaagttaataatcctatataataattgctttggctttcacctaaaattctgggcatcacaatttccttgggatagaggttgtgttggggaatagattgcttattgctgttcactggagagaaaaggtagtgtttttgtacaaggtcataccgccagaagccccaaatcctattttggctcatcttcaggtaaagagtaattcctatcctgtgtgcctcagaagctagaatcgaaggcttaccctattaattgtttattgtcagaaatgcatgatggctcttggaaagaatgacgttttgctgga

SEQ ID NO: 145006 - DNA, 538 bp, Homo Sapiens
ttaggtgctaaagtcctggtagtgtaattggtaaaatatcatgcatttaaagctcctcactgaaggcttaattccttattcagatatctttataaaaatcccacctgatcataagctctacctgggtagtatctatctcatttgccattccaggtactgagtctaaaaagaaagacaaggccatctttgccttggggaatttgcaatcctggagcagaaggtatatgtgctatgatggaaatacatagagggtccagtgggagcatggggagaaatggaaacactatctcaggacagttctggaaaatcttccgaggaaagatcccaagccaagtcctgaaagaggcacaggtgttcgtcatctgggcagagtggagagtggcattccagaccaagggaaccgcctcagcagaggtgtgaggtgcttgggaaggggaggtaggtgccatatgttctgggagggtgaggctgaatcacctccaggtgtttaggggcatcttcccattcactcctctcccagaccctcccttgaagcagt

SEQ ID NO: 145007 - DNA, 414 bp, Homo Sapiens
tttcatcatgggaatattttattgggtataagtgttttaggtaattgataactgatttttctactgtttttaagtgattacttcaaatgtgatttgaagcattgtttggcctgaagctttaagaccagtttcttaagcttttccctgagtttcagcagcttacggtttcagtgaataagcagagcgcctggttttgaaatgtctgttgtttgtttgaaaatctgaatgtgtctttcaaaggctgctgtgatttctttggataaaatcagatttcgtatcccttagagagcttccactcctgcttcacctttccaaaaactagacctaaggtagaagccacctcgacagctcaaagccagagttagaacagtcatactgaatagatacaatagtttatctggtgcgtatttggag

SEQ ID NO: 145008 - DNA, 419 bp, Homo Sapiens
ttgtgcggtgtgtgtttggttttggaggggctactctgatggagaagttcagtgccatgcatgtggagtccttgtcaacccctctgctaccactgggcccagacagtggggagcagatagagccataaaaggcctcatgttatgaagaggatcgtggttctggctccaggtggagtccggcagactcaggtccttcgggcagcagcttgccttctgagggccgcgtccgttctcctccactcagagtgacaactgtggcagcgagccaggatctggagagtgctgtcccctgagcacaggaagccctctgatggcaaaggtctagcagtgacagcaacctattgtatcatcactgtaataacccatggctcatagcccagtgtctggcacatggtaggtgccaaggaaatgctaagaaa

SEQ ID NO: 145009 - DNA, 431 bp, Homo Sapiens
  misc_feature (13)..(13): n is a, c, g, or t
ggccgcctgcagnccagccccctctttcactcccacctggagaccctgcagctgctgaggactgcacagctcccagaacaggtgagctggccttgggggcaggtggcaaatgggaaggggaaccaaaggaacatggggtccccccaaccctccctcctggcgtttgaaagaaacctggaactccagattatgggtcttgggtattccctattgatggggaaactgaggcctagggtggcaaaggacaccctaagggtacacagggactcaaccccttcacctctaaccctcaaggattagcatttgtgaagctgaaattctttgatctggtcctcaaatgccgggaaggacctgaacaaatgagatgaggttgtcttcaggttcccaccaccctgctctccacccatacctctactcagtcttccatcctc

SEQ ID NO: 145010 - DNA, 1045 bp, Homo Sapiens
atgaactaggggctgggagactcctgtggagatagtctgaagtctttatttaccatggggcctttcctaatcatttctttcactacattctatatttggaggtcaagaatttctattcactttgtttaataaaaaaagaaacagattaaagttagggaaggaggctggggaataaataaagggtctcattaaagcaatatgcactcccaatttcatgggcaagtcattaagatctgataattagctgacatatgactttcgaatggttataactaaccttcccgtctttgagtctcattagttataaaacaggatgctttcctgtggagatttccaccaggaaatacctcctttagaagttaagttacattgcatagcatgtcgtccatctgagtcaaggtataccaccctagaggcagagaagaggtcatggataatttcaaatagaaatactaggcattaaaacagcattagtgctgggcaatagtctcaagtttatagcaggaactaaatccctatttgggatgtggaatgtcaaggccaggccttatttaacgctcagcaaaaagagcattacaattccattgagtcaagtgtatgaattaatcagattttcttagtcattctctactgggaaaaacttaattttataaacttagtttattgtgatttaaatgtacttttaattccatggactttgagaagactcatttaacgcatggaagtataaaacgcgtttttatgtctggtaatgcagattaagtttgcttactgccttaagtaactaaaataaaacaaaattaaaatactcctcaccttgtttaaggctgtatgctccttggaaaaatagtttttctagatatcagcataggcaatagctttggtttgaaaaccagattggcataaaaatcaaaacccatcaaatgaattcattgccttttagagacagagcttggcaaggagctcatctgcactgtgtgccaccccgcatctcactactctgcagccctgttttgcaacaccaaacattggttacaaatggaaa

SEQ ID NO: 145011 - DNA, 844 bp, Homo Sapiens
tttggtttttgtgatgctggaagaatgaccagaatgagtcataggaagagtatacattcctgtagtattttccaggacagaggtgtgacctcctagagtactgggaccaaaattcccaagtgtctgcaaccttgctttaacagtatgggagatcacctctatcacctggaattcccctggaactctggaatatacaagagaagtatgagacttgggtcttcccttggctgtgtttaattcactcttctatggaataccaatgattctcactaagactggccttttcataagcacaatgtgcattttatggagaagattttacactttgctctatttagaaagaataaatatgagcagtggtttaggttttatgccctggacttaatatgtttctgattcctgttttgagattaaattctcatgtaaatagaaaaatacttattatttctcataaggccaagtttgttattagtttgagtttttgaagatgaagcacaaacttttgattttatctttgtctgtctctgtcagcgccactcgttgtctctcagtatgacctggacttgcccctgcacttacccttgtcctgctgaaccatctccatgcactgtccaattccatcagtgattcgggctccttccaaggctccccatgactgctgaagtttgaattcttagcagtacgattcgttttcttgtaaggtgagcagcttaggaaagattggccatctcgatcatggatctggcagctcttgatgtcagcccacaccatgtgaggctgctcttggtgcacccaatggggaagtttcaacatcagggcctcggagaatccactggcggccgca

SEQ ID NO: 145012 - DNA, 233 bp, Homo Sapiens
tttttctctatgtatattctattttattaaattaattgaatctagtatatgcgggatgtacgacattttgtgactgaagagacttgtttccttctacttttatgtgtctcagaatatttttgaggcgaaggcgtctgtctcttggctattttaacctaaaataacagtctagttatattccctcttcttacaaagcacaagctgggaccgcgagcacattgcagccccaacgg

SEQ ID NO: 145013 - DNA, 432 bp, Homo Sapiens
ttttaaacttgtaaatggatcatttattccagaattgcttgctaactcattggataaggaggttaggtcctgcaaagcttttgttactgttccgtcaggggctgtgttattaggaataaaagtacatcattggactccaatcaagacacagacaccacctttttctgctagcatcgtatctagggctatcctgttttcccagactatttagttaatgggacctaattgggaggctgttcccttaatggcatgtcttgtgtagttaacaaacctttgttggttgtaataaatgtagtttatccaatctacatttttatttacagttgaccaccaaaacagcacagattcaaatcctgaagctgtttgatttcgggccttaaatttatctggtacccctcgtggaactccagtagcatctttataaacgtggga

SEQ ID NO: 145014 - DNA, 623 bp, Homo Sapiens
tttaggctcaaacacatctttattaatcaaaataggaaccattacaatcaacacatttttgccaacaagaaataagtttgtttattcctggagggtaaaaatctgtgcttcgggattggacagaaaatgcttgcatcccctcgttgtggaagcgttttacctgcaaaaagttgtggagatgtttgaagaagtggtagtcgattggtgagaggtcagatgaatatgatggattaggaaaatcttcgtagcccaattcgctcaacttcagaagcgttatttgtgcgacgtgcagtcgagtcaacgttgttgtgaagaattgggcccttcctgttaaccaatgctggctgcaggcattgcagttttcgatgtatctcattgagttgctgagcatacttctcagatgtaatggtttcacgggtattctgaaagctacagtgaatcagacaagctgcagaccaccaaacagcgaatatgacctttttttggtacaagtttggctttgggaagtgctttggagcttcttctcgatccaaccactgaactagtcgtcgccagttgtcgtataaaatccacttttcatcgcacgtcacaatccgatggagaaatggttccttgttgcctcg

SEQ ID NO: 145015 - DNA, 762 bp, Homo Sapiens
  misc_feature (370)..(383): n is a, c, g, or t
atatgaatttcagtggttcaacaaattccctgggagccccaccacaggctgttcttcagattccaggttaagaacagctactttaggggctaaattcgattataatatttaagtgaccgaatttctgtgaccagagttatgctatcagctagtgcataagcatttcacacacactgctcgcgttcagaaatctttgtttgcctcagtaaaatttaccatcattcttactgtaatgagctctttgctctagaagtacatacaagggaagtaatgagattggtagacatatgacacctggtagaattagtttgaacatctgtgtaaaggctacctttgagagttcgaagatagaacaaggaacatcacactnnnnnnnnnnnnnngaggttggctcctttttgtatctatagacaattactggtaaaacttacaacccacttcatacactatttgcaaaactgcaccatacggttcaacatcttcagctgtcataccagaaaatgtcacacgacagggacgttaatccattagtctatttttttcacttgtatttgtctttttctttatatgtccttctttctcattttgggcgttggttcatgtctttcctattctctagttccactcatcattctttcattctgccatttttatccggaaagcgtaggctgcccagacgccccgagggaccaaagctgaagggaggagccctcgtaagcagacaagagtgcgcgcgtcgagcttgcgcagccgcagtagccc

SEQ ID NO: 145016 - DNA, 491 bp, Homo Sapiens
aaaaagacaaatacaagtgaaaaaaatagactaatggattaacgtccctgtcgtgtgacattttctgactatggaaatgatattagacataaagcaacttcaagtggttttcttatttgagttcaaaatgggtcataacgcagcagagataacttgaaacatgaacagcgcatttggcccaggaactactaacgaacatacagggcagctgtgattcaagaagttttgcaaagcagactagagccttgaatatgaggaacacagtggccagccattggatgcttcacttcttgaagcatcttgacagctttttgcaggtgaaatgcttccacaccagcaggatgcagaaaaatgctttccaagagtttgttgaatccagaagcatggatgtttatgctgcaggaataaacaaatttatttctcgttggcaaaaaagtgttgattgtaatggttcctattttgattaataaagatgtgtttgagcctaaaaa

SEQ ID NO: 145017 - DNA, 369 bp, Homo Sapiens
gcaatgaaaaaaattttaattttcttcttcatagagaaaacaaaaatagcacactaatggtcatcaatggggaagaatcttgccacgccactaatattacatttgagtgttataccctcccgaatgcttttgtgtggactaatcacaggcgcccatcatccctgtttgctaaaggaggaaggtacgtactgtccatgcctgtgttccatccccaccacgtggccctcccttgggagtgcagaacactgaaaggtcaacaaatactgggccccagttctttcttcaccacatgcatcacagttggaatctgtgtttatttctttgtttacgtgttaatctctggaaggtgcacggggagaagggtcacct

SEQ ID NO: 145018 - DNA, 869 bp, Homo Sapiens
cgtagtaacagaagctagataacagaggcttctggagtgagtaggcagtgagaaaatggaggtggtaaaagaggggaaaactagaacaaatagtcaagtaaagatttttgttttgttttaatgtactaaaagtaaccagtatagtgcttttgctttttcctgttattcttttgtggtttttcaatagatatctcagatctcagtgaagatatcttgctgtccacgccttaaaattcttcgcctggaagagaattgtcttgagctcagcatgcttccccagagcatcctcagtgattcccagatctgtctgcttgcttgtctgtgattcgttttatttgtggattttgagcatcaatctcattgcctatgttcagggccatgtcttttagatttcccaggatactgcccacttgagtcaggttctcttccatttcatcttctctggcatcattagttatgcgtttaatgtatccaccactggctgctcctgttgttggttgctgaagctgaccatttgtcaccgggcctggctgtttagatactacattgcaaggtgagttttctccaccatctccccatgttgtcttataagccttgccagactcaaagttctttgttctattacatgggcagacacaaaggccacagcatttgttgagttctgttaaagtcttctctgtctctctcatgtccttatttaattgggtccagccttcttctatgcggtttagttggttcctttgttccatcagcatagtgatggtcctgattcccgcatcctgaggactcaatggctaaaccagggattctctcgttacttccagagactcatcagtaatcgggtgaggctctcgttgaaattcctctga

SEQ ID NO: 145019 - DNA, 1155 bp, Homo Sapiens
  misc_feature (17)..(17): n is a, c, g, or t
  misc_feature (66)..(66): n is a, c, g, or t
  misc_feature (117)..(117): n is a, c, g, or t
  misc_feature (175)..(175): n is a, c, g, or t
  misc_feature (1077)..(1111): n is a, c, g, or t
gaaaggccaaaaagganccttggtgaaagttatatgaaggaggaatgaaaaccccttaaaccatgnccataggaaaacccaattcttaagccgtatgaatttgagaaaagaaaattnttagaaagaaaggccagagccagccagtcggccccttcaacagaaaaccaaaaaaganaggaggggctgtacctgctctgggccctcttcccatattatctcccaattagaagagcgtggaaccgaaaacttaaactctgaaaaggtaataactttcaaggaggagctacggaagtgaataaatgataaagaagaccagcagtagctttagctgtcaatgagtttctttgctctggcattggcaatatcaatacgatctctgttggtgtcagccttgtctgtgattcgttttatttgtggattttgagcatcaatctcattgcctatgttcagggccatgtcttttagatttcccaggatactgcccacttgagtcaggttctcttccatttcatcttctctggcatcattagttatgcgtttaatgtatccaccactggctgctcccgttgttggttgctgaagctgaccatttgtcaccgggcctggctgtttagatactacattgcaaggtgagttttctccaccatctccccatgttgtcttataagccttgccagactcaaagttctttgttctattacatgggcagacacaaaggccacagcatttgttgagttctgttaaagtcttctctgtctctctcatgtccttatttatttggtccaagccttcttctatgcggtttagttgttccttttgttcatccagcatagtgatggtcttgattcctgcatcctgagactcaatggctaaacccaggattctcctcgtactttccagagactcatcagtaatctggtgagctctctgttgaatttcttctgatgacagattatccatgatgaatcaaaactcaagcgggcgaggccactcctctccggcggcaactcggacaccccaacaccccccggccgtaatggccgaattcccgggcatatgtccggtaccgtcgactgnnnnnnnnnnnnnnnnnnnnnnnnnnnnnnnnnnncgccgcttcctcgctcacatgacttcgctgcgctcgtcgttcgg

SEQ ID NO: 145020 - DNA, 873 bp, Homo Sapiens
  misc_feature (757)..(757): n is a, c, g, or t
  misc_feature (778)..(778): n is a, c, g, or t
actgcatccaacgccgcaataggagtctgttatttacatttttcacaaatcttgtgcactgcacaatcggcaaagagagacccccccatcccccagcacaacattgtggtccactccagcacccccgacccaaggtgagggacagggcaaaagaaaagggaagaacaaacagagactcatgagcgggtctgtgggggaaccggagccataagcctccaataaatctatttgtagcaactgccagcattgttcagggggaggaggaggagcagaacccttccgagtctgtgagacacatcaatccaggcccaggagtccagactgtgacggggcacgtgccctctcagccggccggagcgcagccctgaacgctcggctgcctgcggcccatcctccgccatcctcggggcccctcgcctgggggtctccctgtcagagccgagtcggtttctcccagagtttgacagccctgctggagttcttgtttagtagatgacctcataaactgtggccttcttgtcaccagagcctgttacaatgtatttgtcatccgctgaaatgtcacaactcaagacagacgaggattctttagactggaatatgctggctccataaggcgtcctccaggcgttgagaaggttatctttcccagtgctcacgaaccacttgcccgcagtaggcgaacttgaagggagagcacgcagctctcgtgcaggtgcagctggtacttgtcaggcttggtgtggtgcagcacctncacgttgctgctctccatgcncacagccagccacttcccagtggggcagtagcccagcgagaagatcttgggagtgaagtcatgctgctgtagctgcggacctaccgcaggcccag

SEQ ID NO: 145021 - DNA, 443 bp, Homo Sapiens
tttttatactcactaatttttttattatatgacaggattgactaacttttcccccatttgcttggttttacagaatcttgagctcagaaaatatatctccaggttctctgcagtttctctgacacacacaagatgtaatccacagcatcttccatttaaatgacccctcatttgggcaatcaaattggatagtaatcattttagacttattagggatacagcatctcttatccaagcatattccacaaaaagtgggtttgtaactctgagtacttgagcatcccggaaagacaaatttttcaggtttggaggagttggaaagtaggttggcatgtttttcctttgggaatctttattgtctttaatatattgctgtcgcaggctgaatgttacacagtcttttctcttttctcattcacagttgctgtttcattggtcacctg

SEQ ID NO: 145022 - DNA, 365 bp, Homo Sapiens
ctcacacacctatcatgacatctgtggctcttgatgtccctcgggtgggctgtcaggagaatagaaaggtgcctgtgcttcaggcctgagacttctttccgtgtgtaggctcacactgcctgagaaatttgggttccttgtttcgtctttaaacagcttcttcctttactagtcgaggctttttcaggtgcccattgcaggagacccctttgtagagtcacgggggcttaatcagaatccccttctctccatatacccaaccccgtagactgtggtgaggattgaatgagacctacttagcatgattcctgacagagtgtgcactcaagtagatactagctattatcgttactattatttctctt

SEQ ID NO: 145023 - DNA, 593 bp, Homo Sapiens
  misc_feature (551)..(551): n is a, c, g, or t
tttaaagatatcttttcatttattgaggaagtttcaacgcttttacactcacacacagcttgcaaagcagcattgtgatagttcacttttatgaagtcagatctcctgatgttgagtcatgtgggtcatgccacgtgccagaaccatcttcggctttgcagcagaactccactgtgttcaccatcttcccttctcccaggctcttctgggactggtgtggccatacacttcagatccttcaccagaacatcccggctgtctggcaaacttaaatgggttacacctggagccactggccccacttagtaacccgaggatactcgtggatgcaggctgctttcctgaccccgaattcggtgcccacgaaacagcctctcaatctgaggacaggattttcacattgtccctgtgcatctgagaagagcccgcttccccttcaggagacgttcgtatgtggaaagagtgtatggacggcctctggccttagacagttctgcaggccaagccctctggcctctgccactcattagctgggcccgttacataacttnccctgggctctgccatcggccttcccaccagcagaagctgca

SEQ ID NO: 145024 - DNA, 531 bp, Homo Sapiens
accatccatctctttcacagtctcttccagaagatcccaataaagtatcagccctgggacttgggggatcaacatgtctaatcacaaatggaggtttatctgtttcttttttgaactcatagggtcccagatttaaatgggccagccgccgcctggtgtcttcagatagctcacacatgcgtctttttgtgtagggagatggagagtgtgattttgaagaaattgtaggctgttcgtagttttttgcatttatacagtatttacttctctcaggtgacttggattttttcttttgtgatcttgatgttctgttttgcagtctgccatgtgatttttcaactggagccaaatggtaaataaatttatcctgagtgtggcatttccttgaacttatcagacattcagtaatcactgaagtcgtagaaaattccagccttggagcatttcctcgaaggccagaaatcctcctcatggtaaccctgcggtttgattcatgtgtccagacatttggtttgacccggaacatgaaat

SEQ ID NO: 145025 - DNA, 567 bp, Homo Sapiens
tttggatgcattttactctttcttcaatattccatagagggctataaaaccttacaagtggtaggtcttaaaatttccccataagaccaatgatgtgagtacaacctacttagggggatgttgggttcaatgttgtggtctgtaatatagctgttttttcagtcattccatagagtgctttaagagcttacatgttggaggtgtttggatttccctataagactaatgatttgagtatcagtgagggcaggccagcatccatcctggctgctgcaggtgacgggttggcttcctgggctggctgctgcaggttgtgggccatagttccatttgtacagatggtcatgccattgtctctttgtatatccagcctctcagaccacattctggctccagcccttcctgctgtgggaccttggacacatcccctgactgtcctgtgcccgtcttctcagtggtgaagggagcagtgaccatgcacatcactgaggacagccatggggatgaaacacggcaggccaaggcacagcaaggtgtactgaagtagttcagaaaagcccagctctc

SEQ ID NO: 145026 - DNA, 509 bp, Homo Sapiens
  misc_feature (361)..(388): n is a, c, g, or t
taggaacgtcacagagcccagagagcgtcctgtaggaacgtcacagagcccagagaacgcctggggacggtcggggaggcagttcggggaggggacgattaagttccctcagagaggaagccgcgggccgactggagtcgttttcgtgctctccgcacccgcccgccgcgggtagcatcttctcagcgccccggcgcccaggaacgcccaggaaacccagtcctcctcctaagcaacctgcggcgcggggacgcccgccttttgctattattataaacgtgcgtgcgactaaaccttcggatttttagactttcttctcgcttcctctgacccaggctgagggagcccccgaggctactgnnnnnnnnnnnnnnnnnnnnnnnnnnnnccctcgccgcctcaggcagcgccccggccgctggcgggaggcggcagcggcgcgggccgagcggcgcggggattggctgcggcaggcggagacgtcaggctcccgcggcccaagcggccgc

SEQ ID NO: 145027 - DNA, 331 bp, Homo Sapiens
  misc_feature (180)..(195): n is a, c, g, or t
  misc_feature (218)..(272): n is a, c, g, or t
tttcttttgtacaaaaaaagtttgacatatatttaattcacatacaagcaggaagattaacttcataagagaattaacaaaagttgttttaattcaagacaagagactgcagagactaaaattgcttagtactgaaacttttgcttatataaactgtagtttatggagaaaataaagaannnnnnnnnnnnnnnngaggcaggatctcactctattcnnnnnnnnnnnnnnnnnnnnnnnnnnnnnnnnnnnnnnnnnnnnnnnnnnnnnnngaaggctctttaattccccctgattacaaaggttttgtgtgaacataatttggtgtaat

SEQ ID NO: 145028 - DNA, 520 bp, Homo Sapiens
gaaccatttattaagtttattaccttttttattgcattcacccatacaaaagctacattgaaatgagggaaaagttctagtgcaggccaaaagcaaagaaatgcagtgttaaggatgcacttttatttttgaattgccccattggagagtatatatagacataaaacacaaattttatttctccaaaatgaaagaggggactgggaaattgaatgaaattacctacacaaaagatgaagtatattcttgaattctacaaaactgagctacagcatatgtcatttaaaaataaataatgcgatctacttatgcttgatgtgtgagatctattacaaggaaccctattttatgtattttattaatttaaaacaaaatgtcaggaataatttcctaaatggcctcctggcctaagtcagggttctgcaatgtaccacaaacgccaaaatgacagaaaaggtgattttgaatggcagggccagggtggccttaggcaaatattgaaaaaaggtggatatcattg

SEQ ID NO: 145029 - DNA, 243 bp, Homo Sapiens
agatgtgacagctgcatgcacagcggcgtcccggatggggtcccgtgcttctgggggtcacatgtggagctccagcttcagccccttgagattaaaatcagtttctgttcctcttctctccagggccagcctccactacatgcctggccacaccagccatcagggatttggtctggtcttggtacctctcctttcctccataactcctcattgctcccacagcaacaggtaactctcccctgt

SEQ ID NO: 145030 - DNA, 459 bp, Homo Sapiens
ggccgccggcctcatgagcctggcattcctgtcgccccctctccccatagcttgcctcctccttctcacagtcgggcgcccggctcctcgagacgcaggaccacctcagatctccagtcctgcacctgccggctgagcaaacgaggagacggggagaaaagctgtctgtcgttcctgaaggaacaggacctccgcactccaagaaggaatccggcgcccagtgggggctgcaggagcagaggaccgtggcggcagtagcaggagaggcaggagtaggagcagtggcttctctggaggtggcactgtctgcccccttgagcctcttcctaacgcagtcttgattcaaaatccctgctcaccacggatgcacagtcacagctgaagattgtagttatctaggaggattctttcttagttgtaaatctatgttttatataggagttttttcgttgtttctct

SEQ ID NO: 145031 - DNA, 567 bp, Homo Sapiens
  misc_feature (182)..(194): n is a, c, g, or t
ttttttttgatgcatgaaaacagaactcaattttatttcatgtttgaaagtaaacatgacaaaaataagaatcaatttttaactttccaaaatgctccatgaggtttgcatggctgagacagtcccctctgctctgaatggtttctgttgtcttgaggggaaaataatgcttatataaagannnnnnnnnnnnncttctgagataaatcacttctcctattcatcaaatcaaccttctcattctgaagattggtgaaatgaagcccaagaaagttaaaggacttgctcaagcaaacactttggtctcttgctactcgtcaccatgttcctcacgtcctcttgctgctttctgtaacatttcagacttcctctttcgcttccttctttgtttcttcaaacccgttacaactctgttgtcctgcctttgtaaatcatcggccggttcgctcctccagaaaagagagcggcaataaatgggcagacataccaggataaggctgatcgcaccaagcccaaacatttgcatcatctgtttaggcacatctctaaatggagcaaaacatttga

SEQ ID NO: 145032 - DNA, 445 bp, Homo Sapiens
  misc_feature (151)..(163): n is a, c, g, or t
aataatgactggaatataatagtatgcaattagcagcttacttcctatatttttttcttcttagtggaagagaggccatgatcaatttagtatcttgtcctagatcagagattctggggagccatcttccaatcagtttaaagcttgaggnnnnnnnnnnnnngattgactctccctctagtaggagaaaactcttcctgcctgactgctttgaagtggaacatttatcttttcttgcctttggactcaagtagaaacacaagctcttcttgggtctagaacttgctggctttcagactggaacttacacccttggctaaacagactttttctggaactaaagccacagtatgttcctggttccaaggatttcagactcaactgaagacaccagcatctcctctgggtcttttgaatacagatcttgtgattttcagcctacaaa

SEQ ID NO: 145033 - DNA, 520 bp, Homo Sapiens
tttgtggttatcttttcagtttctttagtacacaagaaatactggtttagccaagcaacactggtgagggggaaaggtgaagatgaggaggaggctggaaggcagaaacaggacaccgagttcagtgctttggactaatggggcttcctgtaatttcaatctctggactcagtccagctcttctcacccaacacccttatctgtgactcttccaaccaccttccttgtgggacctgtgaatagatcctgtgtattcctttgatctcttttatacaagggaaaagcagctgatgggggactgggagcaaatctgagaaaaatgacaaaacatttcttatctcacagaacatttctcattttccatataccaatagttgagctgagggcctgcctgcacttttaagctgtcatgctcataggagggccttgctggtggccaacttgcctacctggtgtgagaactttctacacaacatataacaatctatctccttttcgacattaagcaataatttccctt

SEQ ID NO: 145034 - DNA, 958 bp, Homo Sapiens
aaaccttagctagtacgaggcctggtgttgaatcggcacgaggctgcaagtactgcccggcaccttctacagctcgcccggccttacgcggcacatcaacaagtgccacccatccgaaaacagacaggtgatcctcctgcaggtgcccgtgcgcccggcctgctagagcgcgccctccaccccggcccccgaactgtgccttcgcttggagacccacaaagagagtgcgccctgcacgccccgaacccgagtccgcgctgggggagcctcgcccccgcccccaccgggtgaaagtgtcgtctccgcttctctcggtgtggcgtgacggtaaccccatactctccttttgactccttttggaacccccacttttacgttgtgtccctccgcctcccccatggcgcaacaggagtcagtctctttctgtacaagggagaaaagctgtacgcgtttgtctcgtggttggaagcctccccttggcggggagaagctttttttcttgctagtattcgctgtgttcatggtctagaaatgcggtctggtctcgcctcgcctaccaatctctgctctctatgtatgtagcgtacgggttgttttgggtgaatcttgaggaataaatgcctttatatttcacaggctgtaaattgaacttcccacacgattagctttattatggcttgtgaactgctggagtctggctttacctttttgtatgtgaacaaatcaaattgcttaaaaaagagttttctttagtaatagccacaaatgccttgaactgttgtctgggattgttcgtggggggagggaaggactgttccgagatgtgagtaacggctagggttcaggtagaattttggttgaccacctggtgaaggaggatattagtcctctaaggttatgtgggactgcggaaggggaaatactaatatgataactgagatagaataatgggcaaatt

SEQ ID NO: 145035 - DNA, 432 bp, Homo Sapiens
aggtcggactatccgttccctctaaatgtatatgttgatttatgagtaattgttatttattctttatttatttatattaattatgaagattatgatattatttgattgcagatttttttggcgcgctgccccctccccaccctgccactcttgacattccactgtgcgttttagaagagagcctttttctaaagggatctgcttaaagttttaacttttatacctatctgagtgaattacagacaacctatcatttattctgcttcgagggtccccagggcccttgtacaaccgacagctcttacttttaaatgcaatctcttttctacatacattattttcttaattgttagctatttatagaaagcttcaatagaactgtttcaactgtataactatttactattcaaataaaaattttcaaagtcaaaa

SEQ ID NO: 145036 - DNA, 689 bp, Homo Sapiens
  misc_feature (215)..(215): n is a, c, g, or t
  misc_feature (354)..(354): n is a, c, g, or t
  misc_feature (363)..(364): n is a, c, g, or t
  misc_feature (366)..(368): n is a, c, g, or t
  misc_feature (372)..(372): n is a, c, g, or t
  misc_feature (375)..(378): n is a, c, g, or t
  misc_feature (381)..(381): n is a, c, g, or t
gctgtatgcaatacgtacgcagaaatcatgcattacagtagatctctgctgtcacggccctcggatcttccagtagcatcatgtcggctgtcttaatcatcagtagcattaacgtaacatttatgcagtcccttttgaaaatgcttcttctacacgacagtggatgtctagatggctcggtcggaagtggcctcgcgcctaataatctgctatcnattatatcatctcttcatacttcatatacataaataaagaatatataaccattactcatagatctacatatacatttagagggaactgatagtcctacctcaacaaagatatcaaaccagagagtatgacgtgaaacantgaggcagnnannncagnatnnnnggnacactcccttccctccccccacaaaacaatcccagacaacagttcaaggcatttgtggctatactaaagaaaactcttttttaagcaatttgatttgttcacatacaaaaaggtaaagccagactccagcagttcacaagccataataaagctaatcgtgtgggaagttcaatttacagcctgtgaaatataaaggcatttattcctcaagattcacccaaaacaacccgtacgctacatacatagagagcagagattggtaggcgaggcgagaccagaccgcatttctagaccatgaacacagcgaa

SEQ ID NO: 145037 - DNA, 469 bp, Homo Sapiens
  misc_feature (325)..(380): n is a, c, g, or t
  misc_feature (453)..(453): n is a, c, g, or t
tttgactttgaaaatattttatttgaatagtaaatagttatacagttgaaacagttctattgaagctttctataaatagctaacaattaagaaaataatgtatgtagaaaagagattgcatttaaaagtaagagctgtcggttgtacaagggccctggggaccctcgaagcagaataaatgataggttgtctgtaattcactcagataggtataaaagttaaaactttaagcagatccctttagaaaaaggctctcttctaaaacgcacagtggaatgtcaagagtggcagggtggggagggggcagcgcgccaaaaaaatctgnnnnnnnnnnnnnnnnnnnnnnnnnnnnnnnnnnnnnnnnnnnnnnnnnnnnnnnncacttactcatacatcaacatatacatttagagggaactggatagtcctacctcaacaacgatgatcaaccanaaagcctttacgtgaa

SEQ ID NO: 145038 - DNA, 450 bp, Homo Sapiens
  misc_feature (67)..(122): n is a, c, g, or t
gatcatctttgttgaggtaggactatcagttccctctaaatgtatatgttgatttatgagtaattgnnnnnnnnnnnnnnnnnnnnnnnnnnnnnnnnnnnnnnnnnnnnnnnnnnnnnnnncagtttttttggcgcgctgccccctccccaccctgccactcttgacattccactgtgcgttttagaagagagcctttttctaaagggatctgcttaaagttttaacttttatacctatctgagtgaattacagacaacctatcatttattctgcttcgagggtccccagggcccttgtacaaccgacagctcttacttttaaatgcaatctcttttctacatacattattttcttaattgttagctatttatagaaagcttcaatagaactgtttcaactgtatacctatttactattcaaataaaatatttacaaagtcaaaaaaaa

SEQ ID NO: 145039 - DNA, 727 bp, Homo Sapiens
  misc_feature (25)..(25): n is a, c, g, or t
  misc_feature (344)..(390): n is a, c, g, or t
cggggtgttttgggtgaatctgagngaataaatgcctttatattcacagggctgtaaatgacttcccacacgattagctttattatggcttgtgaactgctggagtctggctttacctttttgtatgtgaacaaatcaaattgcttaaaaaagagttttctttagtatagccacaaatgccttgaactgttgtctgggattgttttgtggggggagggaagggagtgttccgaagatgctgtagtaactgcctcagtgtttcacgtaagactttttggtttgatcatctttgttgaggtaggactatcagttccctctaaatgtatatgttgatttatgagtannnnnnnnnnnnnnnnnnnnnnnnnnnnnnnnnnnnnnnnnnnnnnntattatttgattgcagatttttttggcgcgctgccccctccccaccctgccactcttgacattccactgtgcgttttagaagagagcctttttctaaagggatctgcttaaagttttaacttttatacctatctgagtgaattacagacaacctatcatttattctgcttcgagggtccccagggcccttgtacaaccgacagctcttacttttaaatgcaatctcttttctacatacattattttcttaattgttagctatttatagaaagcttcaatagaactgtttcaactgtataactatttactattcaaataaaatattttcaaagtcaaa

SEQ ID NO: 145040 - DNA, 445 bp, Homo Sapiens
  misc_feature (70)..(125): n is a, c, g, or t
tttgatcatctttgttgaggtaggactatcagttccctctaaatgtatatgttgatttatgagtaattgnnnnnnnnnnnnnnnnnnnnnnnnnnnnnnnnnnnnnnnnnnnnnnnnnnnnnnnncagatttttttggcgcgctgccccctccccaccctgccactcttgacattccactgtgcgttttagaagagagcctttttctaaagggatctgcttaaagttttaacttttatacctatctgagtgaattacagacaacctatcatttattctgcttcgagggtccccagggcccttgtacaaccgacagctcttacttttaaatgcaatctcttttctacatacattattttcttaattgttagctatttatagaaagcttcaatagaactgtttcaactgtataactatttactattcaaataaaatattttcaaagt

SEQ ID NO: 145041 - DNA, 435 bp, Homo Sapiens
  misc_feature (321)..(382): n is a, c, g, or t
tttttgactttgaaaatattttatttgaatagtaaatagttatacagttgaaacagttctattgaagctttctataaatagctaacaattaagaaaataatgtatgtagaaaagagattgcatttaaaagtaagagctgtcggttgtacaagggccctggggaccctcgaagcagaataaatgataggttgtctgtaattcactcagataggtataaaagttaaaactttaagcagatccctttagaaaaaggctctcttctaaaacgcacagtggaatgtcaagagtggcagggtggggagggggcagcgcgccaaaaannnnnnnnnnnnnnnnnnnnnnnnnnnnnnnnnnnnnnnnnnnnnnnnnnnnnnnnnnnnnncaattactcataaatcaacatatacatttagagggaactgatagtcctacctc

SEQ ID NO: 145042 - DNA, 1413 bp, Homo Sapiens
  misc_feature (93)..(101): n is a, c, g, or t
  misc_feature (148)..(165): n is a, c, g, or t
  misc_feature (189)..(344): n is a, c, g, or t
  misc_feature (349)..(359): n is a, c, g, or t
  misc_feature (384)..(397): n is a, c, g, or t
  misc_feature (406)..(584): n is a, c, g, or t
cccccccgttttttccacggggggaaaaatttttctccccgcgggccaagggggggtgtccccccggggaataaaggattcacacccccgttnnnnnnnnntcccctcggcgggaaaggttaaaaaaattcccccctcccctctaatnnnnnnnnnnnnnnnnnnaattaaataaaaaacgcctggggnnnnnnnnnnnnnnnnnnnnnnnnnnnnnnnnnnnnnnnnnnnnnnnnnnnnnnnnnnnnnnnnnnnnnnnnnnnnnnnnnnnnnnnnnnnnnnnnnnnnnnnnnnnnnnnnnnnnnnnnnnnnnnnnnnnnnnnnnnnnnnnnnnnnnnnnnnnnggggnnnnnnnnnnnaaaaaaggttttaaaaatttttttnnnnnnnnnnnnnnccccaaaannnnnnnnnnnnnnnnnnnnnnnnnnnnnnnnnnnnnnnnnnnnnnnnnnnnnnnnnnnnnnnnnnnnnnnnnnnnnnnnnnnnnnnnnnnnnnnnnnnnnnnnnnnnnnnnnnnnnnnnnnnnnnnnnnnnnnnnnnnnnnnnnnnnnnnnnnnnnnnnnnnnnnnnnnnnnnnnnnncagcttagaaccttctttattaaggaaggtctttcaggcactttcattaacaggcacatataagcttagcaagagcacctttcaaagtcacagttccaatggtttttgtaaggtcaaccagaggcagagaacacaatcatggtggcttaccgtcaaaatcatgacaagttgtcaacctaatgccttctgtcaaacataaccaccacccactctgcttctgtcctgtgaggaatgacgggaagtagggagtcaagacttgatattaatgtagatcgcatgtgacacttgcgtggccagcagacaaggccccccacccatgcccaggcttggacaaaatggtggctatgttttctgtgccaaacctcctcatctctgccatgtctagcctagaccttgaagtgtctgatcctccccggacatggaggaaccactggcccagcagcagcaccaacactaggctgcaccactgtgcgtgttttccgggggtgcgacacttctcctgaggttgaccccaatgagaccacacccaggagggtgtgggacaggtcgtagtgcgcccggtgcaactggtgtcctggaagagctgccagtaacaccatggtagtcttgggggtgagccaacttggaaggagtccaagtgcgccaagtgtgagggaccgaggtgcatctgggtccaccaacgggggtgggggatgctttattgcccccttcctggtgggggctgggagacaccggctgtgtttggaaaaccgtgcaggttcactgaaccttttggcccaacaagctttctcctgattgtggcctacaaaagccttattgctttcttgcc

SEQ ID NO: 145043 - DNA, 553 bp, Homo Sapiens
agtttcattttaagtaaactcattttgtgggatttgagatttaaaaatgaaattaattttgcacattctagtcatggttgggctctaaggcaatgttgtaaagctgtaattgtttgccttatgggaagaagtgaaaaggaattaaaatttatggtgtgtctactatgaaccaggcatgatgctgagagtttaactgtgtaatttttggcctaaatagccctgtgaagtagatattattccaactttacaggttagaaaatttgaggcacagagaggtgacatatttgcctaaagtgaaacggcaaatttggcaatttggacttggattcaagtgtttataactaaagcccagctccttgcatcataccctggtacctaaaagacataaaaactcacttcaggtgcaatgtgaatgaaaatgacgttatgacccaggcttgttgtctatgtgctccttgagaaatagttctgttggatagatgcggtcaatactcaaaagcccttgctatctttgccatgcattactctaagcacttgacatgtattaatttaa

SEQ ID NO: 145044 - DNA, 453 bp, Homo Sapiens
ggaagagttgagattttattctagggagccattgatgggtctatatcaaatatggcgaaatatagagaggagtacagagagaaatctgatggaccagatctgtgtcctcaagcagcatccaggtggtgaaggtgtgcaagtagaacagatacatttcttggcaatgtctgtggttgtccaaatacaaacacacaaggtatggacctgtcttcaaagacctaagattctaaggtagcaaaggagtagaagcagcactgagattggaaggcagattctgtgagtccaaatgcacccatcatggcaactcctaacagcttcctggaggctcccaggctgtactgaaggacttggcttcgctggcctcctggctgtctggacaatcccctgcgcttactcttccaagatgggaattccagtgggcaaaaggcaacatcccaggctctggaccaaagg

SEQ ID NO: 145045 - DNA, 503 bp, Homo Sapiens
tttattttgcttccaaagtttatttctcggaacaccataagatttgtataaagtatggtaggttgtttatcaaatcattttgtttgcaagaactcaccattagcagctgatatggccagatatacagatgtaatggcatcacaacaaccaaaaatagggctaatgagatggtgaccgtttctctctgctatgctcctgtctcagttcttgtagccttcaactcggtacgttaatatttgatgaagttggattctttcaaactagtgatgtctccataatggtaagtgttactattcacagaataattacaatacttctcatttcctcaactgatttttctagggattatggattcaaaaaacatacatttcctaagaaatactgggagggaattcccacatggaaacactggtctgtgtcctagccctagcctctgcagcatcattctgggatgacagtttgtaatagtgaccaaaacatgtaagttggagttaaggcagatc

SEQ ID NO: 145046 - DNA, 842 bp, Homo Sapiens
  misc_feature (656)..(656): n is a, c, g, or t
ttttacaatgaatgttgattttattaggtgagtctgcttttataaatccaagtaaacaaggttataaaaatgactacctcaaataaaatagctcttaatgtacctcctcttccttcacaccacccactttgggaagcactgttgactggaagtactcaattgaacatcccattgaagaaagccttgtgacatttgcttcttaaaagcaacagtagtaacaaaactacccagaagacaagggcctgagctccatccccctcctgagtgtttgtaggtaaggaagactcaggaaagaaagctgacttttttcaaggttttattttaatttaaaagacattgttcgtgcaaaactgttggtagttcttacaaaacatcccttccacattcccctcaggctgtgataatgcacgctttgagttctcccatgggactttcagcacagcacccaggtgactagttagctatactttggagccctcaagacagtcccttgaagaaaaggggcaggctcgctgtagctggagtctgaagcccctcacagggcctgggactgctgtgtgcagcctccctgtaacccttaaggtcatgctctgctgtcacagaacccagtgtctgcctaatgggggtgtcttaaagctgagaacgtttttccatcnccaggaaagtgcttttccccatccaccagggatccctgagccagagcaggtcattctgaggccaactctggctggaacgcaggtttcttaagcagtgggttgcttaggtcaccagttccctggtcccttcttttgtcttctgggggcctggccatggctgatgttttcagttcctgcaggtaagca

SEQ ID NO: 145047 - DNA, 419 bp, Homo Sapiens
gctagtgaattcatctagtggaaaagtaaactgaagagctgttcatcaccatcttcctgggatattcttgaataagggtcacttgcaactatatacagaatacgcagaagctgaaggacatcttctactccacaagagttctgtccattgcctgctttggcctgaggttgttcttttgttaaattaagaatatcactactttgaagagtagaaatggccccctggtttaacccagactttgttccatgctcacaaaaatccttatatgcagctatgagctgagaacaatttctgtttttcctaatacttttattagtgccagttaatttccagtggcgcaggaaagcagcgtctgcattcttctgcaggtaggttatcaagtcattctttggtaattcatcagtgccaaggtactgctc

SEQ ID NO: 145048 - DNA, 405 bp, Homo Sapiens
tgagccaccatgcccggcccaactccaagatctaaacaaaaaagactgggttgaaagggagtttttaatgtttactgtttgctttacatccattttcttgttttgttaatacttgctttacttaagcttttgggtcaaatgtcctcgttaaaatggctttctctagcgactttatgttttacgtttctgtttgtaactgacatttgaccttcttttaacacggtattacttgcttccttataccggtttccaaggtgaagccatttgcagggtcgctgggtttccccctccccccgaaagtcttgcgcgacccggggtgggccggatagtgtgcagttttttgagccttgggctggggacctccaggaagctgaagcggaaattgcctaagcccctggggcattg

SEQ ID NO: 145049 - DNA, 1196 bp, Homo Sapiens
cgagggacggggcggcgtctattgccacggtccgcgggtgctctcctgcttgtggcatcacactatgttctggaaggaatgcggtgcggtatcgggacgggtggtggtgccgcgcgactgcggccaggagcgtggcacgccacgcgggtgacgcagatcccgcggctatgaaggggggtggtatatggtgggtaaagccggagatgcattggttggccgttgaacgaatcgtttcttttatcttctagccgcgggcccatgccccagggcttaaacgtctattcccccccgcccatctgcgctctctcttgctttctctcaggccgccggttagggtggccatacatcggctctgtacactgccgcccgcccggggcccaacccgccgccgctaggtgtcctttcttccgcctcgccgtccgtgcacggccgctgacctgtcgagttcttctcccatcaccgcgtcgacaatccgccctggcctgtctctcattttactaaccggctgtctgctctacttccgcgtgtcgccatatcggggggctatgcgggtgcggggcggggtggcatgatccgactgggatttgttatcttttttcgggggttcgtacccccgatcacaggtatcacaaaaaaaagtgaaacaactggttcctgtcttttctcttttttctgttttctactgggaggtaagctgaagtctgtgaattttgcatcatactttcgtggataataagaatttttaactgcagggttgaaggacttctgatgccgaggaaacctatcagaagactgtctccaataccacgatgtggaagcatggaaattccaaggctggccgctgggttgaggctgagaatcaaggggagactgggcgtcgaaggggggttgcgccccgggaagaatctgggcgtcgaaggggggcggagccccggggagagactgggcctccatggggggctgcgactcagaggaaggctttgacccggctgcgggaagcgaggacgtaagtggtggtggcggtggcggcagcattgcccagaacatccacctgtcccgcggcggggcagtgtcgctcaggggccctaacgtgggagtcagctcgggagacgcatgccacccgataggagtctcgaaatcactagtcggctcagccataccactggcgggtccggagtctagcacgcgactgtccc

SEQ ID NO: 145050 - DNA, 519 bp, Homo Sapiens
tttttttaaattttcatatacgttttaataaaaatagaactacagtaaatataagatgttggttcatagattatataaaacaaaatgatagaatattatgtagtcatacacatacattcaacaatgttagcatgatgcattttgtgtctccgttttggctgaggccctaaaaaagcagagaataatacatcagggaccaagtattcctacctatcaaaggtgctaggcagcccaggaagggggcagttaacattcctagaggaaaccttcaactagtagaggatggaaatccattacatgtcccagcctcccagcatcgggagagataattccaaggtgcattccacagtttcttagagggtctccagcaggattgaacccccgttgctgatgacaatactcagcctcagtaacatactctttattttcttccttccctgtcccacatggcctgtcccctcccttctgcttcctataatctacctcccattacaaagcccagacacaagttcttatctc

SEQ ID NO: 145051 - DNA, 411 bp, Homo Sapiens
  misc_feature (119)..(170): n is a, c, g, or t
gaataacctttattgtttcatacaccaatttttctttattttttaactttaaaacattttctgttgtctatagctttatgttccttataagtaatttcttctatgagaaacctgtttcnnnnnnnnnnnnnnnnnnnnnnnnnnnnnnnnnnnnnnnnnnnnnnnnnnnntcagttatatatatgcacatggtttaaaagtcttggtctgcgtatcctaacaaaaactaggggtgccctgcatgtttctttctcttgttttgtatttctagaggtaaccacttcaaactcttcttagttgcttcttttgctgattacctccttagctatgaattgcttggttatattgcaacttcaaattttttttcagtgttaggcttttcttgttttcttttggaaacagggtcttgct

SEQ ID NO: 145052 - DNA, 573 bp, Homo Sapiens
  misc_feature (421)..(526): n is a, c, g, or t
tagctatcttgatttcactacagctcagtagcagttcagtgctttggctttggagtcacagccaagttcaagtcatggttgtgtgactttggattttattaactatatatttctgttttccatctgctgctaaggtgatgccatctggtataatgagaatgaaatgagatgtttattaaacactgaggatcagtgcctagcatatacaagcacttagtaattatatttttatcattagtctaattctggtctcttgatctttctttagttcctaaagtccttactatggtttctattcatgtggctcttacatgaacaatacatgacacaaatatgatagtgtttgaatgtctgtcatgcacataatagtctgctagaaatttcgaaaatgaataagactggctgggcacggtggctcatnnnnnnnnnnnnnnnnnnnnnnnnnnnnnnnnnnnnnnnnnnnnnnnnnnnnnnnnnnnnnnnnnnnnnnnnnnnnnnnnnnnnnnnnnnnnnnnnnnnnnnnnnnactgacatgacatagcctttcctcaatgtacaactacgccatgaccc

SEQ ID NO: 145053 - DNA, 1324 bp, Homo Sapiens
tttttattgtagttcaatacttttttctttttaattcatactgtacttccatggctctagctactttacattaagatttggctgggcagccttgtgtgtttctaggtactagcagtaagttttctgaccttgcgcacagcgccaggcaaagtacagttatagatccaaatacagatggccagacaactcgactgcactcgacccgtgttctttcccatagatggcccagtgcaggtgttggggctgctccctctgcctcaccccactccaccccacgtcaggattatccaggggccactatggcctctgacccatccctccccaccttggagtctaggttgagttggggaaaaagcaccatgggtttgggaagatggtctggtccatgcagagagtggtctggcccttgagtgcagggtaggaaaatgtggggagccacaagctattgttggcaaaaatggctgttttgactatgcaatctcagcacgtggcacccaagccccaggccgatgccccagacagagccagctgccttgcctggagcagaggccacccttttgcttctgcaatgtcttattgtattgagagaagcaaggagggctgaagaacgacaatgttctttaagccttcagatgttggggagatcgtcagcatcagctcctcctggccggcaaggtgctgctcatcagctgccaagactccagtcctggctccagggcctgttgaggatctccagtcacaagaccccggagctgttgcacagtacatcattaacagggagctggctgggcccttcacagccatggccagagcatgaagtgaggttacataggctgggcagagaggtgggaagggagctctctaaatagtgtgcaagtttctgctctgcactatgacagcaagcaggggccttaaatagatggccttccaggattaatgctcctctcagacccaaaatgcatcttctagaagataacacagaggtgaagaggattgggtccaacctgctggaggttgggggaatgaaatgtcaatggatgtcaaggatgtcaagtggtgaatgggatgattgtccacatagcctagagacaagtggtcgaaggtggggagagtcaggaacggggccccggagattcctcctggaggaggcagggtatgaggtgtagggaggcacagagtccatgccatctgtggggaagggagaagagtgctatttctcctgggggcagtagtcgactgcgtgggtcgacgatatcccgggaattccggaccggtaccagctgcttttgttacacacgtggttctatagtgtcactatgcattg

SEQ ID NO: 145054 - DNA, 1271 bp, Homo Sapiens
  misc_feature (19)..(19): n is a, c, g, or t
  misc_feature (42)..(42): n is a, c, g, or t
  misc_feature (44)..(44): n is a, c, g, or t
  misc_feature (1195)..(1203): n is a, c, g, or t
gggcatctagtgacactangtagaacccacgctgggtgtganantagacacatgcagggctggtacggtccggatattcccgggatatcgtcgacccacgcgtcggaaacagtggagagtagccacttctggttctagcacttctcttttgttcagatagggtttggatttagtatgaagctttggctaaaagccttgggtttgccttagaacactgacactaagaacctggaatgacatggggaggacaaagagagctcaagaggaatgctttgtgagaagtggattctctccgtgtccctgcccccccacccaaacttgaactatacctattacatttccaggcagtatccctaagatgagatcctggagaaaggactagggggaagtatctttctggatgcttgtggtcccagaagggtactttctgtgtcataccatgccacttctttaagctcttcagggcagccaaagccagcccttttctcctactgcccccaggagaaatagcactcttctcccttcccccagatggcagggctctggcctccctacacctcataccctgcctgcctcctccaggaggaatctccggggccccttcctgactctccccaccttcgccacttgtctctaggctatgggacaatcatcccattcaccacttgacatccttgacatccttgagtttcattcccccaagctccagcaggttggccccaatcctcttcacctcttgtgttttccttctagacagatgcattttgggtctgagaggagcattttcctggaaggccatcttttaaggcccctgcttggtgtcatagtgcagagcagaaacttgcacactatttagagagctcccttcccacctctctgcccagccttgttacctcacttctgctctggccatggctgtgaagggcccagccagctccctgttttgatgttctggggaacagctccggggtcttgggactggagatcctccacaggccctggagcccaggactgggagtcttggcaagctgatgagcaagcacctttgccggcccaggaggagcctgatggctggaacaaatctcccccaacatcctgaaagggcttaaaagaaacatttgggggtgtcttccagcccctcctttgcgttcgcctccaatgaccaataaaggaactttggccggaagcccaaaannnnnnnnncctcctggcctcccagggcaaaggggaagcttggggcttcttggtctgggggggcgggtcggggcctg

SEQ ID NO: 145055 - DNA, 1146 bp, Homo Sapiens
tttcgtatttctgaaatcattcttttattttgcacacacatagctgctatttactgaacactggaaattcatgaatgcgttacatatttaaactttcatagaaggctcagatcaacaaagcaaaacttctacagataataagtagttgtgtatgcttgtcactcttgggcccatcagcacctgttccctatcatattgctgaactctgcaaactccagaaaggaaggtttcttttccaaacttcagagaagctgcagatcaagaatttgggccgttgcatctgattagaaactctcttcttccagtgtgagaacgttggattgaaagcggcataatataaaaagagatggttgtctgtcagggagaggtcagatctgtaggggtctttcacctgtcaccctcggaagaagctgatgagaaaggcgcacagggcctggaagggtttccaacaatgttcccaggccttcttctttgcttcctcattccctccgggcctgggtccaggctgggtaggtttggctgtgggtcgggtgttgggtttggcttttcccagctcttccatcgagtcctttcccagctgtgttgcttctgtgagtttcactgtggccttgggcctcagagatggcgtcccagcctcaggctgctggttgggctctgggctgcccttgaggctggaagtcacctgctgcatatgggcctggggtccaagcctccctgcacacggatggcctaagcaccggggcccctggcacgcatggtgaaggcgcctcagctcctgcagggcttgattccagtaagatttggggtcagcagcgaaagcctggcacatgctgggctgccccctgtactcacaccagtaggtctggtctgtgttgcggcagtcgacgcgaagccagacttctccagcaccttgccccaagctgctgggacgcatagtgcaggaatctctccctccagtctggaaatggaattcctccccagtgcttccttgcttttgcctcggggcctgacccaagtccccaggcaggacaaggtcaccagcaggaggcaggggacgaacttcatggcgatactccgataaacttgccttgcaactctgcaccaggagagagaacacaagtgggacgagtcaccctttaaaggtgc

SEQ ID NO: 145056 - DNA, 531 bp, Homo Sapiens
ttttttcacgtgtgaagacatcccttcgcctctttcagtttggaaaggtttatcagtctttgctgggctcttatggccttcgagtatttgaagctggcaggagggctactttgagccatggtcctactttgctgttttctcttgattagattcgggccatgagtctttgttggaaccatcacaggagaatgctggctgctcactgcgtctgaccaggcacacgggattctgtgtgtggccttttactgacaatgtccacttggatcatttgactaaggaggcagctgtcagcttcttccctgtaagagtattcctttctctttgtcactttggtttcccttagcagctcttctgtgaacttgaccacctgggccacctccacccatgggaagcctttgcccactgcaaagatgatgctctcgtagagggtgtccagcaggatgctcctccgggagtctctctgttcgtcaaactcctcccagttcagaagcctccgcaggcgctcccgaccttgtggtctctgaaattgga

SEQ ID NO: 145057 - DNA, 480 bp, Homo Sapiens
tttcatcatcaaattgttctttatcactttctccatcatatttttcaacaggtacatcagccttttcagggggtttcaaatctgagagggaaacttcaatcagattaacattttttggagcagtgggtgggaaaacgggtttaggagggggttctgtgggttgattcaattggtcctcatttggtgtcagacatacagtctctgtgacaggcagtgataggacttcagagactgttgactcaaaaggtttgatttccttttcttctggattatgtccacgctgttccaaagtccctttggattccaattcctcctttttaacttcctctttaggtttggattcctttaactgaggttctccatcatccccaaaacatacaaatgacctagtttgaataggaacttgacttggtgaaaacctccttaaccgaggaaggctatccacagaccgaggaggtgtcaaggttcaattcaaaggtg

SEQ ID NO: 145058 - DNA, 526 bp, Homo Sapiens
tttcttggacatgtaagaaggatctttattccacaggtggaaaagggtgatagtggttttcttgcaaatgaagctttacgggaggattatatccatctacccaaagtgatactttttcacttgccctcacagtggtatgtgctgctggtgctgaagctcttcccagaaatggagactagtgcatgaattcacaaaggccaggttaccttgctagcacaagtgctttcccgagagtttacagagttgataaatattatgattcttccggatccagagagaagatcttcatcccgggcctcgcagggactcctgttctcagcacggctctctgagaaggcaggaaccaagacaaaggcaactccaaggtggagcagtgttctcacacttcgaactggcctctcacgggttcagataaggttgagagagtgtctcagaggcccactggggcaattgcaagcctgaaaagggtgtccacaagttctgttcattggcactgtggaacccccatataatcaaagaaaaatca

SEQ ID NO: 145059 - DNA, 763 bp, Homo Sapiens
tggtagtggaccctggcctctggaccgcgtgctggccaaccggccacgactgcagctgctgcggactacccccctcctgcacgccgtcatggtgtgcgtggacctcgtggcgcgcggccagggccgcggcacctacgacttcagacccttccccgcctgctccttcgccccggccgctgccccccaggccgtccgcgcaggcgccgtgcgtaaactggacgcagacgaggacggcctcccctacctgtgcactggctacgacctgtacgtgacccgcgagccctgcgccatgtgcgccatggccctggtgcacgcacgcatcctgcgcgtcttctacggtgcgccctcgcccgacggcgccctgggcacccgcttccgcatccacgcacggcccgacctcaaccaccgcttccaggtgttccgcggggtgctggaggagcagtgccgctggctggaccccgacacgtaggcgccgccctcctgcctccggacccttcccgctcccggccgtggggcgcccctcctggacttccgggcctcgatttcttccgcacaagcctgaccgtggatttcagggacacataccgcctccagcggggagcacgggtgctgccttccgtgcggatcgagctttcctggactcggtcattggggccaccccgtgccagcggtgcccttctgcggccgcccttgctgcgtttgtgtcccctctgtctcgcgggccgggaaactgctctgatgggaaaataaacagcccaaaacc

SEQ ID NO: 145060 - DNA, 167 bp, Homo Sapiens
cattttcatgttattttcattattggcaaagaaaatcaaaatgtttatagccaaataacaaatgtgccatgtaaaagtaagtctggacttaagagtttaaaatttttaaacatcagtttccaagtttatatcatattaatacatttcagtggataatttattttaaa

SEQ ID NO: 145061 - DNA, 537 bp, Homo Sapiens
attgaatgccacgaagaaaacagatggaaacataagacaagccccggccactgttggctgggcagggatgggtgttggtctcactccctaaggcttagagcatgcatggtctctacaggggactttgaaggtcagaaaaggaggcgttttcatcacacacggagttagagaatggtacaaaagaacttcttctcgcgaaaggggttttctgatgcaggcactggaatgatgagaggatcttcccgcacgtgagcttcacagtaggccaggaggtccgcggctgcctgggagaccttgaccctgtccatacaggcttccatctttagctgctccacagctttcctggcttgggagatgctagtggtgctgttattagacatgccctctttcattctactgcccctgctgagaggcagccgtgtgacaggcctgggcaagggacagaggctggcggtggcagcagctgtcagtcgtcagatgagaggtgaattcagagcttctgctttgaggtcacctgtgcgaattcgcgcggccgca

SEQ ID NO: 145062 - DNA, 431 bp, Homo Sapiens
gttcaccgggtccctgaaaatgaagatgggagatacttgatgaaatggagcaaagaacacagacctccgtgtcctacagcatggggctgtcaaggagcattaggggtatcaggagtagctggtggggtttggttggactggggtgggtgagaggatgaagaggggacaggccggctgggagccagaaggaaagctgggaaggtagtccgggtggcgtggtggactcacactgcacgttcagctgcacctgggcctcacgggggcgcacgttgaagccattatagcgggccgtctggcagcggtaggtcccgctcatgtctcggctcactcgctccagccgcagcttcccgtccggagtctcctccaggggcagccccgagggcagcagtgcagcctccttgtccacgcgggaccagagcactggcggccgc

SEQ ID NO: 145063 - DNA, 450 bp, Homo Sapiens
gataaaaccaatgttaaaaattcttttctaattcaagttcaaattttaaaaatttgaaaggcatgttttagtgtataaataatagaaaagttgttgacagttgtttgttttgcagtcagcaagtggtaagaatctttggagagacaacaggagaataaaagccgaaacatgcgtatatacaaaatgaaatatgaatgtgagcttagaggctacacgtggtctctcggatactagaactatctttcttgccttggaccagctaacgtgccttggttgcgccagtgtactgagccctgtggacatcacctcattaaatattcaataaatgttatttttttcctattgcctttctctcttctatatgagaatctgtaagtattcgccgaaggcttttcttttgcttttgtgaataccttcacaccacgttgtattctgtcttggttagttaaa

SEQ ID NO: 145064 - DNA, 501 bp, Homo Sapiens
ttttttttaaaaggaacaaaatgaattttaatggacatgtgctttaagcatgccaacagacaacacaccactagagacacacatcaaaagcaatcacagtgctatgatcaaatgatgggtacatgtgaacacatccctcgcaaccccaccccccacgttgcttctctttagcgattagtccagagtgctttagtggctgggcacacccgagatacttaaatcaggaggtgaacatgaatgcaacgtgacaactagtagcacagaaaacacctgattggtattcaaagtgcacgaagcaatgctattttcaagttcattgagtctctgcgtcatcactcaaaacaataaaaatactttttcttctcatacaagccaattgtaattaaaattttgttatgacaagctacatttaaaaatctagataaaaataggcatgatagcaaatgctaagaacatcatagcactcttttcttgtgtgcttatgtggttccttttttggag

SEQ ID NO: 145065 - DNA, 1774 bp, Homo Sapiens
cctgctctttatttgattttattctttgaaaaaaacagatatgagaattgccgatgcacaggccagcctttgctaccatatgtgggctttgaaaagattctggattttctgtctgtatgataatatgtgcttttgtttagagcacggaaaacagaggtggttttccaagctccacagcccatctttatcactgccaggtaaagctctgtcccttcaaagttagatacaaccaaccaagtgacatttattgagactctactatgtgccagacctgggcaaggtaccttctcataaggtcgagctggatgactggctgggataaaggatacagccaaaacgtgggggtccaacaggaggtcgtggggaccacatgctcatccacaggacctgatctaagcttgttcatagaccttctgtgtattttccttatagaaaataagaggattttgcttatcatttcttttccattgttgtcagtttcagttttttatatgtcctaataaccatatatttcattttccacccatccagactccttactcctccccatttggtctggggagaactcataaatgtcattggtcacaaatccactctccacgctcaccagagtcacaaacccactttctgatgggttcacagccatgttgtcatagtcacaagacatgtcatcgggagtggcttctcccgaacacactcggaatgaaatattcttcaggtctggccgggtctcagctaagtcagcttcgctttgttttcttatgacattgtagacctctaggtccgggctgtttccctggtgaggagagggccagatggtgtgttgcttctttgtgctagggtctggctgctcccgttttctttttctacagatccaaacccaacatacaactgtggtgaccacaaggaggaggagaaggggaatgctggggattaggatgtaggccagattcaaggcagcttctctactttctttaaatgtttttttggcatcttcttcctgtgtttcttctggaagtacaggtgttgtcagctctgtttcctcaccttcagcttctctagaaggaactgctggtttctcatcagaatatttgcaaatgaaattgttcttcatgttgcaccggtcatcattccactggaacatgtaggggcctccgatgccagcgggtgccgatggctgatggtacatgaccacgcagacctcgctgccgcaggacggctcatccacataccagttcctaaattgtgatatgctgccatcagtccaagcataaaggtcctggcaggctgtgctattgctttgtttctcctcacgcctcctgagcccaatccagaagtcaccatcagatggcaagaggttttcaatgaacttttctatcagtttctgttcatcttcagactcgatgctgactagctggcctccatccctcctgcaggcttctttggcttcctcaaagttcagtcttcgagaagtatcatggaagtaaatgactttataacaaggcctctgtgtccctccccggcagactggctgcccactcagcaggcgacccgtcgcggcccgcagccccaccagcagcacggccagcagcacggcctgtagcgcggttcccggcctcatggcccgactcgggtgcgccccccgacactcgggcgctacggcggtggagcgggctggcgggcagaggcgtgcgcgacaactgcaaccgcggcagcagcatctctaggccaccgcctcgtgccgaaatcgccacccaggcctcgctacctagac

SEQ ID NO: 145066 - DNA, 897 bp, Homo Sapiens
aaggtagcgaggcctgggtggcgatttcggcacgaggctgctgccgcggttgtagttgtcgcgcacgcctctgcccgccagcccgctccaccgccgtagcgcccgagtgtcggggggcgcacccgagtcgggccatgaggccgggaaccgcgctacaggccgtgctgctggccgtgctgctggtggggctgcgggccgcgacgggtcgcctgctgagtgggcagccagtctgccggggagggacacagaggccttgttataaagtcatttacttccatgatacttctcgaagactgaactttgaggaagccaaagaagcctgcaggagggatggaggccagctagtcagcatcgagtctgaagatgaacagaaactgatagaaaagttcattgaaaacctcttgccatctgatggtgacttctggattgggctcaggaggcgtgaggagaaacaaagcaatagcacagcctgccaggacctttatgcttggactgatggcagcatatcacaatttaggaactggtatgtggatgagccgtcctgcggcagcgaggtctgcgtggtcatgtaccatcagccatcggcacccgctggcatcggaggcccctacatgttccagtggaatgatgaccggtgcaacatgaagaacaatttcatttgcaaatattctgatgagaaaccagcagttccttctagagaagctgaaggtgaggaaacagagctgacaacacctgtacttccagaagaaacacaggaagaagatgccaaaaaaacattttaaagaaagtagagaagctgccttgaatctgggcctacatcctaatccccagccatcccccttctcctcctcccttgtggtcaccacagttggtatggtggggtttgggatctgtaag

SEQ ID NO: 145067 - DNA, 976 bp, Homo Sapiens
  misc_feature (444)..(471): n is a, c, g, or t
  misc_feature (776)..(784): n is a, c, g, or t
cccgcaagccgagaccggaaccgggaaatcgaaggggccacttccccaaacaggaggatagaaccgtttccgggccctttctcccagtcccgacacgggtactccaggaaccagttctcagccgacttgaccgcaccgccactcaactcacagaccccacccagcagcccccacgcccaggagatagctcacagctgccccctggcccgctcgagcagcacacatcagtggggtccaccagaaggcatcccgggcgttgatattccccccagctcctcctgcctcatgcggttccagcagtctcctaagttctggcaggtccccctcctgggctgccctcagtatccggtgagtcatcttatcctcagcctcaagggatctcccttgtccatgtcttcctgatgctccttctgccactgcttctgctgctggtgccttcattannnnnnnnnnnnnnnnnnnnnnnnnnnnggcaggttcagtctgagatctctgggagtcaggagcgctgctctcatccccaatcagggcctcatagaaagctcgggctgcagccccatccagggtggactctggcttctcgggctgtggctgctgctgcccatccttccagaggtcgctggggtcagtggctggggtgaaggtgatgagcaagggccgggacatggcttttgggagaactgagaaaatgataccaggcaagggaaggatgagacaagtaagccaagctcgtggtgaccctgtagcaaccacagcctcagagacctgcagtaggnnnnnnnnntcagcctggccctttaagtcttccgcgatcccatttcggagtttcctcttcccaaacaaaaatagatgggtcactccctagaagatctcggggagagtctcctatacgtgttgctgtgtagcttccgtaccgcaaaatggcaccattctaatcagcctcggccggattcaaaccaggcctcgtactagcgta

SEQ ID NO: 145068 - DNA, 495 bp, Homo Sapiens
gagacgaattaagagtcctttattaagccggcggccaaagagacagctaatgctcaaaattctttcggccacgaggaaggggctcgattaacttttatacttaggtttaggaaggggagggggacttaaatgtaataattctacagaagtcaaaacatgcaagaatcaaaagaatcaaaatggttacagagtgataaacaacttaaaagacaaatggttacaagaagagcaacagtaccaggtgcaagattctaaatctttcattataattagatatagggtctacgccagacacgaactcaaggttttatgttgttatctcttggagaaaattcctgggaacttcatatattgttggtgttcgtaccttatcagttaattaggctcctttgaaatgctgaggatctgtttacccaggccaactccttacgaaagggggttgggtgaggagcccttagtgtcttgtaaattaaggggtcaattggggtttgtacg

SEQ ID NO: 145069 - DNA, 811 bp, Homo Sapiens
  misc_feature (119)..(226): n is a, c, g, or t
  misc_feature (437)..(447): n is a, c, g, or t
ctgtaagtcacacctccaagtgcttacaatctagttgagaggataatacatatacataaattataaaacaaacaaaccatcgagcataatggtaaagagaatagattttgaaggtggannnnnnnnnnnnnnnnnnnnnnnnnnnnnnnnnnnnnnnnnnnnnnnnnnnnnnnnnnnnnnnnnnnnnnnnnnnnnnnnnnnnnnnnnnnnnnnnnnnnnnnnnnnntgcctacttcatatggttggtgccgggatcaattaatctacttcctgtaaaacccttagctgagtctttacctcattgcaggtgctcagtaagtgctagctactagcagtggaagtaagaggtctaaaagctgggacacaagagaacaagattagtgccccaaaatgctccaagagagggggactaacagccatcaaaacaaatgttctgnnnnnnnnnnntagtactgctgtgatatcattctgcctttccctcctgttgcagcctccagtttcttaaagtgcagtgatacctggggcctaggttctcagacaagaggtgtgtctcctcctaacatctatcctattgtctgacaaacctcttcaaaattttgtatctttagagtcatttccatggcctcccctacagttctgtaacacagcaggaagggagtgcttattaaacactctggcgcagaagcaggacaggacaacggcagccagagtgggtagaatgagcaaatggcagctttaagacaggcgagatctatctcaaatttgtatggaagttcttgtcctacccaagcttttgcccaactcagtctcc

SEQ ID NO: 145070 - DNA, 708 bp, Homo Sapiens
catcctttccgtgctccattgcagtggtacctttgttgcaactttataactttgttataaatcttgatgtaaagtaacgtgagttttacaactttgtcttcttcaactttgccctggctattttggccctttgcatttattctcatatttaaaatcagattgtcagtttctataaaattatgctagacttttgattgggattgcattgaatatatagctcaaattggtgagaactgaaagcatattgaaactacaaaacataatatatctctccatttatttaggtttttctttaaattttgtcaaaattgttttgtagttttctgtttaaaaattataaacttgtttcactagttactcctaaatgtttacttttttttatcattgcaaatcatatctttattttcattttataattgtttgtggcaaaatacagaaatacaatttttgaacatagaattatattaaattgatcatgtgtcaagcagctctgataaatttgctcattaactgaaataaaataatataataaccagtgtatagattcatattttttctacctattaattatattggcaatgagtaatggaaattctatttcttcccttttaatccttatctttcttattctgttttgcctgtgatactggctaggacttccagtacacggttgaacagaagtgatgatagtagacattcttgtctcat

SEQ ID NO: 145071 - DNA, 553 bp, Homo Sapiens
tccagcatcatcatggaataagtccatcaaaaccaacttctcaccctcaacggtgctgttcccaaacctcaaagtatctaaaaagctcttgccattctgtttcaccagacaaaatagaacatatttggctataagttctttgcagcaataaattatctcactgtcactaaatgaaataaagtcctttagacaaagcttgctccgaacaggggtcggcaaacattttctgtaaagagcccagtggcagatatctcgggctttacgggttttacgacgtctgtcgcaaccactcgctgctgtggtggtgtgaaagcagccacagccagtatgtaaaccaactgcctatgcccgggaaagtctgacagaggcagatggtggaccagatttgacccatgggccgtgctttaccaacctctgctctagaagaacgaaatgcggaacacggttctcctgcagcaattcccaactccagagttcctaacattctggtcccttcataaaagccacgagccacaaaacccatagaggcactcatgcgtgcaactcacgcata

SEQ ID NO: 145072 - DNA, 444 bp, Homo Sapiens
  misc_feature (41)..(96): n is a, c, g, or t
tttcttctgtgtctctttaataccctccaggcccgtcaaannnnnnnnnnnnnnnnnnnnnnnnnnnnnnnnnnnnnnnnnnnnnnnnnnnnnnnnagcccaaggactaaggcaccaggtggctgcagcaggccggcccggacacagagacgcacaggttggggacgctgactgcagacgcggacgagcagggcgggcgcgggaggcagggttcaggccgccgcggggctcccccagcctctgggcccgtcctggggggcgtggaaggcgcagacagcccccgaagggagccagtcggaagtggggagccacggctggactgcatcctcacttgccgcccttgcgggacagacaccgggggaggcaagagaaagtctgcttgacgcgcgccagcagcggcagcggccggtgggcttcccggggcgtgcgcggcaccaggcgctg

SEQ ID NO: 145073 - DNA, 528 bp, Homo Sapiens
  misc_feature (505)..(505): n is a, c, g, or t
tttgctatatcttgttctttaattagttaataaagaagcatatacattactgtattacaaatttgcttttaaaatattttgttaggtatttcaatactcagagtttccttttaatccaaaatattttatgcatttaaaaacactgttctgaaaatgggtccctgggtttctccacactgccaaagagtcaatggcacaaaaacagaagttaggaacttcttcttaggaatctttgatgatacctgcccattcgtctccttttctctcctatccaacaaacccatcgttctgaattaggtgtcgctcctttgtcttctttttgatttcccattgtaacttctgcatgcctccttgatattcttgtctggtctcaactaatccttggagctctctgagcactggaatcatgctgatcattgctgtatgcacagtgcccagaaaggtgcagagataagtcttcaagagtggcccctcaggatcccatgtcagtttttcagtgaatctnctcggtgtttctctctgtatgag

SEQ ID NO: 145074 - DNA, 529 bp, Homo Sapiens
ggccgcaattttttctcttcctttctgccttcctctctgttttggtttgtggatcagcttcatcctcttttcctgtaaatcagctgtctttacttcttgcatttttagaagatggcccctctcccacaattcatatgacgtgcccaacagagactaactggggagaattttcagaggagtgaggggtgcaggctgggcacatgcagtaagcatcatctgcttttctttgccttaactgctctgtgcagacccatgttaccctacacttgaagatgaactgtaccccgcccttacatcccattacagacagtaatgatgatgatggtatatacccattttaatatagtggttattccatgcctggttctggtctaagcatttttctatacttatttaattctcacaattttttcaagaaattgaagcacagagaggttaacctgacctaaatcacacagcttgagatttgaaaagctaagatttttaatcttagacatgtagcttttagagtctgggcttttcagagacc

SEQ ID NO: 145075 - DNA, 487 bp, Homo Sapiens
  misc_feature (417)..(427): n is a, c, g, or t
tttgcgaaaaagcaggtcacttctattcctggacgtacttctataaaaggtgtgcccctttagaagcaaagatgcaagaagatcccagaaagaagcagtaacaacagcatttcggtgatgctgtagatggaaccaccatttgtctatgatcctattatccacatggtcaccacctgcaggaaagatgtctttgtcctccttgactattgaagatgcagcacttttgaagaatgacgtctacaaaaatagtaaataagcacaatgatttggattgatatgcaaatttcagtcagtgaagaagttctcacttcttaaactggtaccacctcagctataatgtgttccataatatatgctccataaatattattcctcctccttcctggacatcacttagaaccctagaactctggcacnnnnnnnnnnnaatccgagaggtggtcgtctcatttttacacatccttgtttccatctcaccaaatgcctc

SEQ ID NO: 145076 - DNA, 927 bp, Homo Sapiens
  misc_feature (512)..(522): n is a, c, g, or t
  misc_feature (643)..(643): n is a, c, g, or t
aatataggtcgggtacatatatgcgcgagttattcagagctgaatgtcgtggttaaggagatatggtcgggtggggatgcagtccactattgcgattattgaccatctggcctatggtgggcttgtggaaattgtgatttacgatctccttcccgggtcgcactgcacgggctatctatggggcatagcttggttttataggcggcaataattcgtgtaataaaacggggtgttgcgtcgtcggtaaggggggagattggcgggttggtcttatagggtttattgattgtgtagttttgtatcgcgtcggggtttggcgtggtcgctactccgtaagtgacgttcttgcacgcagtgtgacttatacagaaagaaaaagcatcggtcctaaaaagccaacagtattcattttaaggcaggtactatactcactgtgttccataatatatgctccataaatatttttcctcctccttcctggacttcacttagaaccctagaactctggcacnnnnnnnnnnnaatccgagaggtggtcgtctcatttttacacatccttgtttccatctcaccataatgcctctgccttccgtgatccaaggataagtttccttttagctttcgacaacgtacaacatgtagnaaaaaaaaggaactcagaatatctatacaaataaaaaagggtatctgagcaactagcaaagtgcaatactacacctgccatttttaagtattcaaagttttcaaaacattttctgcagaaaatcttgaaatcgaaaagtctagtgaggcacactgactggatttcagagtgtcatttttaagctcaaattttgaaatcattatgttcagacaaggtcctgtgtcatcatgaacccccggccgtaatggccgaattcccgggcatatgtccggtaccgtcgactg

SEQ ID NO: 145077 - DNA, 646 bp, Homo Sapiens
tttcaatcgtctactttccttttaatatatgtagcatttcagagtacataaggctcatgaaagaggaggtacagatcctccggggggaaaacctggttaagcctaaagcatagtggaaaatggaaagatcaacaattagtacagaacagaaaaatgattttgaggattgtattaaggaagttttaaagaacaagaaatcagctctagaaaataaatgtattttaggagtgacaaggccagtccctggaaatacatttgactattaaatttttatttaacttcttcacccaaaattaaacagttccacctgagggagaacttgatgcggacttaaggaagacactcatattacgtgctggagttactatgagactatatgtaccagtaaaaggacgcccacctccaaagattacttggtctaaaccaaatgtcaatctaagagacaggattggactggacataaagtcaactgactttgacactttcttgcgctgtgaaaatgtgaacaaatatgatgcaggaaaatatatcttaaccctggagaacagctgtggtaaaaaggaatataccattgttgtgaaagtgcttggtaagtctatttcaaaaaagaatcatatatattttaaaatagcttatgtatttttta

SEQ ID NO: 145078 - DNA, 500 bp, Homo Sapiens
tgtttaggtttttctgattgaaatctacacattgataaaacttttgctactattttggcagatactatatatgaaaataaatggacataaataaggtaatgggatagctttggatgaaaaatgtgtaggttatgtgggctagtcaaaacagatgcaggtgtggctgtaataagcaaagctgcttcaagggaagtacagatggcaatcaaatgtacagtgattactgcagcttaaaataagaatactgaatgagtgcacatcatcaatataataaaagaaacatttaaagaggagcaacagttcatcaaagatctactagctgacgtgctaagaacagaagaaaactaaactcaacaaagatgacaaaggattaattggctccgttactgtaagcttatggctttcagtaattgattcttccccttttcactaaaggatacaaatatttcccaggtcttgaaaagtatcataacagagaccataaactctaacactcaatt

SEQ ID NO: 145079 - DNA, 754 bp, Homo Sapiens
tttttgactgtgaggaatttttattttcctttcatgttcactaattgcaagctttcttcatttcggtaatatctaaaatgatctcctcttgtcggaggtagattttcccagtagcttctaactcctgacccagaagcggtgtattgcgcctcagcatggaggaggacgtgaaggcgtacggagtctgggagtagtacaccacgtaggtaggtttgtactggtttggctttgtgtactgtgttccccaggcaattcgaatccagactgcattctcctcagtttctctgaagctgactgtcacattttttaatgctctctgaagaattttcttgaacgaatttttaaattgtttcatatcaaaaaggtcaacatcttcacctggtcctttactcatctgaaaaacatcccaaactttctggtgctgatgaaattgcatataaatgatgtctaacagggcagcatcactgatacttgcacgcttttcctcacacagatggatcaagtgctgaactacagattcctttctctgtcggaaatttacagtctgcagttgattttcagacaaaaaatcccaggccttcaggattgttgtcagttcattcatggggattttcaagatggtcctcttgatgaactcagcaacagtctcatccatctctttggcacggcccacatctcctgcagtctcactcctcaagagctgttcccgctcgccctcgtgccgattcaccacccagcctcgctacctagccta

SEQ ID NO: 145080 - DNA, 406 bp, Homo Sapiens
  misc_feature (167)..(292): n is a, c, g, or t
tcttcaggccatgtgtataaggtgtataggaaacataaatgatttctgtgtttagatttgggtctgatcccaaagatattaaatatatgcaaatattccaaagtctgaaaaaatccaacatccaaaaacacttctgacccaagcatttcagataagggaccagaatnnnnnnnnnnnnnnnnnnnnnnnnnnnnnnnnnnnnnnnnnnnnnnnnnnnnnnnnnnnnnnnnnnnnnnnnnnnnnnnnnnnnnnnnnnnnnnnnnnnnnnnnnnnnnnnnnnnnnnnnnnnnnncctaagtaactttttaaaatccctacacccaaggaaacatatagattaagtagcatgctcaaagagtcctacagttaggatatagtgccaggttttaacccagatcagtgtgaa

SEQ ID NO: 145081 - DNA, 691 bp, Homo Sapiens
  misc_feature (538)..(538): n is a, c, g, or t
  misc_feature (587)..(587): n is a, c, g, or t
tttgtcattcctcagagaactgctttattgatactgcgagcctgggcttggctgcccactcaagtggtcctgtagaaaatacctgggagctggagctgttctggtccagaagcagtcaccgccacagcagagggaaacaaatcctgacaggaacagtctttctggggatgggcagggatgtgcagccccaggtcggctcctgcatttgctgggcccccagaacatttttggcaaatccttgccttggctcagggctctcggcaaccagtttcagatgtgagggccggcccaggagctgtggcatcagtgtccctgcagccacttgcttggggctgccagctgatgtacattcttacctcagatgagggcctggactggccgatgcctcagaggctccgggcctggcatagtggttgtctggagttggaaccaggtagcaagagtcctgggtagtgttggcgagaaacagcagaaggccatggaaagccccagcaggccttcttccctctcctcagagcagtcaggtgccctggagtanctgagaggatgtcaaggggctttttgggaaggggagggtgcacactcanggtggtctggagttacagcgtcgggggagctgcctcgaaggtgattagactggattctggggcagccccttccctgggggtgtgggagcttctcgtgccgattc

SEQ ID NO: 145082 - DNA, 749 bp, Homo Sapiens
  misc_feature (594)..(651): n is a, c, g, or t
agggtggcgccaggaatcaacgtggacgtctgactccagagcccatgcttcaaatagagttttcaagagggaggaatatgactgtgtgttctagggagaggcaaaaaggcataagcaaaggcatgggggccaagaaggaactcctttacccaacaagcttcttgattcccttaaactgtataaaatcttcacaatcccttctccacataccccttactgctgggtcctggttcccttaaggctgaccccaggaccaggcgcaggggtttggggcaacacaatttgaatggttttgattctgtcatctttgttttaatgataaaaacaatgttccaactttgcttctacccctatctggtttttctcatctctccaaagcctgatatggcacagatgggtgtggctgggggacataaaatcctccttcccttaattaacatctacttatctttctatcttcacattcaaatgtcactccccaggaaagccttccctaattcctgaggacaggtgaaatccctctgtcagagcctcacagtggcctgaacttccccttcaggaaagttcatcactcttgtcattacagttcattannnnnnnnnnnnnnnnnnnnnnnnnnnnnnnnnnnnnnnnnnnnnnnnnnnnnnnnnngtccctggcacgccacaagaattcagagctgtgaactagaaagggagtggggaaactaattagtggcagagtttcatggacaaccaggtccattcttt

SEQ ID NO: 145083 - DNA, 1137 bp, Homo Sapiens
gttctttgctggtgttcttccttgttcttgtctgttccccgtcgttgttgccctgttgtgggctgctattttcccttccttaagtgttccgactctccacgaatgtctccgggattgccagaggtcgccgtcttcctgtctcctccgtcaccttcgcaagcgccctctgttgtaggattttgggtgtccgagtccacacagagattcacctgtccagttttgtccagatacacggttgcagacacctcctggggttcgtcctctgtccgcgccaaacacagtccagcatgtcagcccaggttgcccagcgcacagcacttcctcccccgggcccaggatccgactctggatctgtgtcagcccgcggagcagcatggccaacaggggcatggtggggcacgcgtctgggtctgacctaacgcctctttggaggatgggggtaactcatctaaggcaggcaggtacttatgggccattgcactaaactgggagagcagggggtcctgcgggtgacccttgtgcttcatcacctcccaccagacgtccaggaagaaggccacgtcttcggcagaagtgtcaacggtcacatgttccagaaagcgctctagttctgcatggcagatggtggtgggcagggccatcaggagctggataaagagtccagaagcttccagggatttgagcagctcgaagaggatggtgtggttgatggtggggatcatgttgcccaccgagaagaacaggtcttcctgccaccgtgtctctgtgtcggacggggtcacggggtgcggctgcagaaccttggcccagatgatgatcagggctttcttcttccaggcaaagggctgggagtgtgctgcagccgaggagatctcccttaaggcctccacgatgggccgtccaacacgttcccagtcagactttgttaattctgccagtgccttagggtggaacagctgctcggccagcaagaagcctccatgcagaatagtcatttcttcacagatgttcaagggtcctaggtccatggcggcgacgccggcggctgcgcggggctaacgccccctcccctccgagaactcgaacgcggcgcgggacgcacggcacgatgggagacgcaggagccacggcggccgc

SEQ ID NO: 145084 - DNA, 401 bp, Homo Sapiens
  misc_feature (291)..(291): n is a, c, g, or t
ttttttttaaacaacagacatttattttctcattgtccaggggctagaaatccaagatcagggtgccattagagttggtttctagtgagggctttcttcttggcttatagatggctgtctcctccttatgtcctcacatggcctttcctttggactggtgattgacttgcttagaattctctgggccagcatttcatttcctgatggctgccatttcccctcccattccaagttctctctacttggggctgacacaggacgtggaaatactaatatggctgctgggactcnctttcgtgtatttcagcaagagaattatttcgtatcagtgctccagtgtctctccaacttttccatttcctctaagggtcaggtttcccctgtgtccccgatgccatctg

SEQ ID NO: 145085 - DNA, 537 bp, Homo Sapiens
ttcagagttttagatattatttattttaaactaaagcaaataacaagttaagtgaaatttgcagttttcactttgcattgtctatttaaaaggcctaggtattggagctgaaatgctgaagaggctaagtcaggtatgtattacaattagtattgatattctatacattaaccttttcttaataaatattcacagggcataaattaaatcattaatctcaccatttgaacataaccccaacatatacttcaaatttctacccaaattaaactggattttcaaatcagatgatcatatacagtatatgaattatagtcaattaaaattgatttatatataatccacaaccacactatacaccctttttgctatcaagggaaagtaagaaggagggagattagaaagcatttttattcaaaaacacaggctcacagtatgaatattacaagactataaaagcaagatcttcttgtattttggaaacatatgagaacatgtgttcttttaggtacaccttttctgtatgataaaggcttt

SEQ ID NO: 145086 - DNA, 379 bp, Homo Sapiens
aaaatctgaataaattccagagcatataattttttctaactaaataataaactgtaccacaagatttcccccaaacaactcatacttaatagcatgtatcagtgatgaacaaaatttttgcctaaagcaataaactgaaaatgaacagattcatcaaaatatcttctgatccaaagtctaaaatgaagtgacatttctctggctgggcatgcccaaagccagccctggatccagcctctattcccaggagtcacctgcaggcgaggacagactctggcctgaaagatgtgcatggggttggcagcagcactgggtgggacccttgaggacaaacgtatccatttctccctacatgccctaggacatgccataccaaaaa

SEQ ID NO: 145087 - DNA, 418 bp, Homo Sapiens
ttttttttaatttataaacaatacaagtttatttggatcatggttctaaaggctgggaagtccaagaaaatgtcactggcatctggcccctttctcttgaacgatttatctgtcagaataaagaactgtgttcaccacattctttcattctgtgaagtggtcacactctagatgtggtgatgaaaggaagatgccttcttcttcacttgcacagtatagcatgctgctatctggtgaatgtttccatagaaacagcagaatggctgccagggcaggaggtacgctggaattcttcatggagccttttcttccctttagcagccagtggcagtccctggtttggttgaacttatgagcagacagacattgatttgaagctggcatgttcaaagaagaaccaagctcaaagcaaactttc

SEQ ID NO: 145088 - DNA, 628 bp, Homo Sapiens
ggcctcacgattagatcgcggagaatgaggatttccgctgcattgctggcatgtgtgtggatgctcgtggtgatctcatcgtggctgacagtagtcgcaaggaaattctccattttcctaagggtgggggctatagtgtccttattcgagagggacttacctgtccggtgggcatagccctaactcctaaggggcagctgctggtcttggactgttgggatcattgcatcaagatctacagctaccatctgagaagatattccaccccataggggatgagaaattatcagtttcttctgctcccaagccaacttcccttcccttagttcttggttgttagtggcacatgcagaatagactcagcctatgtcctgattccagctgggtagttctagaactttagaagctccatcttttaatgtttttatttgttatgtccccctccccgcttcccacctaaatttagagctttaaaagatgcactgcccaaataggacacacgatggtgttagctgaagtttgattagcaattaggcacttccaaggctttagtagagagagccactttagccctttgtgccatgtttgaaatttgcccttgtattaaatccttgattttttcccaaaa

SEQ ID NO: 145089 - DNA, 544 bp, Homo Sapiens
ttttagatctttacatggtgaccttaaaataaacctgcagatttgactacatactttcacatccccaatttctttaacccatgtgacctcccacaagcctgaagagagaacaaaataaaattctttatgggtgacagtcatgagctgtgcttggctccaaaaacccgactaaagatgtaacaaggtgcaggtgttgggcgcatttatcctgtgttaacttcctatgttaacgtgctgtgacaccagagggtaagttacgctcacctctctgagccctggtttctttgtaaaatgatggagcctgggtcagatgattctctggtttgtttccaattctgaaattctacgaacctaaaacctgtgtaaaactgctccacgttacttgataacttagatgcttcagaagcacttgcactggtgcagtgggccagatctcctccctcgccctggattaacagaggtccttgttccttctcccctcctctcacccgtatctttgcaggtgtgcatcctcgagtgtgaagagaaggtcttcccagccccc

SEQ ID NO: 145090 - DNA, 406 bp, Homo Sapiens
ttttttagatggaacaacactttactcacacagagaagagacagagtaagatcagctgcaatcatgggttcagtcccgcatggccaggggtctcctgctacagcagacacaaggtgacggtctgcacacacccctcttgtgcagcagcgggtggaccctgtttcctccccacaattcacagataggatgccagaggttaaaagaagttcagtagttgatctatgttcaccatgttcgttttagaagccaggttgaattgagccctcagatgtttccaattcccgacctgatcctcatcttctcaaggaacaattgcagtgaatccctcagttgcctctccctggaagccctccttgaccagcacagcccacactgatccccatgtcctctgaatccaacctccact

SEQ ID NO: 145091 - DNA, 559 bp, Homo Sapiens
  misc_feature (117)..(129): n is a, c, g, or t
tgatcatagtgtgatgtccacagaggcacaatgtatattagtactttcttccatatttggtacataatgaatgcctttggtactcattttctgaatggtttgctctagtaggaaagnnnnnnnnnnnnngcaagaggcagctttgcttgcactaattgaaggctgtaccacccagaaagcttcattcccatggttcctctgtatggcatccaagaagttgcagagtcccttgtgtagttcagagagcaggggtgtttctcaggatttcagagtcatcagctgctttgaaggtgtgcttccttcacctgtgttttaacgccctgccccaggggtggtccctgtctcccttgggtacagtgccctgtggcaccttgggtgctctagttccaggtttgcctcgcttcccctctgagggtgttctggagaagcagtgctttttaaattgacgggtcccatcctctgccagttctagactttatttcaagaatcaccagtgcaactatatatacatcttcaggttgctgtttttatttttaataattattaaatacattttctc

SEQ ID NO: 145092 - DNA, 262 bp, Homo Sapiens
ttgatgtcaacactttttaatccccatttgaagatggaggcaactgaagtacagagaggttgtgcaagttgcttaaagtcacacagctgagagtttaggtatcatctgtttcagtagaaaaggttcctgtgagcagaagcttcatctggagctgccctggtcactgctacagtcctgcacccagagcagtgcaacacactttaaaaaaaggtgtgtgggaaatgggacctggctacgcagagataagctgctggggagaaga

SEQ ID NO: 145093 - DNA, 443 bp, Homo Sapiens
agttgggggttttagttgtagcaatttctttcatacccctgttcttggatccaagctgagggatgagctggaatggaagtgctagctttaggattgaaaaatcttcaaaagaatgtagattggatctggaagctaaggaacgtgcatagaccttgaaagagagggtcaaggctgcaaagctgaccgccttgcctggaattgctcctttcaacagagctggggagggaaggaggaagtgacccaggcttccggccttctccccagtccctgaggatggcctagcccctgtggatctccctatccgttagagacgcatatggagcatgtacaggtgacattgtgtggcttctgcaatttgctggaagcagcagggaaggtcaggccgtacatgaagccaaaaggaccaaacaccagggggccgctatgactgttacaagaagttt

SEQ ID NO: 145094 - DNA, 404 bp, Homo Sapiens
tttttatagattaatttgtctctgcattttgttgtccaaaccaggagctcggtgagggtgtgatggggtctgccttggtcaccgtggcaccccagcaccccgcagtgtccctctggccaaaagagatgttcactgatgccctagaagcaggaacagaggggctcccctgcgctcgccaagggcgcctgacaaatctggaggcccccatgacagaatcagctccagagtaggaaatgtgtctggctgcacgaaagccccctcgtggcgcagcgcctccaggcccacgcagatgtcgctgtcatacattgttggaaacgcctctgctggaaaccagtgtttgctgaatcttggagggagaggaaaaaacctagtaaacattcttgttgaggtgatctgggggaatg

SEQ ID NO: 145095 - DNA, 512 bp, Homo Sapiens
  misc_feature (344)..(345): n is a, c, g, or t
tttctcataaacatgcccattgctggagccattgaaagccctggggtttttgttgttaggcacacaggggttggactggttccctatacagatgtccttctggaaacgggctggcacggccccatgaagggccgagaccaccggcttgttggtgacaagggcccggaagtccggcctggctttcgacgcccccgccaccgtgggctgcctgaagaagtaggatttgctgccatggagcaagcactggtcgtccccaaaagtggggatgaaagggttttgcgtgacccggtcagggtagagcgacttgctgagcatgtacccgccgccggggttgttgtggtggnntgattgtccggcagtgggcacttgaggactttgttgttggcaaaggtgctctcgccagcttgacatctcaaacatgtggggcgtagggggctcccatccattgaatcgggcccttgtttttcaagcttaacgcttgcgcgggggccagggcggcttttttccttctg

SEQ ID NO: 145096 - DNA, 598 bp, Homo Sapiens
ttataaatatgaagaatatggttttcctttattagaatataaaagttacagaaaatggactaacttgtacaaattccttcttcacaacagcagccccatgtcctcctctctcccatagacacagtttcatagtttctattcactcacatcagtttcatcgagtatcaactctcattttatctttacggctttattttacatgagggttattatcaaagactcagcaaactatgttacatattttcttctacacaagagattactgagcagtaaataagaatttctttggatataaacacttttatgtacacaaactttttgtgaagctaatttatggttaaatacacattacaccattatgtgttatgtgttccagataaacagaactctaaaattttattaaacatatttaattttaaaacttctgcaattacaatgacatagtctctgctcaatgcagcaacatcttcagaaatcacttgtgaagacttgggaaaatgtcagtcatttacatgaaaaatgagagcattaagtgacaacactgcttgctggtataaataagacaaggctagatccttaccagattcaaagagatcag

SEQ ID NO: 145097 - DNA, 326 bp, Homo Sapiens
gggttctgcccggcctgttttattggcggcctgggcgggtggaggtgtggcctgggctagggggtggctcgggtgggacccaggccccaggagtctcttttcttcacccaggccattaggactggccctgggtggaaggcactctaggctgggtgagtgtgttgccgtccgagacatctggcccactcgggatcccagaggaccgggaaactccagacccctgttgccactgttttgcaggtagggaacctgaggtccagagaagttgtggcttgggcgttgctgttgagttgtgtgatggggggagggttagcccaaggcccgta

SEQ ID NO: 145098 - DNA, 473 bp, Homo Sapiens
taaagcacactgatgttattttatttacacactattttaagaattaacaataaatacacattttccatctcctccttgtccttcatttataactttatatgttaacaaggaagtaaaaccctccaaataaaaggaattaaatgcaataatccataaagcttatcagatatgggcacaagaaggagacacccaaaaacaatgtaaaaacattttaatcctttaatgttacaagaatttatctataaattcttatgccattcctagtggaataataatataaaacctatacacaaacattgaaatatgttttattctattgctatttaccagaagaattgcatataaataacagcagcagaactgtccctatgttatacatgaatgtacttattctgaattcactgactgaattaaaaacacttaattcagacttttcctattaccttcgggtattgttttcacatacaagtaaa

SEQ ID NO: 145099 - DNA, 460 bp, Homo Sapiens
tttttttcttagcgaaatacttttttattcagaaattcatttggaggcctctgcatttaggcctagggaatcttactcattttcttctctaaagaatctcttaaatgaacaatttttcaagccaaatgttcccagagttgccaccaaaaacccaagtcacccttggtgaattttgccaagtagaaagatcagcatgagaactaggaccatgagaagcataagtctttcctggaagagcagaggattcagccgtggatgcccctgcaagctggtgatgggcggcagacgcatcacgccagtgcacagtgtctcaggcccccggcctacgggctggcctcctccaaacacagacccagcaccctgcaccagacccccacccccaagcaaaaaaccatagagaatgttctaaaagccaagttctcaggacaaaacccctggacggcagaacctcacccagttt

SEQ ID NO: 145100 - DNA, 889 bp, Homo Sapiens
ggagatctgcctactcaaggagctgaagcacaagaacatcgtcaggcttcatgacgtcctgcacagcgacaagaagctgactttggtttttgaattctgtgaccaggacctgaagaagtattttgacagttgcaatggtgacctcgatcctgagattgtaaagaatggggagctgaaattggctgattttggcctggctcgagcctttgggattcccgtccgctgttactcagctgaggtccctttcggggggggtctcctccaggtggtcacactgtggtaccgcccaccggatgtcctctttggggccaagctgtactccacgtccatcgacatgtggtcagccggctgcatctttgcagagctggccaatgctgggcggcctctttttcccggcaatgatgtcgatgaccagttgaagaggatcttccgactgctggggacgcccaccgaggagcagtggccctctatgaccaagctgccagactataagccctatccgatgtacccggccacaacatccctggtgaacgtcgtgcccaaactcaatgccacagggagggatctgctgcagaaccttctgaagtgtaaccctgtccagcgtatctcagcagaagaggccctgcagcacccctacttctccgacttctgtccgccctaggccccgggacccccggcctccaggctggggcctggcctatttaagccccctcttgagaggggtgagacagtgggggtgcctggtgcgctgtgctccagcagtgctgggcccagccggggtggggtgcctgagcccgaatttctcactccctttgtggactttatttaatttcataaattggctcctttccccgggaacccaaaccactcacaatgatttcccttgttg

SEQ ID NO: 145101 - DNA, 936 bp, Homo Sapiens
  misc_feature (874)..(874): n is a, c, g, or t
cctctgcaacgccggggccagagtcttaaaaccgagggcccgcaggggtccccgcggccgccgcgatgcagaaatacgagaaactggaaaagattggggaaggcacctacggaactgtgttcaaggccaaaaaccgggagactcatgagatcgtggctctgaaacgggtgaggctggatgacgatgatgagggtgtgccgagttccgccctccgggagatctgcctactcaaggagctgaagcacaagaacatcgtcaggcttcatgacgtcctgcacagcgacaagaagctgactttggtttttgaattctgtgaccaggacctgaagaagtattttgacagttgcaatggtgacctcgatcctgagattgtaaagtcattcctcttccagctactaaaagggctgggattctgtcatagccgcaatgtgctacacagggacctgaagccccagaacctgctaataaacaggaatggggagctgaaattggctgattttggcctggctcgagcctttgggattcccgtccgctgttactcagctgaggtggtcacactgtggtaccgcccaccggatgtcctctttggggccaagctgtactccacgtccatcgacatgtggtcagccggctgcatctttgcagagctggccaatgctgggcggcctctttttcccggcaatgatgtcgatgaccagttgaagaggatcttccgactgctggggacgccccccgaggagcagtggcccctctatgaccaagctggccagactataagccctatccgatgtacccggccacaacatccctggtgaacgtcgtgcccaaactcaatgccacagggagggatctgctgcagaaccttctgaagtgntaccctgtccagcgtatctcagcagaagagggcctgcagcacccctacttctccgacttctg

SEQ ID NO: 145102 - DNA, 1019 bp, Homo Sapiens
ttttttggtacagacaggtctttattgttgacatattttctcatttaatccttgaagcaaccctgaggtaggttttattatccccacttcgcagatgagtaaactgatgtccctaggttaggttacttgccgaagatcacacatttactagtggcaaagccactgataattccaaacccaaggggactcttttgagtagttcacaggctgctgccaaggaaagtagagcagaaaacttcaaaggggaaggactggatcattgactggagcttgaggggctcaagcaccagggatgaacgaggcacattcacaggccaagaccaggactcagcaggagaagcctagagccatgtgcgagtggtcaagcaggaagaggtcttgacgtttggtaagagctgacaatgtcatcaaatacacatagagctcagcttccagggactggagaaacaagaaggcctccagcagctaccagtccagggactggccacagtcagtcagactcaaagagaactgagaggccacaacagtcttccagacccagcaacctttggcatctcagtggtaactccattccagcaaatcaccctgttccaggcagggcaagtccagggagagctgccacagagtgatgccatcctaacttggcctcagtgcagtaacctcagggcagtggtcctttaactttgttaaggccttgaaaatctgacaaaagccataaaacctccccacagagacatacagacacacatgtacaaacaacattttgcatacaatttcagggagtccatggaccccaggtaggggggactcctgctttagggcaagggtgtcaccctgagtagtcactgattgcaaacgtatctttatactgctcgtatatcctatgactgttccccttctgttgttccctaatcattagaatgttgttgatttttaatgggagccaaggaaatggggtacagcctacactccagccagagaaagcagctgtgacatggcagtggtggcagccagggggt

SEQ ID NO: 145103 - DNA, 723 bp, Homo Sapiens
  misc_feature (98)..(155): n is a, c, g, or t
gtttcttcctgcagccaatcacaagtccatccctttaagccaattataaacgcaccactggtgtctcccttgatgccagccccactgagtagctgtgnnnnnnnnnnnnnnnnnnnnnnnnnnnnnnnnnnnnnnnnnnnnnnnnnnnnnnnnnnctgctgccactcagccggcccaggagccacacagatctcttggccctcaacagcatccagggtgttccaagggctttgcagctactgcctccggtcttccgtctccgacctggaaaacgccatcaccacgtcctctgcaccctggtcgatggagtgcggaggcagctggctgagctggctgttgaccacccctgcataggtgcgcaggaactcctcctcgctggctgtcaggtttgatcccatcttccgcagcatgagcagcactcggaccttctgctgaatgtacatctcctccggactcttcccgggagctccctcgcggttcatccccctgcctggctctggggactcctgcttctggaaattaacttcaggcaaacaggtgctcaactgtgaggggagggctgtggctgggcagaagtaggaaggtgccgccctgggccgcccgacccggccgggccggcaggggcagcgggtccggcgcgcagcgcgcggcggcctgttccggggcgtgctcagcccgagcagccgctgcggcggcggcagtagcagcagcaggagcggccgc

SEQ ID NO: 145104 - DNA, 430 bp, Homo Sapiens
tttaagactttgatattccatcttttgagttacaattgggacaactgagagaggggaagagctggagtggggtgagaactaggagggctcaacagctggaggtgtagttcacttagtttttgtactggaagggttcatcactggtttcattgagaagtcaggtgcgacgagagcttctgtcacctacatattcctcctaacatttactgctgctgttgaatccattgtgctgtttatttggaaaatcccccccactccctggaccaagtgagagcggaacagccagacctgagaaatgcagccacagcaacttcacagtgtccagtctaggcagggaaagtgcaagagaaacataccttttgatagcaatacttcacaaaatgataatataactggtttgttggctatgagcaaaaagaaatattgagca

SEQ ID NO: 145105 - DNA, 410 bp, Homo Sapiens
ttaataagcaaaataggaaaccattttaataaccaaaaaacagaaaccagtctgaataaaactacaatagactaggttttaatattttcatatcataagcagggtttgaaattgatcccttattttacatgaaataaaaacaatttctgttgcggcaggtttgatttcaacacagttgaatctgtaaaaaccaaagctcgtttctgatgcaggacaaatatccacaatatttaaaactgcaagcaccatgcggttcatacaatcttgttattactgttaatttatcaactaatacaaactcaaaaatgcatccggccagcagcgccagcaatttcaaatgggaacttaaaaatacacttttattttggtatttttgtcagtgcaacttaaatccttttactgacctgcag

SEQ ID NO: 145106 - DNA, 924 bp, Homo Sapiens
  misc_feature (808)..(842): n is a, c, g, or t
ctttcggtagatctcccgccgctgtctcttgtcaccggatctcttgtgggaacacgtccgttccccactttctgccctctccccactgtgtggggccccgtgtgcctacacaacaaagttggggtctaacaaactctctccacgggcccctagggcgggcgccacaaaaggctgtttttcatgcgttctcgcagctgcatttccgtctttcttagagaagactagaagtttatttctctctcacataacagtacaaaagtaagtggataacctagggtggagagacagctctgctccagggaacccagactagccagtcagttctgctgtcttcatcaattggcgtccatctctggatccaaggctgctgctttaattcttgtcatttcccagccaaagagaaaaaagaaaagagggcatccaggacaaatggctttttctttaagaagatgacccaaaaagttgcccgcatctcttcctttcacatcccaacggcccaaacttactgggcccaatctaccggcatctacctgggaaatacagttgcacttgtgtagtcatgggctagcttaaacttcaggcaggactagaaattttatttcttttaaatgaagctgcttctgacagcttggtatatgccttttgagttactaaatacaattcaacagaaataagatggtgtctgctctctcagaaatctccagtccgggctctcggatgctggcccggagccgggcttccgcctggcgcggtcccccccggccgtaatggccgaattcccgggcatatgtccggtaccgtcgactgnnnnnnnnnnnnnnnnnnnnnnnnnnnnnnnnnnncggccgcttcctcgcatcacctgactcgctgcgctcggtcgttcgatatacgcactagcgccctatagtataccaagttttt

SEQ ID NO: 145107 - DNA, 552 bp, Homo Sapiens
ccagggggggttatgtaaaggagggcggcgtttctaaagaagatagaagtttatttctctctcacataacagtacaaaagtaaggtggataacctagggtggagagacagctctgctccagggaacccagactagccagtcagttctgctgtcttcatcaattggcgtccatctctggatccaaggctgctgcttttattctgggaaatacagttgcacttgtgtagtcatgggctagcttaaacttcaggcaggactagaaattttatttcttttaaatgaagctgcttctgacagcttggtatatgccttttgagttactaaatacaattcaacagaaataagatggtgtctgctctctcagaaatctatttgtcaagttgaaaaaggtcctgtctcctcccattattcttcctcctcttctcaactcctatagggaagaaatatgttctcagataccggtctcccagtcccgcggcgccgggcggcggcgcgccgaaaggcatccactgaggaaacaagtgcctgcaacgttccggctgcgaactcccc

SEQ ID NO: 145108 - DNA, 503 bp, Homo Sapiens
ctgttttctttgtcttaatgttaaccagcaccaagaatcagaaagggcaagatagctacctgcagactaaactattgtcaacaagtgatgttttgctgttttcctgggaagaagcatggaagttctgtctatgaaaatccgtatcatctgtgctggctgtaattccatgcagttacggccaaaggcgtgcaacctgcactcaccccatgagcctgccagagagccgaggctgtaactcccccaccccatgagtcatcacggcacggcttcattgcattttctgattacagttagtttaatgtgcatctgacctgtgaaatcattgacagcagtggaggaccgccattattcacaatttgtccatcgtcattttgttcccaagaactgtcatcagccgtatctacatgaaggtgtgctggtgttgtcatagaggacattattcccaaactcagtctgctttcagaagcagtaatttcctgccattttggcccattacttgtaaa

SEQ ID NO: 145109 - DNA, 461 bp, Homo Sapiens
tttgtttagatggggtcttgccgtgctgctcaggctggtttcaaactccttggctcaagcaattctaccatctcaacctctccaagtgctggtattgcaggtgtcagccactgtgcctggccccagttttcctcttatgtctccatgcagactatggggagctccagctttgcatttgttttctttttgcttgaagaacaaaatgataagacctggatttgggtgcttagtatggaatgaattaggcattgtccctgggggaggcattttatatttccctgtatgtataggcatgggaagtatagtaggtttgattttgttggaatgtttagtaagtttaatctgatagattagtctcagttggcctgaagaagtctagctcagaaggacatttttccagccctgaagaagaatatgcctgcttccccatcacccctaaggggatgattctaactctgttg

SEQ ID NO: 145110 - DNA, 827 bp, Homo Sapiens
cccagagctgcagtttaatgtttaatgcccaattatctcaatacaaggaggcttacatggtgctcataaagacacgaccaggcgaaaccaggccggcaggaaatgacccgcatgagtcccagcacggggaccatgttctctcggttccagctcaccctcgaaaagtgccacaggcaaggttcttcagctcacccaggagccagcaggctggccaggcgtgtggccaccatggtcactgaggatcctcgtgggagaatagggttctgggacctcaggatacaatcacaagaaccagaaagctgcttccaaacaaccccagaaggttttcacttcacatgcgctaagccacacaacacctggatgctggggcacccaaaccctttccctaaaactctgaacactgcagaatggaggttgagaacacttggggagggagaacaaagtcagaaccatcctaaagccagtttttcaagcttgaccacctccctcttcctccctgaaggcacaccagccgatcccattactgtggaaaagggacaccctctggtctattctaacacctttaatgggaaaggagttaggagcatgtccctggcttcaagaaatctctgaatctccaactctactggatgatttcctggagccccaagctttagaagtccctggggacacgagtgattttttttagggtggctgctggtggggctgggaagtttcctggcagaaattatttacctcagaaagacactggcttttctcttaccctcgttttaaagtctacctggtccctaaagaaaataccactcaggctgggcctggtggctcgt

SEQ ID NO: 145111 - DNA, 387 bp, Homo Sapiens
tttcctgcagcatcatctttttttatttctcctgtgtctgtcctccaccttctaggagagccagggcagagctagcactgtcttaagctgtcaacgtggactagctcgtgtcatctgctcgagaagggctgtcgctgttcttgtttctgagtgaggagtacgcaggccagagtggtcacccggccgtgagcagtgagggccagagactagccccagacaggtggatgccagagagagtggcacccatgccaggcaaggcctagggaggtggtcttgctcagcaaccctgccctgagcagcaggtgcgcccatccggagatcctaggagaaggtggccacctccatccactgtctgtgggtcaggcagatgaccccctcacccccatc

SEQ ID NO: 145112 - DNA, 227 bp, Homo Sapiens
ccctagggatgtaattttatgttgagttaccagcaatactaggtcatcaaatgggaagaaagggtctgggttagttcaagaatattttctgcttagttgtttgttttttgtgagatcaggtatcattcaataataaagctttttatggaggtcttacctcctgattccttattagaactttaaaaaatatttttactttcaaaaaatcatagattcacaaattgaaa

SEQ ID NO: 145113 - DNA, 367 bp, Homo Sapiens
  misc_feature (225)..(225): n is a, c, g, or t
tttactgttggtttgttttgctttgttgttgcttgtgcatttttaaatctgggaggaccatttgttcaatggcattctcagaatatagacgggtatatacataccgactttagtgaccagtgggtcattgatcttcaaggaaatgatgatcctctttgcaggggatttttctttggtcttcttaggtgattgagctcgcagaagctcctccagctccctcagggnggtgatgtggtgccctgcgccagggactttcaggtagagcttggccaaggtctcagactgaaaaagctggggctgatggagctcccatttgaagcccaggcactcgagaatcacatctgcttccccactttggatgtccttg

SEQ ID NO: 145114 - DNA, 575 bp, Homo Sapiens
  misc_feature (364)..(376): n is a, c, g, or t
tataagaaattttaattttctttatactttaatgtgctttctagattttatgctataagcataactgcttttatagtcagaaaaaaagcaaaataagatacaacctattcggggtaatttaaagacccttttcacacatttcaaaatgcagaattacaaagtcaataacttttattaacataatgatataaaaattttagtgtgatatacagaattcccagagtaattctaaaacattttaatgcacttcttaaaatcttaatttacaagacaccttgtcttaccaccactgacctttcaatacaaaaagctgacaatttttgtttgctataaaactacaacattaagattggagttaggtagnnnnnnnnnnnnnctttcccttcccagccattctattgtaaggaatgtccattagactacttcccaaacctctgtatgtcaacaataagttacatagattctgtacatacttacaacaggattattagaattccagtatgtcacaacatactttaccacagtccaacaccatggggaaacagggctactatgcacagtgcttttttgtagcc

SEQ ID NO: 145115 - DNA, 374 bp, Homo Sapiens
ccatggttttataaaatgtccagagatataattttggttaagggttataccttgatctttggttgtacagttgtttcttttagtttcagtacaatctaaaacaggaaatgtcaattcacatggtctggtagagaaagaatgactctaatgctctactattcaggtagaaatgaagaaagaagggtgatcacttccatgagcactgtaagcccttgaatgggcttataggcaaatacttatagttaaaatatgtaactcccattttagtattggatagaatactgtcacattttttcttattaaatctacatttttaccatctttcttgattgattttgccaataaaagttccttacctttttataaaagtcaaa

SEQ ID NO: 145116 - DNA, 469 bp, Homo Sapiens
cagatggtaacaagtgtcagaagcattcaattagcccctgcatttgctcatgatttaacaagctccgtctagtggcatacctgtgatatgtggagctgcagagacgtaagcttctgaaggactcttataaaaagctttttgagaatgatgggtttgagtatttcaagttcccagactgccgtaaaaggcaaaggccaggctcccccattcctcttgactgtgtgctcacacagcaaattgagcttccaaaggcaattaattccacaatcctcaattccacaggggatcatgggctgtgcacacagcttcatagaaccactgagccagggggactttgccctatatagaaacccttgtgtttatacaccttggaaatgcttttcaaagccaattcgctcacattgtcatgttggagcctcacaaaatcctgttaagtagaacagttattatcccatttgatgtatttaaa

SEQ ID NO: 145117 - DNA, 500 bp, Homo Sapiens
aacaccacttctcatattccagctcactttgtctggtcacaaaactccaaaagtcctttgaaaatctaactcactgcacctacagtccattagtctcatatcctttccctggcctggacccccacaccctgtgtcctcacttcactacttaactaaattccacggtcaatcgtcataatcactcccatgcagataccttcactaagtttttccccattccttttcttacctatctgtgcctaaaccaaaaccctcattaaatctaaactctttgctctgccctaagccacaaaatgtgaccaaaggaaaaaacacagtcctgccatcatctttcatttccagttcaggaaaatccacctcaaaaggtctgttattcttcctctctcttcacacctccttggctcatggccctttttcctgatccattgagaaaaagatccaatcaaaagagaaactgtaccagctcccacgatatctacccacttacctgcaccttgaaa

SEQ ID NO: 145118 - DNA, 552 bp, Homo Sapiens
ttttaaaacaacacaaatttattctctcatagttctataggccagaagtcagaaatcagtttcacagaactaaagtaaacgtgtcagcagggcttgctccttcgggaggctataggggataatctgttttctttttcttttcttagcttctggaggccattcacattccttggctcatggctgctttcttgtatcactccaaccttttgcttccattgtcgaatttcctactctcttttccctagtcaaatctccttctgactccctcttatagagacacctgtgattacattaggacctgcttagataatgcaatataattttcccatctcaagatccttaacttaaatctgcaaagtcctttatgcatataagtgacaggttccaggaattaggacctgggtatctttggggactattcttcctatagcagcactgattttctaattttcaaatctgatgtcttctgttcagtcctcatcctaactctcttgctatttgatactgtcagttactctgggaaaagctcctccctgactttcatgattattt

SEQ ID NO: 145119 - DNA, 508 bp, Homo Sapiens
taaagcctggctctgacccctgcttctgagccaggtcagagcaaggcctggggtggaggcttctggggaaattttgtgttgttgctttattaaaggatagttttgctgaaatcactctatcccttgggtcatatacactgcatcacactttttataggagaggggctatagaagcctcccctacccttggaggtgacgtagtattgtaagaaaatagtgggggcagagcttcgcctggccaaatatatatgtgttctaattgtgctttacacaaattaattatattgtttgaaggtatcaaagatgaatatttatgaaattatacattaatgaaacactttcaaatgcctttcccgtccccacactgaacacagatacactcactttccaagctaaagtactggaatcatggcaatttcttccaatcagtgccagctccataattgatgagttttcacttccgttatttcatttgagtgtagtgatgatgtggatgttgccctctaac

SEQ ID NO: 145120 - DNA, 846 bp, Homo Sapiens
  misc_feature (742)..(742): n is a, c, g, or t
  misc_feature (815)..(815): n is a, c, g, or t
ggggactcagtctggtcggctccttgcgctcggcggccgcggcggcagcagcagcagacgttggcggccgggctgccaggagcagttccgccgggtttcactgtccgtgacttccttcggggcacctcaggcagcaaaccaagatggagtatgagtggaaacctgacgagcttattcctcaccttattcagtgcctctctgataaaaaggctcttgtgcgttccataacatgctggactcttagccgctatgcacactgggtggtcagccagccgccagacacgtacctgaagccattaatgacagaattgctaaagcgcatcctggatagcaacaagagagtacaagaagctgcctgcagtgcctttgctaccctagaagaggaggcttgtacagaacttgttccttaccttgcttatatacttgataccctggtctttgcatttagtaaatacccagcataagaacctgctcattctttacgatgccataggaacattagcagattcagtaggacatcatttaaacaaaccagaatatattcagatgctaatgcctccactgatccagaaatggaacatgttaaaggatgaagataaagatctcttccctttacttgagtgcctatcttcagttggcacagcactgcagtctggattccttccgtactgtgaacctgtgtatcagcgttgtgtaaacctagtacagaagactcttgcacaagccatgctaaacaatgctncacccagatcatatgaagctccagataaagattttatgatagtggctcttgatttactgagtgggctggctgnaaagacttggagggcacattgaacagcctgg

SEQ ID NO: 145121 - DNA, 387 bp, Homo Sapiens
  misc_feature (94)..(106): n is a, c, g, or t
taccctcttaactgatgtgaaatgcaaacttttttttgctgccctcctttcgttaagccacctcagcagcgcaactgtcaccttccctgtgtgnnnnnnnnnnnnnaatatgaatgtgaaattagcgaggatgccctttcccctggcggacagaatcctctgttattaaaaagtaaagcactttaattatgaaaactttttcctctttttcttgtgttttaactgtttaaaattaatgagaagggcagaatggttgtcaaagcaatattgaaagccgggcagccaggaccgaataagcacaaaaatccctctagagtgttaaataaacagagctccaggcctctccgaatgcctctgttggttattgtatacattgtgtaacagctc

SEQ ID NO: 145122 - DNA, 473 bp, Homo Sapiens
tttaaaggagttgcccaaaggtttttattagctgtagagggggccaggaccggaatgttccaagtctttgtccctgactggggatgaagctctgactggggttccctgtggacaggctcatgggctatgtcccaatgtggtgtggtggaaacacagactaagtgggggatcaagtagctgccccttgacctctctggacctcgggttccatgatctgaaaacaaggatgttaaattagatctgattctttccagttctaaccccacagcagctctcacctggccattctgttgccctctaggaagtcattgaggtagggaggatgggcaacacaaaaattgttttttttctttatataaaacatccccttcttgggggagggtaacgaggtggaatggttctggaatctcccaaggaatgctttgaaggcatcctggttcaaggattgctaggcagtgtgggcaacggagtaa

SEQ ID NO: 145123 - DNA, 541 bp, Homo Sapiens
ttttgctttttataaaacaagtttattcacattttagaaaaactaattccaggacaggaaatggcctccctataggatccctaagagatcaagaacagaaggccagagggaggggcttgggagggaaggagtggggaaggggaggcacgtctcccattctgggtagtgggaggtcaaataaattaaaggaagagtggacagagggagagggtgtccaggcaaccagaggagggcttggagctgggccggaagacagtcgacacctgcaagacctggggagtaagggatcaccgttttcgaagcctcttcatgaagcagcaagtgatggtaccaaggacagtggcaccagtgactagggccacccctgtacccaccagcagaggcacaaatagggtgtccagggcatgcatgtaggggtagactgtaacaggccctgagcgggcactgcccgcctggtaccagctgtagtcggcatgctgcacccaggcgctgggggcacagtggtacacgccttcatcctcgggccccaagctgtgtagtc

SEQ ID NO: 145124 - DNA, 614 bp, Homo Sapiens
ttttttgatttcatttgttatttaataatttaatcaatgactaaaaattaatcaattaaataataacttgaggtctcagagaagggttctttttcccctttcttcgtacacacaaaatatattttctacttggcctgaaattccaccattagagtaaaattcctctggcttgtgaggaatgggtccagctgaggcagggggtgaagggtgatgggcacggcactccagaggttgtgcagctcggtggcccttaggtgacatttgaacagagaccaggacaatgggagagagggagtcatgtggggctcaggaatggtgtgcagatggaaggaacagcatgtacgaaggcctgaggcaggacatccttctgtttagagaactaggagccgatgccaacctggagggagagggagagggctaggatagctgggaagataattacatggctgtgcagaaagctgaaggaggtgttagttggatgtgggagtcaaaaggagtccaggccactttctctttttatcaaactggagaaacacacctcctttccattttaatgtctctggaatcaggatgctcctcacctgcagtggcagctcatatttgatgaaatacgg

SEQ ID NO: 145125 - DNA, 395 bp, Homo Sapiens
acagcaaacaattgacaaatgcgtttgttctgactgcccaaccaacgggccatttctctttctctttttctcaggcttctttttattaatattaaaatgtggccaattaataaccctacaatagcctctatatgttcatgaaagaagagttgcatgtctgtcactttaacccaaaaggaagaaataattaagtttagtgaggagggcatgctgtaagcaagacaggccagtagctagccttcatgcaacaaacacttagccaagttgtgaatgcaaacgaagtgttctggaaagaaatttaaagtactgctccagtgaacacatgaatgataaaaagctaaacaatcttgctgctgttatgaagaaagtttagttggtctagatagaagatgaaa

SEQ ID NO: 145126 - DNA, 1506 bp, Homo Sapiens
ctccaaacttgaatcaataaatttattttctgcttaagcaggttgagttgggttttctatttgcaatagcaaaagtcctgactggcaaggtttaaaagtttgaagactctcacaggtaagtgcagctcaggatcctgtgagtggagcagaaagtcttaagaaatggcaggggctggttgaacccagattttccattggctgagcagatatccccagaggcgtagaaaattaaatttgttttatgttgttccaaaagaggagaactgaggccagaggagcacacttctgagacactcatttttgctgggtagaggaactctctggcaagcaggaccatcgatattagagcagctggcctcaggagggagtaagagccccatccctgaaggtacacaagttgtggcagcaaccatctggcctgcagtttccagaggggagtcaggcgtggggtgggactggagtgaacgggtagatgcttccacatgcggcagttggcactgacggcaggaacacgggggtggcttaatgggtcctggggctcccctctggccctcaggaaggcaggagcatgaggggcttgggatgcagcacctgcaaatttgcacgttcctggcctcaggaggcctccagtacagaaaagaccatcaacgaagctctgcagccatctgctaagaaacgccacagggaggggacagcatggccagccggggtgccatcaggctttgggtggggatcctggaggatcagacccatctaggtgggagcgctggggtgcaacccctagaggaggctgcaggcgcgcttctgctgccgcgtgggctgagggcacagcacggcccggatggcctcgtcgaacacggttttcaggcctctctgggtgagagctgagcactccaggtatttcaccgagtcaatctccttggccagtgccaggccctgcgggtaggtgatgggagccagcttcttctccttcagtttctcgatggtgtccttgtcgtcccgcaggtccagcttggtgcccaccaggatgatgggtgtgctggggcagtggtgccgcacttctgggaaccacttggcgcggacgttctcataagaggctgggctgacgagggagaagcagatgaggaagacgtccgtctgtggataggagagcggccggagacggtcgtagtcctcctgcccagcagtgtcccacagccccaggttcactggcttgctgtccaccatcacattggctgaatagttgtcaaacacggtggggatgtactctccgggaaaggcgttggtggtgtagctgatgagaaggcaggtcttgcccacggccccatctcccaccaccacacacttgatggcctgcatcgtgtccggagcctggagagtgtcggtggtgacagctcagggccaggcgcgtttctgcgggcgcaaggggtgtggaggctggtgaggcgcctgctgaggagcagcggtggtggggcaggacctcgtgcggaattcgccacccaggcc

SEQ ID NO: 145127 - DNA, 407 bp, Homo Sapiens
  misc_feature (211)..(211): n is a, c, g, or t
ttttcaagcagacatacaatatatattttcccaacataaattttcatgtgttgttcatgccttggtctgctattgagctggacttctgaaataaactgtgttatgctagaaataactcataaccaaagtgtctctccagcaaaagcagggaggaaagtgtcacctttctcagtactaagatttttccttagcaaacgggtgatctcagagntaagtaccgcttgccagaaatcgctgagtccgttttcagagaggaaggaaaacgctgtgagcatcacatcatgctgtgtcctgtgtgcatgggtcttttcttcagttggtgacattagaaaaccatctgggaaataacgctcaaggcaatggctcccaaataaagcatagaagacaccttgtgaagagccacagcc

SEQ ID NO: 145128 - DNA, 512 bp, Homo Sapiens
ttttccatttcttaaaaatctttattatttggtattcttttggtttatctttattatttcgtattctatttggtattcttgttttctaaatcctcagctgttactttgaaccttataagaatgaaaaataactacccaatcaaccataacagttccacagcagatacaaagctcaaactgaaaggaagctttcaaatatattctataacatacttaaatacacttggctatggctaccttagctgggtattttttggctaaatttcttcttaggtagcacttttgggtttagaaaagtgctgagataaatattagcagcagaagacatttataggtacccctttccaatggaaaatattttatagttaacaaacaaaactgataacaaacaaaggatcctaaatacagtatcaattccattatcatccattatcacttctcttgcaaaccttcccctggcatttttgcatacatataattgtcagtcttggagggcaacggaggtgtaatac

SEQ ID NO: 145129 - DNA, 606 bp, Homo Sapiens
  misc_feature (127)..(135): n is a, c, g, or t
gcgctgagacgctggtgacaaccgccctttgggactacctgccaaacaaggagaatgcgctctttgacagataattccctaagagggaggcactgcctcggtcggtagacaagtaatgaatgaccgnnnnnnnnntcacattagaagttatcaccagcacgggtgcgaaggcagtgcattaaatcaacactcattttagagcgccccagacagcccagccggaagggaggagatcagagctgtcaaagcacagcagagccccaaaccacaaaggcttaatgaaattcaacttcctgagccaggaagtgtcacggtctcgcccgcactcgccctaagctcgtcctttccttttgaggaggcacaggcagagctgaaacatcttaagtaaagtttccaacacctacaaccactgggattccgtgagactggagagaagagtcccgcgcccgccctcgctcgcgcttccaattctgtcgctcccgagtgtggggagctggcggggccgccgagcacctcctctacccagggggccgggtccctgggcccggggcaccgcagacccagagccgggctcacaccggggggcccgcgagccccacccacaaa

SEQ ID NO: 145130 - DNA, 434 bp, Homo Sapiens
gcacgaggtgatggaccggttaataagagactctgagtgtgatgtaaatagtatgtttattaaacaatagagcccattggaatttttttcttcccacgtattgttagatgtaaaacctgaatacactatccatacagacaggtgattgactagaccttgtttatgtagttctaatgtggaatacttagagttgttatgaattacgattatccataacttttgaatctaaaaagctggctacacaacgtattttgttggaatctttttgtaataccaaatgtctacactctttgatctagagaatcacaaaattttagaaacatcactacccagtttaattgacttttttattgtttactgtccaaatacctgttacatattaatagtattctactttatatacctgtaataaactattcagggtttcttaaaaa

SEQ ID NO: 145131 - DNA, 417 bp, Homo Sapiens
cggggggcggggcaggtcgactgcatcagtcaggagctcacagctgcaggaggccacgcggctgggcagacagcctcctcgggtacaggagagctcggtgtcttcctcactgtcaccggggtccacgcagccctggatgtcagctacccacgagtgcttctgcagagagtcgatggtctccaagatgtattcggctccgttctctaccttgaggacgaatgtgttatccttctctggcatttccaggggcatggtggtgcggacctcaatgatggctgacagtgggatgctgaccttgggcctggaggctttgggcggcacgaagaactccaggcggaagcgttcctcggccacagccctgcgcaggagcaggcggcacttctgccactgagccgagcccccggagcccgcggccgc

SEQ ID NO: 145132 - DNA, 481 bp, Homo Sapiens
tattgttggaaactcaacttttattctgggttaagcctctagataaaatcttaagtctgccaaactattattccccccaccttttctttccccaactatcaagaccattctaggaagtacgtcactctaccaaaaatgattgagttgtgttgggcctggggaaaaagtcgggcaaaaggagcctttcttgtggctgctgatagttaggttcatccaccaccgcactttgagctcgactagagtcgccatggggtttcatctgtctttgtggccccacagtgctcacatgttccacttcagctgtgccaataggtggtagcagattatttcgactcaggggcgtcggtgagggagaggagagcgagtcgggtgccactgggactcgggctcctctgaggatttcttccacagatcttggtgtttcagcacatgaatggctcgtgctgatcggatgaagagttcgtggtggtggattgcgtct

SEQ ID NO: 145133 - DNA, 524 bp, Homo Sapiens
aagtcgggacgttttgtgaaaattctccctgattatgagcacatggcgtacagagacgtttacacctgccgtatgtacctcctgcgagctttggcttctgcggcagccagcacggccaagaactgcatggggagggccctctgattcacacatgggacagctttggtcctggagcaagcggacctcgtggctttttgtcatcctttcacgttcacttgctgcagcgtggctctgcttcagctgtgacagagatcacacctgtgtgttggacccaggctgcatttggcttacctttctgcagtggtttctgggtactaccagtcgagatcactttaatgcacattttcacatgtatcgtttattgaggagctactgcagacacagagaggaactaacagagtagaagctttaaaattttattctaaagtgaaatatgaatatttgacttctgacctttattagttttaatcacattttaatagcctatgtgaattaaaaatcacatatgcatataccctcaatag

SEQ ID NO: 145134 - DNA, 464 bp, Homo Sapiens
  misc_feature (336)..(336): n is a, c, g, or t
tttaaaaagacccaattcttctttaaaaatcgagaacgaatgcacagatttccagaacactgtaagccctgaggcagtggcctctcttttccctccttgttatctactccagtacttgtggctgggtcggcccgtggctcagctccagcggaacgggacgtgacgagggcggtcgcctccctccttcaccagcggtttgtggaactcccgcccggctcgggaatgtatgctcgcccagcagtattcacagtaatactgcagacaggtgacgttggcacagaagaacggggcaaacttcccaccacatgtcgtgtgtccctggcactcatcacacantctgatcattccagcacatatggctttacttcaacccgtttgtcaatgtcattgtgctgaagctgcacaaaacgagcgctgatggctgcaatgtaactctgctgattggagaatggcacgcggccagc

SEQ ID NO: 145135 - DNA, 476 bp, Homo Sapiens
cagggtgggtttcttgccggcggccgtgccccacctcgacgcgatgcacctgcggtacatcccacccaggcgaagtcacggaacagacgcagaagaggggagacggccgaagacccggggagccacgcggcccgaaacagcccctgctggctctggcgtctttccgggccggggtgcccctctgccatgttccgtggacagcgaacacccgggccggagccattacctactgtgaaggccagcgcagggggcacgggatgtgagggaggcccccgagtgcacggggccttctgcagggactccggtcctccgccttccaccagcataggaggacgggcttctggcccaccggacataaggaattcagagaaaaggctctgcaggtacccaaggccccccagcctgcagcaccgaggggcgcccaggaggcccggcctgcggagggcaccggcagcccccgccccgctcgcggccgc

SEQ ID NO: 145136 - DNA, 829 bp, Homo Sapiens
ggtcaaaaccccaaatttgtatattcaaaaggtgagcacacttcaaaaagaaaatacacataaaaccataccaaggccctattagaagactggcagggcagggttttcaagggacttgctatgatttctcattttcactatttataataatggacaatatgctctccttagagttttcttcctgcagaaagtctgttacgtcaggtgcagatgactttttagtctagttttcaaggtttaatttcttaacttggaaatcaattaaatttgtttcttaaaatcttgcagtaaaactgatgctccagaaagatgcccagggagattctgtcctgctgcgtccgcactgtacagaactgacgctgtgcctacgcccgtttcagaagcgtggagtacttaagagttaatcatggcaaccctgcggcggaagctctgagaagctcttggcctctaccggttctgcgagaaagtaaactttgggcacgacaagtcatgaagtcggcacgttggggagacaccgtgtcacaatgacaaggtgagatcagctgccccggccaagctgtctcctcgagtgcaggagaggtttgtgaacagccaagcttccctccgcatggcggaactgcactggaatcctgaaagagctcggtgcagaacggccctttgctgggaatgatgggagctgtagtctcttatccgcacccaggtgttagttgtaggtttacaagactacaatcccagcacgaaacaggattgggagtggtacagatccctggagggagacatagcgcggtgcgctactgcagggtatttggcaggagtagtgtcttagccg

SEQ ID NO: 145137 - DNA, 374 bp, Homo Sapiens
tttctggagacaatatcactgtttatttgggtgacacatctgcctgcctgagggctctgacaagaggcttagtggttgaaggtcccccagattatacttttccccttgctggctctgcagaggccccagactccgagtgcaggcctgtggagctgtggctctgttacatttctcttggcctcagtgtcctgggagcagctgcctcgtggctgaaacctccttttcagagatcccagggcggtggcagcctcacttcttgaagttctctctctggagcgacaaggagtacctctgaagccgggcccagtgctcctcctccttctctgggttcttctccagcttccgatagctcttctggaggaaacgctcacatc

SEQ ID NO: 145138 - DNA, 1446 bp, Homo Sapiens
agtcaccacgcccagccaccccatctctattttaaagaaaatgaaaacgtattatcatcggtcctatgatcaccaacatttggcccaaacaaagtcacaatacttggaaattcgggggtgaaactgcagccgccgcgtcccgaacttcagaagggtcccgtcagcaccacagcagcttctgattgagcgcgatgacgtcactgacgaagccgtctgcgccgatgaagtcccccgcgatgatgttggtgcaccgtgaacccggccccgggcactgctctcggacccacgcgctcagccgcggaaggttgggcagcgtcatcttctccagggactcggacgggtgcgccagaacgtactgcaggttctccgtgaggttgatgccggccacgaacaaccctcctgggcggccgcagctcttcatggtctccaggtatcggatgagggcctcggtcttcaccctgtttccccccaccagtaggggactcctggccacagctcgtggtgccggcgcaaggagctctcgtcttcataggagacgatgacctgttggccccgggaccacagctgccgcagtgtcggcacctccccacgaggacacagcatgtccccgaagatgttcttgatacaggcgaccaggtactcgtgcaggtcctcgctcagcccctcgaagtttctgcaggccaggatgaccacctcgcgtggatgccgctccagccactccgagatttccgtgagtgtgtcctccaccagcgccgttgtgtacaccatatggacaaagtgcaggttcttctccgagccctccagcatgtgggctatccgcagatccaggtaccgcaccccggcatccagctgctctgtgacgtccagtgcctgggtgacggaccatttcagcacgacagggcgcgtgatgcagggcaaggccttgttcagcagctgcagcagccgggactcctcgtgcgaaatgggggacttcttgttcaggcagtacgtcatcgtgtcgtggctccctgggatggagaggtggtggaggggcacatcccagagccggggacacagtgccgacatccagtcctcgttggcatttctgcagtgcagcctcgagaagctgttggaagcgctcacctgcccgcccatcagaggtgagccctgggcaaccttgagtcccacacgcagggggagttcggaattcgaattgttggtctcgagcccagaatgaaaggcctggtctccctgggccgcaagaaaggacgagatcctctcggtctgcagctcctggcggctgcccgcgttggcttcacaaggttctgtaataatcctgctgccttctcttccacactgaggccaggcttcccaggtggctgcagattttgttcttatttacatcttcccaaaagccttcctcccagaccctaagccaacaccagctacatgaactcagatcttccc

SEQ ID NO: 145139 - DNA, 501 bp, Homo Sapiens
ttgaggttcataaacatttattagcataaagtgttgtagaggaaatgtaacattttcaagaagaaaaacttgtatttgcatagttcacctatgtttacatggatcatggtggacatcagctcaatacactattacaatgcactaaattacaagggctttccttaaaagtgataaagcagctttattttaaaataccagtatttatgatacactggcaattacatctttttcaactaattttaggatttaaaacttcaagttatgaaagttttaaagaattgttttagttgtaacataagtaaaaacttttaattacttaataaagtcaaaactttattaagatcaccacctctctaagaacaaaatgaccaagaaattacacagagtatttagagcctaaagtaagtacattcaccactggctcccaaagtcctcaaagtggtatctaatttctatcacacatgagagctcactattaagaccaatctggatttgaattct

SEQ ID NO: 145140 - DNA, 475 bp, Homo Sapiens
ttttggagtggtggctgggggatagatcccccttcagttggtcctgggttttagggttttatttgtttgctgtgacttgttcagcactctaggcttttgaacccaacatgcttctctaaagccctctctccagccccttttagccaggaccacttacatcatggcaggctgttgtttcagtcacctgcatggccgggttgacaggcatagccagagctcctgggctcctgtaggacgtggcaggaaggaccatagaccatggcaggggttctgttggagcccttatctactctcttttgcacaccccttgcaggcttgtagcagcagcagcagtagtagcagcaaattctatagttccctgatgtctaagagggtgggtgggtttgtttcagcttaaggagtgaagtcacatgaactatagcttccttagctaaaaattgtatttgcatttccttttattctgtaccttctctgt

SEQ ID NO: 145141 - DNA, 514 bp, Homo Sapiens
gggattgatgcagggctgctttttatttttctaagctgaggcatgtgaaaattaatttccagttactagcaacaatatggtgttacaaacaaaagaagttgtacagcagatataatatagaattaaaacagaatagatttaacttatggaaaggcatgtcttttctcctgtttttcttgatttgctgaggaatggtggaagtaaggtggtctggcagaggacacgaactcacatttagaaatctctaatcccatccaaacctttgcctccataaaccgtctgagccaagtggttgttgctcctaattttagggatccttgggcatgaagatttcacagtcttcctggcagcttcttctaaagtttaatcatgcttaagttatgtttgagcctgagccgcccggaggattgaatccaagcaatgaagaaaaagcagcctgacctgtctgccttctgggtgggctgtgccttctgaggtgttcacatgtataatcaaatctccttgtggtcattca

SEQ ID NO: 145142 - DNA, 158 bp, Homo Sapiens
ttttttattgtagaaagaggtaaaattttatttctattatccaatgccaaaggacaccccaaatggttctgaggataccttgggcaggtgccagatttggggaggcgagggggagggaatcaatgggactccagttcgatgactgcggttctttactt

SEQ ID NO: 145143 - DNA, 978 bp, Homo Sapiens
tttacattttacatacatataatctctgtcaatagataagccacgtgggtaaggtacatagcccgggtctgctcaatcccagccaaagtcgtgcccggtcatctggtagaacttgaggttgaaaggccggtagaactcgcgcagcctgcgcaccacctcgcggtcgatctcaggatgggtcctgcccttggtcttgcccaggcaatggggccggctgctgccctccgccttcttcaggcaggggaagcccttggtcttgttgaagtagaagtgcttgtccgtgatgatcctcttgaggcccaggaagtcttgcacgcggcccagctccccggccgggtcgctgatgagccgctcgccgctcacgaagagcatctggcggatggggaagtggcgcagccagtgctccaggtgcttggcgtagatgccgatctggatggcgctccacgacgtgtcgatgaggcccgctgtcctgtattttgaagcgtcaagctctcgaaggtggggatgtcgggccgcttggacagcgtctgcgtgtagtccgagatggccctggtcacggggtcccgcaccaccccgatgagctttggtgtccttggacatggcgaatgcgcggggggcctcccggtgacgaagaactgggcgtcctctccaaggtgattctgcccgccagggttctgggcattacaggtcccgggaccaggggaggccttgtggaaggtgcggaccgaaaaaatggggctcgggcccaggggcgcagtgcggtgaacgcgcaagaaatccagaaggccggtgcgcccttttcaccgagatgaggctggggagtgatctgctcgcacggaaaggcggacccgaggcctggaagggacggccgaggcggaccgaagacggacaccagcgccccggaggagagaggccacggagagagtggcggaacacaccgagacacccccagaccaagcgaaaagcacaagaggcgac

SEQ ID NO: 145144 - DNA, 361 bp, Homo Sapiens
tttcacttctaggattttatctgaaattttaaaatcaggcgtggatcaagacatatgcacaaaggtgctcgcttcagcatcactttaaaaaccacaggcaccgcggaattttccacagttggtaaatagattatgacgtgagcagtggaggattttgtgtatcttcagagaatagcaaagctccgttccaaagtgtccttaatgatccaaggcatgacggccaatgaggaaaggcctgtaatctcagcacgccgggactccaggcgtgagcgaccacgcctggtctattaagaagtttgaatgtctgaagccttcatggttgcctcaaacgtagtcacgcctggggtcggtgagtgctgtg

SEQ ID NO: 145145 - DNA, 403 bp, Homo Sapiens
atatttatatttctcgctgtagtgctgaaattttttggatttgcgagaagacagctgccccagtgaagactgaggatttggattagtatgcttcttccaaattctccaagaagtaagagacttgtgagtaagctcatatgaggaaagaggaaactacggtaccagagccaaaccagcttttaaaatgactgtgtatttacattatcagacaaatgaacttgtttaacagaacattctccagttccttgtctgacgtcttctgatttgatgttattattcggtcttaaaattatacctggggacaaaggggaatagccatactatggccctatgattgtctcagaatcatttcactgaatttctttgctttctcaaataaagactcctttctttcaataaaaaa

SEQ ID NO: 145146 - DNA, 945 bp, Homo Sapiens
aaaaatgttgctccccccaggcctggaactgagtacttaccctgcttcttcgccaaagcgaactggggcctgcccagactctccctatcgatccatcgctccttctgcttgccatcagctctccagtatccggcccagttagtaggcgccgctcgttgatcctctgtgggagccgctccagcagccccacgggcacgtaccggcacaggaaggacagccactcgagcagaaagcgccgggtcttctccacgccctgcgtgtccgagccccagtgctccaggccgtagttggtgaagtcccgcaggatgtccaggcgctcggacgacgagatgtcccagtgccgctgctccttgatctccgtgaagagccacggcttgagcagggcgccacgggcaatcatgatcccggtgacaccagtctgcatggcgcggttggcatcctcaaatgacaagatgtccccatttccgaacaggggcatggggctggcggcctgcacgcactcctcgatgtactgccagtcggctagcttggtgtagcgctgctcccgagagcggccgtggagcgtgacgagtgccacgccccagtcccgcagctcgggcagcaggcggtgcgccaggttcacacgctcctggacgcctgtgcggatcttcacagtcagcggcacatccagcacctggttcatgccacggacgatctgctggaacttggtggagcgattcatgagggcacagcccccacccttcttgtacacgaggtcgatggtgcagccgacgttgatgtccacaaagtccaccttcacggtgctgctcagcagctcggcacacttgttcatggtgtcggggaaggcgccctccagctggacgccaaagatgtcctcacactggtggcgtttgagtagggcccactcgacatccctcgtccgatttacaccagcctcgacctagc

SEQ ID NO: 145147 - DNA, 455 bp, Homo Sapiens
ttactaggcttgtaggttttgtggtctgggctccggctcaggccaggccatggaagcagaggccacacgatcccaggcaggctggtggctgggcccactgatcgtcacccgtcccacagtggcgccctgctcaagccgtggctcttcacggagatcaaggagcagcggcactgggacatctcgtcgtccgagcgcctggacatcctgcgggacttcaccaactacggcctggagcactggggctcggacacgcagggcgtggagaagacccggcgctttctgctcgagtggctgtccttcctgtgccggtgggcaccggggctggctggggtgggcggcgcgtgggccgcggctggttagagctgactcaagcctgtcctgcccgcccacccgccgcaggtacgtgcccgtggggctgctggagcggctcccacagaggatcaacgagcggccgc

SEQ ID NO: 145148 - DNA, 484 bp, Homo Sapiens
  misc_feature (408)..(408): n is a, c, g, or t
  misc_feature (445)..(445): n is a, c, g, or t
  misc_feature (455)..(455): n is a, c, g, or t
tttgttttcaagtctttctgttttattcttcgctgcaggtcttgtaatgtccactcaggagggaatgctttgaaccgggcatcaagctctgggccggattccaagtcagtctaaaaacagtctgagctccccgctcccccgacgcccggacaaccccggtcccctacttgctgggcagaatggataaaaaagtgggttctcccttctgcctgcccctccctcctgtcgggtcctcacactgcctgaacagccctgtgctaagccaaggcacggaccagaccaggagattttcttatggcagaacatcttctccccatctggaccccagtgctttctcaccagagagacaaagtattcatattttaaaggctccacgtagcatgtccagaaatttcccatgttcttcancagggtaggggtggggaaagggcccaatgaggctacngacttaatanctcctaacagctgtggaaagtttgatgca

SEQ ID NO: 145149 - DNA, 983 bp, Homo Sapiens
  misc_feature (420)..(420): n is a, c, g, or t
tgcctgttttattcagttatcacctccagctttgtacttcagcagctgactttccttcttcactggggagcaaatctgcacttgccttaaatgaatttctatttttgactacttttcaaatttatcacatttttttcctaaagtactgagaactaacctcatcttgtatttcttgcagcttcccaatgctgagggagtcttagaggcatttgctttgtttttattaggagtatggtttatagtcacccagccagaatgtgatatacaagggtttacaaggaaaagtagaaatgggtgtagatgtatgtgcttgttgtaagaaaaatttacacttacagatgaaaagatccatatataatccagccacataccatggaaaggaaaaccaagaagaatatgtaatagtgatggttgccaaancctatgcaccgtccagtccacaggcagtgttgatcatatcgagccacacagcagttgcatacatggcagtggagtgaccttaatggcttccttatctaagtgggcaattaagagaggcctaagcaaaaaccagtgtctcaaagtggtaacaaatcacaagcaaaattttaactttaggtcacagaggcattggcacaaatcctaaacagaccatcaattcacacagaggctgtggaatgccttattagtatttacttccatatgtctactttgattaggacatcactaagtgggatctgaattccagagcctgttcacactggctaagcagaaatgaggcagtaccacagagcaaaataagcactcaaccaagggaaggaaacccaagttccatttttatcaccaccaataatttgggagaatttacttcctcccttgattcctcaattgcaaaatgagaggtttcactaagtggtttctaaggtcattatgagcctctgatttgacgttagttctaatatatgcttcatgacagagaaaagcaaataaaacacacaatggat

SEQ ID NO: 145150 - DNA, 554 bp, Homo Sapiens
taaggattctttgcagaaaacttaaaactttattaagagaatattatcagtcaaatttccagattaagaataacgttcttggtttcagtcttcatttgtcttgcttgaaacctatggttgcgcatcacctgcttccagcactttagtgagatcaaaagtgggcataatcccctccctgacatcaggaccatctccaggctcatcctctatcttaagcagagccagttcctgttgaaaagcttccatgtcaggcccttgaaaagcaggcactgcttgattttcaatctccccactaggtgcaataccctgattatcagttggtggttcctcttcttgacgtttttcctcagtgggctcctggacaatcacagatccaaccggctgggaagactcttggtcatttcctctttctgaggattgggatcttgctcttagaagctcactcatatttcccacggctgagtcttggtcagtgagaaagaatcaagatggcggaaagaatgaagacactctctctccttgcagacctctgtgcggacacaagacgggcaccc

SEQ ID NO: 145151 - DNA, 272 bp, Homo Sapiens
taaaaaaagctacaaatttttatttagctattattaagaaacgtaggcacacggacagaacaggtctcataggtaaccagttgtgtttcctaatagggtgaatacatatcattgccatgaatacatcttttatcataaaatgccaatgagcatcaaaagtaaatggtttgattgttgttgtcactgttttgtttaagaaaaatagggccttaaaataagtgcttcagtggaattcttgaacagtaagtagcctgttgatagtggacctagtt

SEQ ID NO: 145152 - DNA, 480 bp, Homo Sapiens
ggaccaaaaaacgagggggtaaagttgaaagtggccccactcaccacctccactagtgatccactagcaaaatttttgcttcctgttcctgcaacatcacattctgctggtctagaggtcttagttccagagggagctacactccccccaggagacacaacaatgtttctattaaactggaagctgagattgccacctggacattgggggcttctcctacttttaagtcaacaggctaagaaaggagttacagtgttggctggggttattgacccaggatcatcaaaatgaaatcagtttactactccacaaggaagataagaaagagtctgcctggaatacaggagatccatcaggacacctcttagtattcccatgccctgtgattaaggccaacaggaaactacaacagcccaatccaggcaggactacaaatggcccagacccttcaggaatgaaggtttgggtcactccaccagg

SEQ ID NO: 145153 - DNA, 397 bp, Homo Sapiens
  misc_feature (287)..(287): n is a, c, g, or t
gacattgccactagtttttttctctcggtctgattaggtgggtgacactgcttggaagttggaacacatcatagatttctgaagtcttttgctcttttttgctaactggtatttaagaaaaataagtcgaagttgtaattctttgtttttattttaaaagaattttgtgattctgccttgacccactatcttaccctggaagtttttcatattctttataaatagctgttatattcctttcaagcacttgtcttaccagctagtgactaagatatgtgtgttgatcngtgataagtgtagatcattttattgacagtaatagatcctctgatggtttactattgtctctattcagggaacttcttctgcactttgctagcaaacccttttttttaca

SEQ ID NO: 145154 - DNA, 247 bp, Homo Sapiens
tttgtcgtcatcttttctgtgtaaatttgatggcatttaagtatgctagctgtagtgaaagctacataatactgtttcagtatatcttgagcacacctaaaagccatagaacaacggcttccttgccttcagttgcttctcctgccttctccctgaataatctgggggaaaattcacacttcttgcctggttagtgagagtaggaagggagttttagagcagcctctctcagtggctgccgtagagg

SEQ ID NO: 145155 - DNA, 467 bp, Homo Sapiens
atcttacgtgttctagtcgccacgttaaaaaaagtgaaaagaggccaccatgcctggccaggaaaataagtattttcaacaaataatactgaaaaaagtggatatccatattaatatggtttgggtctgtgtccccaccaaatcttatgtgaaaatgtaatctccagaggtggggcctgctgggaggtgactggatcatgggaatggatctttcatgaatggtgtaacaccatcctcttggtgctgttcttgtgatacagttctcataagatgtggttgtttaaaagtgtgtggcacctccccacttcgctctcttgctcttgttctggccatgtggtatgtgcctgcttccccttcgccttccgccatgattgtaaattttctgaggcctccccagaagtggaagcctctatgcttccccgtacagcctgcagaactataagccaagtaaacctcttttctttaaa

SEQ ID NO: 145156 - DNA, 529 bp, Homo Sapiens
agattgtattttgttgtttttgtgcaaaatctgaatacagtagtttactatccaagttgtactttttcattctaccaaataagcagtctctagagtagaaatgatgaaatgaggtttgcgtatcctctaaaaagacaagagtgaaacttgaagtaacagagaagtttaacaagttacaatttcatatatatgttggtgaaatatacattggtgaatccaggaagagacttaaaatatttagaaaccttgtgtgcactatatttatgcccatttcgcaacacatgagggatctgaaattggactgctttcccatcagtcattatattctgtaggctcttctttagcaatctctttcagatttggaaacttctcatcaattcagagtccgtttgtaacctggggactcatcaccattcttatccatgcacactactgtagagcttatctttctgtcttcaatttgaacccaacttccagtctaccctcctaatacatcatttttactatatctgtttttagtcaaaaatct

SEQ ID NO: 145157 - DNA, 441 bp, Homo Sapiens
atactaagctgagtttttaatgtaatcactaaattaaatgtataaacaaaagtgtggtaacatatagcacaatctatacaattcagaaagagatcttttgttgtgatcgcattcaaaactggatacctggtgaatgaaagttacccaatataattcagttggactcttcaggaagtagtgcaagctgtctctgctcaccactaggaagagggcttgattactatcgagctttaagggccttctaattatcttgacgagtttactcatgttgacctgatcaggtacaaaattacttggtttttccaggacaggaagctgcttttcacgcctgtgtcattcttttgtcactgggattttggtaggatgctgctgtcagataagtgggacccccactctttgttcgaaggagtgacactgcttgaaggtcttctccaatctcat

SEQ ID NO: 145158 - DNA, 454 bp, Homo Sapiens
  misc_feature (365)..(389): n is a, c, g, or t
ttcatttttaccagtacaaaacttttattgcatcccaaccaagctaagatgaatacagaattgtttcaacagaagttaccattatcataattcaagacaaaaatcagccggcaattacatgagttggaaaacaaactactcttatgtcacagtctaccctaaagctccaacttatgtcagaatttaaaatacacacacatatacacaaccctgtggattcctcctcatttatgtaaaacctacttttgtgatgatctgctattttcttgagtcttctggaatgaacactgtagccccactcccggataaggagaagataccacttccagggcttagcactgcccctggcttgaagcagatactcnnnnnnnnnnnnnnnnnnnnnnnnnttgtctgctgatagggctgcccatcaagcctcataaagaaaaaattcagaaaaaagcaactttat

SEQ ID NO: 145159 - DNA, 430 bp, Homo Sapiens
ttttctcactgaaaggtgtttatttcagaggagctgaaaacctccagaaaggggagggaaaaaacccagcctgaccaaggtagtttccacctggggcctggccaccctgctcagtccgaggacagacgggagccacccggcttctcctccggggactgctcgccgcggtggcgtgggctggaggacccaaagccgctcccagcttctggcaccaggtgcagccgggccccgactcgatgcattcccggcagctgctgaccttgaacttcgtgcactcctgagagaggaccccagtggcaaggtccttccccagcctcccgggaacttctgtctatgggaaagtgagggcaggccctgttctccctgattggaatgtcacgcgtggagtcccctccgtggaacacagaactcaccgcacccgagggagagc

SEQ ID NO: 145160 - DNA, 1149 bp, Homo Sapiens
aagttttccgggaaggtttttctcgaaggttttttcccccattcctaattggggcccccccggaaagatggggccgggattttgttttccagcccagcttggtgccgccaggcggccccacccaaagggtaatttcgatttcgttgttccctcttgtacccaagtggtcctcccagggtgaaaagcgccgttcgttgggggttcaggatggcgcccagtttcccgttcgcccgcgaaaatggaaagccgtcatcagttggcaaacaccagcaggccgcgtgacgttgcgccagccgatttcttccgggcaggcggcgacctgcatcatggcgtccagcccagccgtcggggtgcatccaggtttccggaaatcagctgcttcccgacctcggtctgaaactggttggagttgttggtcagcttcagcacgtgcctgaaggcaaacgggggctggcactctttctccttgttggggcatgggtttcgcagcttatcagggtgcgtgttcacgaacggcagcacggtcttgtccacgaaggacccgaagccaatgcggccggactcggtgatctcgttgagggcccggagcaggtcgccacctagcttcttgacattcctgaggtcatcaagcatggagtaggagaggtccatcagatagtacaggtcgatggggtagcccttggcccgccggaaggtcacgttgaacgctgctgcctggcctggtcgcaggtaaagcgtcactttttgtggggacagctgcttctggcccccattgtggtcttcctgggtttcagcgaggcttgtggggtccatgatgtcgtcagccgcacagcccctcatgagcagctgtggccgggtgtcgcagcgaatggagtcaggatcccccggccctgtgaagttcagcttctggcaccaggtgcagccgggccccgactcgatgcattcccggcagctgctgaccttgaacttcgtgcactcctgagagaggacgcacccgagggagagcagccccaccagggcgagcagtggggggcgcaggcccagcatgtccctcggtgtgctggagtcctcggcggtgctcctggctgggcgtgggggctttgctaccagtctgccctgggatcccgggaattccggaccggtaccagc

SEQ ID NO: 145161 - DNA, 442 bp, Homo Sapiens
  misc_feature (223)..(231): n is a, c, g, or t
tttaaattcatcaaatgtgatgcagttttaattatacaaggccaattgaaaatgcaaaacatgaatatgcaattttaatttagatacatgggtaattacaatgatacttctcacaggaaaaagcaggaaaatttcgttttactcctcgttacccctcttcccttaaatgcgatccttgttcattaaatcctctaatatccttggaaatcgtcctgctgtgggnnnnnnnnnaattgctcatagacaactggagttaaaatccaaatccacctaaaatccagtgtgagagcctgttttaaagctccactttgtgttttcaggggaagggcataacggtccgcactgttctcatttgtattgacgtcaaccaagtatctcagtgaaagtggatttcagacccaccaatcgcttacggaagagatacgacataaacattgaaata

SEQ ID NO: 145162 - DNA, 1422 bp, Homo Sapiens
aatttttcggggcttttttgaagttgaattccccccttataagggggcattcccccgccctggagtgtggatttgggtcccccgaatattccgccccagttcacagtgcgggacgctattacagacccaggacagttcctgaggacagtcctttctgctctgtcacgatgcttgagaatgtgcaccagctcggccaccttatcctgctcccttcagtctcagaaatgtctgtttcacatgagggcatgatacagtggagcttggagcctggtgatggtggtgacagcatctgggctggcgactttattcagcaactggcctacaccttcgggaaatgtggctcctaccagcactaactgagctttgggattgaaggggtcttccaagtcagctgggccttctgctatgtggctcttctctaagatgtagtccaccagttccaggaagctttcatccagcagtgtgtctgcctcatccaacaccaagaaggagagttgctccagactgatcagtcgacttttcagggccttccacagagcccctggagtggccacaagcacatctgctgaaggctgtctggacagctgcagcctgatcctacgcatgccgtggcctccctccaggtcccgcaccagcaggcccaaggagcggcccaagggttgggccacagcccgcacctgttgggccaattctcgggaaggaacaaggaccaggcctcggggcgcggggataggaagggagtccaggcttggctggcccaagagccgttgaagcagcggcaggaggtagctgagagtcttgccactgccggtttctgcggcgcaaacgacatggcggccgcgaagtagtgaggggatggtgctagactgcacggttgtgggctgaacgacttcaggcgcagcctcctgtagtgcgtgcagcacacggggctccaggcccaggtcagcaaagctgcccttagacgagagctttcgcaccgctggcgcctcctgttgcgcgcgctcgatggagaagtggtcccgacgcgcgcgtcgactcttccagccttgagaggctagcggcgcgcgctcccaacggcccagtgtgaggcgcgccggctggttcaactccggccgccgcgccgaaaccagcagcggtccgggtcgaaccagcaccggcctcgggaggttccgccgcctgctctgccgctgttccaactgccgctgtagagccactgggatgcgcaccaccggcaggggttcgtcgggactgcggaccgtgaggccccgtcgcggcgccaggagcaaccgagtcacgagggaaaagagccgcaccggccgcgctagagccatcctcgtgccgaattcgccacccagcctcgctaccttaggaccgtatagtactgccgtcgtttacaagcctgtgttttgacaactagccgtt

SEQ ID NO: 145163 - DNA, 384 bp, Homo Sapiens
ttttccaatttagaaagtttattttgccaaggttaaggacatgcctgcgacacagcctcaggaggtcctgacgacatgtgtctaaggtagtcagggtacagcttggtttcatacagtttagggagacacgagacatcaatcaaaacatgtaacatgtacattggtttggcccagaaaggtgggacaacttgaaacattcttttgagtttctgattagcctttcactgaatgcacaatttacaggaatagtcacgtgccttagtctggcttagtgaaccaatagggcagaggaagcaatcagatatgcatttgtctcacatgagcagagggatgactttgagtattgcctgttctttgtcctcaaggaatttctttgtgggtaaa

SEQ ID NO: 145164 - DNA, 975 bp, Homo Sapiens
cgcggtggcagctgcgggtcgcgggtcgcgggtcgcgagtcgccggtcgccggtcgcggcggagcctgggcgctgaggttgcagatatcaagaaagtcaacaacttcatcagagaacaagacttatatgctttgaaatctgttaagattccagtgagaaaccatgggatcctgatggagacccacaaagaactgaaaccccttctgagcccgtcttccgagaccacagtgaccgtggaactgccagaggcagacagagcaggcgcgggcaccggtgcccaggccggccaactgatgggcttctttaaggggattgaccaggatattgagcgtgcagtgcagtcagaaatctttctacatgaaagttactgcatggacacctcccatcagccactgctcccggcacctccgaagacgcctatggatggtgcagattgtggcattcagtggtggaatgctgttttcatcatgctgctgattggaaagatctaggagagagggagaaattgatgctgccagaacagaggggacagttacagaagcgaagaccttgagaaggagatgatgagacccaggatgcaacacagaaggcttggacttagataagggcatcaaggtccctcgacagttgcctggagggaagattcctggatatcacgtgagaaggtgaggtcggtctcatcagattccatctattttctcaatggaaaatgtgagaggaagtaaccagctgagaagagaaggaagtggtcttggaggtgtgaaaggagaggagatgcagtaaaatagttacgtctcaaagggaggaagccggcatgccaggaagctgcagctgcatctctgggcagtgttgagagccatttacaatttacggtcatgaggaatgaaaacagtccagaattagcccctttactcagtgaagtaaagatgatctttctaataaatggtactgggacaagttgagagccttgaaaaa

SEQ ID NO: 145165 - DNA, 1000 bp, Homo Sapiens
  misc_feature (52)..(52): n is a, c, g, or t
  misc_feature (115)..(115): n is a, c, g, or t
  misc_feature (260)..(340): n is a, c, g, or t
  misc_feature (553)..(573): n is a, c, g, or t
gggttggttttgcacatctatgtggaggttcgtagactgtcgacatcgcacngggcgggacgggagacggggggggtagggcatgtcggcccgagtaggatagacatgcgggcancgaggatatgcagcggcgggcgaatgacgggggcgccgcgttgaatggatgtaattggcaggcgggggcgggagatgtgtcgagaggtgtgagggcgcgcatcccctcactgcgcggccgagcgcaaccccgctgcggtgctatnnnnnnnnnnnnnnnnnnnnnnnnnnnnnnnnnnnnnnnnnnnnnnnnnnnnnnnnnnnnnnnnnnnnnnnnnnnnnnnnncaggggggcgccggtgtaagcggtctggcgcgagcccgggaagtgggggcggaggggggctcctggtgcccccgaatgccgggaacgagcgggctgcgtccgggggcaccgcccggggagggttatttggagctcgttagcagcgacgggcggccggggggcccagagcccccgcggggggcttcccagcggggtcgctgctgccccctcccnnnnnnnnnnnnnnnnnnnnnttctgcttggcgggcatcttctcgcgtttcgccttccactcctccaggaagtctgtggtgctgccgccgaggccgctgctggtccggtagccaccggtcgccatattcccaaaggggccggtcgggctctcacctcaggccgcccaccagggctccggccgctgcctcctcttccttcctgcggccccgaggatgccaggagacgacctccaggagagggacggccgccgctcccacagcagccggcggggctgaggtgaaagacaaaagggggcgggtaagggaagcgtaagatccccgcccgacccaagggtctgcccccgggctgcgccccttggagtcctcgagcgcgcccaccagtcactaccggccagcagccgccgggtccccaccctgcaaagtttctcccacgcacctacagtacccc

SEQ ID NO: 145166 - DNA, 395 bp, Homo Sapiens
tttttttgcatgaaaaacagatgaccgtgttctgtggcagctgctgcatgtgggggcctctttgtcacagcagcttagacttggccctgagcagcacagggcagggttgagatgtgagtccggtgtcttggacctcagactcctatgatgctgcgaggccgctggtggctggactgtggggacccacagcctctcacacattcactcaacagccccatgttgtgcctcccttgctggccatgtctgaggcaagcaaccacggtccccatggccctggtgccctcaccctatggtgccagctcagccatgtgggtgtctccaggatgccatcgccagggagttcacatgaggtcagcctgccagttggggctgcgaaagtcgggctcacatcctgg

SEQ ID NO: 145167 - DNA, 335 bp, Homo Sapiens
cccctcccctcccccgactaaactcgggcgccaaacccagcccttctctaaccaccctacttcctcctctcctttctagcatggtggctgtatggacagtctgacagaacagagactgacatctcccaatctgccggccccccacctggaacactacagtgttctgcattgcaccatgaccctggatgtgcaaactgtagtcgtttttgccgtgattgtagtcctcctgcttgtcaatgtcatactcatgtttttcctgggaacgcgctgaatggagtccagccacctgaggtgtcgcgaactctcgctttgatttcatcccgagagccaccgag

SEQ ID NO: 145168 - DNA, 413 bp, Homo Sapiens
tttctcgttggctctcgggatgaaatcaaagcgagagttcgcgacagctcaggtggctggactccattcagcgcgttcccaggaaaaacatgagtatgacattgacaagcaggaggactacaatcacggcaaaaacgactacagtttgcacatccagggtcatggtgcaatgcagaacactgtagtgttccaggtggggggccggcagattgggagatgtcagtctctgttctgtcagactgtccatacagccaccatgctgtgagtggttctccggcgcctgctcagtctgtccgggcgtgcgtccgtccgcctgcctggctaccggtcagtctcagtctcccctactccctttacttcgctcgttttcctaagcttgctcgctctcttcgctgggctcccggctgccagac

SEQ ID NO: 145169 - DNA, 627 bp, Homo Sapiens
cccatgtggttgatcctttattagacccattttacagattaggaaactgagatgagcagaggtgaagtcagccctgacaggtcacaggagcagcaggtggcagagcccgagttgggctcaagctagtgccaaatgtgccccattggccactgaccctaaagatgtgtgacccagagggtcctgaggagccacgttaacccatggccggtgtcatcctcttccggtttaggactagtggattttgggcactggagccacctctttggcaaacagcttgagggagaaatcaagggctggggccgcctgggtcagcatccccatggagatgacgtctatgtgcggcccgcagaactgggggaggttgtccagggtgatgcccccactggcttccacagccacactcgggaactgggccttcagcacggtggccgtggggtgcagctcctctggcttgaagttgtccagcaggacaaggtcggcaccagcctcagctgcctgcacggcctcctgcaagctgctgcattccacttccaccttcagagcgaagtcagccgcctgtctggccgcccgcaccgccttctccacgccaccggcggccaccacatggttatcctttaccatcaccag

SEQ ID NO: 145170 - DNA, 493 bp, Homo Sapiens
ggctcctcctgggcaggatggggggcaggggctgggccttggggtggtgctggctctgatgattccagagcctgtatccaccttctgggctcctggccagcaccccacccccaggagccagggacaggtggcatgtgttggggtcgggggatggcccccatctcgaagtgttctggaatttgggggcaacccttgcccagcccagccatcaagaacttctgatctcctgcccaccaggaggggacttagccatggacttggccagtaggcctggggagggagggctttggcagccaaagtccactggccctgccgtgcccctgagtaggaaactgtcccctaggggctgggtggccccactgatatatgcaaacccgccggtccgagccctgttcctgcctgtgctcctctgtgcccaggctggctctcccccaaccctagcatgtatactctgccacggacgtcccgtgggccatgattgtgggcggccgca

SEQ ID NO: 145171 - DNA, 460 bp, Homo Sapiens
ttttgtcaatattgggtgatttattgagggaatttacagaccgaagtgggatcttgggtggccacaagacaggtggagctctgcattctcacaccccagatgcaaggcttagataccatagggaaagggtattcgtgctccagcaagacaaccaaaggcagccctccagaacaggcaagaacgctacgtgagtcacagcctacgatttgtggagtaacatcaaggttgacatgttcttacactaggggcagtaaataaagtagaaatcagaaggcattcacaagactggggcgaatcggaagtcaacacaggggagtggcatccaagatggagtcacttttgtctccacaggttcccactgcagacctgccgaggagtcagtccccagcctgcagctcatcagagagaggctgcagcgtcactcataaaccagagatctgagaactggggacactgtcgt

SEQ ID NO: 145172 - DNA, 867 bp, Homo Sapiens
gctctatcgcacgcctaagtctgccattgtctattcacccaggggctctctcccacttccaggtcaaggaaactcaacgcctcatatcgatttgcgcccctctcccattctccacgtcaaccttaccttgtacatattctcgtcttttacgcttttatcgaaccccaatacatctggctcccaaccttgccgactattcacttccacggcaatctaccttcccctctacgaccactcggtcaagtagcttacttatctctctggatatcgatctcgggtacattggagacggaaagggagtgataggcggctatatccgtgaccaccttaaatcgtaagcattactagatcattctcaatgcctagtatagtcctgatattgatgtgatctttcgttctttgtattacacctctttccatagattcatggcccaacacagtatataaaagagtggggaaggaactgcatttgcaaatagttcaaatcattgctccatcttaactacgcagttcacaaagtgtgaagaaatttgatcatctcaataaagataatggggaaaaaaatatgttttgttctgtgactttaaagtcttgcaatattttacataaatgataatgggtgctttaataagaactcttgatacttttgttattgtattcaatatatgcatataatacaacaggatgatattgttttggatttggaatgtattctttcttatgcaatcttatgcagtatatgttgaatatagtactgaattatattgttttttttgagttgttgtatatgacaactctacatatctggtgccggatcagtcattagtactcaggtatatttctcaactaaactgacaggtgatactt

SEQ ID NO: 145173 - DNA, 531 bp, Homo Sapiens
aatttttcaaagctttattctttattaaacaacaacaacaacaatcttagtaattctaaggttcaaaactcagtaagggtcaagtgaaagacactgtctaggggcaagaaagctgaattctgttcctggcactgccaccattggactatctgatctttggcaagtcacttaatctgcacttaatttcctcactcacaaaggaaggacgttcaaccaggccatctttaaagctccttttagaagtggaatgtgatgattccaaaagagcagattgagggcgtagagcaggcagcgcagacacttcacggaatcttctctggccattgtgagccccgtaagggagaagccccatcctttcaccacatcctactcccaagggcaaaacggcagcgatcgtcggcgctgggcccggtgccccacgcccgcctggggatagtcggggacgcacggcgggggctcatctgggcagggaacttcttcgcggagagccggagggctgcattggcttcagctggagacgcttctttctct

SEQ ID NO: 145174 - DNA, 226 bp, Homo Sapiens
aaccgattccgtttattgcccccagcggcgggggagctccccgttgcagacacccagcggctcggccactgcagcgtcctggcccagtatgggccgcacacgagtaggagtcgttgggggcttcctgcaccttctcagtgagcccggttgggcctggattcggctccctcctgggcccaacgggaggagatcaagggagttcaggttcacagtctaaatatcttaa

SEQ ID NO: 145175 - DNA, 553 bp, Homo Sapiens
tttttaattgtaaaaagttgataagcattttttatttattaagatggtatacccactgcctccctactccctgtctcccaaacacacacacgttacaaagcctagaatcacattcatcagaatgtcaaccatggtgattctcctaacctgaggaggcccaccaagctctgagtttcttcgtggtaggaggtatgagctgcaatagcttggagctttggaggggatacactgacatgctccagaccattgaacccctgacagcttacctatatggcatatctctgaatctttgtaacgtttctctcccaccacctgcagtgtttgtgatttagtaagtcattcagaatagtctatatttctcacttatcaggcccatgaacatactgtcatcaatccagtggacgaatgtaatgtattccagagtttccagaaaggctatattgtaacacggagcaggattcacattgccctggagcaagaccgtaaggatatactgttgtccaatccttgagaatgtgaattgcttctcaacctacatcctgctgaatccttt

SEQ ID NO: 145176 - DNA, 564 bp, Homo Sapiens
ttttcattatgtaagtttttactgaaactaatcaagaccaaagaacaaaaacccgacaagataattgcaaattttgatgagtgctttttaaggatgcaaagtagggctaaagaatgaggtaacatgcgaggcctctgtcaataggtggtgtttaagctgagacccaagtgatctgaaggtagccatgtgaggaggggaaggagcctgtcctcttaaccggaaagtaatttccagctgccttcagtgatttgctttatccgctgctcctgtcactaggaagtcagctccatgaggactgggtcttttttctttctcatccactgctatattcccagcacctatcaggtgcctggcacataggagatgcacagtaaaagatttctgggtaagtggggccggggaaaggccaggaaaatgagtaaaggggagagtggcaccaagtgaggtgagacaggattcccatcactggaggccctgccggccatctggaggtttgagttttattctgaatgctacgaagttcagaagtgtatttttccggatatgttcaatttgagatgtttg

SEQ ID NO: 145177 - DNA, 1241 bp, Homo Sapiens
  misc_feature (549)..(560): n is a, c, g, or t
  misc_feature (1177)..(1177): n is a, c, g, or t
cctcttgcataccttctataccatattcaacccacaggagtttggaagaaccgattgctaacttatgctacattcatgtcagaagaggtgggaaaattcttacaacaggagccatactcataggaaatcaagttgctataaataaaactaactagcaataaatggataagtgatttattggggggaccctgattaaaataatttgggtttggaaccttaaccttgcaacactgctaaggttaactcctatgaatgttgtaaatgaaacacgtccagggttggggactgagggatcagagatgttacatgagccatccatttcttcacagtgtctcagagatctgaactcttttccacacttaaagttaggtcatgatactggatctaattgacagcagaggtcctctgtctggtgtgagacacccctttctctattagtgcttcttttcttttggctactcgtgtggtaggtagaaaccaagtttgtgatgttcaggagatgtacacacctctaagccactagtaatcaagtgttttaaaaagtagttnnnnnnnnnnnngggaaagctcaaattaacataatcaaaatgtttttaaaataaatctatgtaatgagaggtgaccagcaagcctgtatctatgccagagtgtggtagaagagaagaaggcactctcactgaattttataagtatactgaagtcacctaacctcttagtagacatggctcttgccaaagaataccacggaaagagctcttctcttccatgacatcctcaccatatcctgttcttaggtcactgccaaccaataaagcaaagctcccagcaagttgacaaaaagaagggggaggtctgggggaaaaggggaggagacgaaggacaagagcagaacaacaggaaccccttctaatttgccccaagacaaagagactttccaaatcactgcagttgtcacaattacacacctggaggaatcaatgcacagtaatggagggcacacgacacaggaaggaacttggcattctacattactgagacataagcatattaacttgcttgacgtttgtttatttattttaaattcagcccactgcctttggggcctgtccagaaccactccaatttcctttatgggtgagtatcttacatctgtggagtgactggaccacacacacanacatgtgcgtcccccttgctcaggatgtctgggtgtatgtacgaaggcactaaagcggttttag

SEQ ID NO: 145178 - DNA, 717 bp, Homo Sapiens
aaagaaatagacattttactgttattttgaaagggcatcttttgatttttttgttgttgttgttcacttttggcatatgtatataagtaatattgacggtgatatgaaaacttttgttatgtgaagatatttaagtcagaaaattgttaaataatattacttcttttccaaactgctttgtgtattgtatatttttttaagaaaaagaaaagccttatttgacttatgcttgtgatactggacttcttaccaatccggaggtttccttccttgaatgtcagtgtgtaaacctggctgtagccgcatatgcagaataactgtaattgtgctagagttttaaaggttctgcttttaatgcactttttattttataattttgtattgaaatattttagaaatgttgattaattttggtgaaaaaatatccccaaagtggaaattattggaattttaaacttttgttcttgctgggttatttattttgattttagcattaaatgtcatcctcaggatatctctaaaaggggttgtttaattcctaattgtatagaaagctagtttggtgaattgtattggttaattgactgtttaaggccttaacaggtgaatctagagcctacttttattttggttaaagaaaaagaaaatatcaataattcaattttgtgtcttttctcaatttattagcaaacacaagacattttatgtattatttcg

SEQ ID NO: 145179 - DNA, 415 bp, Homo Sapiens
tttttttcccagttgtgacttggcgtttacttgaagagggagctagcagaatgtagtgcatagacattttcacagcacagaggtaaggcatcgctcagaaggcttccttggcactattaaatttctttggtggcagcctcggctgggaaggcaaggcacagaagttgcattcagggttctgaggaccaggaggtggtgtctgcgcacttacagggatagaacggctcaggaatctcgctgaagaagaagaaagcccggtgtaggagggtcggaggatggtggtgtgctcctctgtcttggcgctgtgggggcctggggggctgttcaggttgcccccgttgctgttgctgcttctgttgtactgattattgttgagctcagggtaatttctggtagttggctgggagctgccatt

SEQ ID NO: 145180 - DNA, 649 bp, Homo Sapiens
  misc_feature (545)..(545): n is a, c, g, or t
  misc_feature (551)..(551): n is a, c, g, or t
tttttttactgaaagtgtaatataatgaacaaaccattaggatacactctgtcatcaataagatctaagcattattcacattccttgtctacttaatctacaccacagcctgtgagatgggaattcctgacggttcttcacctgagaggtggtatttcaagatcacttagccagatggagtgagagcaaactaaatgtaatgtcagccttcttccctcccagctcagggcagccatgacacctgactcccatgtggacaggccagtcccccttcatctggaagccaccttggccggctgctgcgggactttggatctgggagagagaccttaatatccctaaagaagaatgtgggatgtgattcatcctacatttcacccctggggaggaagggcgtggttgcctgtgaggaggactcactgttgcttgtctctgggattgcagaggccctttgccaagaggcctctttctctgattcctgggtgactgggcagatgactatgggagttccgttttgctcattataggacagatactcaatgtanggcctnaataagccttcaaaccgacatgtcaaggtataaataagggactggtcatttatgttgaagaacgatatggtcccacactcatagtccatgaatactcc

SEQ ID NO: 145181 - DNA, 493 bp, Homo Sapiens
tttttacttttaaatatttgtttaataccccattggatcctagggcttttacttttcatcttatctgagagtgggtctcatttcctccaaatttagaactgaatttctattgtgtccactttggcagattccctctcttctctaggtgattcaagacatgagtgaatgcatggggtttttccttcttccatcattacatagtgatacccttggtctatctatgcttctgccatcagtagcagacttcgttctggggggagctgcagtcaggtgatatttcttcagtctttacttgccttgacttggtatgctgaccaggatccatgctcgatgaggtatgatttaggttgtctatccaagggcatgattcatgcaaacttcccatagtgtctgacttgctttggggccagcaactccataatctttgggccatcctcatccaacctgttctggtagcttcgactttgggggctgcagctatagccggcatcca

SEQ ID NO: 145182 - DNA, 556 bp, Homo Sapiens
ttttttcaaaataactatttcattattccatgggtcccgtgggtcctgaattcagacagagcaaagcagagtggtttgtcactacaccacaatgtccaatgcctcagctaggaaaaatcaaacacagggaaccatctagaagcctcttcactcaatctggtagttgctgctggcaatcagctgggccctcagttgaggctgtcaacctcagcacctccatgtggcctcttcatacagtctgggcttcctcctagcatggcggcctcaggacagtaggacttacatgtcagctcaggcttccaaaggcaagtgtccccaaacacaaagcaaaagctgcactgctttttctgacctagtctcacaagttgtgcagcatcattctcacctctatatactggtttccaatgagtcacaagcctgtccagcatgaaagagagaggacatagactgacttctcagtaggaggaatatcaaggccacgttgtaaatgagtgcctgaaacaggggatattgttgtagccatctttgaaaaatagaagctattgccatagctggt

SEQ ID NO: 145183 - DNA, 453 bp, Homo Sapiens
  misc_feature (280)..(334): n is a, c, g, or t
cagcctggaatgttttaacaagttaaatgttcaacacatttgaagtaaaaaataacatttcagaacattaaaaactcataaacttataaaaatacaagtgttaagcatacattgccattctaatataaatcagggaaaaaagtgaaacattttaaaagaaaccatataaaaatgaggaaaatttaaataatcaccaaaaaattgagaattctgatttcttcaaaagcataattttgcataaaaattgcattactagtatcacaactgagctgtgagcatnnnnnnnnnnnnnnnnnnnnnnnnnnnnnnnnnnnnnnnnnnnnnnnnnnnnnnnggttcacagcaacactgagcagatttcccatattcccccaccctgccaccaccagagggtacctctgttataactgatgatcctacactaacacatcattatcacccagagtccatagt

SEQ ID NO: 145184 - DNA, 557 bp, Homo Sapiens
  misc_feature (543)..(543): n is a, c, g, or t
ccttgtgcaagtgatttattaagggagttctcctgggagaacccttaaggagagggaagcagaataggccagtgggaaaagccaagcaaagatgcaggctcagctgaagtccacgtggaggccgaacaaaccctcagagtcggcccacctgaggcaagttgtgtctggccttctgtgccccctgctatcagtcaaccacagctggaagccatccccagacaaaggacatgaccttccaggcatttccaaagcagcacccgttacccaagacgattcaaagggaagggcgcagctgtaggccgggtgagccatcaggtaaaagggcgctgggggcaccggcactgtcacttatcatccgcccctcacacctgcgcttcacaggcagttcactccattaagcacagcgtgttctggattctggttgatcacaatttccaaaatgcatgtctcagggatgctgtccaaccacagagtggagtctgcacagagatcttcacaatccctgagctggtggagagtaacaccttctggcttttgtgccanccttgggttcaagt

SEQ ID NO: 145185 - DNA, 568 bp, Homo Sapiens
ttttttttccttttccctccccgccaacatgttgaatggctgttaggagactgggttgaagaataagggacctccgaagccttcctctgttagtttagccacatgcagggttttgtattctttgccccgggaagggttaaaagaggccatcatggtgatgggggaaaaatagatgatttaccttccagtcttggctgatgttcaattaaaggtagcccttttgatgctgcacagggccctctgtgtgttgcaaggggcaagttattaggaatgaaatcgatgcagggcaagcgagcctcaaaattggggtttagcctgggagagttcttggctttgcccagaaaaaaattcaaggaggagccggtagtgctaggcagcaacttttgaggcagcagggcacacacagcagcagcagaggtcctggtccttgcagagcagggctaccccataggcagtgggcccagagtagcagctcagaggcagggctgcagtcatacttatttttaattatatacaaattaaggggaggattatgcaaagatgtctagaaatagggtggtaacttctg

SEQ ID NO: 145186 - DNA, 1100 bp, Homo Sapiens
  misc_feature (287)..(287): n is a, c, g, or t
cgggcagactagcagcggcgggggaaggggttccacgaaaaaggggtggcgccaggggttatttgtgggagggtggaaggggcgggggaataggccccggtgcccccccatttacattccgccaccgggaaaaaccccggaattggggtttccccccaaaggggagagcccaaaatgggcccccagttccccgccaggaggcccttttccactatttcccccccgctggggatggagggcctgtgctttcctccccaggggtgtggaggaagttggttgggggattnctgggggtgaaacctacggggaatgcaggttccctgtccatcggcagatgtaggagggctgacccgtatcatggcttacggatcccttttttcccttgccccctgccaggttggtgggggaaattccgccagaatacgaccgttgattttcagaatctgaagaatatgaggctgcatggcgagattcctgttcattctttgaagcaacaaatcttggcagaggaaggtcctttactgtatttatactttccactcttaaagggaaaccagactgggcaacagctacaagtttcaaagcaatgtagaactgacttcttccaaaataaccaagtcttgttgcaccacaaagctccatgatctgtaggaccacgtcgttcggcagctgcgcggcccggaacagctccagcacccgcccgttgaccaccaccttcttggtgctctcaatgtcgcagtaggagaagagatctgaatagtatttctgctccgcatcgctcagcgttaagccttccatcttcgcctccggctcacggccgccccgccccgcatgcactactcggggcccggccccaggaacctgggccggcaggggctgcgcgtggcccggcctcctgctagcttcccgaaaacgccggccccggcctcacacgcgccaggtgcgcccgagcaacagggcccggaggtcgcgaggagggggcccggctgcgctcgccgcgccgctgcctgcgaggcccggcgcgcggctgcggctgcggctgcgactacggctccggctccggctccggctccggcatcccgggaattccggaccggtcc

SEQ ID NO: 145187 - DNA, 459 bp, Homo Sapiens
gttttgagaaggagtttgctcactactgcaacttttgtaagaaggtgataacttcaggtgggataacattttgtgaccagctatggcataaagagtgttttctgtgtagtggctgtaggaaagatctctgtgaagaacagttcatgtccagagacgactatccattctgcatggactgctacaaccatctttatgccaacaagtgtgtagcctgttccaaacccattagtggtctcacaggtgccaagtttatctgctttcaagacagccagtggcatagcgaatgctttaactgcgggaaatgctctgtctccttggtgggtaaaggcttcctgacccagaacaaggaaatcttctgccaaaaatgtggctccggaatggacactgacatctaggagacagtccttgcccacctaaaatccattttgccttcgttgtcactaaagccagaactcaaaa

SEQ ID NO: 145188 - DNA, 737 bp, Homo Sapiens
taccagaaagagtgtaagggaaagagaattaaccgaggatacaatttcataagggtataaaaaattaggttggttccaaattccagaataaatttaataactcttcgttatttcatatgtatctggaaatgggacagatacgtgtcctgatcctgtcacaagaggtagaattccagcatttggtacgacgttccaagacagggtcaaagtgacattcctgtttcccttgagaccatttccatcgtcaaagaaaaaatattttgttttcatatctttcagcagcagcttcggattatcacctctcaaaacaatcttgtcccataggacaacttggttcagagcattattttttgttgaatattctgctgataaataaagaaacaactgcttaacattccaatcaaatatattctctagatcagcagttatatcaaatgtgataaatcccagatcacttctttctctaggtccagtgaaatcttctacattttttagcatgatccgcgagacgtgcagccgcaccgggacgctcctgtctttgaaggcggtggtgatgaagcagccgaaggtgagcgccgccatcacgctcagcgagaaggcgaacagtgagttcgcccgcgacagcaccgtgttcatcgcgatcgtctcccacgagtccggactccacacgcacacccaggctcccgttccggcggcggaccggctccctgcgatccgcgccgtctgcggtgcgcccc

SEQ ID NO: 145189 - DNA, 964 bp, Homo Sapiens
  misc_feature (236)..(236): n is a, c, g, or t
  misc_feature (285)..(285): n is a, c, g, or t
aacgtaggctagtacgaggcttggtgttaattcggccgagggtgttacgaaactctcagtttgtgtttctgagaaaggaagagaggatggtgatgcaccggttacaaaagatgagaccacctgcatttcacaagacacaagagctttatcggagaaatccctgcaaagatcagcaaaggtggtttacatcttggagaaaaaacattctcgagcagcaaccggcttcctcaaagccnttcttttttgggtgctgataagaacatggcgaaactgtttaggaaatancgcccctgttttctccctcagaccaccgagtgcctagaatttatgtgcctctcaaggactgtccccaggactttgtggcacggcctaaagattatgccaacacactgttcatctgccgcattgtggactggaaggaggactgcaattttgccctggggcagctggctaagagtcttgggcaggctggtgaaattgagcctgaaacagaaggaatactaacagagtatggcgtggatttctctgatttctcttcagaagttctagaatgtcttcctcaaggcctgccatggacaattccaccagaggagttcagcaagagaagggatttaagaaaagactgtatcttcaccattgacccatcaaccgcccgagacctcgatgatgccctctcctgcaagccactcgctgacggcaacttcagagtgggagttcacattgctgacgtgagttactttgttccggagggatctgatctggataaagtggctgccgaagagggctacaaagcgtctacttggttcaaaggtgggtccccatgcttcccaggctgtgtgtgaagagctgtgcaggcttaacccaatgttcgaaaagctgacctttctgtgatttgggcactggcccagagggcaaaaacttgaaaagggttgggcggaccataatccgtcctgggcaaactttt

SEQ ID NO: 145190 - DNA, 812 bp, Homo Sapiens
ccatctgaagtattcctctttaattccttctgttacaagaatattgccaccattaggtttcagatcatgactcttaatttcacctagaatttctttgtcaacggagaagtacatttccaaatcacattcctcaatattgttttccttaacccagatgagagaattgtaaaattctggatcaatagattctaaatccttgagtccaactggtttgttcaagatacgcttatagaatggtaaagaaaaacccgtgtctatgaatttcccatggaacagagccatggcaataaatctgccaataaaacgaaaatatttcaggtgatctggattgatgtaagaagcggggtttatctgcaagcagtagttatccttccctgcatattcaaacaggcaatacattgggttcaacacttcatgtgacaaaagaaagaaccattctcttgctacacctccataatctaaaccttcttctcctggaaaaatcacccacaaacgtcttcgcagatcttggggactgaagctcattatctgttgaaaggaatcctcaaacaatgtttttcttgtcactgtaatctttatgtgctgtggcatggccagttgctgaaatagaagaatgacttaagtcaactctcatcattaaaatagcctatcaaaaaaatcaaaaggggaaagttttatttacttttatctttccttacagaaacaagtagactatgaatataaatttatattcaataatgtttaccaatgcatctgtgagtacccggccgtaatggccgaattcccgggcatatgtccggtaccgtcgactg

SEQ ID NO: 145191 - DNA, 793 bp, Homo Sapiens
  misc_feature (136)..(145): n is a, c, g, or t
  misc_feature (663)..(663): n is a, c, g, or t
  misc_feature (686)..(686): n is a, c, g, or t
  misc_feature (693)..(693): n is a, c, g, or t
  misc_feature (713)..(713): n is a, c, g, or t
  misc_feature (719)..(719): n is a, c, g, or t
aagttaaggtttcagatgttttacttcatttttcttttattacagatgatgagtacatttggaaaaacaactggttgcatttagctatataactgtattatatctatgagcttctggtgaatgattatcttagggnnnnnnnnnngtatttatgttattcccagcactcccagacacatatcaaatattgaattagtgaatgcatgaatggaaaatggataattacagattgatgttccaaatacctttttccaaaaaaacaagtcatcacatacctataggattaaatagatttcccttaatattttcaaaggtctctctgcacttacgtccattgtttttaaaacatgaaggaaattaaaacacatggctttcttaatcagtcaacctagaattttttgtctgtaacttagactgacaaatactatctattgtagcaggggtaatgactagcaactccctaaagcaatgttggttgcagagatcaacactgataatcatgattttaggataaccagtttatctacagctaccctttgtggtcctgggatgaatggtgggttatatatcagcatatgtaacacatatacccatgtccctgcataagggagaatgatcacctctctaacatgcatcacacattttcctcaacactgaccctanatgtttgtcagtgagaattttangattcanactcaacacatttatgttantgtgangcagtagaaaacagagtcttacactccccaagcatgtataaggcagctttggtttttaagtgtcatcatataaa

SEQ ID NO: 145192 - DNA, 361 bp, Homo Sapiens
ttttttccttctatggctctggatatattttatttcgtaagtgatacagacttgttgaatataaatagaatgtcaggattgtctaaaatgaagcgctccccaggacctacgagtgttcagatgaccctaccacagactgagcaaaatgtcaccatgaagagtttgggacctgcccaatgtctggccaagtgcttaattgaattgggggtagatgaagatagaatgcttgcccccagaattttacatatagggagtcaagcagttggctctccaaacaacgaaggcagctgggcagagctcctggcaaatgcacaactttgagtaatgccacttgttaagttaaaagagtgcctgcatcacc

SEQ ID NO: 145193 - DNA, 537 bp, Homo Sapiens
aagcacgggatcctgtcttcactcctacacactgaacatatccattcggatgctattgaaattaccatctaggccagaagcaggcttagccttcacttccaaagaattatctaagtcttctagcttctggctcagctcactgtcagactcatctgaacaactttctgtgggtagtgaggtttgaacccctgaggtgctgcacaaacttgaggtaaccgttgaaggcaaggaaagggaaggaggagaagaagggggagaagcagctctcctggcagacgcttggaaaaggatattaggccaggacttcatggagaagcaagaaagatgaggataggtgttattagaagaagctgcagactgcgaggtagatgtggtgttaggattaggggagcagactgagtgaggtaataatctaacatgctctttggcatttctcattgcttgtttgattgttttctctttgtgcaagcttgactggaggtgttggctaagtgcttcattcccactgatagccacatcacaggcaagacactgata

SEQ ID NO: 145194 - DNA, 295 bp, Homo Sapiens
tttatctgtatatatttaatagatttataaagaacatgtgtatacatatatcaatatagatgtaccagcaaggaagatttagaacatataactatgtggcagggttagaaagaacataattctttcccagaaggggtgcggggaactatacttaatcagctaccagttacaacataacttaagtcatttctcatcaaaatatgtctctactgcatattctggttgataaattttccagttttttgtttatgaagattatccaattcatttctttgtagataaagcctaagaatag

SEQ ID NO: 145195 - DNA, 460 bp, Homo Sapiens
cccaactttatttaacaaagttttgtaagcatacctaagtagtaacttgatatgctgaaaaatctgacctgtcacttcgtttcactctgaccagtaattgcagattgtcgtcaccatcctagcctatgactacattaggattttatgacttattaacttgaaaatctgttctgtaagtggcattggtagaatctcccactttgctcctcactgtccaattgtgtaaagattaaggtacatactattgttggtgatgcttttacacctcaacttgctattttaaaaggttatatgaacccctcccacttttaaggatattcccttttactgattttcctagctaaaattatatagccatctttctaaatattgtatttaaatctgatctaggacttgccttattttatcatttttctttaataatctccaataaactttctttattcattaaaaataaaaa

SEQ ID NO: 145196 - DNA, 328 bp, Homo Sapiens
tttaaagcttacatcttttcaggaactgtttatttttgaacatgtgacattggaacacaattttgtaattggtttggttgactgaagaagtgacttcttgaattggggtagaaaagccaaggtctgtaaattgaagatagactaagtaatggtgactctcctctccttccaaaatactgcagacattgtgatatattgctgagtccaacacctagaaggtgcaacttttctgcagaagcactgcccaaaggagaataatgacatatcttttcattcatcatctagatgatgtgactcttctcttctgtctgggccctagaatttggac

SEQ ID NO: 145197 - DNA, 331 bp, Homo Sapiens
tttcgtgtgaataaacgattttcctttatgtggaatggttcaaagaacgtgggcgtgtgcacacaagtgccctgttccggaggctggtgggtgggggttctagcaggctcctctcctgcgcagggggtctggggctgcggcctcactgactgccttggctcctcctctgtgcgctggtcctctgctgctctttatggaaaatgtttcctgaagatcttccaatattttgaaggatttggtccagaatggatagattttcatactgagtgttctttgaattcttttctttactggaaacactcttctcactgccaggagacacctgtggccc

SEQ ID NO: 145198 - DNA, 367 bp, Homo Sapiens
acactttaagttctggaggggtacatgtgcagaacgtgcaggtttgttacataggtatacgtgtgccatggtggtttgctgaacctctggttacatctttacagctgattccttttacaaaaaatatagtggaagaactggttaaaagacacctctaggaagcaaaagacaactccgaaatgctgtacattcttttaagagcaattgactccaacaattcaattgcaaggataaaaaaggaggtgagaggaagaggagactgctctagattagacacttgagagagacaacaaattaactttcaaaagatatttttgagacaagtgggatcatactatatggactgggtatcaaggaatcattgttc

SEQ ID NO: 145199 - DNA, 424 bp, Homo Sapiens
cacgaactcggtgatgcccccgtactggccgctggcgaacttctcttccatctgcagcagacacatgccctgtccgggctgctgcgggaaggcgcgaccgccccggcccccgctgcgcggcccttccgccacctcctcctccgcggtggcaacgccccccaagggctgcagaaagggggcggtgaggccccggtgcttctcctgcaggaactcgcccaggatgcggtagccctgctgtagctcgtaggtcagctcctgctccttgcagcaaccgcctccgatcaccatcgcctccatctcttcctcctgatcgtccgcgtcctccagcgaggaggcactccttccgtgggccggccctgaggtctgggccgccgctgccacctcctcctcgtcgtcctctccttcggccgccggtggcggccgc

SEQ ID NO: 145200 - DNA, 503 bp, Homo Sapiens
tttttgcagaaaagccataaaaatttattggaagacaattccaaatgacataattagatggaatataatatactgtttccttggatgggaagactcagtattgtaaagatgtcagttattcccaaaccgatctgtaggttcagtgtaattccaacaaaatcctagcagaatttgttgtgcaactttaccgatggattctaaattttttatagatgggcagcagaccaagaataaccacaacaaatcttaagataaagagtatctattcaccaaaagataccttaagataaagagtatctattcaccaaaagatacctggcaggcctcagcaatatcctattagccattctgagtctgtatctttgttttataagagatgtataatatcatcttgcctgccccacagggtggcaggcaggaatagatttttggaacagttgaaagaaattcaattcttcacatcattcaagagaaaaattacctttttagcttaatagtgaaga

SEQ ID NO: 145201 - DNA, 431 bp, Homo Sapiens
tttcctaggggctgtgtgaggtttttttccagctttattttgaacaatgtttttgttagaaggtacttcattcccagagggttcattaattgagggcgttgcactttgaagaaatcgctgtctaacttgggtctggaaatcacactgtgcgcttttcagatgtgcaaggggccttggaagtcgttactaaggagaccaatggtgggttcctttctggttagccggtgggagggcctcaggaattgcttggaagctgctgctgggaaaaagagtgttgggggttttcagcagatgtgtggccccaactccagcatggctttgtcctgatctgtcctgctgcatgagtgaagctgctcatcagttcttccgtgcaccaagcccaacctgctgtcctgggacttgtaaaccctggtcacctggcctagatctgc

SEQ ID NO: 145202 - DNA, 169 bp, Homo Sapiens
tttttggttctctctcgttttttagggagggaagaaagtaccaagttgcattgagctgtaattaaggaacattataatttatgacacatttctatacttgcaaaaattatatcattttatggatataagagaaaaatgcctttttataaaatttcaatttctgagaaaa

SEQ ID NO: 145203 - DNA, 819 bp, Homo Sapiens
  misc_feature (66)..(108): n is a, c, g, or t
  misc_feature (358)..(384): n is a, c, g, or t
tgtctctcagtaggttattagttcttcaaatcaagtcaaggactcctgccacacaccctcccctannnnnnnnnnnnnnnnnnnnnnnnnnnnnnnnnnnnnnnnnnnaataacacagacctgagcaaagtcagcattagatattgttagtgcaaaatggatatgttttaccctctagggaaataaatgaagactatctctgaactatgaatgagcaaaaggggactgcttccctctgtttggatatgatgaggagttattaagtttcgcagattgtaatatatgaattaagtatacatttaggatttataaaatccaaaaataggattttaaaagttattattgctatgcataggcnnnnnnnnnnnnnnnnnnnnnnnnnnnccagagctaagacaaaggacaagttgatcacctgatcggacagtgagaagtgctgtcaaaatcaggatgagaaccctgaaccagtagccctcatcttcatttgcaaggttataatgtttttccaccaaaaatttttcatagtctttcaatcaatatttaaggtccatgttgcctaaaccttggggattatgaaaatagccactaagtcccatgtttatgatgccatcttatttaatgggaggattgaagagatctgcatgtatttttggtttggcaaatcttagaattattttttcaacatttgggtttggataaaaccaaaacttattttgccaagcactttggccttaattttcaaacccatgtgtattttaaaagaaatttgatctatgtgtttctgactcatttacacttaactcatgagaatgctgtttg

SEQ ID NO: 145204 - DNA, 424 bp, Homo Sapiens
cttcccccaacaggcaggaggcccagtgtccctcctgggttacatgtggcacaggagccagttcgctcatggctgttcagggagttccccacagtcccctgttccctgttcatggcctcttcttgtgagagtgagtcctgtcgcagagtcaggcagattttgttggtagaaagggagattggctcacggggctcccgaagcacctgactccagttcctagggcgggtgcaggagggactcggagtcaccctcagcaagtgttagggagctccgtgcatgaaggcttagctgccaggaagtaaaactctatgctaacagatctggggcggggacactgctccccactgagctccgaatcaggggagatttgtggtgggggcagcctctctctgttgtgatgataatttgtgtttttcttctcttt

SEQ ID NO: 145205 - DNA, 365 bp, Homo Sapiens
tttaattttctgcattgacttttatagacacgtacagacatttatagaaccatggttggttatcaggtaatctatggcttcagtcatggtttagaaagaaacctgaaactgtccagtgtagatcttcatccaatgacagacaggcatcacataactcacattaacttgagtctaccatcattcagaaatatcatggaaggtaaatcactctgacagttgacttggtagaaaccctgcttattcctcacacagggtgtgtccttgaggagcataatatgattgggcagatctggccacctttcaaaaaggacccaacacaaaaagtgatttgagcaataaaggaaatatactgactcgtttaactc

SEQ ID NO: 145206 - DNA, 591 bp, Homo Sapiens
taatttgtggagaaatgatagatattttaataatcaaatattggaaagaatttttggggtgtgggaggaattcttgacaccaccatttagccctgtctcccttggatctgcatctgcatatgacactcagaataaccagtgaaaacagagcgtctagcattaagcaggttgccaaaagtttgtgattatttcccccctctgcaacttaattggttttttgtgttggtgttatgggtagaaagccttgggggctttatggtaaaatgtattccaatagctgaaagtggactctgttgtgagtatcctaaaaaagggaaagtgtctgacaaaaggataaattagtctagaactaacaaagcaaggtcaatgcaaaagccagggcatgtgtctgtagctgaaagaggaggaaagagccaatggtcctgagctgattactgcccagttcactgcacttgactacacaagcctgggagctgcaggagagccagctgcctttctaattaggacacttgggacacaacaacttttttggtcataaaagtggttgtatagatttaatctttgaaacagtctttaaaaacaaacagagat

SEQ ID NO: 145207 - DNA, 222 bp, Homo Sapiens
tttttacaggtgcaaccacacattttattttttctatatgttttcgatccacaattggttgaacccacagatgcagaacccacagacatagagggccgatttgtatagagaggaaggcaaccagacctaagtggttaagacaccaacttaatttaaagcaaagatcaaatggtataattcagatgtttctgtagatagtaaacatccagtcagataatacta

SEQ ID NO: 145208 - DNA, 472 bp, Homo Sapiens
tttttttttggcggtcaacgcgctttattccgaggggcttcagatacagatgaccccagccctgcatccgcccggaaggcgtccccttactcccatggggcacctcgataccagctgccctgccctgactcacttctcagcacccatcttacggcagtcggccctggcctcagacccttgggttcagatcccaggccctcctcctactcactgtgagaccctaggcgagtcccttagctcgggagcctaattccgcttcattaacatgggggtaatttaactacctagctagacggttgcaaagggatcagttcactaattctcaatgttggcagtgcatcacattgcaaactccctgcctctgctccagagctgatcagaatcaataagggtggggcctgaaaatactacatccaaatttccgagaagcacagtgtctagcatacccctatctctccatctggggttactg

SEQ ID NO: 145209 - DNA, 489 bp, Homo Sapiens
ccattcataggagcacaaataacgtggctatataaagaagtacagaaatgacctgataatcaggctcagtgtacacagctgcgagaagagcaagcggtttcagaagcttagagctgtaatggaagtgaaatcagcatggtcaaatgcagttctcattactttggagccttttaaatatttttgttcaatattttcattaatatgctctagatgctatataaatttgattactatatatttgctttggcttctttttattgctattgggttttgttaaaagttaccatcaagctacaggtatcaacaccttccttagtattccatttcatcacttgcttgcattttttctgacttgtttctgggaaagtcatttcgtcttagcttgcggttatttaattattttgtgtgtgagacttaggaggttggcatagaacttggttggctagctttagttatgtaactaaaccatgcctcattaaggctctgtta

SEQ ID NO: 145210 - DNA, 590 bp, Homo Sapiens
ttttgttatattatggctatagtatttgcaaaaattaataggtgttagaatgtgcagaaatggaaactattgtgtaatgaagtacatgcataaattgttcaaagtgatttgatcaatttggcagaataataaattttcaaatgatcctgcactaagaaccagcaaatttgctagtgtacatacaccccagattccattcacccagaagtgcccatcaccagcactggagccaagtaagtccactctggtgtttgatgtctcagccagcattagaaggaagacatctgatcgtccatcaacccaagggcaggggtaaagtgacccaaggacttcaatgagactaaaaaggaaagcaaaggggtgtttcttgaagcagattagtgttggaacattaataagaattatagaaacaattttaatacacaaatagaattatccaaaacatctgaattcttaaaattttataatagattctagcagcacttttaatattttgtttgacacactaaaattctttataatggtatttaattacataataactaacattcctgttttcatattaaattactggttgaactttgaaaaaa

SEQ ID NO: 145211 - DNA, 500 bp, Homo Sapiens
accctctcggtgtatagaggtcagtgcagccccctgccgccgccctgttttctcgagactgtacactaacccctgccgccaccaccctggatcctcagcacagggactgtcgtgctctccttgttccctttccaggtgtctctgtagccttcaggactgtcgctgctgcagccatcctgggctaagagcttttgctggcctcgggttctactgagcaagagtcccccaggcccagcgggctcagtgcagcaggcggggtgggacggtgccgccaagagagggcagcctggggctgggggcatggacagaaactgaaggaaaggcagcctgtgggagctgcgcttttaaaataagcggcatggggggccggtggggggcgctgtgacgggggagcaggtctcttctgtagggactgggttttgattaagtcagtagcaggattaagtcattgggtcatcagaaaatctcatggataaagttcaaggggtttgtgaatttaa

SEQ ID NO: 145212 - DNA, 564 bp, Homo Sapiens
atgtacttttcactatgcttaaaaaacactgtatttttgtgtgaccaaaatagtaaatcagtgaaagaaggttatgttctccattcttcaaaactgagaagtttattagtatttagcaaatctagactcactggttaaagtatgccttggtttaactattagtttattatatcaatactgagtttaagatcacagatttgagttgatagtgttaggtagctattacagtattaaaaagatagtgttttgcaattatgtattatctgagtgcccattttggcagtgggtttctagttgtgttttgctgagacccagggctgctgtacagattaagggtaggactaagggacatttcagcaagctgggctctaacccttttctccttctcaccctcacccaatatctgcatttatttattctgcacaggaaacctttcctctttgaaaaaaagtttatattatatttaaaagtttggagacagttccatgcttagcagttgttctagtgaatctaaacctaaatgttgatgttcttcctttataccattgtagggatctggttaaa

SEQ ID NO: 145213 - DNA, 489 bp, Homo Sapiens
gtggctcacgcctatctatctcattttaatgggaacagccccttagttctcggcaaagcggcccatactgaggcacaccatgagggcagtagctcatctcagctttggtgcaggcaggaagtcaggaaggatggcacaggcctggcaggctgcctggtaaactgtgcaccttcagcctccagcaggaaagccacccgtctgcaggctccctgccttccctacatctctgttcctcagtaggatccttgggtgtgctcatctcatccctccatttggtcaaggtttgcccatcaatgtgcaggacccaggcaagttcacggcctgtcctggagaaggggggaagcaatgacatcagcggcagtcccctcgctccttgccagtgacgctggggtcttaccagtggtgtttgcgagtggtgactccgaacctggcagtgcactcatagcagtaggagccgtcacaccacggaggctccttggacagcatatc

SEQ ID NO: 145214 - DNA, 466 bp, Homo Sapiens
ttttttcatacagatttgccaattctattttattttttaaagttaatatacaattctatatggaaaattccaaaataatgtaaaaacaaattataacagaaactttagcaaacgaatgaatacagatatatttaataattgtatcattatataccagtaactgttgatagaaaatgtaataaaaagataccacttgaagtattaacaaaaataaggaactataagagatgtgttacatctaaatgtagcactttataaaactgtgttggaagatatcaaacacctaaataaattgatccatatgctgtattaatgaatagaacgtcccagttacataaagatgccaatcatttacgaatcaataatttcaataccctttcattcaaaatcccatttagggtagagaggaatggaacatgtgaaagtgcagactaagaataagacactttgaaggagaagagtaaaa

SEQ ID NO: 145215 - DNA, 580 bp, Homo Sapiens
ccttaagcaacactatgtcattcatgtcaaagtatatatctgactcttaaaatctgttaaaattagaaaatatttaatattatgaggacctaaggatacaacaagttttttaaagctgtagaacccatctagaattgctaactttttcctctggctgttaccagagaaggcagccacgtctgtctctttgaccagcacacctcattcaataaaaagtcaggactttttatcatgggcacaacacgatgtcatgtgttttcatgacatccaccaaaaaatattattactggtaaaaactgaacactatttaaagcatccactgtcaatgcccttctcaaggatctgctcagagaaggaaagatgactaaccttagaagtgtaccaacaagtgttcatcacactgaatgtggttttaaaaatatatgcgacaccacccagaaggacagaaagcatacagaaagcaaagcgtaagccaatgaagcgcattcagccagctgaggggtgaggcacgtcctctctggcactggcttcctcaagtcttcacctgtgtaccgaaagcaagcctagtttcaaccctcgt

SEQ ID NO: 145216 - DNA, 514 bp, Homo Sapiens
tcaccccattagcctccggcggtggctgcggccccatcgggagcccctccttggggcctttcctgtccacggagaccgcgggcaccgccagcagctgcccccccggaggctctcgggcaggggccgggatcgacgaggggggcggcggaggtggcaggggctgccggaagccgtccaccgcagcctcccagttgttgtggttctggtcgtccatcatcgcctcgtagctgcccccctcctcctcttccatgctttcctccatcctgctggcccccggcacccgcccgcctcacaggcacctgccgcctgtctcaaccccgggccagcgggcaccgctgcctccccgagttacatcgccggcggcaggaatgggcgcagcggagagggctgcggtgcgcagggtctctcgctctccgcggggccgactagcttgaagacgcggctgacggcggtgggcgctccggggctctagtctgggagaggcagccgtaaagcagcggcgctcctcacgacg

SEQ ID NO: 145217 - DNA, 378 bp, Homo Sapiens
ttttcagagaaaactcaaactttattgagagaattttcaaattttcagtcacattttcaatgtgacatcagccatgtgtgtagcttcagcttgtcttctttttaacttatggctgcccatctcctgcttctttagtcttagcatgcttaggattaggtggagtcttctcttttacatcagagccatctccacgctcactccgagtcttttccagatccatttcctggcaatcaccttctactttacgttcttcgatcggaggtgttccttctctctcttgtccaggttcaatatcctgattgtcagttggtggttcctcttgctgagattcaccgggagccacgaatgcaaccacatcgggagcctcctgaccatctc

SEQ ID NO: 145218 - DNA, 546 bp, Homo Sapiens
  misc_feature (178)..(223): n is a, c, g, or t
gctaggatttcttatatggatctgccttagtattttgaatcaggacctcaaatgagatttttggatgttcatgtgtttgtggcacgatgttgaatcttgaaccttcctgtctttctaattgttagaattagattcttcaagctagacttgattgggctagtattactttaggaaatgnnnnnnnnnnnnnnnnnnnnnnnnnnnnnnnnnnnnnnnnnnnnnncttatctaaggaagattaagctgtttgcagaaaatacagttttctttagctaccctgctcacaataccatctacactgtgtctgtacctgtgtgacaaggccaagcactccataactttacccggattgtttggtctttttcaaaatgtttagagtttcaaaaagaaatttgtgaagttgcttctcttaagtagctactactatgtttttaaatgtgttgcagtatttctattagttgatcttgtgtgtagtcattcatatctgtcttttgattctatttcttggtgatcttgctttttaaaatcaccatttaccttaaaaaa

SEQ ID NO: 145219 - DNA, 458 bp, Homo Sapiens
tttgcttttacaagtcaggtttattgcggtatcacgtacacacataaggctcacccgttttcgatgtacagccgacgacttggtaagggtctagagtggggcacttctgccccgacagaggcagcccacattttgcccctctgcagtcaggccccttcccggcccccaaccaccacctgtctctcctcgctcctacagctttgcgtcctccagaattgtcctgtgagtgactcccgcaggatggagacttttgtgtctggcttccttcacttcgcagcaggcttcgcgggacccgtgtggtggcaccagcgtccagcccttggtactgctgagttgtaggttgtgggacaggtggaggtaccacagttgctcacgggttcaccatcgcactttgttgcacatctgggttgtcctgagaggggagccggcaaccatgggaacctggatggggctgtgct

SEQ ID NO: 145220 - DNA, 1318 bp, Homo Sapiens
tttttttgctgaaacagacactcatttatttccccagaaggaggcagaatggggtccttggggagtctctgtcccagcccggacaggcagatctcacttccagaagagcacattccagaaaagcagccagcaggggtagaggcccagggacagcagtgggaagagcagggcgccgtaggtgtggtgctccagcacaccctgggctagcgctgccaggaagagctgccagccctcggccagtgacagtggcgcctcctgcagctcccgccacaggaacaggctgccaaggagcgtggctgccgggctggtcagcaccagcagggcagcatagagggtccggggcccatgaggcttggcaagcgcagcagtgggcaccatggtggtggccagcaggaagcccagtgagaagttggtgagggcgatgcagcccagctgcagtgctaggtagatcagggctaccagcttcagtgccatccagcccctgtctggggcctgtgtgcttaccacccggtgggtattgtggggcagggccaggccagctgcataaatcgccagcagtgtcagcaccacagcctcagcctctgccactgggaagtgctgggtggcaacgtgttggcccagcactggcaggacatagagggccagtcccatggcctgtgagatcagcagaggtgccacgagcgaggccagccccacaccctgtgatgggggaaggggtacactggggccaggggcacccccgggctcctcaaggcccattccagcctcatgcagctgcatccacagttccagagccttgagaccaaggaccaggagcaagaagccgacagcgggcatgtagaggccgatggagacgaagcgggagaggccggggagcaagtagaggaagaaggactggtgcaggcgctccaggaggtggttgagcttgcggaacatgccctccaaagccttgcccactgccaccaggtcatacttgtactggcggaagctattgatgccacgcagggttagggcctccacacggtagcgcaggaagaggccatgggagccgtgggggcggccggaggcctgccgcagaaccatgagcagcagtgtctgcaggccctgcagcggtccatccaatgatgtccagtcctcgggctgcagcttgccctgaagcgtgcacaacaggccccctttctggcagaaggtctggaagagattgagcaggtcaaggttgggcagctgcccgttaagcccctccacggccacatcgaggctggtgaccacatcactgcctcgtgccgaattcgccacccaggcctcgtacctagctaat

SEQ ID NO: 145221 - DNA, 1574 bp, Homo Sapiens
ttggcagcagccgcatatcgccccaggcagcccccagctcgacttgccaagggatctggggcacacgggtggcccgcactggcagacataaaggccatcccatgcctgtgagaccaacagaggtgccacgagcgagccaacccccacaacctgttgatgggggaaggggtacaactgggccagggccacacccccgggcatcctcaaggcccattccaacctcatgcaactgcaatccacagttcccaagagccttgaggaccaaggaccacgaggaccaaaaaccgacagcgggcatgtagagcccgatggagacgaagcgggagaggccggggagcaagtagaggaagaagggctgggtgcaggcgttccaggaggtgtttgagcttgccggaacatgccctccaaagcctttgcccactgccaccaggtcatacttgtactggcggaagctattgatgccacgcagggttagggcctccacacggtagcgcaggaagaggccatgggagccgtgggggcggccggaggcctgccgcagaaccatgagcagcagtgtctgcaggccctgcagcggtccatccaatgatgtccagtcctcgggctgcagcttgccctgaagcgtgcacaacaggccccctttctggcagaaggtctggaagagattgagcaggtcaaggttgggcagctgcccgttaagcccctccacggccacatcgaggctggtgaccacatcactgctcagctccagggccacggctgcctgaatggccccagctcggccctgcaggggagacgactgcatgccagtgacattgacatcgtggtaggcttcaagccaagcctcagtgcccagaaggtcatgttctgttaccaggaagacgatatctttggcccaataaatctgcccccggaagtgggcagccagtgccagcagcagccccacagcctggctgttggtagagtcagagccacagggcacggtgagcacaagcgactcggtgctggcagcacgcggggcccgcaggatgccgtacacgttggtgcccgacaccatatagcgctcgtgggtctcatctgggaagggcagtttccgggagaaactctgcgtgtagacctccagccctactgaccgcatcgtccgttcaagccaggccactggcagagcccccgacttcttgcggtgggcggcgaagtcccgggcaaaagcccgggcacggtctccgcccgcaaactgctcctccaccatggtggagcccatggcgttctccgacatgtaagtgcgctgggtcagcggcgggaaaaccagcgccaagaaccaggcgatgcccgccacgtagctcagcacgcacaacggcgcgttgaggcgcagcactaggcgggcgagcgcgcgccggcgaaccgggtccgacaggaggcccatggcggggcagggcggcgcggctacggaccctctcccgcctccaactaccgccgcggtgcccacaggctgctcctgtcagacccggggacccgcgctcgcccgcacttccggtcccagagacgctcgcgatcccgggaatccggaccggtcc

SEQ ID NO: 145222 - DNA, 496 bp, Homo Sapiens
tttttgctgaaacagacactcatttatttccccagaaggaggcagaatggggtccttggggagtctcttctaccactgctgtttatgggacacttttgatgggaagggaatttatacaacatttgaaattttcagactaatttggggatgggcgggacatttcaaagcagggcacctgggcattgccttctctctccaaccattcatttctctgcctaaagctctgattctgttagtctgactgagatattggcatgtgcagtcaatatccagatagttgtcctgctcccagttttcctttcttgtgggtctagagcacctttagtggcgtcacacatctttgtggcagtacttcactatgtgcttctgctctgggtttcctcttcaaattccatatagtattagtcttttagagattcctcagaaattctgctttacaggttccactttttgcttgcaaatgtggatttatatgtgcctatctgtgcatgtacct

SEQ ID NO: 145223 - DNA, 317 bp, Homo Sapiens
gattttgttaatttttaaatatcttcattttgatctatcattaatggagaaatattccgtctaccatgtatataaggactttcagcagatgaaatgcttaaatagtttaagggtggaaatgaatacagcaattagaaataaggggttgataaaatatgcatttagttttgctgttacagttaaagaagcattttttaagaaagactttctcatttatctactttgtgcaataaaacttaatttttgttgttgtgatttatcttacaaaggatactgtatactgttctctttcccaaactaaagtctaaatttgcact

SEQ ID NO: 145224 - DNA, 511 bp, Homo Sapiens
atggcctgtggtcagtgtgatctctcatctccaacagggtaacttgggcttgttcacaccccagagtctgaggttcttagagagaaagcagaagtgttcaagccctcttgaacgaaggactatgaatctgtgtaccattacttctgctatattcttttggccagtgcaagctaagccacagtctaggccagattcaaagggtgggaaataaacttcagtccttgataggaggatctacaaagtcgtatgcacaggatgtggaaacggggaggagtgaagatttttgggcagtttggaaatttaccacagtgtacacgtgtgtttacatatgtgtacgtagatgaaaagtgagagcatatacattctgcatttttatcaccagacatgctccaaatccaagttactaatccaaccctgtggatatattggggaaagtaagtaaatcttaaatgggaagtgcctcaacaagtatctagaacaataccttccattcaatcaatggaaggctaaa

SEQ ID NO: 145225 - DNA, 499 bp, Homo Sapiens
cagtgtgattcagtcctcagacctaattgggttgaataaaatctaaaagaatatacccttttggagcataacattttaataccttggggaatgtggcactaccaaaagaagactactaacacgtcagatgttcacctggaagctttatcaagaaattcgaaccacccttttggccccattaattgtagcaagtttatttctctatattttgtcattcagtgaattgaagtcctgtggtatactgcattcattagaagaaaaacgtttttaatgtccttttaatgatggcccagaaagcatttgacacagcaagatgcatgtgttactatattgagaatatagaataataacagtatcactaaatttaagacctcttcccagtcttgctgttcctagcaagaagtttggcctgtgactgcacttactgtttatgctcatcagaaactgtcaatgtctgcttttctttaactctgcagtctgtaacatcacgctgtttatt

SEQ ID NO: 145226 - DNA, 336 bp, Homo Sapiens
tttaatgaccagtatgttctgtgtttactgctgctttccctcactagagattaactcataaaattttactccaaattaaacaaactgaggctctccttgcagccagtcaaactgccacttataccaaaggaaatcttaacttccatctgtgagagtttgaacggccacccctgcggaaagataacagggtctctcttttcttctctgtgttctgcgagtccttggaggtgccaaaatacttgtctggactctggcccccagggcacttcatcatcctgtcttctcagctgaaatttctctggggatgattagatgttgtctttgaaaaatccaaat

SEQ ID NO: 145227 - DNA, 556 bp, Homo Sapiens
tcccagataacttctttctaatttttattgcaggatattctgttcattactataggcctcaagggactcaaaaatgtcccttcgtccaactacaaaaagagtgtttccaacctgttgaaacaaaacaaaggtttaaatctgtgaggtgaatccacacattgcaaagcattttcacacatagcttgtttctagtttttatagcaggatattcgttttttcactatagacctcaatgtgctcagaaatgtcccttcacagattttaccaacagagcatctttaacctggtgaagtaaaacacaggttgcattcagtgagattaatatacattttcgtagataacttgtttctcatttatatcacaggatattcaattttttactataggcttcaatggtctcagaaatgtttcttcatagattctacaaaaaaagtgtttccaacccgttgaatcaaacacaggtttaactttgtgagacaaatccacacattgcaaagcattttcacagatagcttgtatctagtttttatcatgggatattcagtttttcactaga

SEQ ID NO: 145228 - DNA, 624 bp, Homo Sapiens
tgcggccgccgcaagaaagtgtccttcgaggccagcgtggccctgctggaggcctcgctgaggaacgacgccgaggaagtacgctactttctgaagaataaggtcagccctgatttgtgcaatgaggacggactcacagccctacaccagtgctgcatcgacaactttgaggaaattgtgaagctgctcctctcccatggtgccaatgtgaacgccaaggacaacgagctgtggacacctctccatgctgcagccacctgcggccacatcaacctggtgaagatcctcgttcagtatggggccgacttgcttgctgtcaactcggatgggaacatgccatatgacctctgcgaggatgaacccaccctggatgtcatcgagacctgcatggcataccagggcatcacccaagagaaaatcaacgagatgcgggtggctcctgagcagcagatgattgcggacatccactgcatgatcgcagcgggccaggacctggactggatagatgctcagggtgccacactgctgcacatagctggagccaatggatacctgcgggcagctgagctcctcctgggccatggagtgcgtgtggatgtgaaggactgggatggctgggagccc

SEQ ID NO: 145229 - DNA, 502 bp, Homo Sapiens
cagagtaaacctttatgtgaaattctgtaaatgtgtatagagaggcctgtcgtccctgtgctggaggccttgtctgtggaaatgccgaggctcagcacttgctgtagatggccacgctgccccgctcctcaaactctttcttgctgacccagagctgttggaaggcctgcagggaggccaggatggaaccgccggtccacacggaggtcttcctctcaggagcggcagccactgcagggctgtccccggggcaaaggaggctcagctccctctggaagcgctcggggaagccatccagcatagtgcagccgccacacagtagcacgttggcggccatctcctccttgaagcccgtgtcctggcagcggcccaggcaggcagctgtgagctccgggaggcccggctgggtgctgcctgccagggagggctggaagagcatcttaaagcaaccgaagcccttctggccaatagtgatgagattgccgtcgcggaacttgtaatt

SEQ ID NO: 145230 - DNA, 548 bp, Homo Sapiens
cccaaccaccaaaacaacccatttgcatgtcggcgacacgcctggtctcgggctccctttctggggctgtcctcccaggcggctcccaggtcctcatccagggaagagcccagcctcggccagaagccaccgcggcctccagttccgcaccgtgacaacctgggacccagcctttcagaaaggccaccaggaactgtttttaaagcatagggctgcactaggaggaagttttcccttgaggctgagagttatttcttgtggagaaatttcattttattgcctagtcccttcaggaacttattgacaccgctgtgctctccactggggagtgtttccagatactcttgggctcggacctcaaacagacctttggcatcctgccggcgcagctcccgctcctggatgaagccccgaaacatctgagtctccatgaagacctccaggaagtggcggaggctcttggaggagacagctttgcggaaggcctcccgctgcaaggttctctcctcacgctcgcccgacgtcgggaacgaagagtagtgtcccac

SEQ ID NO: 145231 - DNA, 864 bp, Homo Sapiens
  misc_feature (73)..(86): n is a, c, g, or t
  misc_feature (143)..(152): n is a, c, g, or t
  misc_feature (365)..(365): n is a, c, g, or t
tttcccctccgggaaacaaaaaaggcttttgtgggaaatttcccccggttaaaaaaattttttggggaaaaannnnnnnnnnnnnnctttttccgagaatattccccccggggggcccacacaaactttaaggggggcaaaannnnnnnnnnaatgttttcggaaacttttctggttccccccaaaagaagggggtgggccaagggaaaatagaaaaaagggggggaggataaaagaaccaaagtaaatttctggcttttattacaccaagcacggaaaccaaattccttttgaaaaaataatgtctcgggaggacttccagaccagtgaggtagagtccaacagtgagaaaacggatctgcccntaaggtctggagacgtctcatcggtgtcagaagaaagggcctccctcgggtccagctgtcccctccctccgcaggccgggtacgggaggcagcagagggcacacctgccccagcgtccaagacgaccgcgccgcggcccgggacagggacaaccatccggcaacttcttcgcgcgtaaagtgcattgggggccggggtcctggccggatctgtaaacactcgactgacacttgttcattcctccgggcggaaggcctgtcccaaggtcggggccggcaggaggcgccctggaggccgcacctcatgcccggggcaccgggaagcggcggagcctcaccatgggttccaggttcactcgcaggacctggcgcgccctgcgccgcgctgccgccaggctgcgctcgccccacacgtcgctgccgacgcggatggtggggaaggtggtcagcgtcggggtggccgccctccagatctcctccaaggtgcggcccccgaagca

SEQ ID NO: 145232 - DNA, 522 bp, Homo Sapiens
gaattgtctagcacgccaccacttcctgccagcaggattttaaaggaagggtgggacagagcgggccagtgtcctcctccacctgaacgcaagcagagctttctgtgggagggcagcgcactgactggggcctgggccatggaggacttctacacggccaggctggtccctcctctcgtgccccagcggcctgcccagggccttatgcaggagcccgtgccgcctctggtgccacctgagcactcagagctgagcgagcgaaggtcacccgctctccacggcacccccactgcaggctgtggctccaggggcccgtcgccttcggccagccagagggagcaccaggccctgcaggacctagtggacctggcgagggagggactgagcgccagcccgtggcccggcagtggggacctggctggctcggaagggactgcagggttggacgtggtgcccggcggccttcctctgactgggtttgtggtgccatcgcaggacaagcacccggacaggggcggccgc

SEQ ID NO: 145233 - DNA, 408 bp, Homo Sapiens
caagaaaggacagagtgatccagtaggggtctttaggtataaagttctaaaacttatcttctgcatccactggtgaaaagagacaataagtataaattatagcaagaataatttcctgacatcttcaaggccctggtaagggttagccagtgagaatgtgaaatagtctcttcttgagatctttcaaagcaagtcatggttatccacttgtagagatgatcctcatgtagtactatccagagcccaagctatagagtaaactgggactcctttccaacagcattgttctttgtgatatatcttcttgtgatatatgaaagaatacatgtatatctatacaaatatgacattgagttggaaaaaagacacgtgactgagctaaagtgttggcttcattggctgccaaga

SEQ ID NO: 145234 - DNA, 766 bp, Homo Sapiens
cagtcccctagtagaagtgacctagtattcaatccagtgcttacctccttcgcagtggaaaaagatttgtctatgtttcgagccgttattagagtttgcaacaaaatgtaaattataagaaaccaaagtggctacctcgtagagccactgctggaatagaaggctgttttgcagttaacgtttatgtgtacacatagattagtactaaattaaagcttagaaaatttcagagcaattttaatactcagtttttggtaggtttttttcctggatacctgtattatgctactataaaatatcctcagggaaataaaagttttccatggcctcaatgaccacctatcattcctatttgtttagtgttaagatggtttttgttgttgctctgtagtatattttacagatgaaaatggttgatgatgtaagtttaagttagcctatgtcacagggaggtttctctgttgtccagctttgtgatgttaagcatgaagttaaagttagataaaccattgcctgaaaactgcctaggctaagcactagattttccatgagaaggttgttttcgattctagtcttgttctctgcaaaagtaaatgggatttgccactagttaaggaattctgtctctggcaaaagtgtcgtgcaactgagagaagtaatagcggtgcttaaaattttcgagatcacttctgtttaccaagtgtaagctgtacaaacactcagcaagtaataaatgagtctgaaatagtcctcaaggataacgatg

SEQ ID NO: 145235 - DNA, 528 bp, Homo Sapiens
tttgcttaaaacaacagaaatttattctttcacaattttgagggtcagaagtctaaaattcaaggtgttccagggtcaggctccttccaaggtctctaagaaaaacctttcctggcctcttccagcttcctgtggttactgataatacttgatattctttgcctttggtggtacaacttcagtctctgcctctatctccacatggccttgttctcggtctgtatttttccaagtctctctctccttaagcacaccactccactgctgacatatattaaggaagacctccggatgcttttgccacgactccgtcttggcaccagtcttgctgccctggaatgcagtttcccaaacgcagcgctcactctgactcctctctgcttttatccgtcaggtctcagttcttgcgggtgggagtcggctgaaggagctgcgttatatggttgtgacatcaccctccccggcccccattttcaggtcagaactttcatgcctttggaaacgagggacccagaagagcccttactg

SEQ ID NO: 145236 - DNA, 857 bp, Homo Sapiens
cttaaactaagagtttatttctcttttttatttcagagtcctagaggcaggcttctatggctgatgtggtgacttcattcgttaggaactgagatgccttctttcttgctgctctgctctttctgatgcactgcctcatgttcaaagatggctgcttgagctctagcaatcacatacatagttcaggaagccctgttcaagtcacgatgtataattggctgcgtcaggttgtgaaggtactccatgcctttggcaacatctactgcaataattaattcagactgcaaatcaagaatcctcttctgctcatgaaggagggagaacagagaaccccctgatatgtattgagtgacaatggcaaactggcttggatcattcaagcaagcacccacaaactgaattacgcagggatgattgagctggcagagaatggacacctctcggcaaaacatatccacatctgacttggagcagtaggtattggctcggataacgttttatagccactattttatttctggatcgtcctttatatactttcccaaaagaacctgagccaataatctcatggaactcaatttctgagagctgaagatggaaatgtgaaggcaatccagctcttaggaggagaatatctgccttctcttttgtcatgcttttaatcttccccaagggtgatggaacagacacataggagccatctcctccaggctgagaatattcattacagggcaattcatcttgtggtctcttataatgcttcaggagtgtgacaatggcatcatgccctttttcataagcccacatcaaacatgtctgctcatctttttcaccactagacctgctgggatcacaag

SEQ ID NO: 145237 - DNA, 708 bp, Homo Sapiens
tgtgccatgtgaaataaggcagtcacaacaggccaaatacttcatgactccacttacatgagctaccatgctggccggggagggggcggctcagatgagctggttcttgggcttcggacacgtcccgctcgcacagttcaggtcatggtcccggcagactcgggaagtcccccacccatgcaaagacaaccccttccccaccgggccccgaggggaccctctaaaaagggcagggccgcccgggtcgcctcatcgggggaccccgagacaattcatccagacccacccgcccctccccaaggaaactgaaaaagcaggaaatgaggctcggatgccggcgaggagggcagctgctcgggacccccgcccgggcccgacccccgcgggggaaggctgcgggcccaggcaggggctccccggcctccgcgggcagaggtggcggcggccccggccccgaggctgaacgggcggaggctgacaggcctcgaccgcgcggcccaggcggccggctcaggggagaggcccgggggcccgcgctgtcctcgcagcctcaacccacacggccactgccgccgccccctagagcatccttgcgcgcgcccgccctggagccgcccgctagtaccgcgcggccgcccccgaccaacagccccaacgcgccggaagtggcgagcgccgggcggccccacagcgcggccgccgggcccc

SEQ ID NO: 145238 - DNA, 393 bp, Homo Sapiens
  misc_feature (30)..(30): n is a, c, g, or t
cgcgcattttccgataccgcgagactttcntgtttccgagcgctgtgaaggaactgagtgaattgaggctttgagttttcgttagccaagacgttgtgttgctctgtgttctttttggccgggagtggttatgtccgtgtcctactgttaggtcttttaggctgaagaatgcgttccttcccgctttggcaccagcgtcactggcaccgtttttgtcctgtgcttactgaccattctgcatcttttgtgaagtttcagttccagtcttctgcccgtttttaaatctggtccttcgtgtttaacagttctggatacaaatgttttgttagatatatgtatgctctgaatgaaaatcttttgttacataaatgattgcgaagtctttttcccaaa

SEQ ID NO: 145239 - DNA, 1006 bp, Homo Sapiens
ggatagtcttttcattgctgacatgcggggaacagggtcggtaagcagagatgctctgacgagggtgcacacagcccagcttcttattggaagagcccgcccaaggtcctcagcctacttggacggcttgtccttttcgggaaggccgccgtggggactgggaagagggtgtcatctgttttgggttcttatggaggtccggaggctcagaggagacccggggcacccggccgcttgtacttgttgccatagtcgaatttctccttcacgtcggtccaggcagcggccgaggcgcgcctgctcctccttgcccgtgtaatcctggctcagcaggatgtagtcccagccagtttgtccgagtcgaagccccagtggcaggtccggttctccagggccttgtgcgagtgcaccacgaacttgtgcggcgggtacatgaggcgcgcagtccaggcactggatgcaggcggcgctcgggctgctgtagagctcgggcaccagcagccctttacacttgccgaagcactcgtggtacacgcggacgctgcgctcgctgagctccaggcccagcagccaggctggcggccagctccttcttgcagggcggcgggtaggcgccgccgtagagcagcgcgttgcacaggcgctcggcgtccgtcttggtgatgagcccgcacgagggcgccgagaagggcaggatgcccatgactttgaggatctccagctggtcggccgtgcagcgcgagcagtagatgtggagctcgtcgcacaccgcgttgatctgctgcagcgagaagtcgcgcagcaccgagttgagaatctgcggcagacacaggcgcttctcgcctcccaccacgaagcacgagatggtctcgccttccagtacggtctcgcagcgctcggtggagcggtcggacggcatgaagaagggcccgggcagcacgggcggcggcggctggatggcgggcaggtgcagcacgggcggcggctcggtggctaagggcaccgg

SEQ ID NO: 145240 - DNA, 708 bp, Homo Sapiens
tttttctgtctattttgaattatatttgtccttataccaacatagtcgtaatgtttttttaattgaggatggggcttatgaaagtaaaagttcctagggcttacaagagtcataatgccaccttgatagtgaagtcctaccaaaaacctgcctggttgtactgacatacgccattgggtttagatttcgaaaggttgatatataactagaaagaaggaaacaaaaacaactgtcagaacactaatgttccaaatgaactgagtcttgcaaagaaatgcaggccacagaaaggatttttcagattacatgttgagtgtaagggagatccaggggagacaggctcttataaaatgctgcttgctgatggagagaaagcagatgtgatagagatccctgttattgcctgccctgtccagattgctttgatatttattcattcattgacttattcatctcaaggatgccttgaaggcccttattccgtatcacaggacagggccctatctgtcccatagctaaatggaccatgcctggacagctgatctataagtagctaatccacaatctcctcagcagccttggacttgtatggtgtggcttggcgaatgggccagtcgtagaccctctctattgaatttcaactaaatggcacagagggaagctcttcttagtaatgaaacagaaacaaagaaatatagaaagtaatgg

SEQ ID NO: 145241 - DNA, 523 bp, Homo Sapiens
aaatttaaatgaactgtagccatttgatggcagaagtttatctgtgactcagagaaaccacaaaatgttttatcacatcagggtctgtgcttcgtgttcttctcaactttctctcgtcttccaaaacgatggacattaatccaattgtacatctaacaaccgagaagaaaacacccgctggatcttgggcagtatcctgtgtgtggctacaaaacttccaccccagatgttcgtccacaggagatgaagactaggggtgaggaggcttggagagacagtggagaggggcgcactgggagctggaatgtggctgctcctcagggagagctgtgtcaggactgacagttgggcagtcttgcctcccggctagttgtgagcactgtggcggtacggaggcagcaggctgctgacaatctacaagaaactgataaattagacatgtgtacaaagagatgacagagcaaggtgttagtaacagtgactaaagcagctgcctgagagatttagtgaggaatgtgcattc

SEQ ID NO: 145242 - DNA, 776 bp, Homo Sapiens
  misc_feature (39)..(39): n is a, c, g, or t
atccatatccttgcccccgttaaagagaagctgataaancagcaccatttccaaagggtacaagggcttttaaaattaaaacccagttagaacacagcttcattcttaatatccacctttatctaccaattctcaggttggaggtaagggagaggcatatttacacatacaaagagtagcaaaaatattaacagacacttgaaaattatattacgattaatcaagaggagggattgggcagggggttagaaaggactacataaacacaattatcaaaaaggttttgatctggaaagacccacattagcaagaccatttatatgccagctcccattttttcttttgcttcccctcctccatcctccacaacaagagcacatttatttttgcagttaactaaaatctggccactgcaccgtactatgaagatcgctgcatgcataccttttcctctgagtgccactgctgacccgaatgttgggtgtctgtgggccctgactatgcaggaggtaagtgtctatggtgggcacggtgactgatgcctccccacttactttagggctgccgatcttgctctttccaagtttgcctttgctgcgtcgggactgctcatggtcaaactctaagtcctccagcctctgggtcagggcgagtttttgctggatagccattcgtaacaaagtgttcagagtcttcttctcatcctctgcagctgctaactgtctctgcatctcatccaactgggtgacatattcatcacatcttgttgcaaaccc

SEQ ID NO: 145243 - DNA, 548 bp, Homo Sapiens
cctggttggtgtttcaccaggagttaaggacaaaacactcgcttcctgggatcaagtgatggggagtggccctatcacaatatcccttttaccaacacactgtatgatgtttgtgcgcccagaagaggctatgaaaagactgtcattgaaatcaatacaccaaaaattgatcaagtacctattgttgatgtcatgatcaatgactttggtgatcagaatcagaagttcggatttgaagttggtcctgtttgttttcttggctaagattaagacaaagaacatatcaaatcaacagaaaatataccttggtgccaccaacccattttgtgccacatgcaagttttgaataaggatggtatagaaaacaacgctgcatatacaggtaccatttaggaaataccgatgcctttgtgggggcagaatcacatggcaaaagctttgaaaatcataaagatataagttggtgtggctaagatggaaacagggctgattcttgattcccaattctcaactctccttttcctatttgaatttctttggtgctgtag

SEQ ID NO: 145244 - DNA, 407 bp, Homo Sapiens
  misc_feature (313)..(346): n is a, c, g, or t
tttaactttttatctagaaattttatttttttaaacccggggcaagtacctcagctaactcccttcatcctcctggggcccctccttcctgccctcagtcttaggttagggccttggtcagggctttgctccctgtgacacccacaccctcgagctagcagcgtctcctcccttccccgggagagctggctggagacttggagctccgggaagtaggagtcacatttttttctctattctttggggatttttttacatgaataaaagtggatttcagggaccctgtgtgcagtgtgatttggggtgacaggannnnnnnnnnnnnnnnnnnnnnnnnnnnnnnnnnactttgggcatttggtggggttgaggtcacagcctccaccaagggctgctgggttgaacct

SEQ ID NO: 145245 - DNA, 261 bp, Homo Sapiens
aaagaatcggtgacttatcttcacactggccttagtcctccatgcccaacacgatgtccctaggaaagtctctggaattgagcacagggttgaccttcaccgtctagagtgaatggggaagataaatgaaaagtatttatcttctatgggcactggcatgaaatagaacattctaccctggcagggttttgcatttcacattttagcttgcatcatccccttcacagacaattccaaagtgtgttaattcaattcctaaag

SEQ ID NO: 145246 - DNA, 1321 bp, Homo Sapiens
  misc_feature (261)..(261): n is a, c, g, or t
tgggtgcttcagtgctctctgaggctgttgattgcgtttgccagggtgatagtaagcattttaattgatgaggtctttggcttccaggagtcaccgtggtcccaattctggtgatggaaaatcataagctccagccttgatctgctgatagagtctgtttggtcttcatcccagaagggtggataccccacaagtagaatatagagaatgacaccacatgcccacatatccactggctttccataaggatctttacgtaanacttctggagaaagatatccaggtgtgccagcaaaacctaaccacgcctgctggtccccttgaacttctatggctaagccaaagtctgccaatttcacagctgctcccttggatttgctagctaaaagcaaattctcaggcttcaggtccctgtgaactatgccatttaggtgacaatgattaacactttctagaatctgctgtatacaatgactggcatcagcttcactgtagtattctcttgccactatgtcttcaaacagttcacctccagtaactaaatcaaacaccaagtagtgaaagccctcttctgatatgctatcatgaagtcgcacaatattagggtgcttcaaaagacggcagattctagcttctctttctagtttctgatgatccctagcagaaagctttttggtgttgataattttggcagcatattcttgtccagtaggaattttcatacatcttctcaccactgagaatgccccctttccaagctcctcgaaaagctgatactcgtccgtgaacctggtgcaggttgtggtcgaagccatcctcggtccggggctgtgccctggctgggagcgcgacggaccagaagcgagcagacgcgcggctaaccccgggactggccccgcggcgctgtcacccagggccgctcttactttcctggtccgaaagtagctcgcccgcgagggagtgtgcgcaggggcggggcgggaggggagatgaccagaaagggtggcgtggggtctcctccccacagtccgccgatcctcctcctcctgcgggcctcgcttccttcttctccactggacgctccacccgccccttttccagtccctgtccccaaatgcagggggtaaagtactcaagaagagggggccgggaaatggaaaaacagccaggcacgggacgagtggcaagcagttgcgaaacgatccgcactggagcaggaggagtagaagcagaggggagggagtccgagggggcggaggtggagtgcagcggggccgaggccgcggagcccagagcggacagcctgagcccagcggccgca

SEQ ID NO: 145247 - DNA, 510 bp, Homo Sapiens
tttgaggcaaaaagaattcccacatttatttaattttctttgggtgtgagttttctgatgttctatgatggaagtgacaggtgttttctgacattaattacactacattaaaaattacctagtactgagccagatgtgaactccacataaaggcttatctttatcccttacactcaaggctttctaaccagtatgaattctgtagtgttcaatgagttgtgagccaagaataaatgcctgcccacactctctacattcgtaaggtttgataccaggatgaattctctgatgttcggtaagttgtgaactacgaataaaggccattccacactccctgcattcatagggtttctcacaagtgtgaattcgctgatgatgagtcagttgtgaaacacgaataaaggccttcccacattccttacattcgtagggtttgtcacctgtatgaattctttgatgttgaatgatgtatgagctacgactatatgccttgccgcagtccttacattc

SEQ ID NO: 145248 - DNA, 458 bp, Homo Sapiens
agtctgggcaccggagcctgtgaccgcttcgttagtggagaggtagctggcagtccgcttctgcgggcctgtgccccgcgccgttctcggggcctccctgctgagctcgcggctcacgctgagagggacacgcagtgacgagcggccgaagcagctttgcggttttgtagtgcatccctgagcatgagcacagaatgaagcggcgtttggatgaccaggagtcaccggtgtatgcagcccatcagcgtcggatccctgtcagcacagatgcttttcctcaccatcaccgggtgcttgcccctgctcctcctgtgtatgaagcagtgtctgagaccatgcagtcagctacgggaattcagtactctgtaacaccagcttctcagtttcagccatgccacaaagcctccgcagtcatgggccccgtataaccatcggtcatagcagtcatcatcacccac

SEQ ID NO: 145249 - DNA, 485 bp, Homo Sapiens
  misc_feature (50)..(62): n is a, c, g, or t
aacaactcccaatacggattcccataattgaccccagatcactatattannnnnnnnnnnnnacttagcattaagggttcattactgaatatgctgttttgaattgcattctgttaatacaggaacaaatactacatattgagctctcacatttttgtgtgccaaatggagaaaatatatttacttagggttcaggtatgaaatttacatctcttctgagattgaggccataaaatggaaattgccttccaaatcctcattaagttagaaggcttttactgacatttagaaagcaagtttatggtcagaacaaataaaaacagtgcagatgtcttcataaggctgattccagaagatcagctgttttgtaaaggtaagtgatttgcatctattacatatggattacccattctttcccaaattttttccccaaagagatgaatttttaccaaagattatagttattgttgttgttgtggttttcc

SEQ ID NO: 145250 - DNA, 460 bp, Homo Sapiens
ttttttacggggatgagtccggtgcttattattagaattcctgttgttcgttaagctcttaccatgtgctttgcacacatgggtgtatttaatccttaccttctgaggagctggtgctatgaggggaggaaagtgaggctcgaagtcatacatctggaaggtggcaaagttaggggctggcctcaggtttgtctggctccaaaacccatgtccttcaacactgtgctgtcctgcttccctcgggggtgagttcttcatcaagcagataaaaaattcagtgaagaagctgagatgaaccagtcattctgctagtgttcagttaccactggcgtgtgaactgagcaggatgggggtctggggcgacctcctgggtttggacgtgtcctgttagcgacagagtgattgagggtttcatctgccaggagacgcttctcagaggtaagggactgttttccagctt

SEQ ID NO: 145251 - DNA, 348 bp, Homo Sapiens
ttgtagtgataggacatatgttcattgcgctgtgcttttgatcttcagctccaaggttaagatgctctcccacggggaaaagaaaaaaggaagaagagctgggcagaagaaaactgacttcacccgtcactgaaatacttcatacctgaagcacagctctcttgcgagaagaacatgatggcagctcttcacagtcacctaattaaggggcttgggttgggtcctgactcagagggaaatacaacaccactgagaggaaccccccacagcacctgagcactcacagccaagcctgggcttggccccagtagacatatgagaacaggtgactgccagaaccacccagag

SEQ ID NO: 145252 - DNA, 1177 bp, Homo Sapiens
cttgttgtacaggtgtgttccgcccccatgggtacggttctgtccggtatcattgtgtcctgttaatcccggatggtagcttgtactttgggtcccgttctttgcttggcatatcacgggcctgcgtttgtccaaccccaggttgaccctcatttagcacagcgcctgggctggcgtccaagctgtcgtactgaatatagccaagctatctccctgttgacgtgatcaatggttccggatggctcccaagccggtcaaactctcggcccagaccgccagtgacgtgttagtcccaggccacccacccagagacggagtggtggggttggcccttgccatagcctatctttaatggggttggcgaccaatcactcggcccgacatggccaccttagcccctatgggccatgtccaggttctggaacttgaggaaggcataggcaccgccctggccacgggcaggcctcttgatgaccacctcctcgatgatgccatatttctcgaaggcccttcgcagctccacctcagatacgctgtggtccaggttaccaatgaagaggttgcgcgtggcccgctggtcatcctcgggcatcaggtcctcctcacacacagctgggtagccataggggcgcccacggtcgtcgtacagcccgtagtagtccagggcccgctcccgggacagtcccacggcggcggcagcagcggcatccagggcgaaggctgcggcggcgtgacgggcacggggctcccgcaggggcggggcagcgacgggggacagcgagcgctgcttgtactggtagcctccgtgtagcgggaggtagccgagcgggtcggcgggcgcgggcggccctgggggaggcgtggaagcggcggcgctgctgctgctacttcgccgactgctcccgccgccgccacgcaggtacacgggctctaccttgagcgggcggtcgtagagcagcagctgccgggccagggcgtgctggcgggcctcgcgtgcgtcctgtgggtgccggaaattcacgtaggccacacggcccagctcaggcgtgtgcgacaggcggaggctgatctcgccgaagcgcttgaactggtggaagagccggtcctcgaggtgctcggcgggcagcgcggggctcaagctgctgatgagcaacgtcttgtactcaggcgcggccgc

SEQ ID NO: 145253 - DNA, 999 bp, Homo Sapiens
ctcacagactgcgcggagtctgggtcacctggacattgctgcaccggtgcatgctggtgagcgagccgcaggcttcggtgtggccctcctgctggcttctccgtttccgcctctcttcccagggcttgggcaaaccacggtctccatctgccccccaacgctcaccactccggctgcgcactgagcgactgtagccctcaaggctgtttcggcggtcagagcttttactggggctggtccagtccccttccaaaaaagtccggtctcggtctgagtacagaaggtgtgggggcgtcctgtcccgcaccaggtcggcgtccaggttgcggtgccgggtgtatccatctgtgagcagctcataatgcacagggagtggcgagggctggtactgctgggggtaccgagtctcctctgctttggcaaaatccacgcggagcctgcggtctggtccacccaagggaaaacccctcattttagcacaggcggcctgggctgcgtccaagctctcgtactgaatataggcaaagctatctcctgttgacgtgatcaatggtccgaatgctcccaaagcggtcaaactctcgggccagagccgccagtgacgtgttaggtcccaggccacccacccagagacgagtggtggggttggccttgccatagcctatcttaatggggttgcgaccaatcactcggcccgacatggccaccttagccctatgggccatgtccaggttctggaacttgaggaaggcataggcaccgccctggccacgggcaggcctcttgatgaccacctcctcgatgatgccatatttctcgaaggcccttcgcagctccacctcagatacgctgtggtccaggttaccaatgaagaggttgcgcgtggcccgctggtcatcctcgggcatcaggtcctcctcacacacagctgggtagccaataggggcgcccaccctcgtgccgattcacaacccaggcctcgtacctagccttagtttg

SEQ ID NO: 145254 - DNA, 641 bp, Homo Sapiens
  misc_feature (347)..(347): n is a, c, g, or t
  misc_feature (435)..(435): n is a, c, g, or t
  misc_feature (461)..(461): n is a, c, g, or t
  misc_feature (463)..(463): n is a, c, g, or t
  misc_feature (486)..(497): n is a, c, g, or t
  misc_feature (537)..(537): n is a, c, g, or t
tttgggtttgacccatttttatagaaagccagctaccagaagtaatgagtccccagggccaaccacattggaggcctgggtgagggaccacccagcagggagcaagggagggatgcagacaaaggtagcagagaccctggcaacctccttccagtactcagcagtcacagctcactggaaagggggacccagcaacacactgggtccccagcacagtctttgggtgggcccttcatggaaggggcagggaggctctggatgcttctgcagtcatgctgacccaggttggggtacatgagacctgccccagagtttggggtcaagctgtcatctcgtgatgagggatnaagtgggtggaccacagggtttacccacatcaacggtacagatggggggctgaggcgtttcagttcactggtgcccttcacattggtntggtgcaagtgaggaggtggaaaggncncctgttttgtgtctaatggtttnnnnnnnnnnnncatgggagccccgatctgctctgctggttggcagcaccgnaagagtaacaggtcaaggcctttcaacccttcatcacgccagaccccgctgagtaaagagagttttttaggggcttttatgcaaacaccaaatgagatcttggg

SEQ ID NO: 145255 - DNA, 412 bp, Homo Sapiens
ggggcccggtagccaaaaggctagggggaggcccgcgcagccggtcggcttcggggcgggaccctgcatacctggaagcggcgggtggcgtcctccttgtcgcccttcacccacccggtccgggtgtacctgcagggacaccttgtggtagcctcgtcggacctcgcggtcggaggcctcgcgtcgcacgcccagcacccggtaaaggtcggcggtgccgaacacttcctcgcaaaggtccagcagccccatgccgggcggagatacgaccccggaggaagcagccgctcccagctgcgccgggtacaacccaggactgcttctttttcgcgcccaaaaagcccagggcgcctgcgtcacaagcactgaaggggcgtggccacgccgcgcaaccgcgctttacggcggccgc

SEQ ID NO: 145256 - DNA, 382 bp, Homo Sapiens
cttgagctgggcaatcctcatagaaggtcggggacgaccctgcccttcagtgttcctggagcatcttctccaaagtggaggtcgagccaggcctaggaggaaagagagggcaactgcggacgaccccaccgcagaagaggtgaaaccgacgggctccagggctttttcactcattccctaggcatgtgggacctcgaagatgccgaatcagctaaacgggaggtggcttgagtaggatttgctgccagctaaagcgtgagatgctattgcatgtgcaaggcaaggctttcttcagcggcatcatcttccaaaatagcccagtgagcatgcctttctcctgaaaaataaaaaatagttggtgtttactgcaatcgtatggcaa

SEQ ID NO: 145257 - DNA, 479 bp, Homo Sapiens
  misc_feature (405)..(405): n is a, c, g, or t
tttttgcaagctgattgttttattggtatactgaagttagagcatgatgccatgtttcacggcatttgaaacactgttatcttcttattcacttcctgaaaaagacaagcaaacaaggaagattacagacaacacttgacatggcaggaaatgtctaatccctcactgggggttactgcagtgatggagatgcaagcccctactcttgccctctatcccttctacagcccccttctccttagtaatattttctttgttcactctttaagccattgcacataatgtgaatttaaagtgttgcttagatgagaaagagaaacaattattgttatgtgttcatgctttgctgctgttggttatgtaagggctatttttacaaagatgggcactgcaacatatcatatnatagtgagaatgtgaatcccgccttaattccagtgacagggattggttaaatagattacgggacaaccaaacat

SEQ ID NO: 145258 - DNA, 477 bp, Homo Sapiens
catctcttttgggactcattatttcctactttgacttataatcatttgtgcactattgtttatccccccctactgtactgtaacttcttggttgaagggatcttgacttatccttatttgtaattccctctagcacctgaggcaatgtagcgcacagtgagtggcctgtaaatagcttttgaatgaataatatataaaacactaacaatacaagactctatatctgatctgccaaatgcatagaactggcagcaagtgctgtagaagttcattgggattgggttgctcaggagagtttccatagaggaaggagtgtcttcaattgaaaacgtgaaaaatgaactggagaaacaagggtgggggcggtccaggcaagtggaagagtatgcagggtgtttataaggtggaaacacagaaaagttatattttatgctttagtggacactgcagatttcttggaatggtacgatttttgta

SEQ ID NO: 145259 - DNA, 418 bp, Homo Sapiens
  misc_feature (209)..(217): n is a, c, g, or t
ccctgcacttaaggtgcttttattgtgggattgtgaagagtatgttaatgtgctaaaaggcagtctgaagactttatgaactatgcttacttttggaaggtactgtagcaatgagagtggttaaggattaagattaagagaaatcacttcagtggaaattgtaccctatatagtcatttgaaacctatctcctttggaatgtgcaaacnnnnnnnnncatcaaatgcaggatcagttaatcatcacatcttcagtagtctggaaatgtcagcatgccatgaaagtaggtgttcaagaacatgactggaaaaatacttcaatcctcagcccacttggatgaagccaaagaatccactgtctatcttttctattccagctgtacttgcccaacatgctcatggaagacttgtcttattga

SEQ ID NO: 145260 - DNA, 383 bp, Homo Sapiens
ttcaatggctaattagaatgtgttatttgatttctgctgtcagaaggcagtgtgattgtaacaaaaacaatgcggcttccccctttcgtacttcatttgtgttctcttaaaatagagtttgaacaaatattttaaaggtgcaaaataccattagaaaatactatttgaaatggacattatcgcattattttggcataatggccagaaaatattgtattgcttggcagaaaagaaaataaggtttaaaggaaagtagcacattagcattgatggctgttcatttcacccagtataagcaagtgcagtgtacaaagaagtatattttgaatacattatttccattcatttagcacaaataaatcatttggtttcactttgcagtg

SEQ ID NO: 145261 - DNA, 759 bp, Homo Sapiens
atgaagtaccccaaaacattttttagaatgattttggccatctcctttagtaaaatctatttttgtttcatagcacaaacagaaggctaaaagtaaactatgagttcagcttttaaaattactttgtaatcaggaagcttaaggaaatctagaattgaaattgattcttttgaaataaataagtactgaattttcagcaagttgaatttatcctcacaccagtaagatggttctattctgctgtatatagtcacagattaatatgtgcagttcacagagaaaggtgttaatgggtttcagataacattgataccgtaattacaaataattgcatttctactaacttggtaaatcagtgcaaaacactttggagctctctttggcatttctagctggcatgtctcgtacattccttgatttcagagtaggctaatgtaaaatggcattggatcttttaggataattggttcatctctttggcattccaccctgcccccacaccctactttacttattcctggtataagaattaaaagtgactgctcaggcgaagacagtgacagtggcttctggaggtcgtacatcaggtttcgcatagagatgacagtggaaaatgtatgtgtgggtgttcgggcatgggggtgagagcagagtcataagtccttaacccgtggccatttcttagggggttggagaaaagaccttattacctggctaaacaggattttgtacgtcacttggatttatctgattattaaa

SEQ ID NO: 145262 - DNA, 401 bp, Homo Sapiens
tttgaagcttcacacctttattgtgtccgggggcgtccggggcctcaggggtgttcgtagcccgtgggcagagggttcacgtggctattgtggaacagagtgtggttgccgtccccccaggggtagggcttggtgcggatgcggaggtgttggtagggacggaactcggggcgcgggcggtggcccgagtggagataggagttgaaggtgcagagggccacgctgggcagcgccagcacgaaggtcagcagacgccaggtacgagctcctgctcctccgtggcctcctttggcagcgctggccaagccccgggtcaggggcctcagaggcaaagccatgatgctgcggggagccgggaaccagcgctgtcctcgctccctttcctggggcctggggtcacc

SEQ ID NO: 145263 - DNA, 513 bp, Homo Sapiens
agttgtgaaacaaagcactcaaatttgagattgaggaggaggagcagaatgacaatagtaaagcctccagcttggagccaccccccagaaagccccttccccggagccccgcgcggggagttccggccccgggacggtgactccggggtgcagccgccaagcccccgtgtgccctcgctcaccgcttcacgcggatgatctggtcccgcatgggcttgatgtcctggaagctctgctggttgacgaggctgtagacgaggatgaagccctggccgttcttgatgtacaggtcccgcatggacgcgaactgctcggtgcccgccgtgtccaggatctccagcaccgacggcgacgaatccacctcgatctccttgcggtagaagtcctcgatggtggggtcgtatttctcgatgaaggtgccggtcacgaactgcacggtcagggcggatttgcctaccccgcccgagcccagcaccaccactttgtactcgcgcatcgtccctccgcggccgc

SEQ ID NO: 145264 - DNA, 570 bp, Homo Sapiens
ctattgtatgttacatgcagaacagcatgggtcatctttgtcaggctgagcagcatagttcatctgcctcacaatttctgcaaagagttcgtccaccattgttttactcttagcggaagtttccataaaggggcagccccactcttcagcaagggctctgccttcgctggacgatacttctctctcactttccaggtccactttgttcccaaccaagatgactggcactttctcataccgcttcacgcggatgatctggtcccgcatgggcttgatgtcctggaagctctgctggttgacgaggctgtagacgaggatgaagccctggccgttcttgatgtacaggtcccgcatggacgcgaactgctcggtgcccgccgtgtccaggatctccagcaccgacggcgacgaatccacctcgatctccttgcggtagaagtcctcgatggtggggtcgtatttctcgatgaaggtgccggtcacgaactgcacggtcagggcggatttgcctaccccgcccgagcccagcaccaccactttgtactcgcgcatcgtccctccgcggccgca

SEQ ID NO: 145265 - DNA, 1093 bp, Homo Sapiens
  misc_feature (61)..(87): n is a, c, g, or t
gtgccaagctaaaattaaccctcaactaaagggaataagcttgcggccgcatacgcggtcnnnnnnnnnnnnnnnnnnnnnnnnnnngaaaaatatagacatttattataaaatcaattggtttgataagaaagcaattatttaaaaagtttaatacaaatacatgttaagtgtacaaattaggattcttttgggcaaacaagttgttatctaaaggaagaagcagaccctccttaacacgttgtcataaaccctatgcctgaaaagttggtggctattacacggaaatattttatattgtgttctttctactcccgataactacttgttaaagaatcaggataacttagatagaatatcagaatataaagttataaataattataaaatatatctgtacaagatttttattgaagacacatcagtgcataaatgcctaaatatgaggctataaatacagcaaaatattcaagaactatgttatctcaattttagaaaagggaacttttctgaagagaaatgtttgaagttaaggtactaagatttcactaatttcacacattggtattaccaacaaattgcgattaaacagaaatcactcttttagacaaaaatatttcccgataatatgaaaaaactggagtttccaaattacaaaaatgttgaaacagaaaggtcagaaaaaacaatgtgaaattaagaaagtatttttgagggtttctttttcacatagctatgcttagtctgggtaaatcctgcacaggcatgttttttgtggcgtccagttggtcatattcctgtatgagtgctgataaagatgacacagcttctgtgaaacagctttcttccatcccttcaacttgtagatagtgatgaaggtgagcctttttcttgtagagcctcatgaatctctctttcagttccatgaaggtgggcttcacacatgtgttatttgctaaagctaataacgaatgagaatggcccacaggaggtacggaacacaggctggtcttccagccttcttgattccaggagaccaattgtagagatggttttaatctttcaatatttctacgaagatctgaaatttgta

SEQ ID NO: 145266 - DNA, 382 bp, Homo Sapiens
  misc_feature (315)..(317): n is a, c, g, or t
  misc_feature (364)..(364): n is a, c, g, or t
ttttgcaattataacccatacttgtttattctgttaaattaaaatatcattttcccatgacctttatttcatttttcaagatgacgtgccctgcccagcatgctgtttggaggtgatgtcctttgaagctctggtgcctatttgaagtgactgattcctggtactcaccctccctgctaaccacgtggaattcccctttcatgcttgccttcctcatgggaagagggctccacgtgggcagggaccatgctgtgtcctgttcgctggtaaagctacagtgcccggcacagagcaggggtggggggatgaaggggnnnagggatggacggaaagtaggtaggccggttgatggacagaaaagaantctgtttagaaaagtgtt

SEQ ID NO: 145267 - DNA, 411 bp, Homo Sapiens
cccttttcctttttttctcagtcccagattcccggcctctccccactgtcagagcatctatcaatgtggtgtccatcacagcggcagcggctttctctttcatcttcctccctctgccagagccagggagggagagtgggaggcgtcaaggaggtaggggagagactggcagaggaaaaggagtgggtgggtgggggccaagtaaatagatacttagatgatgaagtcaagccactgcggcaatgtttcttgtcagtttcacgcgggcaaagcgtgcctttcggtgggttataagcagcgcccggtccttccttctctcgccaagttgcctgatccttccctccaggcgcgcgcgcacacaccacactcacacaccccaaaaccaagactcgtcctacaggatctgggaaa

SEQ ID NO: 145268 - DNA, 746 bp, Homo Sapiens
gagtagctgagactacagcccatcttatttctttaaatcattcatctcaggcagagaacttttccctcaaacattctttttagaattagttcagtcattcctaaaacatccaaatgctagtcttccaccatgaaaaatagattgtcactggaaagaacagtagcaatttccataaggatgtgccttcactcacacgggacaggcggtggttatagagtcgggcaaaaccagcagtagagtatgaccagccaagccaatctgcttaataaaaagatggaagacagtaaggaaggaaagtagccactaagagtctgagtctgactgggctacagaataaagggtatttatggacagaatgtcattacatgcctatgggaataccaatcatatttggaagatttgcagattttttttcagagaggaaagactcaccttcctgtttttggttctcagtaggttcgtgtgtgttcctagaatcccagctctgactccaaatgactcaatttctcaattagaaaaagtagaagctttctaagcaacttggaagaaaacagtcataagtaagcaatttgttgattttactacagaagcaacaactgaagagggagtgtttttactttcagactccgggattcccattctggagtctctctgcttttaaaaaccctccctttgcaatagatggccaaaacagaatgatggtttattaaacttgggaaatttacgggggccctccagaacaagtg

SEQ ID NO: 145269 - DNA, 457 bp, Homo Sapiens
  misc_feature (51)..(104): n is a, c, g, or t
  misc_feature (112)..(112): n is a, c, g, or t
gtcccctggaaaaagaaaacagaaaatggccttgtttctttacccagttgnnnnnnnnnnnnnnnnnnnnnnnnnnnnnnnnnnnnnnnnnnnnnnnnnnnnnngcactatnccacctctgtccctcagctttgagcagagtgggggatgttgagggagagtccagtcacagtacagcctgcctgctggtgttgggggtttcctctaattcttcatttttccccccaacccttaccacctgccaccaccaccatcaggacaaaccctatgactgactcactgacgtcccactgaccacagctcccctctctggacagcgtgttttagcttccgctccttctggttactcctcccttccagtggtgagaagagaagagaaagcccagcctcctgggttctcccctcccctagaagctacatttgagtgtttgtgtgatctcatctcaaggctgttaaa

SEQ ID NO: 145270 - DNA, 324 bp, Homo Sapiens
ttttagcttaaacaacaggcatttatttctcacagctctggaggctgggaagtccaagatggtggctccagcagattcagtgtctggtgaggggggcttcctggttcacagatggtagcttctagctgtgtcctcacatggcaggaggggcaaaagagctccctcgggcatcttttataagagcactaattctatgcaagagggcagagtcctcaggacctaatcgcttccctaaactgttgaccttagggatgagagttcaatatacgaatttttgggggacacaaacattcaggccacagcagtatccaaactatataaggg

SEQ ID NO: 145271 - DNA, 469 bp, Homo Sapiens
tttgtaagcagaatacaggtttattttcccactgccctttgaagtcctcctcctagataagttatttcttgtcctgagcaagccctatcgctttcctgttcccttttcacaacaataagagtctcatttcagtaattgagagtctttctgaccaagtattaaaactccaatgtcctccccagtttaaagcaccttccctccttcagcctgggcaagccttagtctggaacacatatagttggggggtgacatggccagtgtcttctcttattctgtcttggccctacccccactccatagctgttggcttggtcccatccaggattggggaggtgagagaaaggggtgagatcagagtggggaagtgtcttgcctgacaggtgcagccgtgaaatgacattgcaagtggttgatgcacaatcactagctctttcttccgtgagatgctttcatcaagtccactcagtgg

SEQ ID NO: 145272 - DNA, 532 bp, Homo Sapiens
tgccaggcagtggagatacagtgataaatgcttgctgaagagcgctaagggacaatgtccagaaaaagagcaggcgtaacggcatctttttagcaagtttcctggcagtaaagtgaaaaaggatgaatgacagcaacttagtttacttgcagcttcctgtaaatttagtcatctgaacaagaggggactgaactgtttcaaaacagaaagcaattgtttcatggacactggccagtctacaagcagagcactctcatggggagcaccagatgagttccagccgcagttcttttataagctttaagtgcctcatgaagacgcgaggatctcttccaagtgcaacctggtcacatcagggcacattcagcagcagaagtctgtttccagtatagtccttggtatggctaaattccactgtccctttctcagcagtcaataatccatgataaattctgtacaacactgtagtcaataacagcagcaccagacagcatattaattcttttaccataaatttgtgtgtaattataaa

SEQ ID NO: 145273 - DNA, 784 bp, Homo Sapiens
agcctgggcctgggagtgtgccaggcagtggagatacagtgataaatgcttgctgaagagcgctaagggacaatgtccagaaaaagagcaggcctaacggcatctttttagcaagtttcctggcagtaaagtgaaaaaggatgaatgacagcaacttagtttacttgcagcttcctgtaaatttagtcatctgaacaagaggggactgaactgtttcaaaacagaaagcaattgtttcatggacactggccagtctacaagcagagcactctcatggggagcaccagatgagttccagccgcagttcttttataagctttaagtgcctcatgaagacgcgaggatctcttccaagtgcaacctggtcacatcagggcacattcagcagcagaagtctgtttccagtatagtccttgctattcatctttaattcaatcttttcatggaacttccagagaagaagccatggatagctttcctcttttcattggaagagaaaaagtgatgtatctgattattttatggatgagaggccaagacagacataggtatggatcgcagtaacagctctcttacggggtaaagctctcttatgaggtgaagctggactggataagaaaagaaaacgatgaacattcccctcccctcacaaaatgcacacacattaaccttcagcagactagttgctttcttagaaattttgtagatagaaatttatgtcatccattaactatgataaatgttctctagcacatagtctctgctaattaaataattatctgcc

SEQ ID NO: 145274 - DNA, 529 bp, Homo Sapiens
  misc_feature (35)..(35): n is a, c, g, or t
  misc_feature (274)..(285): n is a, c, g, or t
gtccctcattcatgcactcttccatctttttgccnttgtgccagctcaatttaaatgtatctgctctgtatctgttcaagtggagataatccatgcaaatcaggagccgtggctctcaatgcctggttcacagagaggactcagcttgaggaggtcactcgttcacagccgctcctcccattatatttttccccttattgcagaactgctgtatgtatacagtgactgaaaggactcaatttactgcaactgctgcctggctttacttacaacnnnnnnnnnnnnataaaggaacttacctccatctgtcttttcaagtttcagggtagaaagggtccctttaactcctgaagacagtaaatcacagtctgtgtggtggttctcagaagacacttaaaggactgaactggatgctctacatagcacccttgccaaaagggttcggaaatgacttccagcttcccacagtaataaaatggcactgtttggcatcttcgaggtaataaaagtgaattttttccattctagt

SEQ ID NO: 145275 - DNA, 469 bp, Homo Sapiens
  misc_feature (317)..(317): n is a, c, g, or t
  misc_feature (382)..(382): n is a, c, g, or t
  misc_feature (408)..(408): n is a, c, g, or t
tgcggccgcacgccgtcgcggttccccgatgcctccgccagccccgttgaagcggaagtggcgttcagggccgtcgggagcgctaacccagtcgaatttgggcttcgagcctgggaaggtggtgtagggtggcggcggtagggcccgggcttgggacgcaggcgccgagggaggaccagagcacccttcgccgtctccatcacctccctcggcttcctgtgcccctcgagaaacctctcccaaggggcgagcggctccaggaggcaggggcccttgcttcaggacctcggcgtaagagatggcacctgaggcagcanagaggccgccgcctccgccgccccccagcgaagctttggctgctaaggaactcgaggctgccggnaggggcccaaagagggcctcgattgnaagggtgattttacacagcaggctcagaccggactcggaatccgcaggctgggccatttcg

SEQ ID NO: 145276 - DNA, 501 bp, Homo Sapiens
gtacgtgggctgtatgttttctctctaacctttctgttgtaaatttctccaggaaaggaaaccaaatagaatcttggagaagatgttcccagttgggatgtcttactaaaggaagttgatccaaaatgcacaggggatggactgtgctgggtgctgtgtctcaccaaccagatttttacttctcttggaaatatgagtgttgagaagtcacgtgtgagccgttttctgggaatttccctgagataaaaagtaccacctccttcaagtttcagacgcctgctcagtggtcacatatctaatgatggtggacgcaggagtgtgaaggtcagctccattttctccgtctgcctttgtcatacaaatatgaaagctgcccttgaggctaagtatcattttcatgaaatggtttgttagtaggcacttagtgattgctgtttaactctaatttgtttttaaaatgtttaataataactactggataaaccatattgaacctataaa

SEQ ID NO: 145277 - DNA, 374 bp, Homo Sapiens
  misc_feature (164)..(189): n is a, c, g, or t
ttttaataattaatgacagaaccagtattttatttcagagagggaggcactgttcaaaggtgaccacaaagggtttgaggtcaaaggtgtattaaactctgaattagccacttggctctggctaaagtcttcagtttcttcacctgaaattaatgtttctattnnnnnnnnnnnnnnnnnnnnnnnnnnggttccttgtctctttcttggcttcttcattgctttcctttcctactgaatcttccttctttttgttattctcccagaaaaatcatggtgaaggtgaggggaatcaagcatgtcttcacatggttagagaaatttgggaaggttcttgcagggaagcagtggcttctcactatccactgggagtc

SEQ ID NO: 145278 - DNA, 457 bp, Homo Sapiens
  misc_feature (108)..(215): n is a, c, g, or t
cattttggaattaaaactccatgagggcttgaactttttgttccctactacttgtaaaatgcctgatgtatagtagatattcaatttgctgaataataagtgatactnnnnnnnnnnnnnnnnnnnnnnnnnnnnnnnnnnnnnnnnnnnnnnnnnnnnnnnnnnnnnnnnnnnnnnnnnnnnnnnnnnnnnnnnnnnnnnnnnnnnnnnnnnnntgcaacatggttcaatgacttgcttgaggttactgagctagaacactgggagctggtgtataaacccatgctctctggatttgaacctagccagtcccatgccagaatttgtaccataaaccaatatgccatgtcatttctctcatgaatgaatgtatatcatccttgtaagctctacttttaatggctcagaaggaagattttctttgaaattgaaacttgtttaaaccactcttttattt

SEQ ID NO: 145279 - DNA, 508 bp, Homo Sapiens
tttgctgtttagattttctgtatttcaagaagaatcatactcaaacacaagtggggtgacagaacactcagcgatatgtaattagttacgaaggttaacgctaaggcattgctttgtttacagtttttatcctgagtcacatcagatgtttcaactacatgtcctcttggtattccagatattttgctgtgatgggttcttcaagctgaattcctccactgcccattaatgcaaatgctggatacagtgtatgtgaacagtccacttggcgttcataaaggcatttcatctgatccatatcatagaaatttactttgcctttatcacagtcaaggaaaatcccaatacttgttggcatagggagaactctattttcaggttcattagaagaagtaggtgacttgcgtataaaaaatttctgcatgcctatagtaactaaggtaaaatgttgtgaagaatcaaaacaggcatcctcactttcactgtcatgcccactgtcttgctcata

SEQ ID NO: 145280 - DNA, 721 bp, Homo Sapiens
tttgcaatggacagctgaataaatgatttaatgaatacaatggatgttctgatgcaactcccagatctcccttcagaaataaaggtctatatgacaataagtgatagtttcgatgaacgtaggctggaggaaagagttaagtaagtctagaggcaaagcttcaggaaagaggagtaaatgggaaaccttcagagaagcagcaacaataatcgctggccacaggcaggcgttttaagttttctcaggccagaagtgcatgactccaaaaaagcgcgccgatgtcttttaatgcactgacgggagagaaaaacgtacgctagcggcgagcacagaagcagaaaatttatgattgaccccggaaacattttattttgcgtaggtgtcgggagagctttcttttgcgatttgttccttgatccggaagaaaagatagcaaatatcacttgccattggattgcatcataagggttgggctttagcgagccagtcaccttggcaaccggacgtgacgaccccggaagacgcccgaccgagctttgctccagctatcggcttcagtgggcggggcggcagagccagactgacgcagtcttcagcactgaccaggctctgttgggggtggtgccaccaaggccacgccccctgcgcctgctccggcggagtctggagagttgtcgtaggctctgagggcggagactcacgccgattctctctcagcgta

SEQ ID NO: 145281 - DNA, 902 bp, Homo Sapiens
ccagccactgctgtctccttagctgctcacatatggatactttcacagttcaggattccactgcaatgagctggtggaggaataatttctggatcatcttagctgtggccatcattgttgtctctgtgggcctgggcctcatcctgtactgtgtctgcaagaaatgggaaattgccaagcccctgaaacacaagcaagtagatgaagaaaagatgtatgagaatgttcttaatgagtcgccagttcaattaccgcctctgccaccgaggaattggccttctctagaagactcttccccacaggaagccccaagtcagccgcccgctacatactcactggtaaataaagttaaaaataagaagactgtttccatcccaagctacattgagcctgaagatgactatgacgatgttgaaatccctgcaaatactgaaaaagcatcattttgaaacagccatttcttctttttggcaaaactgaagagggttcacacaacttattttaaaacaatcaagattggttgaacttcagtaggtctctgggccctgaaagccagtggtgattttatgaagctctataagataaagcacttcccaaaccttagatgaagacacccctgcgatcggatgactgcagccagaggagacacatgggtgctcggctctgaggacttagaggggtcagccttgtgctgttgaggaaactttccatgggaaggaccacggggctccatggctcccacctgtgggaaactactcatttcttggcattctttcccccttcattccctttggtttgcatggttctgagtgatattaaatctcagcatttggttgtgcagaccctcccaggctcccatccccagcaaggccctcaccaagcatgctggtctttaccctctc

SEQ ID NO: 145282 - DNA, 463 bp, Homo Sapiens
  misc_feature (22)..(22): n is a, c, g, or t
gaaacagtttctggagatctcntcattacctcttttacaatcacctcactccagcatggtgtctgttacctcttcccacttgtgacaatgtctagtaaggtccactctccattctgtgtgatgaccacttattacaaccctcagaataggggacagtggtgtgccccctgcaatacaatggtttctatctcctgatacttttattacacctctagcaggatgtcttgtgatcctccttattgatttttccctcacgatgatgaacaattatctcccgttactcacctagcagtatctaactgtccctaacacagcatgtgggaatgccctcaatacggtggatgctgttaactttcttccttcccctcaggcaatggcggtgacttacaatgaaccataatgtccacatttcccaactgtattttggagcctcttctgtccccttctttctaggaccccagtt

SEQ ID NO: 145283 - DNA, 387 bp, Homo Sapiens
ttttcttgtgtgacccagggatttattttcatcatccatagtagtcaagttgagctaaaccagaatttcattttgacgtgaatttcaattaagcagctcaagcctgtgggtttggatccacgtattatcagcagctctcagaacagcatcttctcctcacgtgttcatccaagactcagggactgtctcaacattatggctctgaaagataggtccaggctggggctggagctacagagagcaggagttgctcatgttgaaggctgtgctgcagggctggctctcatacttttgttgggaggattgaattacataaaacacatgaggcccatgcccggcacctgataaatgttaatattcttgggctgtggaggttcccttgccagg

SEQ ID NO: 145284 - DNA, 561 bp, Homo Sapiens
  misc_feature (537)..(537): n is a, c, g, or t
ttttctgttttctgacgacaatttaattccagttgaaatgtcattcctgtgccagcaaacaagctctactcaatcactatccttgtgtgacccagggatttattttcatcatccatagtagtcaagttgagctaaaccagaatttcattttgacgtgaatttcaattaagcagctcaagcctgtgggtttggatcctcgtattatcagcagctctcagaacagcatcttctcctcaccttcatcagtaatcccaaagggtaacttccccgatggatgtgaagtttactcaacgtcgtgcaaacagaaactgtccggtgtagacactgtgagtcctgtgttcatccaagactcagggactgtctcagcattatggctctgaaagataggtccaggctggggctggagctacagagagcaggagttgctcatgttgaaggctgtgctgcagggctggctctcatacttttgttgggaggattgaattacataaaacacatgaggcccatgcccggcacctgataatgttaatattcttngggctgtgagggtcccttgccagt

SEQ ID NO: 145285 - DNA, 319 bp, Homo Sapiens
agagaccatgtgcagtttaattgtggggaggctgaggaaagcagcattttcaccaaattggtgtaaaaataaaatggggtccacacgtgtacactggcagctacagtaaatttaaaaatctgagcagcaatttgaaccatttcttggaaaaacaaacactgacaaacactgagttggtgcctggcgcggcccgcaggtgttggaggccagctccgcatcatgggtgcagccccgcactgtgggcctgcatcccggggatcccagctccttggggagtggccggtgaccttccacgcagtgggctgagccaggcctggct

SEQ ID NO: 145286 - DNA, 975 bp, Homo Sapiens
  misc_feature (66)..(100): n is a, c, g, or t
tatataggcgctacgcgctatagcgaacgacgagcgcagcgaagtagtgagcgaggaagcggccgnnnnnnnnnnnnnnnnnnnnnnnnnnnnnnnnnnncagtcgacggtaccggacatatgcccgggaattcggccattacggccggggtaactttgtataatttagtagtatgtacttggatgtttctttttgaaaagtgaggattgtattttctcatctattcttttggtgttaattaacttgagggatttcttttttaagtttttaatatcaaaaattgctattgtatagtttgcctaaaaggaagttggagtgaatatcatctttgaaggacactcaaatttataaggtagaagcaatttcccagatataggctgaacagaaacatttactttgccagaaggagcctttaggagtatatgtgggctaatcagaggttaataatgtcctcatctcctactctccatttaaaaaacaaacttcattgtagtaaattcaaataggaaaaaatgggggagtagttaagcaaaatcaacagtcatcctactatgttgaaagaaccaatgttaatattttgataaatatcatttgtccttttactttgctaaatatgtatatttttataaaaatgggctcatatgtgcataccattttgtaacctgcttttttcacttaacaatatattgggaacatcttttccaggtcatgcatagtcttctgcatcattttatggtttattattctgtgtatgactcaatcataaattcattttaatcttctattggatatttgactatttaccatctgttcacagttattaacagcacttcactgaatccatgtacatccatgactgtttccttaaattctttgaattgctgggtttaccaatttgcaaaattttaaggctctgatacttcgaatgaagtgtatttggaaattttcccttgatccagcgtgtgtcctatata

SEQ ID NO: 145287 - DNA, 560 bp, Homo Sapiens
caccagacagttcaccagctgattacagtgctcatgaagttcatggccaaggatgaaagcagcgctgagtcagacatcagcagtgcaaaggctttcaacacggtcaagcgacacctgtacgtcttactcggctatgaccagcaggaaggttgcttcatgattgcaccctcaaaaaatgcgcctgtcaacttgctttaatgcattcattgcaggaattgcccaagttatggactataacattaacttgggaaaacaccttctccccttagtggttcaggtgctcaaatactgctcttgtcctcaactccggcattatttccaacagccgcctcgttgctccctctggtccctaaagcctcacatccggcagatgtggttgaaggccttgcttgtcatcctttacaagtatccataccgagactgtgatatcagcaagatcctgctgcatttgattcacataacagtcaatacactcaatgcgcagtatcatagctgcaagccccatgccacggcaggacctttgtacagtgacaacagtaacataagcagatacagcgaaa

SEQ ID NO: 145288 - DNA, 626 bp, Homo Sapiens
tttttgtttacagtaccatcatttattattgtccttgacagtctcctccatttccaatgcttttttctaaaaacaagagttccaagatattaacaaagtatctgtggtgaaataagtggcagaaatactatgtgagatgaagctgaacaggtttttttctgcatgatcttttcatacctttaatatgttgaggtatataaaaatcttctcagatggcttgatccaagtaaaaccagtgattctgcaagtagtctatggattcaggcagctctgaggtgattttaagggtactggaccccaaatccattagtgacaagactggaagctttatttttaaatgtcaagagaaactgtgtggcctggtcactagaacattcaaactgattcaaagaggataatctttcagatgtgacctgcccagaaggcagaagggactagtctgttcaaatgtggttccccactcagagctgtgatttggccgtggtgctggggaaaagataaattactggcaagaaaataatttaggaggtaattgtccaagcattatcttcaagggcctaaactgggtaatctgcctttcaattaagacaacatcaagtgattagtaacttaatcctgggactgag

SEQ ID NO: 145289 - DNA, 421 bp, Homo Sapiens
ttttctgggtacacaaaaattgttgtttaattcttaacaactacttgatggtagacttaagtatttgactccaagtcccgtgctctttttacattccaacaattgcctcttgaatctgctggaaacgaaaagaatggaaacagctcctggagagaatacttgggaactccagagtttgcccattcattccttcattccctcttaaactcctgcataaaggccactgccctgtgcccacgacggtgcttataccgagagcgtcaaagatacaggaatcacagtcttgaccttcattattcccatttgaatgctgtgtcccaggccccttattgtctcacagtatttaccacaactaccgtatgggctaatcctacatctctattttacagatttacaatctcagagtggtaaagtctcctta

SEQ ID NO: 145290 - DNA, 401 bp, Homo Sapiens
tttttcagagtagtaattcttgtttgtattagtagaggtgggagtgaaagtttcacacaggggaaacaatagacactaagtactttggaggcttccagcagcaaacctcgggttccagaacacgggtgaaggccagtctttcatgattactgcgtgcgcggctttttcctaggggtttctgaaacaatcccgcaggatctacaccggctgtgacatggaccgcctgaccccctcgcccaacgactcgccgcgctcgcagatcgtgcccggggcccgctacgccatggccggctctttcctgcaggaccagttcgtgagcaactacgccaaggcccgcttccacccgggcgcgggcgcgggccccgggccggtacggaccgcacgtgccgacaccaacgggc

SEQ ID NO: 145291 - DNA, 1221 bp, Homo Sapiens
  misc_feature (117)..(117): n is a, c, g, or t
  misc_feature (1056)..(1065): n is a, c, g, or t
agtgtttggggggaattcccgggatgcccatataaggccccggattttccttggcaccatttggtgtccggcttttgcccgccaaggaaaccccattttgcttccctggaaaccttnccagtgatttgggatccccccaaaaatccacattccccaaaaaattattgtaatgagccgtggggatcgagacccaggaaatgttaaaacttaaaaaaaggaaacatgcgccttccctgtttggtgatgatcatctccgtttggtgccggtgaaatttcagccaaaggggcctgttgcacaggtacacctgtgctttgccgggcaccagccccggctgggtggaggagaactggtagaacggagctccttggtaggagtggccgtactgctgtgggtaggggtagccggccgtggggtatccctgcggcgaggagttggacaggaggctgttgtaggctccgttggtgatgaccgggtggtgggccatgtagcggctagggctgccgatggagaaggcggggtgcgccggtccgtgctggccggggtacgggaacatggcactgggagcagtggccgcagactgtggctggctggactgagagaggaggtagcgatctgcagcagagccatcgaaactgtgacgaagctcagagaccccgtccaagacaggagagagtttacttctctggacgtcccctggtgagtccttggagtcaggaaaattgtctgtatctgactgattcgtcatccccctggtaatttttttcaaaggtgaacttctctccaggttgtcagtggtcgagataatgggatgatcgtgcaagacaagctcggatccgcctgaatgtgggtagctgctgctcacattgagaaatttcttggagagcatgatagaaggagaaaggcagtgctccagctgcatagctctagaacctgaacactcgccctcccgtcctggtttttaaagtcctatttatcataaactagaaatccacagaccccctcactagacagaaagcacttcaaccagcaaatgcttctcaaaggtttgatttacnnnnnnnnnnccctgggagaagagattggccaattgacactatgcagcaatcagaaaaggctcacttttgatcttgctgcttgtgcagccgatgaaacggctcctgccattggttagctgctgacagtaatttaattagatagacattaattaggataatcacctg

SEQ ID NO: 145292 - DNA, 528 bp, Homo Sapiens
  misc_feature (508)..(508): n is a, c, g, or t
tttttattaaataccatgtttttatttttaatcaaatgtttgtatcattgagcttccccaatatactgtttttcacatatatggatactggctgagttttgttggactcagtggaaatccagtatatgcaggtgatgctgcaatgtaagaatgtggtgggaagattggtttgtactgagtctgatgaatggttggggatggtaacagacggggatttaagcccactgggacttggtgaactatgccactgggatgggagatattataagttggatgctgtaacataggtcttgaggtacacggagaggctaacaggtgggccactggtgcagcactactgagggtggctgatgatgggtattgaagtagagtaggctgtcctccgaggtgtgtatttccagccaggtgggcatgcactgctgtgtgattgggacttctattagaaagagtgaatggattactggtaacacttagaggaatataagcttgctgtctttcttgcccaaangtttcattccactcttgatg

SEQ ID NO: 145293 - DNA, 451 bp, Homo Sapiens
ttttttttgggaggaatggaggatttattaatggatggcctcaaaatttacaactatagattgtatttatcggttcaagccaagaggccctgtctacatttcaccttgacaacatctttgggttgaacctcatgcttctccttcctttaccacaggtcatcatctgtcttctccatagttcatagaacaaaaaacaacatgaagtcccgcaagagctagtatttcttgtgaggatttaatcctctgaataactatgaaatgggaagcataattaactccttttacagataatgaaactggagcttggagagttagtaccgtggccaagatctctgagataggaagtggtgatacccaggacaggaatctagatgctacgatgccagagtcttgaaccaacccctatgcctgctggccttgggattaaccagaaaaatgaaagtccagatcc

SEQ ID NO: 145294 - DNA, 457 bp, Homo Sapiens
ttttgactttttagtcttgtttattttctccgtgcctgttcccgccccccgcagctccacctctgggagaggggcgggttcagctccaggaggcggggacttcccggcttggcgtggctggggtgtcccgtggaccccagtctcggcgcggtgacccacttatgggacttggcctttctttgttgtttgtttaaggcagggtttctcagcctgggcactactgaggttttgggccggctaattctgtctgggttggggggggtgctgtcccgtgcttcgcaggttgtgtagctgcatcccccgcctctacccagtggatgcaagtagcagccccagtgaaccaaaaatgcccccagactttgccaaatatcccctcccggggaagatcgcctcgcttgaaaaccactgttggaggagagcctgggttttcgggaggtaaccgtttacaaaggggaga

SEQ ID NO: 145295 - DNA, 869 bp, Homo Sapiens
  misc_feature (759)..(759): n is a, c, g, or t
  misc_feature (821)..(821): n is a, c, g, or t
  misc_feature (823)..(823): n is a, c, g, or t
gcggccgcgtgagacacgagtgattgctgtgctgggcaaagctggtcagggcaagagctattgggctggggcagtgagccgggcctgggcttgtggccggcttccccagtacgactttgtcttctctgtcccctgccattgcttgaaccgtccgggggatgcctatggcctgcaggatctgctcttctccctgggcccacagccactcgtggcggccgatgaggttttcagccacatcttgaagagacctgaccgcgttctgctcatcctagacggcttcgaggagctggaagcgcaagatggcttcctgcacagcacgtgcggaccggcaccggcggagccctgctccctccgggggctgctggccggccttttccagaagaagctgctccgaggttgcaccctcctcctcacagcccggccccggggccgcctggtccagagcctgagcaaggccgacgccctatttgagctgtccggcttctcatggagcaggcccaggcatacgtgatgcgctactttgagagctcagggatgacagagcaccaagacagagccctgacgctcctccgggacgcggccacttcttctcagtcacagccacaggcctactttgtgccgggcagtgtgccagctctcagaggccctgctggagcttggtgaggacgccaagctgtccttcacgctcacgggactctatgtcagcctggctggccgtgcagccctcgacagcactccccgagcccctgcagagctggncaagctggcctgggagctgggcctgagacaatacagtaccctacagaaggaccagttccatncngcagacgtgagacctggcgatggccaagggctagtccaccacccac

SEQ ID NO: 145296 - DNA, 441 bp, Homo Sapiens
gggccgccttggctcggtcatgatggctgggtacttgagtgagtggcgcacgcccacgtaccggtccacggagatggtgcagaggctgaggatggaggccgtgcagcacagcacgtccacggcggcccatacgtcgcagaaggcgcggccaaaggcccagaagcccagaacctccatggtggccgagaagggcagtacggtggcgctcagcagcaggtcggccacggccaggttcacgatgaaatagttggtgacggtctgcaggtggcggttgcaggccactgagaggatgacaagcaggttacctgccacggccataaggatgaaggctgccaggaagacgcccacgccccttggccctcagcggcgtccctcttcctcccgccctctcccccgagtctctcggtcactcgctggtgcccttggcgcgcggtgcgttga

SEQ ID NO: 145297 - DNA, 463 bp, Homo Sapiens
tttaattttaagtaatttatttcaatagaaatatttcagaaaactgtacttaaattcatcttaagttagcttatgcagacacactgaagatcgcacactcacatttgcatattaaaaagaaacaaaaagtgagagaggaaccaagctgcacatcactcaaggaggtcatagtgcaatcgagtgcttcatcatcagagtacctcaagttaattgggataaagaataaaaatggcttgtgttttcagatatattatcatcactgggtacctgtccttacagatgtttgatctccttcagattatgttgtgaaccagttccccaccccctccccacacacatgttctttagtaggatgtaaaacaatgaatttgtcaataatcaaggtacagaaactcttgagagtctgacttattatcagctattttaccatacctattaagtcagtaattattggactatatat

SEQ ID NO: 145298 - DNA, 457 bp, Homo Sapiens
aaagagtgtcataagatatttattctttttaaagaaatacagattctcttaagattccatagttctggctctagagaggaatcagtcatgtagaaaataccagacaggggttacagggggcctggagagaaaaagaaagttcattctccaataaagatgttatgaatcagttggtcagcccattgagtgtgtattctattttcgtagttctatctgaatatgttttacttctttccccctttgcagatcttggcagaaaacctcaccatggtcaccgaattcctgttgctgggtttttccagccttggtgaaattcagctggccctctttgtagtttttctttttctgtatctagtcattcttagtggcaatgtcaccattatcagtgtcatccacctggattaaaagcctccacacaccaatgtacttcttccttggcattctctcaacatctgag

SEQ ID NO: 145299 - DNA, 366 bp, Homo Sapiens
ggcacgagggctataaagtcaaatgggagatacttgtttgcaagaaatagttcttttggttcttacttttccataaggattgagtctcaaaatgtctggtagcatccactgcattttgtaggggacaataacaaagaagatgccagcaatatcttctatcttttccaacattattcacctctcccacccaaggacaatggtgggctggacagagcattcaatgaccgagaatctaccataagctactagggccacatcttcccctttcttctcccccaggtttgtcccatttgtactgactctgacccaggttgtcatgacttgagactcactagaagtttcagaaagatgcagactgctttaaaa

SEQ ID NO: 145300 - DNA, 317 bp, Homo Sapiens
ttttttaaaaacatgttaagatgttttatttcttaatcagctaatttgactgggaaacaaagatgccttttattcacattttctttgagtcgtgttactgtagtaaaagttccccacaagatttggcctttgctcacaagttttgcggctgccaattagtttccagagtcgctattttacaaaaatgcttctcacttttaaaaaatgtaattgaatgtctgttcatcacagagtttcttgtgttcaagcccagggtgttaaacattttccaggttgacttgggtcagctttgaaaaatttcagacagtgaaacttga

SEQ ID NO: 145301 - DNA, 386 bp, Homo Sapiens
tttaacactgaaatatttttaatattaaaatgttcaatattttcttatttcaaggccagtgagagaagtctcacactgctcacattctgtagtgtgtcattcagggtcacgcatcacacccactgtgcttacggcgctgtcactgaacaagacgttcggttgtgcttcttccgtgaactcatacattacaaggtcagcactcgatgccgggttacagcgtctgagattcattcacgaaatgacaggatgctgatttggttgcagatgtggtctgagtctcaaggataaatggctcttgggatatggttgctatgacaatgttgttgctaggataattccaaggatcacaagcaaaacaattacacaaataataatgaacatcaatt

SEQ ID NO: 145302 - DNA, 487 bp, Homo Sapiens
gtattccatctgtgttttatacaggataatccacaaaagcatgcaacattcagaggatcttgaagtgccaagttaattgtcactttcactattaagtactggctgcatagatggatggagggaggagaggaagatgattcaaagagcttgctttcaaagagcttacagttctacagcttagagatgaaaataaccaaaatatgaggtagaaagtggttaattttacctctccttggctttacgtctcatgtgtaaagttatagggggtgacagttcatgctttattgaaggacatgatatttacgtcaggctttgagggacagatcagatatagacacatgatggcaggaaaggctggagaaggcatttcagattgaatagcaagtaattccacagtaggaaaattgtgagaaagctatttctttgtatcaaattttaagaaaaatatttagacatgcttaatgcttaaatatttgaaatttttaaa

SEQ ID NO: 145303 - DNA, 645 bp, Homo Sapiens
  misc_feature (608)..(608): n is a, c, g, or t
ttttttcatggaaccaccggggatcttttaatccatttaaatacaaacatagaagatcagactctgatctgacattatttctatatttttagaaacacttttcactcataaatccaaggtgacaatggcattaaatggcattaaaaatatctacaggaaaggactaccacgaaatacaatattatgataacagttattgcattaaagtggttacttttctgtattcttcacatgtcccattgtatcactatacatttttataataaaaaatcgtaaattaagaaagaattcaagcaaagtattgttgactttataaaataattcttaaaacaaatgttcagaaagaaggcattcaactaagatagagaagatgctggatggagaggcttgcaaggtcccgggaggagctccagggtgaagctcatcactagcctttccagcagcactgtccctggagaccagaagcagtgggagccccttccctgtggcaccacggactcccaccaaggcacgtatcatgaacactgtacttgtacacgtttattaccccttgggtgtatggggaatctgagagcacctctggaatcatacttgcatccttttacttngagaaatgagatcacacacaataccagatgacaatga

SEQ ID NO: 145304 - DNA, 416 bp, Homo Sapiens
agggtgttttgactccatgcttataactacaacattaaaaacaccaataatggctgaatttttatcaagaaagtattttcttaattaatgcttactcaatcatttttactccaagataaatgttcaatacagagcagttaaacaatttctacctttttccatcttctattttatcaaaatcattttatggagatgaattcttttgcatttggaattttacaatgatggcttataatttattgacaataatttatttaggtcaaattttagcttctgccactgaattttccatcgtagttttatttctactaagtcaaattttcctggtttaaatttgattgatttgaattttattgggataatttgattcccctgtgaatgtttgctcattaacacattctttgtgtaggttaaaa

SEQ ID NO: 145305 - DNA, 549 bp, Homo Sapiens
ggtcaccagagacgcccgtccccgagggcttccggggccaggcaccgcggtgttctttgcccccagcgtttctgagagcaaactcccaaggaagtaaatcccctctctccctgccacctaagtagcaagtaaacccgtacttagccttagaactcgaggttcagtctcggtggagacgggtcagcccttgtccccgccgtccccgtgttttttctggtggtcagcgggctcttctgccttccctagttcccgagggagggcaccctcgtgggcatgggagctgccccggtgtcctcccgtgcagtctgtcacccacaaagggggacgcgggcagggcgccggagtgggtcccctctccgggcttcccgagggccgcagctgcctgctcggcgcctggcccggccgcgggcgggtgttgtctgacctggtggtttgttttgggttgttgatcaagcatgtcttgagtttggtcggtggcgccagttagtctgcagcgagaaggttcacacaccccctctattcattcctcttccacaggtgtgcggccgc

SEQ ID NO: 145306 - DNA, 1507 bp, Homo Sapiens
ctcacttggggccaacttagctaaaaggtgctggtttgccagcaggcagctcccagccccttaggccctgcccatctttagggcctgagcttgggccagagatttgaaggaggtttagggtcagggtcctccatcctgaagttccgagtgacaaattaaaacacaacaaaataatccttttgttaaaagaatgaccctgggccctcctggccagggcctgagcacatttcagtctgttatgcaggctgagaggccaggctcctccaaggccccatgagctactggttgttgcagccctgtgaggcagaggagctgcctgcctgcttttttctcctcttgttgaggagccggttgttagaggtcttcaggtccttgatcttcacctggtcgtagtctacccgcatagtggccaaggcactggtcatctcctccttgacttcgtcccagtggtctttgtcctcctgcagcactcgggccgtgtggagtggggtctgtggcactaccatcgattggttgatccaggggtggttcatgaactgagtgatggtcagcctctctgtggggtctgtcttcaacaggaggcggatcagctgcttggcatcctcagagacttctgaccactcaggattggggaagccgtactggcccaggcgaatcctcctcttcatccccggggagatggcctggcccgtgttggagtagaagggtgggaagccacaaaggaggatgtacatgatgacacccagggaccacatgtcacatgacttgtcatacttctctggacccaggacctcaggggccacataatagggagtatagcagggtgtctgcagggcattttgggtggtctccttagcaaagccaaaatcggtgagcttaagcactgcgtctttctccttagatgtgtagagtaggttttcaggcttgacatctcggtgggcaatgttatggctgtgcagaaactggatggcagtgccaatatcccgcattatctctgcagcttctctcttagtgaaagcctggtcgccacgctcctgaatcctgctgaacaactcaccaccttccatgcattccatgatgatgaggagacagcgcttgccatggtgcatgttctcatacacatccaggatgcagacaatatgggggccgccagaagcctgccagtgatggtctacctcctgccgggccttggggctgtcatacaggagcttcagggcacacttctgtccagtgcgccgatggaagcactccagcactttgccgttcacacccaggcccagcacctgcttggacaactggtagtcgtcggtcactgcgtacttcttgggctcccgccgcccccccggagcaccgcccaagccgggtccgccgggtgcaactggcgggggcacagggcccccctgctcctctgctgtttcaccatccatggcccccgcggggcgctcagaggcggccccagcctggcgcttctagtggcaccttgctgaggtaccggcgaggggcagga

SEQ ID NO: 145307 - DNA, 503 bp, Homo Sapiens
ttttttttcatgtttatatctgcattttactgtgacttttcagtttgtgttttataaagtgtgcaatagacttaacatttggaggcatgaatacgtatttgtcggggggatacatagtcgtttttgtaaaccaatgggatgtgagttcacagggggtgggagcctgtggggtgggcactggctcggtcttccagctccgagctgctggctgaatcccggggagagaagtatcctggggctttctgctgacctgccgagtaattgccattttcagatcttggtttcttggtaaataatgacatttctccatctcactgaggatgctggctgtatggaaatgaagacaggactggcccagccagggccctggagaggtggccagaaagaccctggcggactcctaaattggtttatttgccagataatcggaggcaaagccgataccctaataggacatgggctcctccaggctgtgcgtggccgggcggtgatcactctgaagt

SEQ ID NO: 145308 - DNA, 474 bp, Homo Sapiens
gggccgcctcaccacttcaatgtgctcccgcgccaccggcatctccagccgctccagggtgtctcgcagcaggcaggcaagcaccggcactgagaactgggggttcagatggcccacatagagagtgtgcgccgagggagcctcctcgaggtcagagtactccgtcagggactgctctgtgggtagctccggcagggactcctcaccccaggactccatgaagggctctgacacctgtgtttgcactgatctcttcatgggggtcatgggaaggctctccctgggaaggggttccaggattcctcactgctggctgcttctcccagggtctgtgttctcagtgtggcttaagggctcccagaggactcagggagtgtcccggctcctgggaggtacacagattggcagagactgggcagggccagagagagggagggcagagggcaagcaggaaagggcctgccacccacctga

SEQ ID NO: 145309 - DNA, 447 bp, Homo Sapiens
tttaatcaagaaatagttgaaaaggatgggagtgaaggcactttaagcccacagatgccagcagaggtgggacatgacaagtgaggctggggggctggccccaaactggtccctcccaagtcagcttggacaccacacagcacttcgtgcgccctcggctggcttagcacatggacaaggcattgccgctggagtcccaccttcttagagactcctgaaaaggagctccacgccaccccccacacctcgccctgtgccactcttccacttgtcctgtccactctggacatagagccttcacggtaaaccagtaataggacgtcaactactttctggaattttgtgagcccaggtgagtgaggccgttctaatttcaacatctacagaagttatcaagtttcaggtttaataacctagcaagttatcagacctgaaagcaaggggcct

SEQ ID NO: 145310 - DNA, 443 bp, Homo Sapiens
  misc_feature (55)..(150): n is a, c, g, or t
tttttgaaaacagacatagtctcactgttgtccagattggagtacagtgacacannnnnnnnnnnnnnnnnnnnnnnnnnnnnnnnnnnnnnnnnnnnnnnnnnnnnnnnnnnnnnnnnnnnnnnnnnnnnnnnnnnnnnnnnnnnnnnncagctcacacagaaggtttctgagtaatctgttgctctttttccctacaatttgtcttccatataactcaaactgacaaggctatggcttacataaagaaatatattataaatcaacaacactcatgataagtttacataagacatgagaatacacctgaatcaccaaccgggaaaaatgattgaagagcttgaaattaagcctaagtgtaagtctctgttaagcttacaacattacaatagttaaatcgaaggttagaaagaaaatggtagacattgctccttttcctgtac

SEQ ID NO: 145311 - DNA, 446 bp, Homo Sapiens
tttacagtcacttgattcagggtccttgttttaatgatggggctgtgaaggatcaaaggggtcagctagggctcaacactcaaagggcagctttgggccaagtcaatcaaaccagcctggtgagctgagatgcacgttacccagtaaatacaggtattgggatagactgtgtctctgcagtgtgatggttaattttgtgtgtcaacttgactgggccacaggatttccagagagctggttaaacagcatttctgagtatgtccagatgagatcatcacttcaaccaggagactgagtaaagcagatggtcctcttcaatgtgggttgggcctcattcaacccactgaaggcctgaatagaacagaaaggcacaggaaggttgaatttcatctctgcctgattgcttgttctgggacatcgatcttctcctgcccttggcattcctg

SEQ ID NO: 145312 - DNA, 518 bp, Homo Sapiens
gggccgcctcaggaggatcccttttcccccagaaattactcaatgctgaaacctctcaaagtggtattagagacgctgaaagcaccatggacgggttttatgatcagcaagtcccttttatggtcccagggaaatctcgatctgaggaatgcagagggcggcctgtgattgacagaaagaggaagtttttggacacagatctggctcacgattctgaagagctatttcaggatctcagtcaacttcaagaggcttggttagctgaagcacaagttcctgatgatgaacagtttgtcccagattttcagtctgataacctggtgcttcatgccccacctccaaccaagatcaaacgggagctgcacagcccctcctctgagctgtcgtcttgtagccatgagcaggctcttggtgctaactatggagaaaagtgcctctacaactattgtgcctatgataggaagcctccctctgggttcaagccattaacccgttctacaacccccctctcacccact

SEQ ID NO: 145313 - DNA, 435 bp, Homo Sapiens
tatgatagacaactattggttttatgatcagcaagtcccttttatggtcccagggaaatctcgatctgaggaatgcagagggcggcctgtgattgacagaaagaggaagtttttggacacagatctggctcacgattctgaagagctatttcaggatctcagtcaacttcaagaggcttggttagctgaagcacaagttcctgatgatgaacagtttgtcccagattttcagtctgataaccgaaaaatgtcctgtttccccttatcctgattgcgtgatccagtgtgagcagcccttcatgataaaatccactgtggttgatgtaaggtcacagtagaggaagccgccctgtcatctctaatgagttgggagaacaagggtttccttagacctctttctcaatcttgaaaattaaacccaatattgtctatcat

SEQ ID NO: 145314 - DNA, 363 bp, Homo Sapiens
acccttccttatcctgccacctcgccgggggccaggacgtcctccccaacgtcgccctcaattccaccgcctatgatccagtgaggcatttctcgacctatggagcggccgttgcccagaaccggatctactcgactcccttttattcgccacaggagaatgtcgtgttcagttccagctgggggccgtatgactatggatctaattccttttaccaggagaaagacatgctctcaaactgcagacaaaacaccttaggacataacacacagacctcaatcgctcaggattttagttctgagcagggcaggactgcgccccaggaccagaaagccagtatccagatttacccctggatgcagc

SEQ ID NO: 145315 - DNA, 424 bp, Homo Sapiens
ttaagcttgtgagcacaaattgtgagttttatttaactgcaagtgatgcaacctatgtaacacattcttttctcatccgtgttctttaactgctaatattacctttacagagacaaacattataaaatgtgcctgattggtaatttattaactctatctgtcaagtgataatattctgtaggcagcctttgaaatgatgttttgagaatttatttacaaccattgaacacagatggttttgtaaaactgacaattacaggctccttaaactcacaacatacatatatttcaatatttaaatagcctgttttcttcaaaagtaattttctactgctttttcataaaaatataaaaaagacaacatttatagttttaaaaacctatatttaacccaaatcaaattttttctacaaatgatacctct

SEQ ID NO: 145316 - DNA, 480 bp, Homo Sapiens
tttcttcttgccataaggaagtctgtatttttatgtaatcaaatccatccaactttttttcttggtttccaactttagtatcatgtttaaaaaggccttctccatccagagagtataaaaagatttatgaaatacttcaaaaacagccatccaaagatgtgtgtcactttgtaatggatgttgtatctggctttttgaataatgtcataagcaagactcttgttaaggatggagactagagggagagtacccagaaaaatcatgtcttgtttttctatctcattcaccctcttcacccctccttttaaattcagctaaaattaggcttaaaaaatggtaaggattgccatcaaacaaaaacctaagtcactgaaggataagctaaagggatagtaagaaatgtggatggtggaaaagtgaagaaaaccaccatttttctacagtgtcattatggttcatctatgagtcacatataacatt

SEQ ID NO: 145317 - DNA, 402 bp, Homo Sapiens
ttttaaatggttaattcatttatattaataaattgtcatggctcttttttagcttctctagttttactgaaaggtagaataaaaatatatgaaaaacaaaggaaaagtcagtttggtcttaatgaacctgagatcttgatactccaatataaagcaggttctttcagtattaccagcagcaaagactattaatacccatgttacagtcaactagaaatagacttcatatgactacacataattaagcaaaaataaagttgatgactacttggcattaatagtttggacatgaactttagaagtaaaaggtaaaggaggcattataatatcatgtttataaagataactttcttcagctaatattttggggatacaagacgaaacttcgttttgttgtttacg

SEQ ID NO: 145318 - DNA, 831 bp, Homo Sapiens
  misc_feature (73)..(125): n is a, c, g, or t
tttttgaaacttcatactatttttattagattagttctaagttcaatttaagacaaatttagaggagttgaannnnnnnnnnnnnnnnnnnnnnnnnnnnnnnnnnnnnnnnnnnnnnnnnnnnnaaaagatattgtttgttctctaaatgtttccaaatgttagcagccaaaataaaggttttccttcgatggcaaacccacacacacatattctcacacaggcatacacacggggacagcttgaaggtgacacacagtgacacgggagcatggctctgcacagaaagggatcccataaccagactcagcagagaacaccctgacaggaagcggagggtgtgctgactgtgaagagctgaggcagaggctggtgcaggggtacggtgtttctgtctggagcccaggaagcaggaaggagcaggtccacatcagggcacacaggggtgcatccgcagggaacccctgcacaatctgcatgttaaccccaacttgggtccatgtgagctgtctgattgcaaatccaggtctctcagcttgtacctttggggagacctttcagtcctctccccatctccctctccgttgactaaacccaaaggagagagggggcctcagaggaggatccctgggaccttggtgggcaggacccagcttccttggaccctctggtttgctgtggggccagctgggcctggtgtggccgagctccaccgtgtcatcagccatttccaggtccctcatggcctgggcggagactatcacctctctctgcacagttagcagaacaaagtcagggatgctgtttctacaacctggctggctcccctcc

SEQ ID NO: 145319 - DNA, 420 bp, Homo Sapiens
ttttttttaggcttttagaatccattaatccattcttttccaagcaaaggtggtaatgaaaatggaaaagaaaaccattccagaaagaagacaaggaagagagtggaaacatattgctgtaaaatacactgccgtttcagacaccaggagcctcctccaagtcatttctttccctttgctggccctggtggcttgccaggttctggtggcttggcgggttctggtcccttgccctgctggggtcctttttcctttcctggaggaggaaccagcatatgctttttggccttcttgcctctgaagtggtttctttgaagacacacatcgataaaagcaaaaactccagccgcaccaataaggatcacagcaagtaagtagtggagattcatggatcgccgacttctcacagcaaagaccacg

SEQ ID NO: 145320 - DNA, 457 bp, Homo Sapiens
tttttccaagaaagataataacttctttattagtgggcaattgtctgtgtacctgacaatgcatcagcgacatccatggaagagccactaggtggccacatagctaacaaaattcttgttagctagaaaactgctccaggctgctgctgtcccttttccaggtagcactaggctgtcaaaatcatgactttaagtaaatttcttaaggaatttgatcaattccattcttgatgattccagatggaaatcttggtgaattgtttcaaacactgctttcgtctctggcagagttgtggatggaaataggcaaacaggaaccatatccctactgcagtcttctgtctggctgaaggaaggaagaaataatctcctaaagtggcacattgtgcaaatctgatgcgtcaatcttgaagcactgccaagcaattcagaagaagaataaatcaattcatcccat

SEQ ID NO: 145321 - DNA, 450 bp, Homo Sapiens
ccctaagatcactctcattttttataattcaccaaaatggctcgcagatctcactgaaagcttacacttgcagttatggtttcttagggtgaaagaatacatattaaaatgagtcaatagaagatactcatggaacagagttcaggaaagttcccaaaacaaaggttcccagttgtcctctcccagtgtaatcatggacagggctaacttttctgagtaacagtgtgtgacagtacacacagagcactgccaaccgtggtatctttcctgagtcttcaagtccagaattttaactgggggctcagtcacaaagacataattgactacccttgtggctgaccattagtctctagtccctctagaggtcaagctaatactacatggtccaaagcccccatcataaatcatattattcgactgcacagtttggcccaaagcccctaggttaaa

SEQ ID NO: 145322 - DNA, 1019 bp, Homo Sapiens
  misc_feature (75)..(85): n is a, c, g, or t
  misc_feature (200)..(208): n is a, c, g, or t
cccccgtatattccgccccgtggggcaaaatataaggttgggggaggggggacacaagggtgtctgagattcccnnnnnnnnnnntttcaaggttacgtcccagcgccggggtgggagggggtttccccggtttcggcacggaaatggattaaaggaaatttacaaccaggtaactcccaaagggggtggcacgggaacnnnnnnnnnagttaaaggtcaaaaactcgccttgggggtcccttttgggaggttcccaggaatggcccctcaagactcgccatctggggttttgtcagaaccgcttgggtggccccccgggggttttgttattggtgggaggtggcaaaacagtgggtcaaggaccagggattttcctagggagccaggtatgaccgcaggttcagtttacctaccgggccccgcgcgccaaaacgaatggttctagaaagcttcttggaggggccgagggcggccgaacaagggttgatttattgggtgtgaggtggggcggagttgagatattttttattaagggctataaaaatacccagaaagataaataaatgtgatgcaatgatatctgtcctaatatgaagaactttctttcactgcattgttttccttcacaatggccttcaaatcacaggaggcagtgattccatgccatttcctcttcttttattacacgctacaggatttctgaatcagtatccccgccctcagtcttctctttataaatcaaagtcattttcaatccaccgtttaaagggagcgtatttttttcttttccacgaagaggactctttgtttcacaactggatcataatgcaaaagagtcagtttttcccgcagtcggtttctcttggtgttgaagcagaaacctgtcccagcttcgctcaccattctcaccagaatgttttttgacttgctcttggcaaagaagaccgcggagaggaacatggtgaccacacctgggcagtctccgtcaccggccaaaaggcccccaaccaacaacccc

SEQ ID NO: 145323 - DNA, 389 bp, Homo Sapiens
ttttttttcagttgcgaaatagcaatctattttgcaatatcagctcctggtaaatttaacttgtgagcctggaacaaggatgggggtggattcaaggaccgccccctgaggtggtgagaagaccagggattgcaggacattgtgagattctttctggggcagctggaaggatgcttggttgcccaacgacaatcctgccttcgcagcagtcttggtttcctgcagtcccggatgcatctcattaaaaggacagagggatggatggccgacacattttctgaagtggcattttcaacgtcctgagtcctggtatcttgtttataagtggcacttacaaaatacaagggaaagaaaaagaaaacgggagaggaagaaaggtcttctatgat

SEQ ID NO: 145324 - DNA, 385 bp, Homo Sapiens
aatccttacaaccatacgcccgtgttttcttcctgcctgtcaccacgatttggaattgtctgtgtttaaatggcaatgttcagggtctcccgctagaaaaccagctcccaggggcaagggagatgccacggtcacttttgtgttcttgatgcccccggcccagtgcccgacactcatgactgctcagcaaacgttggctcagtgtgtgacccggtcacgtgcctggcacataagaagcatcagataggtgtttgtgatttctgtggctgtcactgcctgagcgggcattttgagtgtaggagaaatagcagtgcctggatggtagaagcccagaggtcttgtcctagcttggcttcttcctcctgataattgaatgacttaaaaa

SEQ ID NO: 145325 - DNA, 488 bp, Homo Sapiens
gctgctcaggccagatggatgagcttgtttgtgtgtgaatgttcctctcaccttcctgatggtgaggggggcgatgtccacttccagatgctgccaagtaggacttcctgttttcttcctcttgtccccccccgcttcctttttatatttacaaagctctctggttatgtacagcagggaaatggtgcctgagagactccttcagatagcagttccttctagtttgagtcaggaggcactgcgtccccagagtccctgcatcctcattcatgaaatgctggcagtcaagggaacagccctggctatctcatgaggttggccttaggatttaagtgagataatgtgtttgacaatggaatcccagcatgagcttgggtttcggcttcattaaaaaattagaatttattgtagaaaatttagaaaatagacagaagaaaataatcctagtaccttctcttactatttgatgtatatcccatatttttttc

SEQ ID NO: 145326 - DNA, 341 bp, Homo Sapiens
tttttacattaacaaggagtctcatgaaattttattccatttcaagggtacagacaagaagcaagtttcacagttaaacacagaaataacgcagcaatagaattactggcttggatggctgtatttgaggttttttagagtgccaagagctaaatgagttaccagctatccagttttctccattctgtgtgccgtcctgggcgccattgctcctaactagaatggaaatgaaggtgtatttacagagaaaatattttgttcttcaaatgccagagactgttgagtatctttttgaagtcatagaggcttcactctataaatgaatcacttatttccaacag

SEQ ID NO: 145327 - DNA, 508 bp, Homo Sapiens
ttccattacccaagcagtttcttttaaatctggacttaaattttcagaatcagcagaagaatcagataggtcagctattacatttccagccaatgtcttagcatcgtgtaagatctccccctcctgaacattttccaaagaaaactgtttcttcgtatgcctttcttcagaatcagaaaatctccttttctgacaaattctctcattggaaagtgcctcttcatctggggttagaccatttattggatcaaaaagcacatctggtgagctagaaaggactgtgttttctttggagtggaatcagttgtaagctcatttgtgctgctataaacacctttatttttggttttgttggtctctggatacactgtaccagctgaaaattctctgtcttcttggaatcttttattttctttttcaatttcctctaagagcaataatggttcagtagatggtccatacaccttaatgaccttttcaacaatttcttgggagtagcccatggttt

SEQ ID NO: 145328 - DNA, 441 bp, Homo Sapiens
cagctctgtaggccttgggaaaacattttatggtcatatggggctctttggcatgaagatgggcccctggtcatgttggcaaggatactgacaaataccctcccacttctctgtaggtagcaggcatgtctaaaggccctacaaacaagttttaaaaccaagtttaagtagtgacttgccaattcttgtctatttagggacaatgatctattttgctgattaagaagagtgcttttccttctattctgtttgtcagcctttggaccaattgctgctctgtggcaacagtcccaagggcaggcaggaaggaagattttaaggcgacgctgggcattctagaagcacctaactctgctttgtctgagcatctgaccgcagggttctccaaaatgcagaaggccttcttgccttagagccccttaggtccacccagatggcaaa

SEQ ID NO: 145329 - DNA, 435 bp, Homo Sapiens
tttccctgaaaatgatttattttctcgtcctctactttgttctgtcatctggcagctacttcttttaattgtaaaaattactttgttctaccaccattagttgcttttcccctcatttctacttcacgagcaattcattctaaattgttggtagaaaataactcagggaaagttcgtggtgctctgcccagaagggcaaaatgaggatcctgcaggtgctgattagatgtttactgggtgaagtagttctgccaagtctgtatttagcgctggcctctctttctcaggcttatttgaatcatcttggcataaggcaatgatatgcatttttaggtaatttctgtctccctggggtttgaggcagggaagcagactgggcggtggatagccacatctggggccgcttctggactgccagctcacgcctggtgggag

SEQ ID NO: 145330 - DNA, 422 bp, Homo Sapiens
cgtgagccaccgcacccagccttttaccatgtgggtttctttagtgttttaaaagcgtccataagccaccattttgtggaaccaaggccccctccacgcaaacaccctccctcctggggacctctggagcctcagccagaagtaccattaggtttaattttaatttgttttgctggagaaacatcaggtttgtaggagactgagttgttagcaggtgtgcttagctcttgatagtgaacgtgtaccttgggaactggctcacccacctgctaatagcaccatcgtcactattaagcagacatttcagttggtagaatccatgtagaagtcatggacttttctgggaaatgacttttctgggaaatgacagtttctttgacatattttctttgcccactttaaataaaaactctggagaaaaa

SEQ ID NO: 145331 - DNA, 491 bp, Homo Sapiens
ttttccaaatgaacatggctgtgttccaataaaactttattttaaaaaaacagttgggaggccatatttggccaatggccacagtttgttgactcctggtgtaaaaatatgaacgagactaatggttggcactaattatggagaggctcactatagatggtggagatggaaagcgggggcaagctgagctaatccttgacacctctgatgtgagacttcagcctcctccacacgcggctccttttcttttagcattctgaagatgacctctgggttgggaatgtgataccccactgcgaagagatggctatagagctccagcatcacatcccggtacaggcatctctgggcagggtccagttgctgccactcctccctgctgaagtccacggtcacgtcctcaaatgacactgatgcctcgcaagatccatcctgcttctctggacccaggacctgaggcttctgggataaattcacatcagcaggcatct

SEQ ID NO: 145332 - DNA, 701 bp, Homo Sapiens
aatcgagctcggtccccacttatgcgtgggcggagtttcctctcacacttctttattcaccatttcatttcttgttttcctgacaccatttctaaaatcaaaccatgatagtaatttggcttatggatctacttctgacacgaactacagcatttcagaacccatctttatgccagttgtatctcagatggattatagatggacatgaagaaatcttacacacaaagcaaaaatattaaattaggttcctggtttaattagcaaaagatacataactgtataaaaactagagtggctgcccagggtaagagcagatgaaccacatatttgagtcacttcccttggctgctggggtccttgataggggtcatgcaactgctggtgaaactgtgcatgaaatgtgagtccttgctggatctgaaaggttcattactggctatgttcttattgacctgctataataattcctgaggaatgtgcactgatcatcaaacccaggcatttaaggaattcttacaaaacttgttctctttttgaccttcacttaaactcaacttcagcaagtccccactctaatttagagggaaaagaaatcagaattaatccctggctttccaggaaaacacctcttcctccagctttccagccttccagaaggcccattttactctggtgcccctgccagttagcactaaccagct

SEQ ID NO: 145333 - DNA, 353 bp, Homo Sapiens
ttttaaatgctcactggtgatttattgcatgggctgggggaaccgtccagagcaagaatgggcaagggagcagggcgtgagggtcccagggatctctggaggccactgaaccagcccttcgggggtccctgtgcagggctctaatcatagttggggtcagcctgggcctggcgtggggtgaggtggctggtcaggtagcgcatggctgagcggatgccctccacggtcctctgctccactgtctccagcacacgggtgatggtgcgcagggctgagctggtccctgacaccagcccagaggagaaggccgagctgacgcttcccaccaggctggggaccgagcgcaactgggc

SEQ ID NO: 145334 - DNA, 676 bp, Homo Sapiens
  misc_feature (663)..(663): n is a, c, g, or t
tttacaggttgaattagttttatgtagaacaagtcatgaacactttagtgtggaaaaatagtattatataaagcttaatattaaacattatgaaaaatacatatttacagaagaaactacaaaatacaactatgtacaataatatctgttacctttaaattatataaaattttaaacattctccagattaataaattatacatagtatcaacagaaatagctggcacctctgtagggcatgaagcaagtttttaaaaacaaatcacacagtgaataatttttatccaggagctcttcaggtacattctcaatgccttgaatagactggatctctgtgatactctggattcacattttcatagattggaaacaaggggttttcttgttcactccgtagctttcttgctctgaggacatctcttacacactgatgtaggtagacatactgacactcagtctggaccatgtgaaccctgtgaagtcttaggtcgtgcactgctccataaatgtccacagagtctttggagtctaactgtctggaggattctgtccaatgcaattaaggttccagttctacccacaccagcactgcagtgcaccacagtgggcccagcaccccggcttctgttgatgtatccttgaagttctcaacaaactgatcanaaactgggtggtt

SEQ ID NO: 145335 - DNA, 265 bp, Homo Sapiens
tttctttgcattttaatgataaacttgatttattccattccaaaagttttcttattctgaggttgtctttctatattttgagtataaaacaatggccatactatgttggaaccaccaaggttcttctcttcacttgttcatttgtaatgtctctttataatctgagaatttcctgagcaaactgggaactgttatacataattccttgtttttcaacattctttgtaaacaggaatcaggattggggatggggagggagggagga

SEQ ID NO: 145336 - DNA, 1002 bp, Homo Sapiens
  misc_feature (23)..(23): n is a, c, g, or t
  misc_feature (65)..(65): n is a, c, g, or t
  misc_feature (68)..(68): n is a, c, g, or t
  misc_feature (82)..(82): n is a, c, g, or t
  misc_feature (100)..(100): n is a, c, g, or t
  misc_feature (173)..(173): n is a, c, g, or t
  misc_feature (186)..(186): n is a, c, g, or t
  misc_feature (216)..(217): n is a, c, g, or t
  misc_feature (220)..(220): n is a, c, g, or t
  misc_feature (223)..(223): n is a, c, g, or t
  misc_feature (229)..(229): n is a, c, g, or t
  misc_feature (261)..(261): n is a, c, g, or t
  misc_feature (275)..(275): n is a, c, g, or t
  misc_feature (287)..(287): n is a, c, g, or t
  misc_feature (341)..(341): n is a, c, g, or t
  misc_feature (751)..(806): n is a, c, g, or t
aaagtatattagaataaatcctntttgtgtcagaatgttctacttgtgcatagtggcagattctntantaaatagtgagtgntgagactcaaatgctctntgtatgttctcaggtccacagatgaaaaaccaacagtcacagataactctatagagcagtatcattcttgagntacccactcctcntcatacattcttctcttcatcaacgtgttnntgnaantagcantgaaatcatcttgcaaaatatacttttggacntaggccgggatttntaggcaaatccnaatggccatgtcatttttacatcatcactgtagtgatacaaaattagaacgccnaaatgaagtgtcatgtcagtagtacagaagcttccctgcaatgctaattgtgtttcagcaaaaggaatctgaatcattatgaactagatccatactgtgagaaaacaaatgttattaaaaaaactgaatgcaaaaaatttcatggttcctgactactccatatggaaaagtatggcatctatcataaggaaataaatttttttaacctttcaaatcttagcgaaactgtaatgagttgttgggtttctccactctaaatacaaccttggagataaaaactgaagtctcacaattattaaatttacctattttattagacatgcaccttctcaatgattattgtcctgactttgatcaaagctaacacaagaagttgaactaaaatgtggctctcattattcttctgtgcnnnnnnnnnnnnnnnnnnnnnnnnnnnnnnnnnnnnnnnnnnnnnnnnnnnnnnnnagctttacttacttaacgacaatgagtgataccacagaaacggacaaaagaaataaagtctctcaaaatgtttatttttgtcagaatagctgacaattttctgttaagtattttggtttattattataataagcatttcccccccttgaaaaatccattcaaaatatctcaaccattgaggtaaagcattttaact

SEQ ID NO: 145337 - DNA, 422 bp, Homo Sapiens
gcggccgcggctggcagcacatccgcggggctggcgtacggagagccggtggggttggagttggccacggggcctgccacgttggcgtaggtgatgttgaggcagctgctgctctgggggtcttcttgtaccttctgcacgatggcgctcacggccttgtgcacctgctcgggctcgccgctgaccgtcaccacgcgctcctgcaggttgatgccctccggcttctgggacagctgcacccatgctcctgactgttccatcacggctttcaccgtggcgcctcccttgccgatgatcaggcccgccgtgctgttggggacgatcagcttggcctgcttggctctgtcggggttcatcgtggtttggggttttaagatattgaacacctcagggttggtcataccttgtcgtgatttctcgga

SEQ ID NO: 145338 - DNA, 291 bp, Homo Sapiens
  misc_feature (174)..(182): n is a, c, g, or t
gtattgtaataggtagttttgtatgaaatcttttctcctctcccgttgtaccgcattctttccagcattgtgctttttccctgggcttatttgaaaattttactgttttatacaagctcgtttagtacatttttctatgttttaccacaagttacaatttgaaaagaaaactannnnnnnnnaaatattccattgttaactgaatgttactgtttccactccagcaactacatttcctcccttcaactgcctgccttttggggaaagaccaccttttgtgtgtttgttttt

SEQ ID NO: 145339 - DNA, 715 bp, Homo Sapiens
agtcacgctgtactttatttaaagggggccatagcattaaagtgtgaattcattttgtacaaccagaaatggaaaaggagtcagtcaagggggggcagaagtttctaacaaagtctaaagcatagttttatataactaataataaggacacaatgtttagcttacttaattcccaaactgaggtcactaaaacttaagaatatctaccaaaacttaagcaaaatctcagagagaaactttaaaaataacattttatttttgatctttcaaaatgtttcaatcaatattctgagcctaaacgtgtaggtgagtgctttctccatctttgcacatgtgaagtgcgcctgaaccatagccccacattttctcaaacaccatcacactcatagaacagaaaggaaagggtagtttcaccagctagcccccatacgccactccctggggtcctccccagcacctgctaaatttgggcggcctgatttcaggggggtggataatgagctggcaaaataaacccagaagaatcgtaattacaaagaccaactcaggttccagttagacagcccataccagtgcttttgatgttagctgcggttaagggggcaggaaaggctcccactctatggtcccgtggcgggtcagctcagcgctgccaccttggcgggctccatctcaccatgaccctctcaatcaggctgatggtgtctccttatgc

SEQ ID NO: 145340 - DNA, 460 bp, Homo Sapiens
tttgcaattaacaacattgagttttatttctccttctccagactaacatctaacaggtctgtggatcagaaatgatggtggagcagttgccctttgacatagcgatagaccgtgtggaaatggtattcagtaagcccttgacatccaaaggggtgcacatgcagacctttgcaaatctccaatagagggctgcagaaatgtttgtagagtctcttgactttcttcagactcatattttcatagagaaataagtgtttcctgcgtattttctcacctgcaagtttaatctctcatgaatggttgtgttttatgaggaaataaagttttcagcactttggaagtgtgtataaggatggttagaaaatcatactgtcaggttgagatgtggattctcatccttccgccggcacctcaccaacccagcacttggccaccatccttgtggcacgtaattcatgtc

SEQ ID NO: 145341 - DNA, 503 bp, Homo Sapiens
agaaagatgggttttctcattcacctcactgcagagcctttcagggcagccttaagtcagctagagcaccagctaaacatgcaggtcctgacaacaaaatcattttgattgcatgccataaactctttgattaagaggattgattaagataatctggccttgatgagtggtggtggtttcaccttgagctttaccagttattttgtcaggtagcattccattaaattaggatgcatcatctttgagactgatggatttttgattcatttttccgagttttattgaatttggaatgacaccgagatcccaatagcctgtacaaagtgaagacagtaggtcaacaacagagccattcttgataatacagaatatttcacaccaggcacagtggctcacgcctctaatcccaacatttgggaagccaagggaagaggattgcttgaggccaggagttcgagaacagcctaggcaacatagtaagaccccatctataagaaaaaaaa

SEQ ID NO: 145342 - DNA, 528 bp, Homo Sapiens
gatgaatctggagagatacttgtggcaagtacccggtgttcctgcagtcatccacaagcgcagcagtggtggtagacagctagagaagaaagtgtaaagtttgcatcctccaattatcacggttgcaagacagaacttgaaactagatacacctgattttggttatctctggatgccattcaccgagaatgaagggaagaagatacttcctccaaaggagaatctgatgaggcgccagcaggctgctgctgcggtggaaactgccacatccgcttttgcaaactggtgtggccccagctgcttggactgaggctcaacgcaggtttcagccacttcaaccacagggctacgaacatgccaagagagccactaaccaagtttctcattcctcctctgagatttaaagtccatcacttcgcgactcaaacacgcaagaggcgtgggagacggaggaatggggaagcgaggcggcgctgcccaccttggcaatggcacagccgcggtctctgatgcaaaggcaggcggccc

SEQ ID NO: 145343 - DNA, 427 bp, Homo Sapiens
ttttttcattttcacagttctttagtgccagtataatgccttgttctattaaacattcaaatggctgctgagtactgaataattttaaaaagaagagtgccgtaaactgtttccttgcttaaaaacagaaatctaactgtagtggctttacaaattaggggtttgttttcttacataaagctgagacataggtgatcaggtgtggctccatgaatttatgaaggacacaacccccttctctccttcagttcaaccaaccttagcactttctttccatgctccaggtcacagaatggcttctgaaactctagctatcatggccactgctgtgacttgaatgtgctccatctcttgtttgtttatttgcctagaagttagtctgtgtttattgtttgctgtaactgtaggtgtcagaggctaaaatttc

SEQ ID NO: 145344 - DNA, 792 bp, Homo Sapiens
gaaagctggcagtctgctttgatggaactgaaggcaatttgcagcaacacaaaagggtgcattaaagagggagggctgggagccccaaaaatgaaaggctggaggctggaaaagaaggggatgaaaatggcccaaagaacagcaatttaaatgcaaccaaagcatgaatacttctgccagggaccggggtttccattcacatggaatgaaggacccacgatgcaggtgccttgtctggctgatggagcaggggaaggaaatccccacaggggccaagcctcggtgggctgggttttcatttcttttgttgtgtagtctaaagtaggaaccactggaccttcttgtaatgccttgtgcttggagctggggtgcagattggtgtgaagactcttggggttgaggatggagtggagagggcagatctgagtcacagtcaatgacaggagggctctgatcaaaggcagcaggcatcaccctgagctgggggtctagagtgaccttttagacagtgaagtctggacccatggaggggttatcatttccacagctctcattcgctctgcctgtcccttccagaatcccaaatgtttcagccattttctgtggcatctcgggtctctctgtcgggctttgacagagcaggtctggcctgaactcagtctgcagaagtagattctccatgtgcatgaaaattgcccatttactttgagaatcccatagaaatcgttctcctcctccgcctgctcttctcctccacccgttaacgatgggacactggcatgctagcattct

SEQ ID NO: 145345 - DNA, 567 bp, Homo Sapiens
ttatgtgtcccacacattgtcagccacatagtaggcagtcagtatcaactactcaaaatgacaaatgacaaatgaccagaattttgtggcagactagtttagccatgaaaaatcatttaacacccgtgggcctcagttttcttgtgcctattcaataaagcgccgagtagatggtatctacagtcatttttcatctgtaaaccccaatgaatccccaaaattcagcctgagatgagctggactagttgccaaatctatagatatatttagcatggtgtgagatagggtttttagagagaaacagacacccactgtgaactcctttgcagaaaacgtctgaatagaggggaaagtagggatggtatctcaaacttacttcgtagtgattttaaattaggaaatttagcttcacattcttgtgataaatttcttttcaccttggtttctagaagattattcaaaacatctgtgagactatttgagaagtatacttttgaggaatttcccccaagttatccttacagattatattttgacaccaactgcaaatgtaatatcttttgctaa

SEQ ID NO: 145346 - DNA, 577 bp, Homo Sapiens
ttttgttttatgaggttttttaatttggtttgaaatacttgctttagatttactgaaactagaattaatgggacttttttgaaattttgcttttagacctggggagtgatggttcagagtcagatgtgctcacagttatggatgctacatccactgatcctggctgaagaggttccagtgacacttgaatagtaacttttgtttcaggaggtaatccttctagttgcttaggcttcttaaacatttgatgacactgggtcttgtgctccattttctccttgaaagttaaaaactgtagccggcacttggaacactggtgtgcactctttccccagtggcccctataatgacacatgtatggtgttgctgttttgaaaattttgagacaaaagggacaaagcaaattctttgtgttttcatggcacgttctaaaatgtgtttctacatcagcaaagaccgacgatctataatggcaaacctggcacacatagggcatttcgccaggcttatgatggtccttcatgtgttgtaagaggacctgatctgtttcaaatgacaattcacagattttacagac

SEQ ID NO: 145347 - DNA, 937 bp, Homo Sapiens
gcattccctcgccaagaaattttagaaaagcccttttcatatctggacttttttgggtataaacaaaaattgttattttaaaggataaacttcaaccattggaatttggggcagtttttattccttagcatttctttggtgatgccattacttaggaagaagtgctgtgacattcagctgattattgggtgtcacaggacctctgttcagcccttcagatgactaaaatctaagactaaacagaaattgctgttaacatagaagtacttaaaatgcatttcatcctagttgttcttataatagtgacattatcgtagacacatttttaaatccagatagttatttgtactttttcacaccagtttttgcttttgtcacatttattcaaactagcacctccacagtcaaagtgttgtcatcctacagcctcaaggccccttactctcaatgtatggaatgtcatggtacttgatgttattgcatgcccattgctgcaaggcatcacacaagatatcctgagacaggcggtgtgcatattccaagatcacagtattggtccctggaggttccttcacttcctctttgacattaactggagaagccatcctaggtagacatctctcttctggcataaagggttcttcactctcatgctgcttctcaccttcatatatggtaggaaatgggaaagtttgctttgatttcatgcagcccatgttatgaagagctgtttgtggaggaagcagtggcaaagactacttccaggccatctttagaaaacaatgaaatttgtccatgtgatgttgaccagtgctttccctctccagggcacttcagtaatcaatgttccctttcaccactcttcacgtgtagtgtttaccaggttcactaaactgtctccaccagtcggtctcattcagtagctgtgagcccaata

SEQ ID NO: 145348 - DNA, 436 bp, Homo Sapiens
  misc_feature (172)..(180): n is a, c, g, or t
ttttatttgaggagtgactgatttaatgcatattaattgtgggctcatgccagttcccacgtggcttgggatgtcttttgtacagcttccagaaccagtccagagtcagtcctcaagtgaaggtttgcttttgttattgttctttgattacatgaaaaattaaacatctgannnnnnnnncatacaaactcaatgtaaaatatgagtttgaccttggtagaaatgatccgctcaaagggaaagacattttcctctggattgcagagagtggcatcttctacaagctcctcccaggtatctttagctgaggctgtttgtagaaggtgagggtgggtgttaacctttatatgcagtaacttcctgtctttctgaatctccatgactttttttaatctctagagctggctacagttcagtctcctcattcagtcatctg

SEQ ID NO: 145349 - DNA, 448 bp, Homo Sapiens
tgtttttagaataacacactaggtaaagaaactttaactgcaaggagtcagtgacttttagtgctccctgataaatgatgttattgacaaaagtaaaaaattatttcattgtttttttcctgtattactatctcctctcctgtgcttttgacagtgtgtttagtggatggataatatgtatttctctttcccactcccagattccaaattccctgcctttttggcccacctcaccacaaaagctccatagtttattaatgtaagtttgaatggatgcttctttggggaaacttcaggagttaatggaagagtttcagaaaggaatgagaatgcctcaggagttgttctgtgatggaaattggtctgttgttctgttaatgctgatggaaagaaacttacaacgcttaataaaaatctattcttttagtaaaaaaaattgtgaaataaa

SEQ ID NO: 145350 - DNA, 352 bp, Homo Sapiens
accatattctatgacatggttttaagattaaatgagctaacatccatagagtgcttagaacagtatctggcacatggtaattaggtgtaacggttcaacgaataagtctccattgtccagtcatggcattcactttgcctggggttacattaggtaacattttattggatatcgactttttctatgaagaaaaaaatgtatgtaaataaaggtggaatctttagcctttatttgtcatggaagccctgaatttgtatagctgaaaatatttctatattgtttcttttcatcttttctgatatattaagaaaatgttaatgatatacttattaaataaaattgtggatgtaaa

SEQ ID NO: 145351 - DNA, 413 bp, Homo Sapiens
  misc_feature (211)..(211): n is a, c, g, or t
tttccacttaaatacaaactttattctctctccaagaagatgcagacgtcacaggtggccctgagctcccacccgaggcttaggcccaaggggcttcttccaggctgagggcctgctggggctgggccaggggctgaggctgaaagcagcagcctgcctagtgggtgacgccaggggccggtgtaacatggcaccgaggttggggccacancaatgtgtgggacggtggggtgggctggggcccttggctccaagcattagttctccaagctctggtccgttctcctacctccttcaaggggcaccagggctacaaggtggtagttgagtattggggccgactcctggggcactggagtggtctctaggcccgaggcccaaggagagggctgggtttctgggagagtgctggt

SEQ ID NO: 145352 - DNA, 798 bp, Homo Sapiens
  misc_feature (44)..(72): n is a, c, g, or t
  misc_feature (271)..(271): n is a, c, g, or t
aagttttgtcaaaagtttaataaattcgcaacattcgacagttnnnnnnnnnnnnnnnnnnnnnnnnnnnnnagtccctggctcctcctagtagatacgcgtttttttccagctcttgcaagcggggcctgaaaggtttcgggtccgggctgctctgggcagcaggtatccgaggccccaggctggggaagggggcgagaaccagtcccttcccggaagccccgtcgcgctcaggcgggccttcctacccctcctctcccagcagtcccgnttgctttcgcccccctccccaaactccactgggcccgcccagaatggggtgtgggtgtctcccgcttgcaggcgcccgcacgcctaaatttcctctagaaagtcggtgggaaacagccccaccttgcggccggtgtagaccttgacgtagccgcccgcttcgtctcctttctgcaccacgatctggtccttcttgagagtgatctgccctatctcgcggttccccacgaaggatctcgtcacgcggtgcacacgttctccagcccggacccgaatgatgaagtttggagggaaaaatccgaccttctccccgattttcccccgccaccattcttcattggagtcatcaatgactgtgatcttctctcctggcgggaaatccagatcgtccttctccagggctttgaaccgatagagagccacaaagtaatgagactgctggaagccaggctgcttgtgcttgtcatcaggtgtcttcttctcagccttcttatccccttcagggtttccatcctgggcctcgctgtc

SEQ ID NO: 145353 - DNA, 477 bp, Homo Sapiens
ttcagtttctctcactttgccctgggtaagctgctgtagggtcagaagtaaccctttctgtgccagttgagaatgagcctgtgtggtagctgatgtcagaggacaaagctctctgcaagggctggacacagagctgcagagtcctgaacatccctcctttcaggctgcagaagggagaggcaatgaagacaggtgctccgcaagcagcatcagggcttttggaggggactggtggggactcaggctgggtgcagcctccaaacagagaacggaacttaggtgtgtctctacagttaggcccagcctagcccagcccagaacaaacacccttcagagcctaaccaaagaacataagctgcaaaatgtgcacccatattttaagctgctttttcaggggataaatagtgtttggggacattgaaatggatgttctcaggttgtatttatttcggacaaatcacctagagcattgtatat

SEQ ID NO: 145354 - DNA, 624 bp, Homo Sapiens
aggcgtcccgatgaacgaatctcgtttctgtagagtcttcagattcttggcagacacaccacagtcagccagcctgatgtctccgtcgagggtcatcagcacgttgccagctttcagatctcggtggatgatcctcttgctgtgcaggaagttgagggcttctagcatctggcggcaaaccacctgtatctggggctccgtgaggcctctgtccagctccagcatgatggcgtccacggctccccctggacagaactcaatcatgatccacagcttcccgtcgtgatagtaggctcccaggagcttcacaatgtaggggtggtcgcaggtggccaggatctcaatctccacgatgtagtcctccagctcctcctcactcttggtttcaatgactttggccgcagccaaagcacccgtctccttattcttggccttgtaaaccttgccgaaggcgccgtcgcccagctcgcccacgatctcccacacctcgttggggtccaggtcgcggcggacgtgctcatattcgcgggactttctcttctcgaaggtagacaggcgcaggatgcggcggaaattggcaaaagccatggccgggggcgcggtggcgccggctcgggctaaggc

SEQ ID NO: 145355 - DNA, 444 bp, Homo Sapiens
ttttattagcaaatactatttattaagtagtagtattaaaataaggaagagaattagagttgcagaatttcttttaactgcttgagctatctgctccataacatcttatattttttcaaataattagctcttgatagtgaattactcatagttaagatctagaaagctacttgtcttccagttgctaataggatggtactgaagaagtcttgtagttctttgaatttagtgcccttctgacattcaaagtcattatactttcaactggtctgctttttggtccacttggtgggtggaaaatcttatcatctttgccagaaatatttgccaatttagccacataagggtcagcagaatgtgatgggtaaggatcaaatgttcctgccttcattccaccaggctttttaccaggagaagacggtttaaaagtatttgaaattggtt

SEQ ID NO: 145356 - DNA, 402 bp, Homo Sapiens
tttttggctgttcaagtgatttttaatcaagtaccccacatgactaattcaggtcctccaaaatagtcccagggagccaaaatgaggtaatatgacatgttgtggacttgaagggtggttaaggacacatacagccactgcttcagatgccgctgtgaggcagaaaattcaggaatgcagtagaggaggggaatgtgaacccagaatgcactcagtgtctctccttcagacgcttttttgaccctcggaagcctggtctgctcaggtcaattctgcaacccatctcacaggcataaatcttgacatggtcttcacacccttttcctctggcccctaattacaattctgctatttatttctcaacacagcctacatttcatgtgtttctcgtatgaatgagtt

SEQ ID NO: 145357 - DNA, 512 bp, Homo Sapiens
tttttcaaacaacacaaatttataatcttacagttctggagatcagaactccaaaatcagtcttggggggctaaaataggagagaagccgctttctttcctattgcagcttctagaggctgcctgcattcctcgacttgtggccccatcctccatcttcacagacaaccacagcgggtcaggttcttctcacatgaaatcactctgacctccctctttcacttgtgaggacctttgtgattacactgggcccacctggactatctaatccaggataatgtccctatcttaattcgagctgcaaccttaattcccctgtgccatgaaatctaacatagtcacatgtgctggagatcaggatgtggacatcctttggagaagacatgcttactgccatgattgccaggaccccacagatgaagcatttcacagttccaaagacctgctgggcgttcaggtgtcatcctcttttttggaaacctccagggtcacaacggctgatggtttccaaga

SEQ ID NO: 145358 - DNA, 531 bp, Homo Sapiens
gcggccgctcactcagagctatgctgtgatccaccagatgggctcgcgctgatgggagtccggttgagtcctgctcagccaatggcaggttgtgtgccacgggcgagctacttcatttctctggacctgtttccccagatggctggtcgcaataatgacgacgaggcggatggcggcggggaggctagagcccatttcagaagcctgcagtgaggattccaccagttcacatgcatcgggcactgagccctgaaccgcacctaataaacactctcccagctattagtattacaaacctgagaacgggggccatatctgggtcctcctcctttccagatgtgcgaccttgattgaaagtcaccagttcccttgggttgctccatttgcatagtgagggtctcagtgacacttgggggcccttttggctctaacattttatcattctaataagtgttgatatgaagagccattctttgcaaggagtagggccacatttcggtgagttgtgagaagcataacattttgggtttt

SEQ ID NO: 145359 - DNA, 585 bp, Homo Sapiens
  misc_feature (438)..(472): n is a, c, g, or t
  misc_feature (510)..(535): n is a, c, g, or t
ttttgagccttaaactgctgtcttgtttccctggctgagaaccctggaaacgagggtcctgtgcttagccattccccatccactcaggagagcctgcttcttaatacctgccccacaggtggggtcctgcttgccccagcagacggtctgcctgtgcaccttcgatgtctgcaccattgcattcctggatgacccatttcgtggttcggtcatcatgtccaggctattctattttttgacttcatactacgttttgcctgcactaccacttgtatttttgctaccctaccttttgtgcttctggctaaaatagctaactagctagacaggagttgtttggagaagtacaaatgagtctttaaaacccatcctcagtgccccatcagtaagtacacattgtgaatttttacatctataaggttactctattttaaagtnnnnnnnnnnnnnnnnnnnnnnnnnnnnnnnnnnngcttctttgccttatgtattggcttagtacctaattcnnnnnnnnnnnnnnnnnnnnnnnnnnggacggagtcttgcccagcctgggcaacagtctcgctctgtctcaaaaaa

SEQ ID NO: 145360 - DNA, 556 bp, Homo Sapiens
tttttttctgtttatatatatgtatatatttaaagaaaacaaaaaaatccaaaatttgtgggattggtaatttcaaatttcaaatataaagtcagttaaaaaatatgtaaagcagagcagggtgggacctgttcataaggtggagcaagcatcaggtgctccgaggagtgaggccgggtattcaagggagggatacttcaggctcgtgcagtagaggaagactgagcctggtcttgaaagatggggttgaaaatctgcagagtcctgaggctttcagactgaaaaaggctttcctttctcacctgacaatcacagtctatcatgatttatagacttttcttgatcaactcctctggagatattttcctggagaaacactggagaagtgtggtacactgttctgtttgtgaatacttttttgaggtgcaagaacaagctactgaggcagaaagtgtgcctccagttatccctacccctcaccactgtctcttaagtgtttaccaccacaagatctttttttgtggctgtgatccagattgatgtcttccctctattt

SEQ ID NO: 145361 - DNA, 847 bp, Homo Sapiens
caaggagggaggctgacatcatcccaacaacctagggttccagaagggaaagggtaaggttctggcatgccagtcagcttggacacaggcatcaatcaccccctgatttcagcagtaattgtggagcttgatttatcaagtaattgcatcaatctcttcgaatcacatcagaataggcctcaattgttggtatatgttcacacccagtccgtcgccaaggcaccaactgacagctgcccagtgggaagctggtcacccacattcgtgcttcctgtgatggtgttgacaacccgttcgaaggatggtaggaggctttatgagttctttaagaatgttcgactcggtagccaatggaaaaccattgtcaagcatctcttccgatacctcataaaccacaactacattgtctttgatcactggctctgaacagactccaaaataatcctgaaatgtgtccaccactcggtgaagaaactcaatgacaaacagaggggggacctccgtctggatcacggccacaaaaaagatcttgtggcggtaaacacttaagagatagtggtgaggggtagggataaccggaggcacattttctgcctcagtagctctctcttgcgcctcaaaaaagtaatcacaaacagaacggctgaccacacttttccaatgtttctccaggaaaatgtctccagaggagttgatcaagaaaagactatggatcatggtggcgattgtcagtgacagaagaaagcctttttcagtctgaaagcctcaggactctgtaagttttcaactctggccttgctgctctcagcgtccactgctcctaggcgcggacaggccccgccccccc

SEQ ID NO: 145362 - DNA, 885 bp, Homo Sapiens
  misc_feature (780)..(806): n is a, c, g, or t
aagattaaaaaaagattttttgtgttccaatccatatcatcttccagcctcagtcgctgagccttgaagatggggcggggagaatacctacattggtccttgtggcttgtcggtatttcgttttttttaaaagccaggggtgaaatctctaagttcctctggggagaagcagagatggtggcagcaggaaggctgggcctgcttggtgggtccaagatgcgcgggcttctctgggctagaggccatcgagggagggctgcttcctctgagatgcttaatgacaggaagcggctttatttgcttgagttttagccagagggggtggtgagctgaccagctggtgtcattggatggcgtgacatggtttgctctgcgccctctctccatgagcgtaccctgtgagtgaacgttccttttacttattctgatttctaattcggaggcacctccttttgagcggcggctccaggtcctcaggcccggcgctgagcatgggcgaggagatgatgcacggtgccatggcagccttctccgcgggttttggcacaggctggatcacgcagccggtcttgggcagcatccgcagagcataggcatggtcctcgtccgcggggttattaaggttcgggtctgacttgtcgccccccgccagggcctcctcgcccatcagctttttggccgcctccccgtccaggtggcagttggaagcacagttattctccttgaccgactctagctcgctcaccgccggttcctcaggcgacagcagcttcttggggnnnnnnnnnnnnnnnnnnnnnnnnnnntgctcgggaggcgctcccgctcttagcgcccttcaggcggcccgtgcgtgccgttcacgatgacgttgcagccgcggtc

SEQ ID NO: 145363 - DNA, 715 bp, Homo Sapiens
gactggaagccttgtgacaggaaaactgaacatctgagacatctataggaaaaaaagatctgcttacatccagtccttggagttccagtagactgatttattcaccaacagcattgctcctccagctccattccaggagacaggcaccccagaagtagcaggactggtagacatcactagtattgtatatgtgttgtgcatgtatgtgtgttgaggaagaggatggggaaaacaatgatggtggtcaccaggtaagatgggacccaggaagggattgcaagtccaggccccatgaacacccccaaagaatgcccctcctcttggaaataaaagtggttctggatccagggagatcaacagttgcaagctgatattaagagttgtctattggatctgttctaagggatatgttatgtgaagccaaattaatgaagttaggaagtcacattacaagttgatgggtactttgtttcatcaacttgtagaatttcttccttttgaacctctttactgggtgttagctggtgacttaggggtagggatgtggaggctgtcataggcccgtctccgctcttgggcctgaagggaatcctatgtatgcggcagtatacaaagtatgcagggatggggaggatgacaatggcaaaaagggtgatcatcaagagcagtgcccacggtgggtatggtcgaagcacctcttttgaggtgcttgagt

SEQ ID NO: 145364 - DNA, 498 bp, Homo Sapiens
cgctcactctgctgggattagaaggctttgagccctgaggtcacctggttcctggccaagtcactccttttatttgagcttcaagtctccatgtgtataatgtggggttgatgctgtggtgctccaaggtgttggggggttttaggcagagttcttatgcttaatataggatggaaaagtgttcgagcttcttcccttttctctttcttctcttcatctgacatgagcctggggttctacctcttccagataattcatcctggagctactaattctatctccccattgattttagtgtcctgtctgtttctaaatctactgggcagttggagacattgtcttttgttccctcatctatcttctgtatccacagttgataattgtctatgtttttagtgtgttttaaggaaaaaagtctcatggcagcaaatttttttgagatggagtttcactctcattgtccagcctgggcgacagagcaagactctgtctcaattt

SEQ ID NO: 145365 - DNA, 474 bp, Homo Sapiens
tttagttctcaattactttttattttttatgattttcagcttaagatttcctatttctttacattgatatttagaatgttcctttggggtgtcaggggttgtttcctcagctttccaggctttgacttgagtgtgatgtatccacaagttgattcctgtaacagctactgtctcaattaccctgagtgtgatggactcactagacgtgcgggcaaaggattccaggcactctcagttattagttgtcagcaccagcagtgaagagatttcctcctgtgatggtcagggggcttagaggcagcgcctgctgaaaccgctagttttcagttcatagggctttaggaaagcacagcttattttggaaacttgtagccagaaaaaatagaatttaatttaaacacagatcagacaccctgtacagggactgtgtacacagaatatgaggccagtttccaggagctttattggcttcat

SEQ ID NO: 145366 - DNA, 448 bp, Homo Sapiens
accctagaaggatgttactcctaatatgtcacaggggtgtacacactttgatattatttgtcatctcatagagagatatgacttcaaatgtcacagtggatgttcacacatagtgtataccctgtgatattattcataatatcctagggagatgcaactcctgatatcacagtgtgtgtacgcggtgtgtgtacacccttgatatgagtcgtgatatccagggaatatatgactcctcatatcacacagtatgcacaccctgtgatatttttcatcatactttagggagatattgcttctaatatcacagtgggtgtaccccatgtgtgtgtactctgtgacagtatattctgtatcctaggaaggtattactcgtaatgacacaatgggtgttcaccctgtgatatcattcttatttgaccttgctgccttttttaacccatcctac

SEQ ID NO: 145367 - DNA, 1172 bp, Homo Sapiens
  misc_feature (70)..(70): n is a, c, g, or t
  misc_feature (199)..(199): n is a, c, g, or t
  misc_feature (213)..(213): n is a, c, g, or t
tccctttccaccagtgctcatcgcatacccagtttttatacagatccagtagaagctgtaaagacatccntgatggtgcacgggttttggttggtggttttgggctatgtggaattccagagaatcttatagatgctttactgaaaactggagtaaaaggactaactgcagtcagcaacaatgcaggggttgacaattntggtttggggcttntgcttcggtccaagcagataaaacgcatggtctcttcatatgtgggagaaaatgcagaatttgaacgacagtacttatctggtgaattagaagtggagctgacaccacagggcacacttgcagagaggatccgtgcaggcggggctggagttcctgcattttacaccccaacagggtatgggaccctggtacaagaaggaggatcgcccatcaaatacaacaaagatggcagtgttgccattgccagtaagccaagagaggtgagggagttcaatggtcagcactttattttggaggaagcaattacaggggattttgctttggtgaaagcctggtaggcggaccgagcaggaaacgtgattttcaggaaaagtgcaaggaatttcaacttgccaatgtgcaaagctgcagaaaccacagtggtagaggttgaagaaattgtggatattggagcatttgctccagaagacatccatattcctcagatttatgtacatcgccttataaagggagaaaaatatgagaaaagaattgagcgtttatcaatccggaaagagggagatggggaagccaaatctgctaaacctggagatgacgtaagggaacgaatcatcaagagggccgctcttgagtttgaggatggcatgtatgctaatttgggcataggaatccctctcctggccagcaattttatcagcccaaatataactgttcatcttcaaagtgaaaatggagttctgggtttgggtccatatccacgacaacatgaagctgatgcagatctcatcaatgcaggcaaggaaacagttactattcttccaggagcctctttgttctccagcgatgaatcatttgcaatgattagaggtggacacgtcgatctgacaatgctatgagcgatgcagggttgcaaatatggtgacctggcttactggatgatacctgggaagatggtgaaa

SEQ ID NO: 145368 - DNA, 689 bp, Homo Sapiens
agttctgtgtttggccgtatctggtccatggtgaggggactacggttaaagggatctgtttggtcactgagcaaatgtcttgcaatggtggatctatccacagtgactctggaagatggcagcaccacagggtcacacatcagtgtgctcataatgggatccaggaactcatcacaggcatctgcataggtttcctcttcctgttgttggaggtctgcaagagacttgattctctctgccaagttgctgaaagccataatcatattcccaggcttatttattttcttcaagactcgaactgtctgtgcaaagagagttggggaataggaacgtccatccttgggcacagtggcacagaaattctcctcatccccaagatttaagtagatagtgcagatatctgatacaagctgctggggtttgaagtcaaattcgctgaagtccttgacttttaaggcacccatcttggggccaaccaggtgttgcaggaagtagttcaacatggagatgatgcgctcagtcaggaagggatgcacaaagagtgacttgatctctgatgtgagaaaggcaagggtaccgattgtttcatcggacatgatgttatggaaacgtgccagctgtccaaacatctgtatgccacgcttcctttcttcgcgggcttctggagtccaaccatcccattcactcca

SEQ ID NO: 145369 - DNA, 365 bp, Homo Sapiens
tttttttaccatttcatcacatactttattggacatctcctgtggctggtcactgggatacagtaaccaggaaatacagtcggccctcatgaatgaacaaaacttacaaccccaggaggggagccagaaactcaattagtggcttagtttccacaacactacgtgctacaaagaggtacagaacaattccaggcaaactaagaacctgccccagcctggaggacaggcatgggggtgagggaacccacaggcaaaaagccttccttaagctgagctcaagactggatgaaatgatcttggtggggcaggagggaaagttccaggcagggaaaacagcagggagtgtgtggtggttggaggtgcct

SEQ ID NO: 145370 - DNA, 480 bp, Homo Sapiens
ctgtttgttttgtaatgtgcccattaagttaatacagtagtacatgtatataattaacacacaaatatatgttattaatatacatatatgtggggtatgtgttaaatacttttgatggagagtggtgcgagatccagaattcttatacccccatgatttgctgactcaattactttataagggaggaaaataagcacaagactagtaagaagacttattcaaggttaaacaaatgatattttcttgttcaagactcgagtctctgtttcagcacactgtctggcattcccagattttaatacctccttaaatcattacccaagtttggcctataggaaggattattattaaccaaaatgtcataagtgttctaatagtctggaatcattggagaacaagagtccatggcaaaatccagagaatgtatgggtttgtgtgactgggaattattaccatatctctcttattttgccatcttct

SEQ ID NO: 145371 - DNA, 181 bp, Homo Sapiens
cagcaattctgtttgttacagagatgagagaatacctcactaaaagaatacttcaaaattacatcactttttcttcttttttcctacaaattctttacctgtagatggaaacgtcacatttcaatatatcaatagagtcaaaaatagcatttgcaatagctatttggccaggatgagaagt

SEQ ID NO: 145372 - DNA, 522 bp, Homo Sapiens
tttaacttaccaacaaattttaatgaaacttctagtaaactcaaagcgctttgccaacatccttaggagcaacccagttctcgcagcaccccatgtgaggtcgctgttgaagtatctttggctgcagtggtgtggaattcatctcaacagagttgacggtaaagaccagacatgtagcagcctcactgcttgttggaggaaccacccttaagaaaatttcccaagatagtagttttcccatctccgtactttgctagttaatgttctccacttgcttgcgtttatcctttcaattcctttgctaattaaattgctgaaaagtatacattggtaagaatagccactgtcaatggactgcaaacaaaactcgtttctgttattgatgataaaccatttcagagaagaccaggctgagtctaaagggttcagataattacaaggggaaggcagagagagtagttcatggccacaggacttggccacctctgggcaacacataatgcttgctaagctaatgactgt

SEQ ID NO: 145373 - DNA, 458 bp, Homo Sapiens
  misc_feature (208)..(251): n is a, c, g, or t
cccggtgacgtggcttgataggttcagggtatcatcagggactcattggaggttgcatatctttctaaggaggatctggaggtaggaggctctgggcggaggtgcagtgaccccgcaggccagccctccaacctcctcccgcagcggggactgggtgcccctctgccagctgagacagcccacacacaacccagccctaatgatcgtnnnnnnnnnnnnnnnnnnnnnnnnnnnnnnnnnnnnnnnnnnnngcatgcgcctcagagcccgtgccaagaacaagcagcagtcctgaactcgaggtccataaaaatcagtcgactgaatgacaccatcaaatctttgaaacaacagaagaaacaagtggaacatcagctggaagaagaaaagaaagcaaacaatgagaaacagaaagctgaaagggagctagagggtcaaatccagagattgaacataga

SEQ ID NO: 145374 - DNA, 618 bp, Homo Sapiens
tcccataatcttcatgagcttcaccacaccatacatgagatttccaataatgaagcatgaaacagcagtccccaagaaggcataggccagtatagatccaagatttctgaaacagtgtctcttctttaagctgtatccagcatgaaaaataattggaggcagaagaatgttgaaaaatacttctggatcgaatgttaccttccgtagcatatcattctgctctacgctgttgatcttgccaggactgatttctcctttcagagtgtattcgaagaactttccgctgacattcactaataaggtactgaaggccctgtcttcctgagtgcagctgagtgatttgtcacggccactggtagcaggggtaccatacctcaggatcaccccaacgatgagcccatagatcatggccagcccggtctcgtgcagaaagcgcacccggcggtgcttgaagagccagatggtgaggatggtgagcgtgagcagcaggatgaaggtgagcaggctcacgctgtcttgccggtggctctcctccgcctccttctcagtagcgagctcctccatggcgctgctgtcctccgccgccgccccagaggaggaggccgaggccgcggccgc

SEQ ID NO: 145375 - DNA, 534 bp, Homo Sapiens
tccagcctcttttttccgcaaagcattatgatgtgatgggaaaagcatagggccagacagcatgaattcagatcctacttatcaggatactacttatcaggagctatcttctctgtattttgatttctttattgtaaggtgggactcacgccacatacttctgaggggtgtttttaacagctcatgtaaagttgcctagcacagtttctgatctatattatgtgctgggttaaagttaattctggtttacttactcttttctttcttactgttaatatcatatctggaagctaaatgtattatcagtgaaatttatcataacccagtagtttttaaaggctcaagtaaaagatagaaccagagaatgacttgagctctgagaagaatagatgttgaaattatgctgagaagatccctctaagtattttatgatcatcaaggctatgcaagttaagtcaatatttttatacagataaaggccaagaggacatttgagatagtagtcttttctgccttttagatcgaaaaaataaa

SEQ ID NO: 145376 - DNA, 438 bp, Homo Sapiens
  misc_feature (152)..(239): n is a, c, g, or t
tttacgatgactctcattcatttatttgacacaaaacatcttaaattttcatttaaattcttttataataatatgtcaatttaccattcttgatccattcccccatgtttttctttgcatatctggctttctgccacatggtcaggttaaannnnnnnnnnnnnnnnnnnnnnnnnnnnnnnnnnnnnnnnnnnnnnnnnnnnnnnnnnnnnnnnnnnnnnnnnnnnnnnnnnnnnnnnctgtgctggcagatgcgcaccatatgactccgatcttgttaaatgtatagttttaatgattatttcaaagcagtatggagatgagcatttcaaggttgaggatccatatctgatgagcgtctcattgctggtggtgactcgctgtaaagtcgcaaggtagtgaagggcatcgcatggtgaaggggaggagtgtgctacc

SEQ ID NO: 145377 - DNA, 390 bp, Homo Sapiens
  misc_feature (50)..(50): n is a, c, g, or t
tgtctacaaaggggcactttttatatatcactggggaccatccaaccagntgatataaccctcttctctggaatgggccccacacaaaggaaggatagtgacatattgcaagcccaggcacacaggcccagagcacagttgaaattgtgacatatgtacaccaagcaaccaagcaatgtataacacctcatttggcaatggaatcgagggcacttttacatatcactgagaccagcgcccagctgatgtgaaatattggcctgaaccctgcctacaaaagcattgtggcttttatctagctccattacataagtgatgtgacttccttctactgccttggccctgcacttatggtgaatcgtgacacaaaattgggtagagcaaccaaaa

SEQ ID NO: 145378 - DNA, 501 bp, Homo Sapiens
ttttcttgcaaaaggtaagctctatttttttcttgttagattcaacagacataaaattacgacgtcctgtttccatagcagtttctagacactcactgtcaatttctgagcatgccttgttgcagtaggggcttggtttgtgtccaggtgctgttatgtggagcacactggagtacccctggcctggtgtctatagacccctttgtcaaactcctatagtacagggctggcccaagttggcgtcatcatctttctgtgactctcctcttggccatgagctatctggctccttaaacttgtcgtttcctgcagaatcctgctaatggattagaccaccgccacatggtcctccaaacttccttctgatgccctggggattcccccaaccatttgcaaacccaacccagggtgttaactgcagtggggtgggcagtttacatatgagtgatcaactcaagaggggcaattttctttcccagtttcttgctggtgaaggagagt

SEQ ID NO: 145379 - DNA, 527 bp, Homo Sapiens
ttttttcgagcggttctcacattgtaattctcagaggtgaaaactatacagaaattgctggagcagtttgaatctctagaaaacattcacctccccacccactaccccaacccatgcccttgacctccaagaactgagccgagcctggggcacccgcggcctgtgctgcaagggtcaccttgtgacgagggccgtgcacagcctccgggctgagcagggacaaagactcctgtcccatccatggccccagctccccgtgagcggtaagagggcgcccagcagcgcttcctccatctaggcgggtctcgggggcccacgggaaatgccctccacaggtgtcccctgcacccacagcctcttgtcccctgcaccaccacgagcctgaggtgtgaaatgtgtccggggcactgtgggcaccgccagccaggctgggtgggaacgtgaatgccaggcctcggcccatggccctccctctggcagccgagtctccaaagcagctcaaggggtgaggaccacgggcgtcccgg

SEQ ID NO: 145380 - DNA, 565 bp, Homo Sapiens
gttcaagaccacacctaaagcgagtccatctattgctgcaattgttggtactggaagattagcaatatcgttaatcactgctcttattttggagacaaaaggaccaacttcactggaactcattttggctctttccttaaggtcagcaccagcacagaatatccctgggacttcactcctgattattatggtccgtactttcttatcagatttcaaagcatccacagcttttgatagcatttttataagatttttactgagtgaatttttgccataagctctgtttattccaagcaccacaattcctcggttctcctcctccaggtgccgcacccgcagctcgtcctccgtcttcatctcagagctgtagccccttttcggggcgggacccccggccgcaggtacccagccctgggcccagatcgccgggcccgctcgccggcctgccaacgagccgggcagcctcaaccccgggcagagccacgcactgcaagcggccaccaggcgggcgccgccagcatgcagggatcccaaggccccaggtgccgccgccaccgcggccgca

SEQ ID NO: 145381 - DNA, 501 bp, Homo Sapiens
cgcagctcgccataacagatcaggccatacagttcctgggatgacttcttcaggcctcgagagaacacatgatcaaagtcgatgtacttggtgatcttgtgccaggtgcggtagtagaagtggcggacctgctccttgttcttcaccatgcttgctggcttgcctttcttcttgtacttcagcgcaatgttgttctgaatcgcttcaaagtctttcccatgctcgtacagcccctcgaagaaggtgttcttgtcctctgtgctccacgactcccactgccgccggacctttttgccttcttccttctcgccaccagaagaccctaagttccgggaggaggagcgcgagccccctgcaggggcagcaggggcaaccccagacacatttccagacgatgatccaccaccttcagctccttttccgcggggccccgagccaccggcgttgccgctccccacagcgctcggagggtccttcctgggcctcttgctctgcggccgc

SEQ ID NO: 145382 - DNA, 459 bp, Homo Sapiens
ctatcttactgctaaaagctaatctgagatgcagaggattctacagcctgaaaaactgagaaaaacattgcaagactcacatactttaaacatgattacttctatgcatatctcaatttaagaaaagacaaatgcagtattatacaacactcacattttagcataattttgaggaagggtcttagctcataaatttggcctcctaatgtgaaaactaaatttctgaagcagggcacgttaagcctcatacctgggaacttgggagagatttgagaacttgagagagacttacttttattctcagttttgtcaaatagtagtatttggaccaatggcctgaatgaaaaactccttagaaagtgttcataggctgaaaattattcatcatgctggaatgcgcctacctcagaatatttgcactggctgtttcctgtacttggggactgtttcccctggaaa

SEQ ID NO: 145383 - DNA, 838 bp, Homo Sapiens
ttaccattctgatgttttccaaatcctggacggaaacacaaagtgttttataagtggctggggaagaacaaaagaagaaggtaacgctacaaatattttacaagatgcagaagtgcattatatttctcgagagatgtgtaattctgagaggagttatgggggaataattcctaacacttcattttgtgcaggtgatgaagatggagcttttgatacttgcaggggtgacagtgggggaccattaatgtgctacttaccagaatataaaagattttttgtaatgggaattaccagttacggacatggctgtggtcgaagaggttttcctggtgtctatattgggccatccttctaccaaaagtggctgacagagcatttcttccatgcaagcactcaaggcatacttactataaatattttacgtggccagatcctcatagctttatgttttgtcatcttactagcaacaacataaagaaattctgaaggctttcatatctttattttgcattgtgtccctttctatgttctatataatgaacatcatttattcttctagcaattaattgcctacattagagatttcatgtgaacattttatgggctataagtattgtgacagatatacaattgtaattttggcactgaatcacatgtctccttgaaatatcttgattattttataatcataattctgtatctggaatactcatagagtttgtacaaaatattcagttaaacatatattttatgtgtataaatgccaaataatagtttataattaaaatgaaagctgtcatttggttaaattaataaaaattctttcttagattttaaa

SEQ ID NO: 145384 - DNA, 359 bp, Homo Sapiens
ttttttaagtacaaagagaatgtattggttcttagaatggaaagtctcggatttcaggtatggctggatccaggtgcccctgcaatacactcaggattatgcctctctccctctcacctctgctgtcctcaatattgacttcattttcatgcagcaaagatgacctccagcagttccaggcttagagcatagcagataagtaaccatagcagaaaaagaaacaccactttcccaatagttccagcaaaagtcctgcagctgtctctcattggctttacttggaatggcgtgttcttttctggatctggggaatgtagttggctgtgtccgaatcacatagactaagagcaggggaggct

SEQ ID NO: 145385 - DNA, 353 bp, Homo Sapiens
taggtttttcactatggtttatttcactcactccattttttgtgtatcttttggtagttagaaaggtttgtatttgggttctaatgcttatactcagccttcacatagcattcccactcccctcttgtttggtctttgttgtttccaaatatgaggagtaattgaaatgagctaggagcctcttcctccccgtccatagcactggttttgaaccaatgaccttcgtactctttgggaacatttccagatctctggaatgaatgcattttgtgtagagacacatgcatggtccacaactgattaggatgcagatgcagtaagttaacttaggatcacttgaaataagtaaaaaa

SEQ ID NO: 145386 - DNA, 581 bp, Homo Sapiens
  misc_feature (16)..(16): n is a, c, g, or t
  misc_feature (29)..(29): n is a, c, g, or t
  misc_feature (290)..(290): n is a, c, g, or t
  misc_feature (378)..(378): n is a, c, g, or t
tcagacatttttaacncagataatcctanagtaaccaagccatacaaagcttctgtttggagaagattgaagaaatgcttgaaaatgctgaacgggaacgtctgggtaattctcaccagccagagaagcctcttgtacgactgcgagtggactatagtggaggttttgaacctttcagtgttcttcgctttagccagaaatttgtggatcgggtagctaatccaaaagacattatccattttttcaggcatagagaacaaaaagggaaaaaacagggagaagagatcaanctttgggaaacttaatcacaaagccttcagaaggaacaacctttaagggtagaagatctttgtaaaacagtacttttcaaccgcagangaagaatgtgcagctctcactgctaacagaaagagggatgggtgaagcagtacaagaatttgtggacaaggaggagaaagatgccattgaggaattagtgaaataccagttggaaaaaacacagcgatttcttaaagaacgtcatattgatgccctcgaagacaaaatcgatgaggaggtacgtcgtttcagagaaaccagac

SEQ ID NO: 145387 - DNA, 287 bp, Homo Sapiens
tgtcatacctttttaattgtgcaatagacaagtaaaaagggttaagaagaactgatactcttggaaaaaagaaatatacctttcagtgctaattgggcatttacaaaagttagttatatattaatagaggaaggaactccaaaacgttgaaatactatagggtaaattctctaaaatagaataaaactagaaattattataaacatggaaacaacaaagtctcttaactatctaaaaatttacatatgctaaaaaatcctggattaaagagaaatcaaactttaaga

SEQ ID NO: 145388 - DNA, 539 bp, Homo Sapiens
gacatgccattgggcgtggtttactcaacaacaattgtgtggtttgtcattgtttttaaaagtaatattttggtggggttcttgatgttcagtttctatgtagagtctagcagatacatttcttctctggtggcttttccccatccaagtttccagaatttccaccattgacagtatcagggatttgtgtcttctccacacactgttccattcgcttcatgattaagtccaaaagggtttctacagctttctccacattctgtccagttgctgcacttgtttcaaaatatggtatgccatatttgtcagccagttcccgagcttgccgttcattgacttccctctgatctggtaggtctgccttgttgccaattaatactatatctggattttcacaataagcatttgcttgcagttggctcatccagtttctgacatttaagaagctctgttgactggtgaggtcaaacattaataagaagcccattggcgtctctgaaaaatgcagtggtgagactccggaacatggattgcacagc

SEQ ID NO: 145389 - DNA, 438 bp, Homo Sapiens
tttttttaactttaaaacaacaatttattatttttcacgattctttgggttgactggatggatcctttgctccatggtggggattgctgggttcatcatgcagatgcactcaggagtgagtttggctgtgactgggatgtccaagatggcttcactcatgtgtctggtgcctcaggtgggttgtcttcgtgccagagcagaacatgccttgtagttactgccatattctagccaagttactccatttactgttcctttgttcaccatccactgattgactcgcatatttccatcacttaaagctcctggcgtcactgccaggaatggaaagttaaaaaactcccagctctgtaaggttctgcctggatcctgaaaaaaaccttcccacatgccccgaggaaactcgagggctcgcttctttctcacatccctggcccc

SEQ ID NO: 145390 - DNA, 457 bp, Homo Sapiens
atcaaacttgaaagtgggagaccagtgtattaattatgtattgttgcataacaagctattcccaaactgaagaactttaaaacaacaatttattatttttcacgattctttgggttgactggatggatcctttgctccatggtggggattgctgggttcatcatgcagatgcactcaggagtgagtttggctgtgactgggatgtccaagatggcttcactcatgtgtctggtgcctcaggtgggttgtcttcgtgccagagcagaacatgccttgtagttactgccatattctagccaagttactccatttactgttcctttgttcgtttttcgtcgctttcccacgatcacacagatctcaggtccaggaggacgcatcgtctttttagtaacagtgcatgctgtgaggcttgtagagtcgcctctctcttcaggcgcagcagagggcggccgca

SEQ ID NO: 145391 - DNA, 419 bp, Homo Sapiens
  misc_feature (120)..(238): n is a, c, g, or t
cctttgctccatggtggggattgctgggttcatcatgcagatgcactcaggagtgagtttggctgtgactgggatgtccaagatggcttcactcatgtgtctggtgcctcaggtgggttnnnnnnnnnnnnnnnnnnnnnnnnnnnnnnnnnnnnnnnnnnnnnnnnnnnnnnnnnnnnnnnnnnnnnnnnnnnnnnnnnnnnnnnnnnnnnnnnnnnnnnnnnnnnnnnnnnnnnnntgcatcttcgtgccagagcagaacatgccttgtagttactgccatattctagccaagttactccatttactgttcctttgttcgtttttcgtcgctttcccacgatcacacagatctcagctccaggaggacgcatcgtctttttagtaacagtgcatgctgtgaggcttgtagagtcgcc

SEQ ID NO: 145392 - DNA, 196 bp, Homo Sapiens
aatttagtatttgtgtaaaaccaccttttgaagcagcaactatcaagtctgaaaagcaattgatgtttccattaatctttttctggggggaaaaccttagttctaaggatttaacatcctgtaagtgaagtttaacataacagtattccataagcagcctttttattgtcagaccattgcctgattttaatataat

SEQ ID NO: 145393 - DNA, 464 bp, Homo Sapiens
caatcaatttagaagtttattttgtcaacattaaggacatcccctgaagaaaggaacacagaaatcacagaaacagtctgtcctgtgtgcctttctccaaagagaaaaaggcttcagtatttaaaggggaaacgcagtttggaggggaaagagagaaggtgtggtcacattactgaatccacgtgttgcacgagaaaaggagcaggtaggggaaaagccaattatgtatttgtctggtgctcagtaaatcagcactttacataagataaggtgaacatagagtagctacctgtggagatatctggccttttatctgcagccgtgtgcttagggacaaaaggaagaacagtttcttgcatgacttagatttcagctgaatttttcccttttggcatagtgattttcatagtgaaattttattttcctttcagacttgataatgctgtccattcaatatgagacat

SEQ ID NO: 145394 - DNA, 643 bp, Homo Sapiens
tttaatgtttaacaagcatttttaatacaggacttatcagagccctaagcatattaatacgcattgtgaatcttcaaggaagatatactactttccaaacaataggaaccatagattcctatttctcaggatatctcaaggggtagagttcaatggacagctgcttagaaatgcctcattagaggaacggctctctcagtgggatggatggtggaagaccaaggtacttcgggaagatactggctgactggtctgccctgcctgtagacagaattcctgtagatagcagctagcagtgatggatcacttcctgcttccttgattaaatgctggtggtaatatccattactgactgaaatatacatctgccttttccagactgccagcgcggagcactagtttgactttgggtgctcttcaaatagctggcattgataaggcattcccagaagactgtgttacttagtaatcttgtcggtacattttttcactgggcagagattttccaaacagagagctgccagctttcaagacgtcagagtgctttttcatcccaggggaggagctgcggtggctgagccgacgctgcgcgcacagccgcctgtggttttccgcgcattgtgagggatgaggggtggaggtg

SEQ ID NO: 145395 - DNA, 421 bp, Homo Sapiens
cccttaattaaaattaatttaattaatttgaatttttctctgccagcaggaggaaaggtagcttcagagtaagtgagtaattataaacaataatgaacttcatcttttttatacttctgagtgttctgtataaattttgttttgtaaattctgcatgacctctctcacaagattgaccctttgctctggaactttgtctttgagtcactgagtcatattaagggtggtgaatgaattttatctaacataaccattacttttacttactaagtaattttaaacataaacatggaaggaaattaagatagaaagaaaaatatcatatccctccaccctaaagcaaaaacatccattttgaaaaaatattttctttgcccatgtggttaatatactggtgagagattggccaaaccgtttgcct

SEQ ID NO: 145396 - DNA, 535 bp, Homo Sapiens
  misc_feature (178)..(194): n is a, c, g, or t
ttttttaatttgcaatctatgtacatttattgctcacagttctggaagctgggaattccaagaacatggcatcagcagattcactgactgatgagggcttgctctcagtttcaaggatggtgctttctagctgtgtcttcacatgggaaaagacataaacacgttctctcaggcctcnnnnnnnnnnnnnnnnngagacaggatctctgtgctagaatggcaaccaggttcactcaggcaggttttgtgaatccaaaaccattgctcttttatagcttcctgtttctccacttgggatttcttccagctgaaagcttactcattatatgaaggctcagagctcccaggtcaatgtcatcttcttcatggagctgtgcctggagatgacgccccctttctctgctccattaaacccggtgtctttcctgctgtgtgtgccagcggctgtgttgtggttgtgggtgtgcttgctttcgagtcttcgttctgctataagccccttggaagtaaggaccacaccttaggtatttccatc

SEQ ID NO: 145397 - DNA, 1117 bp, Homo Sapiens
attttttgagacacctacagggtgtagaaaagaagaaaattgaacagatggttctggactacatttcaaaactggttggtcttgctttttattctcctcatatgccccttcaccccactccccatatagttctgaaaatgtggtgcagggaacccatttatgtgtttttcaaattagatttttggagatctcccgttcttaaatcagtatttggtgctgtagattgagaaaagggaaataaggaccataaacaaagagcatttggtttggaaagtggtttattgcccttccttcaaatactgattatatacccatggatgcataggacaatgaatttagtatgcttgccaaatgttaatatctcatcttggcaacttccagctccatgtagatgatttctgtacatggaggtttatgcagacaggagagaacttgaacttcaaatcttaattagttccagtagcctaagtaggccagattctagctcacttgtattaatactaccatgtgaggctgagattggcagttccttacctggtagccacttactgaaattttgtgatccagattagtaacaccactgtatgtgtacatagtagtgataggactagattgaattttaaggttgtcttgagtctttcaaaaagcatagagagttgaggcctgatcttgcttagagtctagaaataatgtttgacaaattcaaaaaaatgtttgcacagaaagagaaagaacactccattatttctccaaatttgtataagaccagtatgcaaataagccagtgtgtgaacatatatttttccattgaactctggaagatttgttaaatttattagctataatcctgatttaatcatttcatgtttaattttcaagttttctgcctttattgcagccattagtgttgtttctacgtaatatatttgaatttctatagtaaggtttgagtttcatagtatttaatatattaggagaggttagtattctcatgtagtgatatttataatcagggatttgaatctttcttaagtctccttctcaatagcactgtaccaaggaactcacttgatgaatgtgttactgatcctccccatgttgacattaacttgcttta

SEQ ID NO: 145398 - DNA, 495 bp, Homo Sapiens
tataaatgagtgaaactgggggtctttattgtccgtttgtgtcctgaaagatagccttttaggcatgcacaacatgttcaccgcatcttgatcaaaagggttccattctatattctgaggatagtgggcgagaactttggatttgaatgttcttttcaaaggactctggtcaaaattttcgcccgccagctcgtcaggctccagcccgctgtccgcgtcgatcccgcacagcacgaagtagtgcgcgaagcggcaggcggccggggaggagcccgagcccgggccgggcgccgcgcagctcccgctcatcccggccgcgctgctccaggggccgccgccgccgccgcccgggaaggctttctgcggaggctgccaccaccgctccggctgtggtctgtgcgcccgccctagggcgacactggcgcgcccatggccgcgcagccgcctctcgccgccgcaacctgcctcctcgctcggcgcgggggaagcggccgc

SEQ ID NO: 145399 - DNA, 596 bp, Homo Sapiens
tttcccctgcacattcagcctatcagcctattgcattttcctagcatccttctaagctttctgtcttctttgagtccaattttggtaaataaaattttccttgaaaattatccatctaagttttcaaatttattggcttagaagtgtgaaaaagtcatatttgataatatctcttgtttttttattttcttctgatttcaatgtttatttcacccttaccatctctttatttgtgtttatgtatgtgtattctttctccttttcttcccttgactaagttagctggtgttttttctatgtaccaattgttttcaagaaacagaattttaacaagttaattgtatcttagatctactatctttctatatatagctcattaatttctacttttatctttactgtttctttctctggttttttaattctctttactttgctggggagaggttcttaacttttcagctgagaatttactttattttcactattttactaataaaagtgtttagttctatgaatttttctctgatatctaccctgaaagtgttctgtaagttctgatatgtaatattttcattattattatgtcttaagaa

SEQ ID NO: 145400 - DNA, 783 bp, Homo Sapiens
ggggctgtgcctgcggtccttgcgggttggccgggctcccggggatgtgcctccgtgttgctgtcgcccggcgctgcgtggtgagaggaggtgagggagggttgatggggatggcgaggtctgacacgactgtgtggagttggagggagtgatgtgcgctgggttgaatccctgttatgcttatgcttgccttgtggcggaagagctctgaggaagcgggagggcccgaatgggaaagtgtgggttgtggtgtttgttgcttctctaggtgaaggtttaaattaacttcagcatgggtaaaactattctttccttcttttttctctcccagagttctcaccacctcctcccaggctaaatccttcatgttgcaggagacagagaatcccaggtgagacccggactttttctcctccctcccttccttttttcaccgtgttcaggataaattatcttggttttgtttctggagggaaaagggcagagaggccctgacttgaatctcaatcacatttctgcacacagtaccttggacagaagtcatgatgatggggcccatgactggcaacctgctgggagaggtggcctgcagtgtgtctggagtacatgggggaccccgggagcatcttctgtgtctgtggcccctggcaggcctgcatcacttggtgctatgccactatcagatccaccacaggagccatgtgctattcattccacaaggagccctttcaacagggagacatcaggcccaactggattctagccaccttggtctccagtctc

SEQ ID NO: 145401 - DNA, 460 bp, Homo Sapiens
tttgcttctctaggtgaaggtttaaattaacttcagcatgggtaaaactattctttccttcttttttctctcccagagttctcaccacctcctcccaggctaaatccttcatgttgcaggagacagagaatcccaggtgagacccggactttttctcctccctcccttccttttttcaccgtgttcaggataaattatcttggttttgtttctggagggaaaagggcagagaggccctgacttgaatctcaatcacatttctgcacacagtacctgaggagacagaatagcagaggggtgggaacaattaacattgctttatgggctttagaatggagaaaaaataattcccactcttttttcttttacccaaatccaacttcagttttctctccaactctctaaaaccaccaccaatactattatcacatcatgtgtagctacttggggggtggtgaaa

SEQ ID NO: 145402 - DNA, 1262 bp, Homo Sapiens
  misc_feature (312)..(345): n is a, c, g, or t
ttttgtattaaaacaatagaaaaatgtttatttcaaatgtcaagcattgccaagtaattttatattaacaccaaatgttaaagaataggatacattaaagttttaataacaatattaaattacaagattggaatctcctctttgtttactttccttagcatttacatatttggctttgaaaaatatggaatcgatacctaaagcctttttttattcacttcccactcagtttaattgtttttgtcttattcaaccaatatggaagcaaatttatttaaaagccagtttgtttgtgaaaatacctaaaaatannnnnnnnnnnnnnnnnnnnnnnnnnnnnnnnnnataaaacatgtcacatcttgatgcagttgatgtcaagtgtgcttaagtcattatgaatcaagagactaacaatagtggctgcagaaacaggtttgttgtctgtacaaagacttcaggtaaattatagtacttccatgttagctgtgcatgtccaccacgctttgtctgtaactcgagtagaaaaagatgttgtgttttaattaatcattccttacaattcaagatgaactccacatatttaagaattcttggctgaaagaaaagtcttcaagatactggatgcctctcaccactttgacaataaacacacaagaaaaccattgtgtaaggcactcaaaaggttcttatcaatcacgagagatcagtcacactgacattcattcccatgccaggactcacgtaagggacagcatgcactgctttgggaaattctggagtcataacacgtccattttctccagtacttcctgtaattgacagccttgccttgttcctcatggcatcattcaaggtcatcttaaatgagagaggagggaaagaaagaaaaagaaatcatacgttatggttttcaaatgcatccagaggaaaggcagggttgtttttgaaaagtttacttctatctgaaagcttctagcaaatgaaagcaaacagtgcaaagctgaactacaaataataaagcacaattatggcaggaatctgtccacattcacccaagctactgtgccattaaagaggaaaatagacagttgagctgcaggttagtcaccaactgggaacatggaagaacgtcaacaatacatacaggatgatccattggccaccttccttatttaaaagagcttaaggacgcaacaagaaagctaaacgtgcactaaaaagtttgtattagagcctcgttcctaccccctaaattttaa

SEQ ID NO: 145403 - DNA, 444 bp, Homo Sapiens
ttttaaacaaatcttactgttgactgttgtatagagaattgactgtagagaggcaagaagaggacaagggaaatcagttgcaagactttttcagtggtcctggtgagagaagataggcttctttggtaggcatggaagtgtgggaagtggcaagaaatggtcacgttgtcctgagataatgaggatatggatatatgtggagttgtgaaagaatgagaattaaggaaaatacctggattttggaggtggatggaatcaagagttgtgactcatttttgatatatcctgtggctgccaagtgattatggtccttccacaggaaggccagggctggagacacctatgggcaaataggtgggctttaaagttattgggctggaagaggtcacctctagagttagttccaatggaaaagactagggcccagaggtgggctatggagca

SEQ ID NO: 145404 - DNA, 723 bp, Homo Sapiens
ttttagtgaaagaagagatttattgcaaagcaaaaagtacactctcaagaaaggggagcttgggcatacccaagagagaataatgggttctggggtttcatcttgatgggtttctttaaccaaggagtggaatgttcatgaaaattcctgggtaaaggtggagatttcttggaactgtggtgccatttttacatcaaacactggtctcagaactgtcatggcactggcgggtgtgtgatttagtatgttaatgagcatataatgagggcctaggtaaaacctccatccaatccagcaccacgttgggtccactcagccttagccagcttggtccacaccctggtttttcagcgtcttaacagcccacagcctcaagtcatgtaaatctgctgcctagaatttgttatcctgtgaccaccctgtagtattcctgtctgaaatctacttgtaaatattcaaatggtctttcacttgggcattccaactttgcttacttcacagtgtttcctgcgtaatatataagaaaagatgatccagacatttgttaaacatctcaaataagatgtagcccaggtatttgtgtcaaatttggattattttggtttcgtctttgcagaatataaaaaactaacttgaggtaagcactaaggtgtggagatggctgtgcaagagatgacaaactccagcaccacgcttgagagtgtccaatcatctcttctttca

SEQ ID NO: 145405 - DNA, 787 bp, Homo Sapiens
tttcctggttcgtaaaactcatttattcaacaaagcagtacaagcctccccttcaatcaggacctgcctgcaggggtgggctacttcagtgtcttcagccaatgggagctagagggtttaatactttagtccacttcccttcatctctggccccatcgacaacatggggaaggggagtgagggcctggtagaagggtactaaggccccttatttcgttcgctggtagaactggaagactgctttctcctgctcataggtctcgatggagccgggtcgtagtcgtcggatttcagcaatggcatctcctgcagccaagccccgctccttcaccaggtaacaggccagcatggtgccagtgcggccaaagcccagagcacagtgcactcccacagcctctccccgtgcgttggcctcgtccacgatctgcacgaagcggtcgatctggtcgggggccggcgggcagaagtcggggatgcgcaggcggtgcagggtgaggccggggcagctgtcgctgtgagggggcccgcgctccgtcagggacaccaggtgccgcacgcccaggtccaacaggaactggtagtgggcggggagccgcggcagcgccagtcccgccagccggcccggaagcacccaggagaagttggggggctgcacgcccatcgctgggaaagggcacaggacagcgggtcatgggggccgaggctggccagccccgctccgcccacgcgtccccctcgtgccgaattcgccacccaggcctcgctaccttaaaccgtagagtactgc

SEQ ID NO: 145406 - DNA, 442 bp, Homo Sapiens
gatgattctcttcagagccaaagagtctccaggaatgcattattttaaaatgcatgatggatatgatggactacataatttcctagtttgcttccacatcaataaaacaattttctaaaaagactattggtttattttacacatacactatcaagcgaaatacggtatcttgttcacttgtctggctcattgctgactgttttccttaaaagctgggaaggctgtgggtcaattcagctcgccacctgtttctgtactgcccacaagctgagaatgaattttgtacttttaaatggttggggggaggggagaatattttctgacacaagatatatgacattcacacttgagtgtcaaagtttttaggaacacagccacgcccatttgtttacactttactccttccactttacaatgaagaggtatgaggagctgctacaga

SEQ ID NO: 145407 - DNA, 1084 bp, Homo Sapiens
tgttgagcagttttttatttgcatgcaataaatatatatctttctttcaaagcttctgggcttcctgtttttagtagaaatgtgatgtctgtggacagcaactgtgctaccaagtactgcagtacattaactcctctttcctttctgaggccttccttatctcagggactaaggggtctccctgctggtgtcaaaggctgttttttcagtaacctcaaaaccttgtggctgattcacaactgatgtccccacatccacaggagaccacagctaccactgcaaccatgtgactgacaccaaaccctcatgtggctgccactcttcctccctggctccccccaccaccatccaaatacacacctgtagggtcccacaggcagaatgtggaaaagacaaagaaccatatggattaggaccacgagacgaggagacacacatcttcaaggaaagacatgttgaagcagcagcaggcgaccacgtcccacccccaactccccactgtgatcctcccacagaaagtgaccaccctgcacactcatgcccaaacaggagaacactacaccgcaagacactgtttctcatagagctctattgtggcatataataataggtactctatataaattaaattaaaaataaagctccagcaggttgcacaggttggctgttaataaatatatctctgggtaattgtgccccaagaccagctcacgaccactctccctcatccagagaattatacaaaaataaatacaggctcggggggtaggcggaggacatgcccagttccactctaaaagttcccctcactcacaccatctacccgttccctcatctccactggtgtcaccacagggagccctgtgttgactggagagcttggggatgagaaggcctctctttcagttgagcattctcagaagcaaaggacccaggtcccctcactgcacaggccatgtatcccatcttaagcctctgctgatcccacaagcagagcctatgagaaccaagccagagagaggcacagcgcaagcaccaggagggacacaccgctgttcagagccacagggaccaccactagccc

SEQ ID NO: 145408 - DNA, 455 bp, Homo Sapiens
  misc_feature (221)..(239): n is a, c, g, or t
tttcataggttacacagttttaaaaatgtgactgacatagaaaggtagatagtaagatttgcattatggcagtgcattggccagggtgataaagattcaaaattaattttgcaaaatttgaggacctactctgtgccaggattcatcttggattcatgggaatggcagacttatacttgcgttttttccaagtgtaggtaccccactctgagcatctttcnnnnnnnnnnnnnnnnnnnctgtgaagctgggagacacagaggcatagtctccttcttaaaatttgcatcagagttgaccagcatccatttcattttgttgtcttatttattcagaaattatggttatctgctttcctgcatggaacgtaaatccttaaaagtagggcagaagtggattcatgcttggattctcagggcctggtttactcagtggtcccaaaagcaaacatctat

SEQ ID NO: 145409 - DNA, 469 bp, Homo Sapiens
gggttaaaatacttttactacttttctgctgctactacaacaataaaataatggaaacaagtaccatgaatccattagttgagcttactatgctatatgtactgtataccattctacatttttttgcattcattaatatattgagctcatccttctatgttaatatcttcagacattacttaataactttaatgacttgtatttcagagtatggattatgtattgacttatagttagattgccctcagttttccattattataaataaaactgctgataaatatcctggtacataaattattgtcgaatttgtgcaagtatttctgtataccaattaagtggaattactagattgttgggtgtgtagatttttaatttttatagtactgccaatttatgctgctccaaaatttgaacagtgtgctcttccactaatacatgacaacacccctttcctccaaaccccaat

SEQ ID NO: 145410 - DNA, 511 bp, Homo Sapiens
tttttttcaagaagaacagactttatttttaacataaaagttctattttcttgtgaggcagcaacaagtgttcaggtacagggaatacataagtacagcgtaacaataccgattaccattggaaatgctgttttttgagagaattgttagaataacaaaatgttttaaattgcattttaaaaagagttacacagcttccacagagacaaaaaatgaagagttaaaaaaattctattcttaaacaagactgtataaacaaaatgctgttcagggctgctctgctcatcttcaatttggtcagagtagaacttaaagtgcagagttaagcattcttagctttattttgcaaattcagcacttccactcatctggttttgagacatcaaaattccaaagactaaggaatgaatcttaagtttacaatagtaaagtaaatgcagtagtggcaaattttcttttattttccttcacaaaagaaaatctttataacccagtcctagtcttggacata

SEQ ID NO: 145411 - DNA, 478 bp, Homo Sapiens
gattttttcttgtttaataaacaagaaattaaagtccaaagagttaaagtgactttgcccaagttcactggacagtagaggagatgagcaggcttcatgatcgtgtcatcttcccatgaggtctgtctcctgtggactcaaccagatattcttgtcatgtgccccaggaaccagcactgagatgggcagtgttgccatagaaaacaatagctggcattgtgggtgtcttcaattcgttcatatctacctgttaagacaagcctcatagaggggacattacaaaatgggaatctccaggttatagtaagtaaagtattattaggctgaaggtcagaaagaatctggctctggttttagatcagatgttacttattcatttactcacacatttattcattcaataaatactcattgagagtctgtcaggcctcattctaagcactgagaatatagtgttgtgaataaaaagagatatagt

SEQ ID NO: 145412 - DNA, 499 bp, Homo Sapiens
tttcagaggacccatggctcctgtatttctcaggatgttattaaagagaagacaggttctgccctgattttaaaaagctgtaacttcaacgttaatgtgatttgtcataaatcacctcctacaaaccttgagaagttggatttctggggagagagtgttctactgcccacatccgcaggaagcgctggatagccaccaatcccttctgcacaacgagctgaggagggaattccagagggcagtgtcttaggttcagtgctttcagcgtggttacgctccccagctccacaggtaacattttgataggatttctttctaaaagcaaagttttcaaatgctggtgagctccaatcccagaaggaagcgctttaattctattgtaccggaggtccagccaagtcaggttcggaagcaactgaaagaaatcttgaggaatcacacacagggcattcctttgcagatgcaattgttgaaggctggggattctaaagacctcctc

SEQ ID NO: 145413 - DNA, 1015 bp, Homo Sapiens
ttttttttacgttacctctgaattcaggttttaatttaacatacataaaagaaccctagccatgatgacagcctcaaaagatcagtcacaagcaactcaagcaaggcagcaaaaaaagacaacaaataacaatacttaggatacatcaatcattctttttcctcttaaaaacagaaattggtcttagtttctcattttaaatgtgctttcttcctttgatttatgtaaaacttccaaagatataaacatctttatatacaaagaagtagtatggcagtacatgtgactttatacattttacatttgtaataaaaaaatcatgaaaagtatgctttgaacctgttggtaaattctaaaaaggaactaatttgaaagatttataaatcaaatttgttaagtggccaaactattttttatttgaaaataacaaaattctaactcgagcaaagctggttggaaagaaggaataactgccttttctaagctttatcagctaggaagcagataggaattaataattccaagaagagaagaagttttatggaaagaaattgtagtcgtcatgctgtagagtctgagcagctcatctcggaggtttaaaacgggtccatctcccccacagcagccacaacactggcagtccccacagagggttcccaggaaggccattgaccacctggattgcgcagagaaaccatctggatttcttctaacgaccggcaggttggagaagagggtcagattccagggaaccacatttgagaggctctcggcaacttgtttcataaggccctcttcattgagataattccccgtggtggaaggggtagccccatgtactattggccatgaggcatttaggacccttgttgattgaaatggctgagatgataaacgagtatccagctcccaagaatccaaccacagcaaatatcgtggaggtgaacatcgcaaatcgcttcccgcagccctcgttgccgcagcacccacagcagtcattgttcttcaggcccaa

SEQ ID NO: 145414 - DNA, 442 bp, Homo Sapiens
ggagatagtaagttttcctttattgcagaatgtctgtgaaagcagtttataatgaaacaaacatttttgatgaaatggttaagaaaaaaaccaccttgatctcatgaggagcaaatagtaatagtagcagtaataataacaaacgttgtctattgttgttactggtactcttgacagctaagctctcctacccctgacacaggttcctggtggaatacctcaaatgtcgacttcctgaggtggttgctattttgttctgttttgattttaaacagaaagcaagggcggaccatggtttgattccagatgtgaagttagaaaaaacagtcccccggctgcaccgtccgtccctccagcatttcagggagcagtttttggttccagggaggcccgtgatcctgaaaggcgtggctgaccactggccgtgcatgcagaagtggag

SEQ ID NO: 145415 - DNA, 824 bp, Homo Sapiens
  misc_feature (80)..(88): n is a, c, g, or t
  misc_feature (500)..(581): n is a, c, g, or t
  misc_feature (617)..(671): n is a, c, g, or t
aatactattattattaaatcccagaattacaggattacaagaaaatgcacacgtaacaaaagcagccttaaaaagctaannnnnnnnncaggggccaagcaacaggaaagagatagacccattattcaagacagatgatgtaatgtgaataaaagagtgaacattttcaagtgtcttttctcctaatattcttctattttctttagaagagagaataatcttcaactttgactcaccagctccagtgtcacagtgtgggaaaggctgtagtgggtgtgccgtgaaaaggcaatgcgtactgccagggcctaaggctgggacagcacatctcagttctgtcttccatagacacaccctaggagtttcaatagaaactctgctaaaattgatgaggaaagagatttcaagaagttcaatacattcagaagcacatgactatcctctcctccttccaaagcaagttctttatcgtctgagcaatcaataagtgtttaacgagnnnnnnnnnnnnnnnnnnnnnnnnnnnnnnnnnnnnnnnnnnnnnnnnnnnnnnnnnnnnnnnnnnnnnnnnnnnnnnnnnnaatatttctcagaggccgggtgcggtggctcacacnnnnnnnnnnnnnnnnnnnnnnnnnnnnnnnnnnnnnnnnnnnnnnnnnnnnnnncaagaccaacctggccaactgtggtgaaaccctgtctctactaaagatacaaaaattcgccgggcgcggtggagggcgcctgtaatcccagctactcaggagccccggccgtaatggccgaattcccgggcatatgtccggtaccgtcgactg

SEQ ID NO: 145416 - DNA, 837 bp, Homo Sapiens
aggcgcatataatataaacaagcttgtacaaaaagcaggctgggtaccggtccggaattcccgggatatcgtcgacccacgcgtccgcgtgcagataccttctcgaaacaaaagattttgcctacctgcttatacttggtaaccgagggaatttctaagacttcttgctcatttctgagtattgtctttatatcctgacactatgaatgctacttggatgcctcttaagggtctcttctgcagggtccccatgaattgtggctgaagttgtgcacaaacgaagtatctccagtgacaggagtgccttctgaggcagccattgcatcttcatctgctgacactctgctaggctgacttctgtagttttcaccactgatcttcagtccacctcacagagctctataaaacgcttaaatcctctttacatcatagactttcagctacttgaagatagccatcagccgctacgtgactcttttctccaggatctccctaatactatgaacgcggcagagataacggacaagctcggcctccattccctccgctacagaaactggcacattcaggctacttgtgccactactggacatgggctttacgaaggcctgaactggtcgcaaccagttccagaacagaactgatcagaaggatctattcttgtggtgccttgtggcacatcaggtaggctctgtgtgtgcacgtgtacgtgtgtgctgggagtggaggcagtttctcacagtggcttatcatggcataagaaaagccggctcactttagaaaccgtggtcagtttgaacaccacttccatttcagggggttgagaccctcttgcac

SEQ ID NO: 145417 - DNA, 429 bp, Homo Sapiens
  misc_feature (89)..(97): n is a, c, g, or t
tttggtattaatactattattattaaatcccagaatgacaggattacaagaaaatgcacacgtaacaaaagcagccttaaaaagctaannnnnnnnncagggccagagcaacaggaaagagatagacccattattcaagacagatgatgtaatgtgaataaaagagtgaacattttcaagtgtcttttctcctaatattcttctattttctttagaagagagaataatcttcaactccagcggttcgtccagcgcttgtgtggccacagcatcctcctagagagggcttcccatgccatgcatctgactcaccagctccagtgtcacagtgtgggaaaggctgtagtgggtgtgccgtgaaaaggcaaggcgtactgccagggcctaaggctgggacagcacatctcagtttgtcttccataaacacac

SEQ ID NO: 145418 - DNA, 387 bp, Homo Sapiens
ttttcaaagtaattctttttaatttccattttcactggagagtgttgaaccccgtgaggcatgagagcacagtgttccagaacaatgcttactgctcattatcacaggggtcaaaggctaacgtgcagggattgttgcagatcgtggacatgctgcctcctgtgtccatgactgcaatcgtctacctattttacagttgttgagcactcgtgtgcattagggttcaactgggcgtcctagggctccctggacccattttagaccttgagttcttgagttcctcaaaagagaaatcacgcatttatgttttctcttcttagaccatccaggaggtggctggttatgtcctcattgccctcaacacagtggagcgaattcctttggaaa

SEQ ID NO: 145419 - DNA, 567 bp, Homo Sapiens
tcacctttttgtactgtgaacagttcaaccagtgaccgacttctctctcatgctgtttaccccacacacaatttcccactcaattctgaaaataagaacctgttaataggttggaaagctgtgtactctattcatatattgttctttcatgctagtggagagtggtgtcattagcatcttaattttagagttgtgaaatgattttaccaattaggaattgaatgtgtattttttttctgtttaataagaagagcaaatttgaataaataagctggtgtagataaacttaataatcatgctttttcttgtttggagataggtgatgtgttgtcatatcctgtgatacaggtcactcatctggccttctgtttctgaagtttaagtctggtttgaatatgtaataatactactcagcatttcttgttgcctaagtgagacgaaacttaaatgttatgatatttacttcatgtattcttgtactgttcatttcaattaattggtattgtatatctaatatgtgatatttgaactgaataaaacttacagtgttgtaaatgttctaaaaaa

SEQ ID NO: 145420 - DNA, 484 bp, Homo Sapiens
tttttaaacacaacaatcgtcatttattctctttcacttggtgggtcaagaatttgggctttgcagggtgattctgacataagggtttcttatgccactgcagtcagatgtcagccagggttgcagtttcatctgaagtctctattggggcttaggatccacttccaagatgattcactctctcacagtgagtcactgctggttgttggctgggggcctagttcctctccacacagggctctctgcaaggcaggttgagcatccttacaatatagtagctgattcgccccagaacaagctatctgaagatgcaaaggctgaagccatgatgcctctgtgacccagcctcagaagtcacactgtcacccctgccacacttcactggccacacagaccagcctgattgactgtgggaggagactacacaagggcatgacctggaatgtgaggattgctggggccaccttggaggctggcaacctca

SEQ ID NO: 145421 - DNA, 1003 bp, Homo Sapiens
  misc_feature (614)..(614): n is a, c, g, or t
aataaatctcacaacaatgcacttttgacctgaactgatgggaagacatgccaaatccatttttagaaatttagcattttgcaccttttttccccctgttccttcattttctttcaacaaacaacaaaggtttcttttatatgttatgataaattaaaatatttattattataaaatgatctacagaaccatgtcacattgcaagtatatataacatatacttgtaaagtccacatttcccatctatatttcagtggtttccttaaaactaggacttcccacacctcatgatgttatcttttgaagactgagatggtgatcaactaaatcaagtggagttgtaattttctggatggaatttccacactgccaccgacatgaataaaaagaccaggtttcttcatactctccattgcagcagttgtctgcatgtgttgcggtgaattcatgcacattaaaaaaaatggtcaatgtattcttccacgaaattatattatgttcagatatttcagtttaaaaatatttgtgaatataaacatatgtaacataagcaatgctactgcatctgaataataaaagaaaaataaatataatgctggtcagcaatgctggtntaagaagcagtacagtctattaaaatgccttatttggagatttaaatttcccttgttttccagcagttaggttatttggtgttggaagcctatataaaggaaaagaacttctcaaaaacaatgtcccgtgcagttggaataatgaaatctttactcagtctctgttggtgttatttgctgcaaaggcatgtaagtatcccatctggctcaggccactctgaatatgtgcaacatggatttctacattattctgaaagcaactgatattagaagcgtctattgtactcttgatatcatttaatgagtctgtaagtgatttgaattcaaaggaattcaggtctcctccttctgctagacacttaatttgtaacaaaatagctgtaagcccc

SEQ ID NO: 145422 - DNA, 643 bp, Homo Sapiens
gctgtggttgctcgcggatctcgggctggctgtagaccagcgccgcgggcctgctgtaggcgtacgagctgccgatgttgaggtttcgcagcgagtggctctgccgttccgcatgcaccaggcccctgttgagctgcttcatcacagtctcatagtctggggtggggcggtaggacgggggtatcacggcgctgtgccgatgggacgggaggtagtcaggcctcatgacgtcactcccggtgatgctagggttggacgacatcggcgagggctgcaagtagggctgaggattatttaaggagttggtgctgtgtgcactgtagacactgccattacggatccgaccgttgaagtcaatctgggctctatccaagcttgtctgagagtgacagtagtatccgttctggttgggcacaaagaggttatcttgggaagaagcatatggttctgtataatgtccattatagtgcaactgcggtgggggaggcatcacgtagggctggggtttaggcagagacatccttgaagaagacctgctgctgattgggttcactgtgacagtctgagtttgcaggttacactggtttagtctgtaaaacttgtgtcgcgcaacacagagtctccaaatgtattgtgctgtttc

SEQ ID NO: 145423 - DNA, 481 bp, Homo Sapiens
ttttttatgttgtcaataaacattttattagttccttgtatggataagaagcttaaagtcaatgactaattcatgccatatacacatattcctgttttagattttctattagcaaacatcctgttcaattgttgttgggagttttgagtacattcagaaaatgaaaccccacaatcactgtttacaacaaatgagtatgtatttttcctaataaaatgaagctgcttgaaaaaaacataccttaaaattaagaatgtactcatcacttaataagaatgtactcattattaaacaataggcaaatcaaacaaactactgaagtggcaatgctcgggattttgagtttccgccccaaacttgaaaataaagtagacagccctcaaactttgagataaatggattccacagtgaagttaagttgcctatacgagaacagaattactcctagccattcaatcttcgatggatcttatcaacctac

SEQ ID NO: 145424 - DNA, 597 bp, Homo Sapiens
tacatgagaggcccagcccagcctccaggctctccttacttgagcaggtgcatcaactccgacagctccaccgccgaagaaggtggtggctttgagtgggatgatgacttctccccagatccttttatgtcacagacaacaagtaacctgctcagctccaagccttctctccaaacatccaagtacttttctccgccgccaccggcccggagcacggagcagagctggccgcactcggcgccttactcccggttctccatctctcccgccaacattgccagcttttccctcacacacttgaccgactcggacatcgagcagggcggaagcagcgaagacggagaaaaggactaggtggctgccaacgcgcacgctcgggtccgaggctgctcccctggagcggcgcccctgcgccctcagcccgagcagcgacatccactcgccatttgctgacatgagattgggaggaagaatccagaggtgaagagggagacggctcttagctgcgttcaaggcggggccctcgggagcccaggtgcagagcgaggccgtgtccaggagccggcgtccctcagtgccccgtgcacccgcggccgc

SEQ ID NO: 145425 - DNA, 574 bp, Homo Sapiens
ggcacgaggttcttttattattttttcaacagtttatatcatttattgagagtctgtcatgccaggcgctaggctgagacctttacagtgttgtctcattacatcctcatttaccaccatgagacaggggtgactgttcccactctgcacattccacatgggaaagtaatctgcctgagttcacacagctagggtgggcacagctggctgccggacactgcaggaaaccccctgtggggctcctctgcctgactcactctggatgaggtcgggcccgatggtggactcgatgatcttgtcgatggccgagctcaggtctgaggaggaagctgtgcagtcggacaccagcatgttggggtctgggagtgcactagagtgcacaagtgctgggggaccgcctgtcacccgctgccactggcccatgagacacagacgatgaatcagggaggtagctattaggcagggggtctgcgctcgagctgctctcagatacctcctactgagaacggctgccgcggtccgagctttgccccacgccagagtcatcggcctctgccttccccggggcggccgc

SEQ ID NO: 145426 - DNA, 580 bp, Homo Sapiens
  misc_feature (79)..(182): n is a, c, g, or t
cttctaaccttttgttggtttacagacgctcgtcaattctaacctcctagatacacgatataaaaatgtctatcgttgnnnnnnnnnnnnnnnnnnnnnnnnnnnnnnnnnnnnnnnnnnnnnnnnnnnnnnnnnnnnnnnnnnnnnnnnnnnnnnnnnnnnnnnnnnnnnnnnnnnnnnnnaaacaaaacacagaaagctatacaactccgtttctcttgctaatttgtcttttgtcagtttaatttgcaggccccagatgctgaatctaagagggcagaggaaaagcttctcctccctgacataaccatccaggaggaagtctgaaatggagggtcagaggggtagggaatggagttaggagaagtagatagattcaggacagtctttggagaatgtacatcactgaggtcaagatgtcctagggaatggcccttctgggttcacaattctgcttccgtcggttaacagcaacttagtcccttctatgcctgtggggataatcagtcaggataggctggattatgctgctctaacaaccccaaatttctctgatctaataaaagtatactcaaaaatg

SEQ ID NO: 145427 - DNA, 461 bp, Homo Sapiens
tggtcagaagttccgacagctgaccaccctcttcggctgagctagaggtcttggctgggctctaggggagcctcgagctgccccacggagaccagggtgctgagctgtcccgaggcaccgctttccggtgggaaggtgaccaagtctgagttcttgttctcactctgatcactgtgctgcttcttgtggcatctcagagagtcatccctgacgaaggaggcgccgcaggtctcacagcggaaggccctctgcgtcacgatcttggccacgtgctgggagctgccctctctgagcccttccttgcccagaggggcccggttctccgtcttggcctcgtccctgtgcaccttgtcgacgtgcttggccaggctgctgggccgcttcgtgtcgaagctgcagaagtcacacttgaagggacggtccttacagtggactctgctgtgcacgcgcagggcggccgc

SEQ ID NO: 145428 - DNA, 614 bp, Homo Sapiens
tactgatacgccatgagtagcatcatcaatactctgatcatcctcagaggacaatcaaagccttttatgtggaggttcaatactatcttctgagtctatttcatccgcttcattctgagggcagtgaagaatgagattcccttctgtgtcctgagtcaaagtcacagagttcacagtttctactgttactgtgtcagaatcctcttccactgtgctcatactcaaatctagacaacggatggatcagctacagcccttcccacagaatcaagttgccttcccttagcaaccagcatcactttcatgttacccagattgtttctctcccatgttcctatctccgcaacactctgaaaaagtaacagcattacacacaataaggcttaataagaacaaacgaatagtatagcagtatgctgatgacaatctaggcccaagcctctgtgatatctcatctggaagagtaagacaaaaccagaattcttttttaagcagaatttttggaaactggcctctaaaagtattccccaatgaaggacagaaatgatgactattcacaggtagtttcttaacccaagtggctctcatcaggcagacaaacgttctctgaaaaa

SEQ ID NO: 145429 - DNA, 538 bp, Homo Sapiens
tttttggcatgcatgaagaaagcacattgggaagagcctcccacctgccattgcttcattttcatggataaagtagtcacagaggttggagggatgcctcaaaacaccattaagcatcttcacactttttctccatcacagtgaattcaccattccagggaagtgctcctaccaaaaagctgcagcttaatttccttttcagcttggagttttcttgaatggcgcagatttcattagtgcttaaaggctttctgcaatcgctgcgggcaatttctacatcaataaggtattccagaagatttgtgacctgaagctgggcttgcagtgtcttgaccaccaggaagacatacttgtcctcgctctctttgttgtattcttgcatggcaaaccacagacactgcttcacgttggcatttgaggcattgacgggttttaatttcctcagcacccccgtctcattcttttttgggtctttcctggccaccagggccaggggaatggtgaggaggatcagggagagccaccggcacctgggcat

SEQ ID NO: 145430 - DNA, 496 bp, Homo Sapiens
tctgtatcatccaaaaaaagcatggggcagggtgagggtctgtcaacgacccccatccctggtctacctgccccttgggtggtggagacctgctctgtgctagcaagggggcccctgagagggctgcgggggtgtccctctcagggtccactggaatctttcattttgtattaaggagattgggggaggtatgaggccaagcaagagagcagtttcttgaaaagagaaaagaagttggctttattgattacaaatacacatgtttattgcacaaaaattaatataaaaggggaaagtaacaataacgtgaaatccaccctctccacagtacctactgatgatgtttttgtgactacccttccagatttttctagatatatgacttacttttcgaagatgggcagacagttcccagtgttttgcaacctgctttttttctcctttgcagaacaatacgttgagaccatcttcccacatctaggtcgtcatttctcag

SEQ ID NO: 145431 - DNA, 478 bp, Homo Sapiens
tttgatagtcactaatataataccttttattatatttcccaatttcacaccttcctcaacccaatccccaaagttgttgaaaggtgactgtaattgcatcgttagttcttagctttcctggaatcttatctaagacaactttcacatcccccaaaaccctaaaaataagcccagatttttgctttaaattgcgaagaacttgctttattttgtaggatgagcttgataacctcagcgtggatttcagcagctgccggaaacagcactctagaagttaacacaggtacgctccgtactgaggcactgttttagctaactgctccagggacagcaggctcagtcctcttaggtaagtaattttggaaggtggcactgtgttcctaataaattgaatcagatcccttaggttagtcactattcttaagaaataaagcacgaaatcaacttgaagtcatctgttgagaaggccgtggataga

SEQ ID NO: 145432 - DNA, 860 bp, Homo Sapiens
ttttatgtttaatatctttaataacttgtttcaaatatatttgaataggtatttttaggtacagaaatacttcacacagttcaaggttagacttctcagcctcaccagggtctttgagaactttgacccagagccattcagtagctgaaagaacagttgtgaaactcattcattaaaactcaattacattattttcgaagacacgtactcatgtcatgttgactcttactttaaatacagttctagtaatcagggttatctgatttcttagatgacagcaaatgtgccgtatagttagagactgctcattagacggaagaggattgttgtacccaagcataaatactggccagacagtactattgtgggtggtaaatcattaagctaggatctaattatattccatagagtctacttaaggaacatggaaaatatgaaatatatttctaaatgaattttttattttaaatgagtaaaataaacatttgacctggagaggtcaactttgctcttctagaaaaaaaaggtcacacatgttcaagacctcattccataagcacaactcaaacatagtgggggctttgttaatatttgctgactgaaaaggggatgcttttaatttcttctggatgttttgaattaacgcctttaaatatacacattaaaataagcgagttgtttcctactattttcaaatttacactcttcattgttcgtgctgtttctctccagctcagtccaggaggaggactaaagggggaacgtgtgtccctctcactgcaccattgccgagctttcttctccaaatggcacaacaggcacagctctctggtgtaacgctttcaactgcataactgaga

SEQ ID NO: 145433 - DNA, 499 bp, Homo Sapiens
tttttttaggccagctatcttttattaagctaaatgttaaagagatttgtaaaaatgtaaaacaataccactcttctcattttttgttttgaaaaatagtcattcttcttatttttttaacataatttttaaattctaacagaaaatatcaatagatttaacccacatacatgaaaactctttggggttctcacttttgaagagtgtaaagggatcttgagaccaaaagttttgagaattgctgttctaatgcatggctgtcatttactcaatgacttttgtatgaggttcttttgcttctttaatgtattccagatacgaatcctttgacagttccatgcattgcaaacatttccttgtctgtagcttgttcttttacagtctctattgttctacagaagccatgtgtttatgcatcattttttcctgtgtatgcttttgtgtcttgctttaaagaaatccttcccatttgcaaaatcatgaaaataaccttatagat

SEQ ID NO: 145434 - DNA, 612 bp, Homo Sapiens
cagtcatgcaaattgattttatttgtgaaaagattaagaagccacagtaaatgaaaggaaacggttatttaaactgctcccttgatagtcataattatccagttgaggtgtttctttgagagaagaatatagacaccaggcccacgagggtctccgcatttattttcaaggccaaaggaagtgacccctcggaaaacaccctcgcacaacaaagggcttccagaatctccattgcacgagtctcttccacctcggaggcttccagcacaaaccatattcattccaatcacagggttaaaattatagtgatttcgatcattgcagacttttctgtctatgatggtgatattgacttctctcagagtatcggaccaagatgcactattgtgagtcctgccccaccctgcaacttggcacatggttcctgttttcacatcatccccctttttaggtagatgaaggatagtcacatattttttaatttttgctttttccgtcagctgtaaaagtgtaaggtcaccttcgcgtgtggctgggtcatagcatggatagggaagctctttcttaacaagcattatctggtttgttagctcttccctggttattgagtga

SEQ ID NO: 145435 - DNA, 464 bp, Homo Sapiens
  misc_feature (223)..(223): n is a, c, g, or t
aaaaggaaatgcaatgtaaatttttatttataacaatatgataatttactatttaaatacgtttgatttgctccatattctctgtatccagtcagtataagtccttacatgtcggctctttacagggctttaacaggtgcagagtctgaggtgacagggagtttggtttattgatctactggcctgagccaagtttgcgtcatcctggtttcagcgcagcagntggtgggctaactcttcctaacatccctcagcctgcaggattctgcatctgggtctctgcctggtttgtttcaaaattggcccttggaattttcataataagaaacttggtacagaggacatccacaatctcagcccctggctttatgttcactacacttttgccattttgcctggatcagcaaggtgataccataaatgttggcttcaggagaacaccagctttactgcgtgcgattcag

SEQ ID NO: 145436 - DNA, 430 bp, Homo Sapiens
  misc_feature (327)..(327): n is a, c, g, or t
acgaatgtggcaggcataaatgtttatgcttatttctccttgttatacatgctcattgtaaatatttccaagatcatagaaatataaacccatcttctacagacaagcaggattaacagcttaaatattcttgaaattttagatacacaatcacatggatgatcaagaaactgctttccataaaaggttagggaacatacaaatccctgggaaaacacatttcctgtgggagggatgagataaatgcttgtaataagatgtattaaccatcctcagagacagatccaaacaggcaaaaatcaacagcaaactgggacgcgactgctnggggtagctagacgtcacccttgtacgcacaccagaagccaagagatttaccgagctcccagatgcaagcacatccttcctttctttaaatccgattttcttg

SEQ ID NO: 145437 - DNA, 497 bp, Homo Sapiens
ttttcacttaaaacaagtctataaagtggtttattttaagaagggtacattttaagaaggacaaaatcaaaagcatggacaagtgttggatgagctgatgaggttgtggcaatttactttgtgaatactgtgagagtttgtccaactcgctgtgcttaggtactagatggtgaggatttaaaaggtcaatgaagtcacagcagaccagcactcaaacatatttctcttctatttcctacttttgaataaaaatgtcagaagtgggcggtgggaaaggaacaagcaaaggagtaattatttgaataaatttttggcgaaacgtgggtgtctgacggggaggctgtgcggtggtgaccaacgcacccatgcgctgggtttcacaggtattcctgtttttcctctttcttgctccaggttacacctcgtggcgcggcgctctcggagagcctgtggagtggccctgtgtccctccctgacccctggaggattccgtaagg

SEQ ID NO: 145438 - DNA, 767 bp, Homo Sapiens
  misc_feature (740)..(740): n is a, c, g, or t
ggagctgaagctttatttggaaaacatgatcaagattgtgtattagaaaaacataaagatgaactttcttggcacagaaatgagataaaatatccagtgctacacctgcagaattagcacggacgccaatctaaaaacagcaaatatttatcagtagctttaatgaattaatgcacaatattttgaaaaatctttgaccttgctcataagcagatgcctgccttgaagaaacactccaagtctgccgtgattccgagcgaaatgccaaggcagagtcaagacaatcattacctttagggctgaaacctgggcatgaggctgccccttctgggatgcctcctaaccagtctgatgtactggggaaggaggagtgaggtggggtcttcctcgggtcccagaagctgaaaacccagcccttcctttgccatcagttctgtgccaaggctggaagatgctgctggagtgcagggcttcccccgtgtgggtgctgcagctcacacaggagcttggtggaggaatgaaggatggattctgggggtagctggagggcagggggctcactgggagcccagagaacatggctggacctccctgtgaggagccagatggtgtcgcagccccatgtgggggcttgagcacgtggagcaggaaggccgaggcctggaaccccaacccacgcgtccgcgacgagtgggtcgacgatatcccgggaattccggaccggaccagcctgctttttntaaaactgttctatagtcactatagcg

SEQ ID NO: 145439 - DNA, 495 bp, Homo Sapiens
tttactcataacattttttgtgtttatttagatacacacttatttaaaatagtacagaaagtaatgcattaattttaaaatgcattttttacactctcaaacattatgaaactatattcaaacttttcacttgtgtgtttgccactggaacctttactatcactagagtcccttgtgaggccatctaaccatcatcatcaacttcactcctatctctgctgacaggcaacacttggatcattccacaatgacatcactgggaaattttgttccaaatcagagaaactatgcatataataatgagactgttctttcccctttttatattaaaaaaccctgaagatgtgtattcttaacaactgccacatgaacactttttatattgttttctaccatgatttaaaaaaatccacatttaaagtaatgtctagtgataatacttgctattgtaaaatctttaccccagaaatagttaccaaattttcctttgttaaa

SEQ ID NO: 145440 - DNA, 425 bp, Homo Sapiens
tttagcttaatactacagagatttattctgtcaccgttgtggaggccggaagtctgaaatcaagctgtcagtagagctattccctctctgaaggctctagggaagaacctgttctgtgcttagcttctggtgttgccggcaatcctttggtgttccttggctgtagctgcatcatttcaatttctgcctctgctatcacatgatggcattctgtctgtgtgtctatgtctctttcttagaaggacaccagtcatatcggcttagggttcaccctaattcattatgacctcatgttaacttgatacatttgcagagattgtatttctaaataaagtcacatccacaggtgttgggggctaagacttcaacatactttggagggggagagcacagttcaaccataatagcataccatgttttgatct

SEQ ID NO: 145441 - DNA, 491 bp, Homo Sapiens
tacagtattttaaaaagttttatttgcgctactttccaaaagccaaaagcctatcccagaattattttttaaatcatgtgttccagacttgagtaactttggctgttcctctgggcatggaagaagtggcagtaacagacaaattaaatagttttcaagagaacaacttaaagacattgtttgaactccacagtgtggtgctttctatgtagcttcaatattgattccagtatggttcctacattcactcattcaacaactatttattgagtgcttactatgtgccagtactgttttaagtcactggggggacaacgtattaacaatctctgcccttgtggaagtttacattctctaaaacatgaaacattttccatttttaaaactcagatcgtaacagctattcagcttattgtctactcattcataggatcagctcttaaatatgaaagtcaactcatttctactacacaaggagtatcacattccat

SEQ ID NO: 145442 - DNA, 914 bp, Homo Sapiens
ggcgaggagccgcgtgcatggcctgggccgtagagtgtgtgggtagtctggcttgtgtgtgctgcgctcgctaggaattcgttgcagggccagtacagaggaagttgtgaagagtaagagtatgcgcgcagagcgagcagaggttgtgcagagggttgttgcgcgcagctgggagcgtccggccctttggagaagcctacaagggcgctccgcgctgtgccgcggcgcagttaaaagcctgtcgggatcagagctcggagtgagccgggagggcgccaaggtctccgcagctgaggaatgggaagagagtggtcagccagaaccgcacgcggcctcgccaggcatgcccgctggcccacctgggtggccgggccccgtccctcgccgccacacccggttgcaaacacacaaatcccttgctccccagaccacccaagtcggaatccgagtgaaataaatagcatcgcccgccaactaccgccctgcttcacagcccgggcccacccacgggatatcgcagtctccgtgggggtgacgtcctggcctcgctgcctccgcgctgctcttctccccagagctcccccacgtctccggctgagcacacggacccggcgggcatgagacccggggccgcagggcgagggctgagggaaggcaccgcacccaggactgggaccctcagcctcccggggcccgaggagcggggggccggccgtccaagggaggggccggtggccctgcaggctgcgctgccgtcggccccgggcccctcacaggacgccctcccggtaggcgcccgagggcccggcgaacgcggcctggtgctcggagccgaagcttgtgccgcccgcgaactccagcagggcgctgccgcgctcaccggggccggcactggacggccccttggcggccgc

SEQ ID NO: 145443 - DNA, 118 bp, Homo Sapiens
tttaaaaaagaagatagcataccacggaattcaggcaacttacatcaacaaataggccgtgtgattttagcatgaagaaaaaaattacaaacagagctgtgtaagcgggttctcccgg

SEQ ID NO: 145444 - DNA, 852 bp, Homo Sapiens
ttatgccatgaattcctttttactgaaataccgtaggactcactaccacaataagtacttaagctgaaagagtttctaatgggagccaagtaaattcagctctccactgtgcaaagcatcttgtcatttctataataaaagtctttccatgttcagtccactttggctctggaacctggatgagtcatgcttggggcccagggtgcctgtgaggatgctgcatgagaatttcagctgtggtggcagtgtctgggagtcccactgactcagggggaggccaggcgagatgagctggaacttttaggggagagctggcacttagggacatcattgattgtgcttttcttagcctagttctgtcctgcaatttatttttcttatcatgtgactgtcggctgaagtctggggttatttggtttctttttcttcttccttgctggacagtctccatggggtcacggttgtctaggtaattaaaacgaatgatatctgttgggtgcttatcagaagatcgccagggtggaagtgctttctcccctgagttattcttctttcttaaagaggaagaggaccgaaaagctgataaaggggactgtttttcctctggagaattgcttgtaactagttgaacgtcagcgattacaaatccatcctttgggggtgtcttaggcttggtaatatgaagttctttcaccatttgaatatagtgcttcttccagatcccctgctcaaagggagttggagagaaattgatgtaccagttaaaccgtaaacatttcagcatccagagctggtccagctcagcaaggttcttccaatgccagcacacctgtgcacaacgacaaaggctcc

SEQ ID NO: 145445 - DNA, 752 bp, Homo Sapiens
tttttttggagttgaaagatgtgagacagtattcagaataatgaagataataataatgattattataataatgatgatgattccaaggaaaaaacctacagcgaatgttccatttctaccccgcacgcagacactctccctaacactgataacctgagcccccagcactggacggaagaatgctggcgtctccgtgtgtactggttcagggttctggccccagccttgtcaggaccccctggtgtccagagcccccacccctcccgcaacaagcagctgatgccccagtgattctctatacatttttcacctcggccaatatgtccaggaaaactgcttacttctcttttcttgcctggagcttcattgttcacccttacgttgcaatataggaattaatgctacaaaataaaagtaaagcttacctgaaaagtgcatagtttggggcaatggtatctacatctcccactgtgggaaaaccagcaaagcatcaaaactctcaattctcctgttaccgaatgcagatctgaattataagatgtttatgtttgaccattgtttcaaccatgggattttgttacgaattatccctttaactgaaaccctcagttttactgtttacattattaagaaaacagggatatcttttggatctaaaaatttgatgtacagcatgtggatttttggagttttacatggtaagtcccacgtatggggggaaattaacgtttggtcttattttttgagacgtt

SEQ ID NO: 145446 - DNA, 487 bp, Homo Sapiens
cagacaggtgttttgcaaatattttctccgtctgtggcttgtttctccattctcttatttcctttcccagagcaaaagtttttaattgtaacgacttcataccaatatcttctttcatggtagaaatttgtcttttatgtactttactgttgtatctacaaagtaattgccaaacccaaagttacctaaatatcccttttgttattttacagaagttttacagcttttggatttaaatttaggtctaaaaattgaattcataaaagtagagagtataatgatgcttaccagaggctgtgttgctggggagaaaaatgggaagttgttcacagatgcaaagattcagttaaaccggagaaatgcgttttgaaatctattgcacagcaggatgactatagtcaataataatgtactgtatatttaaataacaaaaagtaaatttcaaatatctaaccacaaaaaataaaattgaggtgatgggtaaaaa

SEQ ID NO: 145447 - DNA, 477 bp, Homo Sapiens
ttttgctttggtgagcttctgattttactagaaatacactctaagaacagtcgagacgccgcgcctggtggaggcgatgggtcatgttactggttctgcgatgatcttccagagctccagctgctggaggcgctcgtaaaccaggagctgtgggaaggaggcctccacgggctccaccacgaagcgcagcttgccatctgtgagctgctccagcgcgtgcaggcaggagcggaagtgatcgtaggcttcacatgtgacgtccaagtgtctcagtgtgaagttgagcctcttctccaccgacagtatggctgtgcaggcatttttcaatctgtgggcgagtcgggagagcgttttaaacacagcatcagtcaagtcgtcgtcgtaaaacacttcggctgcaaacaggatggtggtgtgatcgtacaggtcagaaatttcctcttgtgaccaactgaaggggaccttgggatctgtgca

SEQ ID NO: 145448 - DNA, 410 bp, Homo Sapiens
ttttttttgctttggtgagcttctgattttactagaaatacactctaagaacagtcgagacgccgcgcctggtggaggcgatgggtcatgttactggttctgcgatgatcttccagagctccagctgctggaggcgctcgtaaaccaggagctgtgggaaggaggcctccacgggctccaccacgaagcgcagcttgccatctgtgagctgctccagcgcgtgcaggcaggagcggaagtgatcgtaggcttcacatgtgacgtccaagtgtctcagtgtgaagttgagcctgcaaaccagccagccggacgcacaaactgccatcatcaatgggaagggttttgctgtttctacccaccttgctttcctatccctcactgatctcatatcccctggacgggcttttact

SEQ ID NO: 145449 - DNA, 627 bp, Homo Sapiens
  misc_feature (281)..(289): n is a, c, g, or t
ttttggttaacagctctttattccaactccattagtgatatgaaagaaagacaatccaagtcagtaatggaaatatgcaagaagttcaatttaggtgaggtgaatttttgcatctgctttaacggttgaggtttagtgtatattgtactttttacccttaaggccaagtaattggcaactgtgaaaccattaatgtaaaatattgataataaattatgataaaatagctacaggactgtcaacaatgttaaatcttggcctaattggataaagtgctttannnnnnnnnaacattgtgtgtttttaagtataaatacaaatgattatgattccttaaaaaacagatttaccaagttctcgaataagacaaggttttacagtaaagctgtagatggtgggctacaaaaacgctttccttttcctcctattgctctgaatgcacttatcaaggcatgtagctcagggaaaagtgtggccagagattagttagaggtatccgagtgcacacttcctgggccttctgtaggagaagtcacagaagatggagttgttgcgtcctgccagcctccattagcatttaaattatgtggactgtacagtgaatttaaatgctaatggaggcggagg

SEQ ID NO: 145450 - DNA, 867 bp, Homo Sapiens
tttaccatggaccaagcactttattcacatcttattaatcctcacaaaaatccaaagaggtgggtgccatttcaccccatttcacacttgaggcgattgatgctcagagctgtgaagaaactggtggcatctgagttccacttgccatctctttctacaaatgacgagaaagcacagcaagcctagctggctctgcagctttccatgggaactttgtcttcctccaccacgtcatcatgctgccaggagttagaaacttatagtgaatggggggtgtgggctggaatcctttggacatgaggccaggactgttcctagtgacacgataaacactcaatcctcacggtgcactaactcatagatgatttattgccgtaagtaacttttgatttcctcatctgcctgttgtgcatttcttctctggagaatcgccactgaaacttcgattccttcttcttgattttctgaggtagacacggtctctgaagaaagacaatctgcttggtggatacactcccctcgctggtagtcttgacgacgggagttggtagcacacaggtgagctgccagccataggccggcagcgagttcagcaggggcacgtagtctgtctgcacttcgacaccttccaggactgtccattgttcaaccacaatagcatcatagccctgtatggttttgctatcttctgtggaaacagcttcaaagatgaatactccatctgtcaagccatgtaaggaatcattcactattccaaggtagaagactgcgttcaccagcatgcctcctttccggaagtggtcgctcatgtgctctaaccagttggcgtccaaaccgctcactgtctggccattcttggagacatgg

SEQ ID NO: 145451 - DNA, 540 bp, Homo Sapiens
ccctaaactatcacttttatatttattggtctgtttagtttgttctggcctgaactacaaacatggaggagcaagagagttttcatgctacagaactcaacattttgggatctttaatgatttattctattttctaccatttctaatgatcattctaagctattgtactgtgataatattgggttgaaatttgttgaactaaagtttgaccctgttaacgaatctaagttatcatgaggccatctgtaaatctgagattaagcatttttctaaataccgaggactttacagtttcattttaggttataaacttagaaattcagaattccagagtccctcaccagcccattttactagttaggagccacagcacattttcagaaatataccacagcaaaatcaaaagtagaaaattatataatattccaggattattcaatcctggtggttcctaaccctaactcccatacttttgccacttcgagaagctgatctaaactatgcactttccccaagaaaaatgcatgtaaactagaactt

SEQ ID NO: 145452 - DNA, 524 bp, Homo Sapiens
caagctgaaaaacatttttagactccatgaacttccagtgagctggtaggatttttgatgttttattaacacttttgagattttattttcatgtcaaaattttaatgctcttacagccattcatggttgaaatggtttgcttttagcctttcaaaattgctactcatagcatgaaagaatctgcttatagtagctgtaagaatcttaaaagtaattggtttaagcacttggtggcagtacagactaagtgcactattgtgtattttattgtagaggttggagtaaaaatgccccaatcatttttagagaagtttctaggattactttaaagataggatctcagcaactatacatttcatttgtttattttactcaccaattttaccaatgtactttttccctgttaataagttctttttacttgtttgttatgaggactgtaattttgtgaactataattacataggtttaaagatgagacttagtattactccacatttattgaaataaattgttttaaaaaa

SEQ ID NO: 145453 - DNA, 459 bp, Homo Sapiens
gaacacctctttacaaggaaatgaggaaaatcagatgttttagttctcttacagaccagcagtaatgttgaaaaatataaaagtagccgtaacagaaaacgaagtgatcatttcagccctcccttggagtggggggatatattgcggagctgagttttaatggctatcagttcttgatcagaaaagtgaaatcactccaactccttccgtattccacggaatatgacccgtcttgaactttgagaaattccccgggtctgtgtgaaattccagttccaaataattcacatgaatggttcacaagaatccaggtaggtttgatctagttcccggtcctatctggggccagagtttcgcccgcaccactacagggccgctggggagtcggggccccccagatctgcccgcctcaagtccgcgggacgtcacccccctttccacgctactgcagccgtcccc

SEQ ID NO: 145454 - DNA, 488 bp, Homo Sapiens
tgacttaaacaaagcctttttaatttattttctcatgattctgcaatctgggcagggctcggcaggggcagttcatatggcatcatctgggtggcttgagtggggctgagggatccacttcaaagatggcctcactcatagctggcaggttagtgctgattgcatctagaaattcagctggggctgtgggctggaggcctcagttttcctccatgtggcctctgcacatagttaggctggcttctcagagcatcatggtcacaggtagttcttatgctgtgtctaccttcatccagacagaagagaagttgctaggcctgattgacgtttaagcccagaactggcgtagcttcacttctgcaacattctgttggttgaagcagggtcacacttcaaactggtttcttcactctgaagcaggttccccttccccttcaggatatctggaccaagtttgaagatgggcatgagttaggttcaccctggag

SEQ ID NO: 145455 - DNA, 542 bp, Homo Sapiens
tacttttcttacccaaatcagagtcaacgcttttataacattttcattaatattttattgaaactgtcctgatgattttgcaaaaaacttttaagattacatacaaacctggttcatttgactcaaatacttaaaatctaccttgattatgtaactaaagaactacatgggatcccaggtctactgcaaatgtacgattaatctctgcagtatttgataatattcttcaacgtctttctctttactccttccttacccttctgtcacagagaaagaaatgtctctactccctgttgggtcaaacctttctagctgtgctgtagatcccatatacactcttgacttttatgggaccggaaataatctccattctttcagtcttcaggtccttctggcaactctcctctctagctacaagtgtgctcaagcctgtcctaacctagaggaaaaataaagcaccaattatcttttttttcaaaccagccttgatccttaagctatcacttggattctctgctttccttcaccaccaaacttcttga

SEQ ID NO: 145456 - DNA, 597 bp, Homo Sapiens
accttgaaaataaagaaagagacagatgcccagtcacatcgcgcccaaagatttccttattttagcccatttgagggctgggggtatgtgaggaggactcctcaccagcacagaagcgaggcaagctctccgacatttaccctcccacgtgccaggtgtgaccagtgctgtgatttcatgggatggttctacaatagacaccagctattggaactgagggcactagttttcagccttcagaatacaatttcaccacttatggctggaggagtcaaaaacagagaggcagcttgtccccattcactaagcctcgaagccagacttacccagatgtggggctgagttatgaagactgggaccggtccacagccagtggttttgcaggggctgccgatagtgcagagacagaacaagaggagaacttctggtctcaagcgctggaggatttggaaacctgcggacagtcaggaattctgagagaactggaggcaacaatcatgtcggggagcacgatgagtttgaatcatgaggctccaacacctcgcagtcagctggggcgacaggccagcttccaggagcgcagcagctcgcggccgc

SEQ ID NO: 145457 - DNA, 1975 bp, Homo Sapiens
  misc_feature (627)..(636): n is a, c, g, or t
  misc_feature (1435)..(1435): n is a, c, g, or t
  misc_feature (1456)..(1456): n is a, c, g, or t
  misc_feature (1481)..(1515): n is a, c, g, or t
  misc_feature (1796)..(1806): n is a, c, g, or t
tcccgggatatggagtgctccaaggtcatgcatagcagtcccagcagccccagctctgacgggaagcagaagacagtgtaccagaccctgtcagccaagctgctgtggaagaagtacccgctgccggagaacgcggagaacatgtactacttctcagagctggccctgaccctcaacgagcacgaggagggcgtagcgccaaccgacagccgcctgcggcccgaccagcggctgatggagaagggccgttgggacgaggccaataccgagaagcagcggctggaggagaagcagcgcctgtcgcggcgccggcggctggaggcctgcgggccgggcagcagctgcagctcggaggaagagaaggaggcggatgcctacacgccactgtggtttgagaagaggctggatccgctgaccggggagatggcctgtgtgtacaagggcggctactgggaggccaaggagaagcaagactggcatatgtgccccaacatcttctgagcgccacccttgcaacaaatacaggcgcctgcacagcctggcccacctgttcattaatgcactcaatttagtactgaatggtctttctcccagcccattcccagcccttcctatttcctttcctannnnnnnnnnctccccacactttcttgggactcccaccttggaaggaggaagggctgacctgggttctctccagcccccaggtgcgccgggtcacccgtgccccttcattatggacctgggccctaccggaacccctgccccagttaccacaactcaggccggctggcccgggccatgggctgcgcaaatcaccagcccccaacccagggaggaactggcccctcctagggagcctcttcgacttttttagaaaaatgatctccatttctttccagccatgatgtttagtaaatatttttagtaccgcacttagcagacagctttccaagtgtgctttcttgccacaaaagtgtcctggcaagagccccttatttttaagacatcaggaagccagaccgctttgagttgggagaattttgtagctcaacatatcaagtcctcgatggtatctgagctgcccacacccccacctgccaaggccccacagagcccaaaacagaagggggctgccccagcccagcagagcacagagtttctgggagctcccatccacagatgcaggagggggtactgatggtaacgcccatgtggatttgagggcagcagtccctggcctcaccctagccagcctgggtggctccctagccccaagaggccaggaagggctggaaggcagggcctgcaggtgctccccgccctgagacccaggccccaaatcagcaataatgaacaaacccttggcccagcctgggctggtgacctgggcaccagagaccttgcatccctcctcatcctaggaggcccctangggtgccccatctcagtgtcncctgaactctttatttgcctaattnnnnnnnnnnnnnnnnnnnnnnnnnnnnnnnnnnnaaatagctattttgcttaaatttctacagtatgtaaaagtgaaaaaatgatgaagacgggtgcacctgtctgagtttggccctcatgtgagctgtgcccttccctctcctcatgcccccttccagcgggttttgccaaccatggggggctggaccaccatggccactgacccagcccctcagaatcccacactccaatcctttccatttcagtttagtcctaaaagttcatcacagggtctttctttctactccaggactggttttgtttttatatatatnnnnnnnnnnngtgaaaacaccaatgtgtgaaatgccttacaatgcccactggaaaggcggggcggggtggggcaggatggccccactggggctcctacagagctgtggaatgtacctctccccaacactgttttgttagcgagcaccttttgaccagtaataaaaaaccttggctttgg

SEQ ID NO: 145458 - DNA, 575 bp, Homo Sapiens
tttttttaatccctctcttttagagacactgaaaaaattaaattgtgaagtaatgaagtgaaatttaatatctgattaaaaagtaaactgcaaatttcatagactttcttcctgtggatttttaatagtaattttatttaaaatggtgagaaaagttaagttgccttaacgatactataatcctatcaactctctttgccttaggtaacatgggagaggagacaggtatatgtttgagatgaaggagaaaacaaaagcggagcacgctgtttagagtagagctggctccaaagagccctttatgcagtgtcagggcatggtccaaagctgcattcagtcaccaatcggcagctttggagaaaagaaaacacacagcctgatagctagcctccccttctcagccattcaatcccgtttaagtgttctatgtggacagctgttaaatttgggtaacactatttagttgcccaataagaaggacccatgctagttgctgtaatgagttgctactaactcattacatcctttttaccctaattatgcaaatacagtggaaatacagtttaaaaaaactg

SEQ ID NO: 145459 - DNA, 812 bp, Homo Sapiens
ttttaaatatgtaaagtatttgtttttattacaaatgtaaaggattagaggtagtttaacatttggaatgcaggtattaaagtactgtaatcaagttggaagaagcagtataaatctgaaattttctcagtaaccagttgaatacatttagactagagagtgaatcatttatttcagttcaaagttgcagtgtctgagttgaaccacagaaggaataaaaaagtccacatttgtttaagaatagcagataactgaattccaagtgatagcctgtgattttcgaggcagtcagaaaagtttcacggaagctaagtgaagggaaagccaaatgtcaaatgtggcattccttcattaagtaagcatttattgataccttgcagtattctaggcagagggattgaagaaggctaaccatgatgacctctctaaggctattgaatttgccagtaatacacttacactaagtggtcctagtgaacctaaatctcaagtctgctattttcttaatgcccattttcttatccaaataacttgtacattaggcttgaaactgctttacttagatgtttattttttgtaactctaaatatgtatcattgcttttaaccatttttatactatgaaaagggatagccttctgttgcaatgagatttgtgaacgtatattttaaaagaaatatatcaactaaacatctggttttggatactctgtatcctctcttccactaatttttaaaggttttcctcatataatctacttcttcgctgtggttcatttatttttttcctaatggaagatagcaaaagagttg

SEQ ID NO: 145460 - DNA, 550 bp, Homo Sapiens
  misc_feature (380)..(402): n is a, c, g, or t
ttttttactttttgggacatataattttaatgtactgtgactctgccatctagctattattactttttatacaagatttggaaatatctctctcattcagatattttaaatgtaatagcatttgatatgatatactcgcacctaataatctggtctccactaaggacttattgtaattaaaaagttaaacaagttagctgatggacaataaatctgttttaaggagggaagagaaaacaggcccttgtaaatattagctcttaagtgccagctactttatatgcaatatcatttgaaagatctcctaccatactaaataaagaattggaggccattatccctatattataattaaaggtgggggaattgggacaaataannnnnnnnnnnnnnnnnnnnnnngggacatataattttaatgtactgtgactctgccatctagctattattactttttatacaagatttggaaatatctctctcattcagatattttaaatgtaatagcatttgatatgatatactcgcacctaataatctggtctccact

SEQ ID NO: 145461 - DNA, 547 bp, Homo Sapiens
ttttttaatttataaagaaaagaagtttatttggttcacagctccatgggctgtacaagcatgacaccagcaactactctgcttctgatgggaacctcaggaagcttacaatcatgacagaaggtgaaggggaagcaggcatgtcacatggtaaaagaggagtaagacagagggacaggaagtcctagaatctttttttaacaatcagatcttgtagtaactcatggccacaggtaaggcaccaagccattcataaaggatattctctcatgactcaaacacttcccattaggtccatctccagcactggaggtcacatttcactaagtttccatctgtattttttatccacgaagtgctcattttctattggtctggtctcatgaacagatgagtcctaacaatgttgtggtttcaggaacatagaagaaagtgtatgcctcaccccttccaaaattcctccagccagctgattcctggagaacttcgacagcaggcagccatagcatacaatcccatacccttcatcccccatcatctctctctc

SEQ ID NO: 145462 - DNA, 445 bp, Homo Sapiens
agttaaaataatgtttccctttgaaatgtttaattagctctgttttattacaaaaacattcttgatgtggagcacagtgttgagctcgaagactctgatgagttaaatggtgtaaagtgttctcacgccctatgtggagcagaacctgaccaggagtggctgttgtcagcagatgtctggaccactggggaaaccatgatgcttgctccaagcagcaggccatcatttcaacctttgttgcttccaccaaacctcccattgtgctttcaatttaacagcatcacaagcagacaaagaaatttcttacaatttgcccttcagttcagagacgaatcctatttaaacttgtctaacctctcataacatattagttattgttgccagcctgcgtgtgtcctctggcaatgagctactcattctgggagaaggagggggtgcccttcag

SEQ ID NO: 145463 - DNA, 616 bp, Homo Sapiens
gctagagacacagatcagctgattttttactgtacaagtatacagtgcactgtcagacagtatcagtcttatgaatttctaagaagaaccttcctttgtcttcagagagtttatatttacctccttgtgtaatggcctttccatcttttgtccagatggcagttggccggggttctccagtagccttaactgcaaatttagcaacactgtctgaagaaacagttgtatcctgcaacccagtaacaattactggttttgaggaaattggttcaggagcttttggttcagtttttctggttactgttgactcagtggttttctgatctgatttcttagtttctgatatttttgataccttctcatggatactcttaaaggcttgccccataaattgtaagttggttttagacgttccaccttcaccagaaatctcacaaacatattctccttgatcagattcagtgaggttattgattttgagctcataggtaccatctgctgaataatgaaactggaaatgcccattttccttcagtttcttgccatctttataccaggtgacctcttttgcccttaatacactgctttcaaccacacaggtcagttttgcaatctc

SEQ ID NO: 145464 - DNA, 589 bp, Homo Sapiens
tttggaatttaaaggcaattttttttgacaaacaacagggggaaaaagcatgataaagaggagacggctattatcgagaaggagcaggcagctcacttggacacggagggtggcaggccaggacgccgagtttggatgatttttggctttggggaagtctttgggtcctcttcttcctctatgtcactgtcgcacacgtgcacgacgacacttggggtggactcagtccctgcatggagctcatacttctctcctggtcctagtttggccacagcatataggaggtcatagttgaggactggcgtggcatcgttgatgggctgccagccaacaggtggggaggaagggggcgagatgagaaactgtttggcaggctggggtggagccaagtgcagtttgtctccatttgtctctggagtctgaacctgtgcaaagtagagctttaattttgtttccctgctgaattgggtttcatgaagctctatcctagctcgggctgcagatttaggattgctgaagtttatacggacacgtctgaaactcttaaatagctggaacgtcacacagtcatcataagtccgaaacagtc

SEQ ID NO: 145465 - DNA, 526 bp, Homo Sapiens
agaattggcaaatactatgagttggggctgcgcttactgttttgttgactgtttagacttaagagaaaatattaataatgcagattcattacattgtaaatagcaccaaaaaatgaatcttcttccaccatcccaaagttactaaacatttagcaaagaaatcactcacataactgacaagtgaagttctgaagtctccattgtatcactttcagctttgactttaacataaacaaaaatgtcaaccaatattcatgttggaactaatcgtaagtttcatccattagtggctttggagtacagcagaaattaacaagttttctgtgagaatcaggtgactaatttacaatacacaacattgtatgttttatgatctttgtaaattttgtgttttgcattctttatatcagtaaaatttaaatttatatgtctggggtgtggtggtggctaggtcaggcaaggtttggtcccagcagctccatggctgctctgctctgagcatctggtatctactgtgcctttgaaa

SEQ ID NO: 145466 - DNA, 465 bp, Homo Sapiens
caccttttttatgatagcattttaaattgaaaaagcactaatgactacaatggattataaaacatcaaatacataaaattcttaagttcctcctaataccaaatacaaagcacattgtctttggtttttacttgggcaccaatgcatgctgaaaaagagtcagacttcattttttagagtagttttaggttcacagcaaaattgagcagaaggtagagttctcatgtgtctctttgctcctccccctgcccccagcctccccactatcaacacccccacactacagtggtagatttattacaatccctgaacccacagtgacacatcactatcacccaaagttcatagcgtacagcagggttcactcttgggctgtacattccatgggtttggataaatgtgtaatgatgtctccaccatcacagcatcaggcagagtagtttcactgctctaacaaaatcctct

SEQ ID NO: 145467 - DNA, 482 bp, Homo Sapiens
ttttttagaacagtgagtatttaataaatgttaaccatgcccttgtggtgctggttgacagagaagggagtcatgaagtctcaaatctgggaggttggtcatgttggttttggaaacagaaaagttgggctgtctcccaggtggaggtacctttctgagtgtccaaaccctatacccagtggagatggagaaagcttgatgactgagtgaaaatgaaggctagtgtcagatccttcacttgcaacacacaggatgcgcaggtcagaggacttgaaaggccacctccaggcctgtccagagctgatgactccagggctccctctcctggcaccatgctgagaggtggcagccctactgagactctagccagaatcaccttgttgccgtaccaagctggcaggaagtcagaaatccccaaatcttagcaaagaaagcacatgttgacccttgagggcatctacagaccacagattcctgaggaa

SEQ ID NO: 145468 - DNA, 279 bp, Homo Sapiens
aagctcctgatctttgttggttatgttgcaaaagattgtatcaggagaagcctcagcatggacattggcatcctgacataacccccattaatttagtattctttctgaaactcaaatgggttctcaagtcccagagactatgggataaaatcattgtttgtctgtgttaagttttatctctgttattgcctgaagacttttggtaacaataatgcgctttcatcaaacttttaacccttgattggaaaaaataaatgtatgtatcatcagttatacaaa

SEQ ID NO: 145469 - DNA, 1078 bp, Homo Sapiens
tttaaaacaaataatcccagtaaaagagagcaaaggaaattacactttaatgatagcttgaaatggatatggtgttcccgatttatttgttttcaggaaacagacaattgcattgtcatacatgacttagaactgcttacttaaatgcacattattagattagattaagtttctcttacaaaaacacaaccatgtcatttaaggcgaaaaatctcagcttctagggagacaagttaatatttatgatatttcctctatctgatttagtgaaatgatccattaatttagttagccaggtttcatcatccttacagttttgctttgcaaatggcatgagaattggtcaatttgtgcctgatttcctcctctctagtagacttattttacttgcaaattaaagaacttcagaatcactgaatcaatgggaggtgagaaagggcaccttagaacagatcaggacttaaaaactcaataaagttattttaaacaaaacttgcaatctacaaatattaatttagttgaacaaaatgcaaacatgtggatcagacatagcaaaatttttttagttaacctcatacaagggatatttgcaattaagtattagcttgatcaaccctacatgttgaagaaggcagacacacttgtactcagaaagcatatggctactcagtgctcagctaaattgtgcttcaagacatcattaaaattgaccaatggaaatttgcttagtgtaaatgggagacccctctcatttccacagagagtaacacgacagacagaaccttatagcttccacacaactatcttttaacatcccccaatttttgtgctagagtaagatagacacaaaatggtcatggcttcaatgtataaaagtttttcacaacatggtttatcacattttgctatgattaagacctcagtgctgtgtgtaggttttgtttctgaatcttcagtcgtcagcaatgctgggtgagctgtactgtgtttgagacttaacgaggcctaaggaggggtccccaatacattcagaattcctgctgccagtggggtttgacccaggacagagtatgtcccc

SEQ ID NO: 145470 - DNA, 1241 bp, Homo Sapiens
tgtatctcttttcccttttccattgtgctgttctttactggatcccctgtcaggtgtaaatccctcttgtccagattctgaatcatagggtggcgaaggcctcggctttcaccagtgtgtagatttgctcccttgacaagcttggtggtcagatcttatatagacttctgactcacagtttgtccccagagctttgaagctttagaatgttaaggcctttagaatcgttgccaggtaattgagtaagcttgtactgctctggtttccttcgatgtctgaactgctccaacagttgttttctggacccgtggttgtcttcatcattttggactgctcctctgaagccccatcagctgaagtcagagccttcagcacttgcatccagcacatcgagcgcttctctacacagctttatgtcttctggggagcagccactttctccatcacttgaagggctctgtcaaggtagcctggtttccatatcagaggcatgttgtggtacacagcccgtagcccttgctgcatttccaccttcccaggaagtgcatagccatacatctgggaactgaaaccccctgagttcttttgttttaggcctggaagcaatagggatgcaccaaagttcctctcctcttcccaactgaagtctgtcttctttgccaggcaatgaaataaaacatagagggagagaagttgggtggaaggcacttcaaaggcttcttgcatcatgacctcaaaaaccacagataaagcatctttgtaattttctttctttatgaaagaatccatcagtaaattgaatgtaaagttatctggaaaaattccatattgaaccttatttacaagggtatatagggctttgtcttgtgcatcatattttagacactgcctaatccaggtgtggatagtccagtttctcaggtaccagcagttggggctgtgtcgaaacttgtaaaggtaatactctgcatgatctatctcttcccgagaggaaatgttgtctataagccgtgatattgttaaagaactaacaggcaactttctctcaaatgttttatccattaaagatgcaagatcagcaagacagtaatgttctttttctcttgcttcccatttgtggctgtctacataggctgaagaaagcaggtatcttttacctgcaggagagagctgaggaagatccacttgccgcgccaggagcatcccgcgccgcactatggaggcagccatcttggagcccc

SEQ ID NO: 145471 - DNA, 677 bp, Homo Sapiens
ttttttttgaagtttcaatgttttatttaaaggtagaaaaatacataaaatttaatattcctactcaacagctaactaaattcctttcatgatttacaagaaaactacacaggcaatgttctagtatgtcataacatcagaatgatgacagtcacctgtgagtttaaaggaactttgtagggctggtctttctgccaaatatgactgtaatttactgctaaaatggatacatttggatcattatttttcatttgataaattatatgctcaaatcttgctgaagattctactggttcaattccataactgatattttcaaactggagaaatcccctgagaccagaacatatactgagtgtcacaaatgaatttggaaattcggcagcatatccttggtaatggcaatgcatcataaaatatggagacacagaatgcaaagatccagtttcattatatgtataaaccaaaaagttctggggtaagaatgattgttttccgagatgtagagtgtaaggttgtccatcaattgtaatgatgtagatcatcttgctctctgaaacttcactgtcatttgacttaatcttccgtgggactgtgacatgcagaaatattcctttcgaaccttcgtgggcttgcagtcatgcaagctcaattaggaaggccaggagaaggagcat

SEQ ID NO: 145472 - DNA, 545 bp, Homo Sapiens
tttaaattaaaaactatatttattgaacatatacacataaataacttattctgaagtaaatgctttaaactttgatggaatgtgaaatttcaagggagtatccgccatggaaggaacccactgtcaggcccctccagggcacccattttgaaaggctccatggaccacgatggggttcgttaacgtttgcctccgctttaaaaggcttagggttgtggatgtgaattacaaacctgggtttttacaacaaaatatgcatgctgggagtcgagcaccaatcagctgtgccgtcgggcaagtccctgctaaggctccggggcctccttgcctggtgaggaagctggtgggtgacggctaaggcccacgtgacactttgcgtgctgctcacacttcacctgccagctcgctgctgcccacctgtgctgggccaggaccgtgacttcaggctggccatctcccccttctcttactaaccaccaaaacctcacacagttctctttggcaaagcaggctgccaatcagagtggcccaagagcgtcaaccag

SEQ ID NO: 145473 - DNA, 463 bp, Homo Sapiens
  misc_feature (179)..(221): n is a, c, g, or t
tttttctaaattaaatgttttaattcagtatatccaaaatatcatttgaacatgtaattaatataaaattattaatgtgatattttacattcttttggtaatactagtcttcaaaatctggtatgtatcttacattgatagcacatctcactttgtactagccacattgcaagtgctcnnnnnnnnnnnnnnnnnnnnnnnnnnnnnnnnnnnnnnnnnnnttctaggttccaccctaacacccaagtcctgtggattagaatcccagaatcagagctggaagtaaacatagagatcaaacctccttttaaaaatgaggacgctgaggcacagagtttaaatggcttgcatgaggtcatacagctaaattcagcctcaacagggtcttctgattccaggcactcttcccactccactacattactgtagtggtaattcttagggttaaaaaaagtgtagagta

SEQ ID NO: 145474 - DNA, 412 bp, Homo Sapiens
tttttcagacaggctcaacaattccttatatatttttcaaagtgcttttgttgcatgtttcattttctgctatacatggcaataaatatttgttgctttggtctgtacaaagtctgtgaggaaggtaagacagatgttacctaaatggacaaacaataaatacagagaacaatcttgttctgagtcccccagacaatagtgaaagaacctgaaaaaggtcttttgattcatagtccaaatcgacaccatattgccacctttcaagttgttgcttacatacagtaaataccaagaaccagacaatattccaggagtcctgcaatgagactgcatgccacagctttctaaaagagaatgtgaaggtccccagcaactcatatatagaaagctatttatttcctatagaaaactc

SEQ ID NO: 145475 - DNA, 464 bp, Homo Sapiens
tttctgttttgagatatttatagtatttctatactatacacaatctctgttttgagaaatactatacacaatctctgttttgagatattttagttacaatatgtaactaaaacatgatcttaaataaatacaacatagataaaaaatgacaaatgtcagaaaggaatggatgagtgctctgtgagttcactgctcagcgttgccctatccctctgattataacagcacttgcttcttggtataatttttagccagatctaaggtcttcagggtccttagatcttagatcttcaggatacttagcgcttggttcagctctcttgaatgtcttccctttttctaacactgaaaagaaaaagcctttcttttatttcaaaaacaacaacacaaagttggaacagcttaaaccatcacttgtggtggctttcgaaatgaataagccatgaatactgcttctgagttat

SEQ ID NO: 145476 - DNA, 770 bp, Homo Sapiens
ccccgactagcccgagagccaatccttatcccgaagttacggatccggcttgccgacttcccttacctacattgttccaacatgccagaggctgttcaccttggagacctgctgcggatatgggtacggcccggcgcgagatttacaccctctcccccggattttcaagggccagcgagagctcaccggacgccgccggaaccgcgacgctttccaaggcacgggcccctctctcggggcgaacccattccagggcgccctgcccttcacaaagaaaagagaactctccccggggctcccgccggcttctccgggatcggtcgcgttaccgcactggacgcctcgcggcgcccatctccgccactccggattcggggatctgaacccgactccctttcgatcggccgagggcaacggaggccatcgcccgtcccttcggaacggcgctcgcccatctctcaggaccgactgacccatgttcaactgctgttcacatggaacccttctccacttcggccttcaaagttctcgtttgaatatttgctactaccaccaagatctgcacctgcggcggctccacccgggcccgcgccctaggcttcaaggctcaccgcagcggccctcctactcgtcgcggcgtagcgtccgcgcggcgttggatgcagtcatcatgcggcgttggatacagtcatcaagcggcgttggatgcagtcatcacgcgttggatgcagtcatcaagcgatcattggatacagtcggtaccgagctga

SEQ ID NO: 145477 - DNA, 432 bp, Homo Sapiens
agttcgacggagactctcggggcgaacccattccagggcgccctgcccttcacaaagaaaagagaactctccccggggctcccgccggcttctccgggatcggtcgcgttaccgcactggacgcctcgcggcgcccatctccgccactccggattcggggatctgaacccgactccctttcgatcggccgagggcaacggaggccatcgcccgtcccttcggaacggcgctcgcccatctctcaggaccgactgacccatgttcaactgctgttcacatggaacccttctccacttcggccttcaaagttctcgtttgaatatttgctactaccaccaagatctgcacctgcggcggctccctcttgaactctctcttcaagttcttttcaactttgaagagagtctccgtctaactggtagcgagctgatt

SEQ ID NO: 145478 - DNA, 545 bp, Homo Sapiens
tttgaggctcagggaaatccaacttttatttagttagcctgatatttttccagttcatcaaatatgcattcccatggaacttgtgggagttttcattctcatgcccagttggctggaggaacggccagggtaggtgcaggaggtgaggcatgtttgtggcagggccgggcttgagcaaagctgaggtctgccctgagctcactgcgaagactgatctgcgtgggtctgcaggtgagttaggggcctgtgacccggctgcccagcaggctcatcctgattctactgaaacccgagtctggggcgcagccagcccgcgggagcacgaggcagggcgtctggatggtgagctgcattttttgcttcctgccttcctgaccatggcaatcacgtggagcatgagggagcccgggaggtcggactgcagtccagattagctcgcggtgaagctgctgacgggcagcaatcagacgctgttgccaggctctcagccctcagtcctccgggctaagggaatccaggtcacgttctgactcggggagcctgtg

SEQ ID NO: 145479 - DNA, 758 bp, Homo Sapiens
  misc_feature (608)..(608): n is a, c, g, or t
tttaaagatactgtctcaacatttattttttctttcagtatggattgaacagatagtgttaactttgtggcaggcactgtacttacatgattacatgggtttctttctatgctctcaattcttcaggtttttaaaattttttcctctcaaaaggaaatcagcctccttgttgttaattttttatgtagtcatgttttccttcattgtgatgcttacattgatattgactaggcctcaagaacaatcttctcgttcttcactgttggacccaggcctggcctgttaacgtttttctctcttgcttagtccaagttatttcagttacatgaaggtattctggcatagcaataaaacaaccggaaagtcctttgagtgtgtttgaagtagacatttttcaatacagtttctaatataaatctactgttttcttctcacggaggtgtgaaggtgtgcagagtaccaataaagacttcataaactcgtaagcactgtgtgaagagtgtttttcctctgttcaagaacagaatgtttcaaccagcacatccagctaatttttgtttgagcccaggatttcgagatgagcctgggcaagaatacatttcattgancttcgtagtcctctatgtatttgacatggatccaacattagtgtgaaagagctatgtctggtttcaaatctgtatggaagtaaagtgggggttcttgccaaagctgtaggtaccatccatgggcttgtaggttgaactggatggcacaat

SEQ ID NO: 145480 - DNA, 1359 bp, Homo Sapiens
gagacaccatctgggttttcctttttcttctttctcttcgtttttaaaacaatatagtgcagactgcacttctcacagtagaatataatggtcaattttagtataaaaaaaacattctcagagatttgtaaatgcacttagtgcttgaccaggccttggagagagatacagtaccgcttccagagcgccagaggggccaggacttgaggacttcgtgaggggactcctgcctatctttccctgccttgatcgtgtgggacaggccttggagggtggtttgcaggaaaggagttggtctgggcctcccagttaaaaccaggagggtcccaagagatccctcgaagaaggcaaggatgggatctaagattgcaggcccactgttagcccctgtggtgcctttgtgcgaacaggaaaatgacgccccttcctcaagatgcagaaaattgtaataaatatacaagtttgggtgaaagtggtgtctccttggacaaggtgcccttgtgcagtgcacagcctgaacaactgtacccagcagccctataagatgtattggagggaaggggggaatatgttagtccagggttttggagaaatggggatgggggtgcaactctgtgttagaaggaatgtgggggtaggggaagaaggaacagggggactggtatagtcctggagcctctgtcagagtggtcttcacctggctggtggggagacactttgggcccagtgacttcctatcggcctcctgtaccccttttccagaatactggggagccagtgtggggagacacagctgcctgaccctgggggggctgccctgcccccaccctgactctggtgcgcctgtttcctcctgcaccccaccttggcctgggcccctgtcccaggaggcccagaaagaaccattcctgtttttgagtggtttctctctccctgcctctgccagcttagataaaggaaggcatgggcgtcagtggctgcccccaggccctcactgtgtcctggggcaaccgatggtggggaggggccttggtatgtgaggttgccctgccaccctccatccggccacagcgaggcggcagccagcctggctcccctgtgggcatcagcaggcacagggtggggctgagcgcccctgcgagccgcccaccctgttctgcggcctgcctcccggctctgcgccctgtccgcatgtccgtatgtccgcagggcaggccttatctgtagacgggtaggcggatgtgggcatgctggtggtcgagtagccggggcacggccaccgtctcatagcccttgcccagcatctgctcatgaatgcaggcgcccctcggccgattcacaccaggcctcgtactagcg

SEQ ID NO: 145481 - DNA, 366 bp, Homo Sapiens
tttcaaaggcttaacattttattagagtcaaaatcaaaagtttacattttatagaatatgtatttcagtatttctgagtaacccgtcacttcaaagcagtaatttcagttttctttctcaggtttgccgcagaagattctgtccagtggctccaggaactgctgccactgctacactgggctgggcaccagggctgaggaaagttgcattcaccagagcggcctgatccagatatgggacctggatttcctgaagtccagtggacagaggagacagagaaggcttcccaaggaaggtgatatctaagctacgacctgcatctgtgtatgagaatgctcactttctcgccacttgcaaactctgggc

SEQ ID NO: 145482 - DNA, 538 bp, Homo Sapiens
  misc_feature (392)..(427): n is a, c, g, or t
gagagaaccggttcccccgccttgacagcggaggcccccacaccaaggcccttggactaagcggggcagggacagcctccaggtagagctgttcgccggggcgcctgcagagcccgcatcccaaccctgaccccggggccggggcgcaggctcctggagggaggcgtccaggcgggacagggcccggggagcggcaggaaatgggctgctcttcccacttgactgacgggaaaactaaggcacggtcaactatcaagcaagcgtggtgtcgaccttagagcaggactgaagcgaggctgaaatcttagaatcaaccccacggaatgaagaggttgtcctaattccagcactgagtgtaagaatggaagccttgcatgtgattttattcaagnnnnnnnnnnnnnnnnnnnnnnnnnnnnnnnnnnnngcgaacggcaagtgcagcatcgggactcgaacccaagtctctcctcgagtgctgggctattccgggctcagtggtcttgacttccgcggccctaaaccttgttgcctgcag

SEQ ID NO: 145483 - DNA, 1402 bp, Homo Sapiens
  misc_feature (201)..(247): n is a, c, g, or t
  misc_feature (306)..(306): n is a, c, g, or t
  misc_feature (345)..(365): n is a, c, g, or t
  misc_feature (395)..(395): n is a, c, g, or t
  misc_feature (421)..(421): n is a, c, g, or t
  misc_feature (966)..(992): n is a, c, g, or t
agcagactcgtgtcgcccatagcgggggagaagaggcgctcagttgtgtggggtgcgtgcgctcgcggaatgggtcgtctctttggttttatttttctgctcccagcgcagtatctaatttctactagttcacctgtctcaacggttttattttttctaaaagtacattagactccagcgatgcaagaccatctgtgtatnnnnnnnnnnnnnnnnnnnnnnnnnnnnnnnnnnnnnnnnnnnnnnnggccggtcggagggagcgagagggagggtggcgcacgtgggcggtggtgcggcgtagcnagattggtggtgataagcgactggagccaggagagaaannnnnnnnnnnnnnnnnnnnnagagtgcttcacgataatatcacatacacnaagccagttgggccgttgatgacgcntgtggggttggtttgctcacaggtgtggtgctatatatctctttatatgtttcgctttgagtgagcgagcgacgtgaaagaaaagaacgagggagggtgagacggaggaggctagagcgggaggatggacgaggaaggatatcatggagcaggacagggagtgggggcgggaagacaggcgtccagacacagagtgcatgtcgtgggcaggggtgtgtgttggcgcggacgaccgagtaggtctgtgcgacgagcacaaaacacacccttccaccccgccccagccctctaccccaccgtaattggtgaggtgagagggcggaggagggttgcgtggtgtgggctaggggccggggcgccgcccggcatcgtgcactcccttatccgagtagaaagagtattttcacaggcgcaggcgggatggggtgtgttggaggggcgggcggggtggagaggggtctagttgggtgcgaggacgtgcgtgccgaggggcggtcgggggagagggtggggcgggagttgttgttgggagggccattcattcnnnnnnnnnnnnnnnnnnnnnnnnnnnattcattcagcaaatactaagctcccactatgcacataagagatgttcaatcaatgttagatgaagggaaaatattcagaaattcacaagtcactccagcactccaaaaacatacaactcttcatgctcctcccttctccgttcttggcctcatctctgcccacatcacaggttgttaaatgctcacatgaacaagaacttaagcacagtatgacatggcctgtgacttatacaaatgtctgtcccaccaagaggccatcttttaaagtagtactagttccaagcctaaaaacaccctaacgggtcttcagcttcatctgaggatatgccacagtgatcatgcctgctatagaggacacaagacctccaagtccaatgatgccaggattggatttatagatccccagctg

SEQ ID NO: 145484 - DNA, 582 bp, Homo Sapiens
ccccactccaaacatggcctccgcctgctccccgatgcgatccaggttcatgttggcagtggtagagtcgaaggcaggggctgtgccatcagccccactgtcctgcatgggaaacacctccacaaactccttcttgaagacagacagcaggtaggatatgcggtaatccaggcggacgttgaggatgaactgaaggatttccaggatcttcagcttggtctccatcaccacaatgtcctcattctcctcaaacttgcttctgtccagcggctcagcagcactggccccagcagacaggctgggggcactgaagacggactgcttgcggctcagcaccatggtggacatcatgtgccccacgccctggatggaccgccgcacattcttgccaccggggtcctcataggcctgcagcatggccgggggcccctgcacacagtcgatgatgcccagcagtgtgcgagtgagccgcagcagctcgctgaagctgtagaagccgaagtagatgagattgtgcgccaggctgaccacctcagaagtgagcttgttcttctcctcgttgggcaagggcacggcctcgct

SEQ ID NO: 145485 - DNA, 423 bp, Homo Sapiens
tttaatcaaaatagtggtttaattgacgaattttacttgcacctgtgccttcttcagatcctacctgcctacttagtttacgtgaaggccgactgcaccatgccccccaaccccgacccccaccacacacaacggggccattgtcatgctaggtgcttgctttccccacctcagctccggagatgtgatggtctttggctctggaggtctcggccagcctgtcctccatcctgttctcgttctcgggcaccaccagcagccggtgctgggttttggctccaagcttgtggtcgggccggtggtcgggcctcaagcctgtcttggtgtccagtttgcactcagcgcggtacttgccctccccctcctcttgaaggaggcagaagacgtggctttggcttgggggctgcaccaccagtggtgaga

SEQ ID NO: 145486 - DNA, 1094 bp, Homo Sapiens
gtgtttttctctccctggtttgattttgcgaggcttccataacacctctgtatattgcatcttgatcattctggagttcaataatttgatcaaacacaactctaagttgatttaaaagtgccctggattcactgaccagcatgcagcgggagatgatggtgtctaataacacctcgtgtgcagcaatgatatgagccaaatcctgagcctgctggacttggttccagagctcataccaagaacattgagtcgccataagtggtaggtgatgcgtgatctgataaatgaaatggaccatatgagaggccaaaatgtgacactggtgcatcaccccggatacctctggcatgtttctcaggagctttgcattgcacatgtgtcccttccgtatgtcattgaggatgtattgccatccgcttctccctccagaggaagttaaatactcttaggtagtggctcatacattctcgagtgaacacagttgcaattggtccgtcaacatgataatcgaggctgaagacatcccatccagtgtcacctggagagacctccagcagccgcacgtccagccttcgcaggatctcaggactgtcaaactgtgcgttggtggctctgacagcggtttctagaattccagtcaatgttatgctgtatactatatgtcgtagtctggacggacaagttctggttttagcaagtccattaagtgccttataaagtctccttgacctatgaagcatggtaccgcctcacttgcctgcatgtggtccagcaatgctgtactttttattgagtacatccaacaggtatttgctggtctcataaataagcagcatcaatcttcccctgaaatgcattttccaagtctgtgaattaggtctgcagcgtcctggggtgatctctgcagacttggtcacagctatcatctttgtagtgggagtctgatcatgacaacttggtgcaagaaatttattgattttcctatcaaaggaccttcctagactgatccatcgtcataaacgaaggaatcatccgatttcctcaaagtatacttgtcgtgccacagtcgatctgttttaactgttggatctgat

SEQ ID NO: 145487 - DNA, 527 bp, Homo Sapiens
  misc_feature (152)..(271): n is a, c, g, or t
  misc_feature (442)..(479): n is a, c, g, or t
gtaggaaagtctgcgtccctatcccggctgcctgcagctgccacaccttgtccagctccttgggctggaaggttcctcagcctctcatgactcccgagccagccttgacacgtgggaggcagcaggccagctgtgcacaggacgtcctcatnnnnnnnnnnnnnnnnnnnnnnnnnnnnnnnnnnnnnnnnnnnnnnnnnnnnnnnnnnnnnnnnnnnnnnnnnnnnnnnnnnnnnnnnnnnnnnnnnnnnnnnnnnnnnnnnnnnnnnnnctacctgctgtgacccgccctcagctccacctccccgcctgctcccagagctccccattctttagcgggtctctgttctccgactggctgagttcccgtgccgggccacctctccatgggacaccctccccttgatacccttcctgtaaatatattttacaggacagctgnnnnnnnnnnnnnnnnnnnnnnnnnnnnnnnnnnnnnnggcatccctgcggacttcctccccagtgcccccgcagccgtgcctgtg

SEQ ID NO: 145488 - DNA, 459 bp, Homo Sapiens
  misc_feature (179)..(203): n is a, c, g, or t
cctttttaaactcctcaaactaccttcccacaaagccatttaagttaaatggtacatttacagactcacctacatgaaggatataacttaaaacatctgcttagacacatacgttctgttcagatataaaaaatgtggcaaaaatttttaaaaatataggaccactatattcttaaaannnnnnnnnnnnnnnnnnnnnnnnntcattcattcaagagatctttgactgcaattaggtagtcggtcctataaaggcttccttgtgtgacgataatttctaaaagtaaaatgctccagtgaatatttctgctaaataatcatatcttaaaattactttaaagaaattccaatccctcatgttacattaagcaataatgccagttttccataatatgccttagttgtaccaccttattcagggtcgacaattaattagaagacaaaaagtataaatcgcgt

SEQ ID NO: 145489 - DNA, 320 bp, Homo Sapiens
ttttcacagtatggcatttatttatttgtaaaatggaggcaagtgaaaattaatcttgcattgaaatcatctgagaattcaggttgtcttttgaaacgtgacatcttgacattgagaaacactgccttagaaacctccaagttatgtgaaagcaacagttgcttgggttcctcatttgattcttctttgtaaactcacacctttatatgaagacatttatttaatctctgacttacttttcctgagttcaacctgtgccttgctgaaggagagcacaaagagtctgaatctcttgcacctgaagatctgctatgtgtcag

SEQ ID NO: 145490 - DNA, 493 bp, Homo Sapiens
  misc_feature (385)..(385): n is a, c, g, or t
tgtgaatatagaaatagtatttttattaggcttggggccacattttggttagaaagtgcagaatcagatgataaaaggaaggggtaagagcaagaggtagtggaagtcgctaaaataatttgcaaagtgaccaatccatctgtccacaaggaattcatccatatataaacactcagatgtttctgggacggttgagtaagtatctaatccatgtcagaaaaatcagctacttttctcaggaggcctgccacaccaaacattcatcttcctacagtttttattcatgtttattggtatggtgccttgagttttcgatttataataacatccctctctcactgtgcagcattcaccaggtggttccacagccagcagaaaatgtggngctgacagcattgcctgacttcagtaatgagcagaaagcttccttaaaactgtggttctcaacctggttgtcacaacaaggggttgttactatgtctattggatagtg

SEQ ID NO: 145491 - DNA, 500 bp, Homo Sapiens
ttttttagaaaaaaatagtcttttattttgataaacatgtagatagcagtaactataaaggctagtatacttaatatgtacattatatcttttaaaggagaatctggggcatttccttgtgttatatacaataacagaatcatggtcccttcaggttattgttcttttgttttaatacatacatcttgagtttcttctgcatccttgttctccttgacatcagccactctgtcaaatctctgtattcctaagtttcttttctaagagttattttcctgcagaaattctccttttatccaaatcctggtcaagcaggtgtcaaaaggtctgatgctgttagtcagggacatcaattctctcttttcacatctcattacagaggccttaagctcagatacccactggtgatagacagggcaggtcacacattgagagaagaactccttacagtacacatggccagggaggagtggacccccagcatgacattgctctgagag

SEQ ID NO: 145492 - DNA, 2010 bp, Homo Sapiens
  misc_feature (383)..(383): n is a, c, g, or t
  misc_feature (1085)..(1085): n is a, c, g, or t
tttatttaaataggaagattttaataacaggcagtccctatagtccccttgtctagaacaattaaattattatccctcagacagtacaagacttgtcagtagactgtggggaagttgatgagttgacaccagggctagtggcatttgttttggggaagacagtgggcttgggccgtgtggctggtggtttgaccggggcagccatcttgacagacttgacaggccggaaggcgcaggcgatgtccccagcagtactggcgctgcgctggaaggcgggttcggggtctttgaggagctgggtgtgcagagggctggagggctctgacgtgggggccacccactggggaggttttgaggggctccaaggtgtccagaaccacgtncaggggtgtgtttgacactgctctgccgttctagttcccgtagctcattcagggccgagttcattgttgcctcaatatcctgagcaatgacctcagggtccatgggccgatggttattgaagctttttgaccttcccgctgtggcagtcttccggatctgtggactatccagccgattcttcagggatgagtggcggctgatggagttgaggctcccgtgcccactgatggaacacttatctggcccttctttggggaggctctggctcatgatgggctgggaggatgggcggcagctagcccccacccctggggaggaggagtcagtcagggaactgctcagcccatggctgtcactccgaaaagttttccggatgctcccagattctggacgcttcctttgcttgttgatgtttgcaagataaatatcggctacatgacccccactgggacagctggcccccgctctggctgtcaccttttcttcaggtggctcagaaatgacctcaatctcagacttggggctggacctctccacgacaccgtcctcggtgtcttggaccacgatgtactgatgggggatgagtccgtcgatgccattgtgccggccttcccaccagtcgtcggaagcccgctggtaaagcagcagggatgctcccttcttaaaggatagctctcgggctgtccggcccacgtagtcanaacttggcaatggcctcgatgggctcacattcgtcatcgctcgtgtggtgctctgcggtcacatcctgggttgagtcttcaacggaggtagtctctccatgagggcctatcacagtaatcctcccatgcttcttcctctgctgtagacagggccttcccagttccctggggcttgggaagatgttctcatgctggatgatgatggttttgatcagctcattcacgtgggcttggcaggacacctggtcgtggccctctggcactgacattagcgagggcccgaagcagatggcgaggttgtaggggtccatcatgttctcttcactgaactgtgataaatgattgaggaaggcaaagaggtatctcatgataatcagagtggttttgggcaggactaggaggactttccggatgtgcagagctctctcctgcaggttgtccattgtgacgcaggccatcaggtcatgaaagatgtccttggggaagagagggtgttccagcccccggaagtaaagcttcaggacaccagctatggaatccatgtcatggtcgttctggtccccagccagggggtcctctcctctctcaaaggcatttttgatgtcattcacttccacctgggatcctgacacccggaaaattccttcatgctgtagtccgtgtctgctgataaaccggatacagctttccaccaccagaggaattgcctggctggagtcctgtttcctcacagttgagctgcgcctggctagactgcaatctgtccgctgactttctcccagggttttctgcagaaggtcatgcttggcttgtaacttggtgatgaggttcctgccctccaggtactctttcatttttgtgaaataaaactgctctgtctcttgctggtggctctcctcctcgtgccgaattcgccacccaggcc

SEQ ID NO: 145493 - DNA, 470 bp, Homo Sapiens
  misc_feature (380)..(388): n is a, c, g, or t
aatgggatatgattaccaattttaagaagcatctaaaacaacctgttatgttttagcaaattgcccccaaaggacccattagggaggaaaacgttcatgtcctttttgcgtatcatctcaagcagtacccatgatggctgggatcccagaacccacctttgagaatgctgccgtatttgcgtgtggttgacaaggttgggccagacactcaggaaatagggttgtcgtcctacctcccccactaacttcctgtaagaacttcagcccctctcaggacctttttctttaccaataaaattcagaaattgggctcaatcagtaattcccaagttattttccaaagaacatgaattttgtggaactttaatagatatcatgcnnnnnnnnntgtgggagggattgttccatggtcaaatggtcttggaaataactcgtttaaccaaaaataaaactgtttctttacccaaaaa

SEQ ID NO: 145494 - DNA, 452 bp, Homo Sapiens
tttttgcaggttttgtggaaaatcctttaatgttctctcgtccgttaagaaacacatgagaactcacactggaaaaaaaccctatgaatgtaattattgcgggaaatccttcacaagtaactcctacctttctgtgcatacgagaatgcataataggcaaatgtgaattcagtaactgtgggaaaagcattcattgatctttcatgcctcagataacatgagcaaactctaacaagatgtatgaatcacctgctactgtgtaacaaattaccccccaaaattttgtggcttcaaacaaaaacacttgttatctcaaaatttttgtaggtcaggaattcagaaacaacatagctctatagttcttcaggatatctcaagaggttacagtccagatgtcagcagaactgtaatcatccagaattgttactggtgaagggaccacttccaaatgg

SEQ ID NO: 145495 - DNA, 517 bp, Homo Sapiens
ctggatgcattcatagatactttatttaaaaagtacactaattgaagttttacaccattttatgattcatcaaacacagcaactgaatactggcgtatatcaacattacagatgatgttagtctaagataaaactcataacacattttaaaaagggtaaaaggaaggaaaggaaaaaggatacaaggctgtagaaagattttaaaaacaaacgtcgtatgtctgaacctttgcctggagtttcatattttgtgaaaagcagtttgtaagtagaggactcgtaagtgcacctagtacactgcaatggcacagacacggcagatagtcaataaaatgatctttaacttctgatctaggttatttttgttgttgttcatgtattaacctagtgaaactcagccaatagctggagtggcattgacctgcacaacttccaagatcccatccaaccttagtgtcctctgaagttctccataacttattgtctgttccaaccaacatttagcataagctacagc

SEQ ID NO: 145496 - DNA, 441 bp, Homo Sapiens
ttttttttaggacaaacgtatttctaaaaatttatttttcaattgttacatttctcagtgtattcatttgctggggctgctgtaccaaagtaccacagactgggtgactcaaacaacagaaccacattgtcttacagtccagatgcccaagatgaagccatccacagggtggtggtgccttctcaaaacaatgagagggactctatttcatgcctttctatttctggtggtttgctggtgatctttggcatacttggtttgcaaaggcatcattcccattgttgcctttatcttcatatggtgttctcccctgtgtggtatctgtgtccaaatcatttcttcttaaaagaacaccagtcatgttggattaggggcccggcctactccagcatggcctcatcttaactaactatagttgcaatgaccctgtttccaaaaaga

SEQ ID NO: 145497 - DNA, 454 bp, Homo Sapiens
gtcaagagactaggctgggagttttaatatcaatgccgactgagaaacaaaatacggaaatgtcaagggctggtataaaaataatctctaatagcacaaaatcctcctgaagggaacacctgtcccactttctcactttgctttccaggttcttccgacaccccaatttcccgcccactcttctccctccggggtacaggtcaggcaggtatcccagctcggcggctctgataggtcggcgatgatttcattgttagggaacatccgggcctttcccctccccgcaacacctccccagagcccggccttcccagtttcccactctcgcctgcgccccacccgcggctgaagcaaaacaaccgcctctcccctgcccacttcttgtcctcgtctgagtcgtcccttcccgtctccacgccgaagagaggcgtttagatcctccaatgagggccta

SEQ ID NO: 145498 - DNA, 459 bp, Homo Sapiens
ttttttaaccaaatgtcatgggaaagagcttgatacggtaccaaggaggacaaggatggttgtaaggacggatgtaaatagacagtgcacacctacagccaagccctagcatagctgagtgggagagaggttttatttaggtatttcttttaatgggtgctattggctgtcttccccctcagtgtttaggaacgtctccaagacgtctgaagacaaccttgaggagggagcagttacttccgatctgcttcttcatccaaacaagcgcaaagtctacacgtggactggagaaaggaaagggaaacaaggcccaaccccaaacagcaaaacaaccccatgacggagacagtggagcatcaggttaaaaccatagaaaaatacgagttaattctatcaggttaaccattagcgtagctacagtaagactctgtacagaaaagcgttttcttgtatccctcg

SEQ ID NO: 145499 - DNA, 449 bp, Homo Sapiens
actgacagtaatagcctcgcagcccccaaaacttacaggaatcttaacgcttccccaactgacaggaacctcctcacgccccaaacctgacaagaacgtcttcagtccagaatcctacagggacctcctcatgctttgggctgcaaggactccacgcccgcggagctcagccccagcgacacgccggcagccgggctagctccgggactgcgaagcgcctcagcggaggctcgtccggtagttccggcccctacggcgacgcgcgtcgaattctgggatagtccccgtaccgccgggaacctcgctcgccttcccctcgagccccccgctgggtcgcgcggcgccagccgctcaacggtgcttcagagcagcctcctccacaacattcccctcggcccggccgttcgggcctactagagaccgcggcttgggcctagtctggcggccgc

SEQ ID NO: 145500 - DNA, 464 bp, Homo Sapiens
taataaatactcaatatgcagattttccccttttttctcactggtacctactgcaatgcccagaagcactggctctccatgctgtggaacatgcccaacactacgctaggcaatgagagatactgatgagcaaaacacacttgtggcctcatggaatgaatggaaggagggagatagcacataagtatttcaggtagtgacaagtgctatggaaaaaaacccaagacagggtggacacagtaacctcttcagatgcggcggtataggcaggaaggcttcctttagataccaggcaagctacgagctacctgatgaggaaccagtgggagaacatctggtggcgagggcttggccagggagaagggggctctgacacaggaacaaatttgatatgcttgaaaatcactaagatcactgtggctggaacacagtcagagagaaaaatgtgtagtaaatgaggtggg

SEQ ID NO: 145501 - DNA, 641 bp, Homo Sapiens
  misc_feature (482)..(491): n is a, c, g, or t
ctccgaaacaacagaaagcacttgacaggcttgctctccaatgagaagccccggaaaagtgtcgcgcggaggcggagccacgcggtacagccacctctgcgcctgctcaaaggccctggacacttggagtctagatggggaaactgacatgaagaggagtccaaagtgacacagtcaggccagaaatgttgcttctgaagtcctgagtccacctcctagcactgccaagcagtccacctggaggtgatgagaacttccaggctttggtaatggacaactctgtatccctggagccttcattccttttggcattacagaaccacaagaagtcatctagaatcattgagattctcaactccattgggcaaactggaaccagcaaaatctcagatatctagaattgccactgcttccttgactctgtgatcagtctacagccacagaatcctgattccctttggacattctagaatggcactttnnnnnnnnnncaacccacccagtggatcctttcaaagcactgcttattctcttggctgggtgctctacagccagaagttggagttatctaatatcaagaactcttaatctgtcacttcagtctttctaaacccacagactaacaatgttttgtgcattct

SEQ ID NO: 145502 - DNA, 463 bp, Homo Sapiens
tttcattttcatttgaaaacagtggcttattttaatgctagtgtcatttttaatgtgccaattcaagacataagcattaatattatgctttgcaatctttgctgattcatcagaataagtgagaagcatcatccctctctgttattgaattaataaatcctgacatgcaaaaacatcccaatctccaggttcttctcttggtcaaagtggtaacagcacaggaccacctttcccgcaaacttttggtaagccttatagacaagaactaaagtgttctctgggggcaggtatcaactgggaaaaggaaaatacaggtttaaattacaaatgtcctcagcctctccatgacaagcagtttttcgaaggaagcaatctttaagaagtatttttaataggtaataggaggtgaatatgtccaaatgccttgaccacttatgaaatgtgatgcagaaaaagaggaaac

SEQ ID NO: 145503 - DNA, 865 bp, Homo Sapiens
aataccttcactctcaatgtgatctgaagaaatacaccgtaccacataacatgaatgtgcaacaggtccacatatctcgaatatctttcctgctgctcgtcgatcacttttaaaaattacagtctcctcattaactggaggtaggttagtcatagattcaattattactagttgttcaataatacttgaaaccatcccaagaggctttaactcaatatcttcaggcagaataatagtgagttcttcaacagaaggcagttcattaagaagtaattcatcttttgttttaagaggaaaattcttattttccttctcaatttgtaaatcatcatctccatctgacagcactggaggaagtgatatacaagaggaagaagacgacgatgaggaagatgaagaggaagacgatgaacttgaactatctgaatctgtttcactgtccgagtccgaatccgagtccgaggtctccaaggagtccggcgcccgcgcaggctctgcggctcctggggaggtgacgcagtctccgcaggccggcgattcagccggtggctgtggctgcggcgccggggtcccggccgcgacggcgttcagaacgggctgcagaggctgctccccggcaggcttaacctccacggtctgcccagcgtccggggacccctcaaacgactgtagcggcggctgtgtccctggcacaggggcagagcccggagacggagccgccggaccttccccaactccaaagtcggtgccattgaatttcagagtttccagctgagcggcggcggcctccactacctccatcgcaccgcgccagaaaccgggtcggcctcaggattggggcccctggacaagctcacggctctct

SEQ ID NO: 145504 - DNA, 970 bp, Homo Sapiens
  misc_feature (582)..(582): n is a, c, g, or t
  misc_feature (686)..(703): n is a, c, g, or t
  misc_feature (777)..(837): n is a, c, g, or t
cagtttaacaaccaaaaagtttattgagtgtctgttggatacattgtactacaagagacagataataatacttcattcaatttgccctattggacttccaaatgaaaaatactgaagaacaaatgatgtttaaacaatactacatgtttctaaaagttataaataaagttatttaaataaaaatatttttaatgcattaggggaagtcaggtggattctttgtaaaaacaattacctgccaatttatttactacataaaattagagttgaactagattttcttatggcagatccatattcatatagaaattcattttaaactagtatttctgattggttagataaaaattgcacatgatctgaaagatcctgtataaacatatacaatttatatcttttgctaccaaaagatagctattatatttcattgattacttttctagaattggtaatttaatgactttggttaaaacttatcaggatttcagttgaattccttgttacattcaaataattgtcattatttgcacattttattctaataaatataatttctcattttcttaatattccagttttccncaacatttgggaagatttacaaggtatactccatttaggcaaaaataactgtcagggaatagtcattgtcaagagcagtttgtattgcaacccacaaagtaagnnnnnnnnnnnnnnnnnnatagtatattctggcaatgtagaaattagttgagatccaaatcttacaaaccttttgaagtttatgtttatgtnnnnnnnnnnnnnnnnnnnnnnnnnnnnnnnnnnnnnnnnnnnnnnnnnnnnnnnnnnnnngtttctcatatagcattctgtacataagctcaagtgacaaacttttatttgcagttttcaactcaatgcaaatgatatgaaaatgcaaaactggcacttattggcattttgcttttcttttaaaagctattaa

SEQ ID NO: 145505 - DNA, 940 bp, Homo Sapiens
ggaagggctgcagcttacagcaacagagtttagactgtctttgcttcatcatctgaaggtaaaattttccagatacggcagacggctttcagagtacaataaacagggaatgagaactatttacatggaagtttctttctcatgatgcggtggagaagcctcggccacttggttctgccagatgttcctggggttactgtaaatgggaaggacaggcagagctaaacaaggtttatcatttaaaagtgcctgtgtgaagtcacttttgctggaaaactgcagcttgggagctttctttgtattcacatcccactcttctgtcaagtacactttaccctgaccttatgagtggatgaagatacctcagttgtctgactttgccaattgcttaatttcagaatttaaaaaggggaaagaaaaacatcctgctaaaatatgaacatctgagtgtcttattttccaacatcgtcaatagctgtgagcgtcagcattaaatattctcccaaggagtgccatgatattgaagtcactttattaataacagctgtatctgcaaaacagtcaagagactcggacgttgaaagccagagatgacactgagcatgcttttattgcggcctaccatctttaagtgggacatattgattgatgagtgattgcctgtccatacactctctcatcatcctgttccttggattggacttcactaagcaatttatcactcaccttcagacttacatgtgggagtttgcccaacagtaagtttcggaatccattagaacttggattgatttcctcattttacagaaacaaacagccaaattactttatcaccatggtttgaacgtggcccgtcagagatccaatggtgacatacgaagttgcaaacggttcaaagaggacatgcccagctctgatgagacatgccattggcataccc

SEQ ID NO: 145506 - DNA, 1577 bp, Homo Sapiens
cgggatatcatctgaaggtaaaattttccagatacggcagacggctttcagagtacaataaacagggaatgagaactatttacatggaagtttctttctcatgatgcggtggagaagcctcggccacttggttctgccagatgttcctggggttactgtaaatgggaaggacaggcagagctaaacaaggtttatcatttaaaagtgcctgtgtgaagtcacttttgctggaaaactgcagcttgggagctttctttgtattcacatcccactcttctgtcaagtacactttaccctgaccttatgagtggatgaagatacctcagttgtctgactttgccaattgcttaatttcagaatttaaaaaggggaaagaaaaacatcctgctaaaatatgaacatctgagtgtcttattttccaacatcgtcaatagctgtgagcgtcagcattaaatattctcccaaggagtgccatgatattgaagtcactttattaataacagctgtatctgcaaaacagtcaagagactcggacgttgaaagccagagatgacactgagcatgcttttattgcggcctaccatctttaagtgggacatattgattgatgagtgattgcctgtccatacactctctcatcatcctgttccttggattggacttcactaagcaatttatcactcaccttcagacttacatgtgggagttttcacaacagtagttttggaatcattagaacttggattgatttcatcatttaacagaaacaaacagcccaaattactttatcaccatggcctttgaacgttgccccagtcagagatacaaaatggctgacattagaagtctgcagacagtttcaaagaggaacatgctcacgctctgatgaagaatgcaaatttgctcatccccccaaaagttgtcaggttgaaaatggaagagtaattgcctgctttgattccctaaagggccgttgttcgagagagaactgcaagtatcttcaccctccgacacacttaaaaactcaactagaaattaatggaaggaacaatttgattcagcaaaaaactgcagcagcaatgcttgcccagcagatgcaatttatgtttccaggaacaccacttcatccagtgcccactttccctgtaggtcccgcgatagggacaaatacggctattagctttgctccttacctagcacctgtaacccctggagttgggttggtcccaacggaaattctgcccaccacgcctgttattgttcccggaagtccaccggtcactgtcccgggctcaactgcaactcagaaacttctcaggactgacaaactggaggtatgcagggagttccagcgaggaaactgtgcccggggagagaccgactgccgctttgcacaccccgcagacagcaccatgatcgacacaagtgacaacaccgtaaccgtttgtatggattacataaaggggcgttgcatgagggagaaatgcaaatattttcaccctcctgcacacttgcaggccaaaatcaaagctgcgcagcaccaagccaaccaagctgcggtggccgcccaggcaacc

SEQ ID NO: 145507 - DNA, 529 bp, Homo Sapiens
aaaatatacatcatccaatttattttctttatccagaagaaatctgttaacattttcccaaaataacaattcaagtaaaaaattcctaccaacgagatgatgttgccaccatttttacacaagcacactcacgggttgagacatcctcatctagcattaaacctgtaagttacagctactaaataatgttaagctattatgatgcatacagaatagagtaccccaacccagctcttaatgaatgctgggtttacctgcaggtagggggttggctgagattaaaaggagaaacatagtaaaggagatgctaaattgattcaaatacttcatttctaaactctacaaaaaaggcctgagaatagcttgagacacatcagacttatcaaaagtcttccagcaatgatgcttttagagaaacatggcataaatgatcctttcagtctcaatccctggagtacaggcctagggattatggaactggtttaagcatggagaatgcttaaagaatgagcctggtcaacaggaaatg

SEQ ID NO: 145508 - DNA, 2238 bp, Homo Sapiens
  misc_feature (29)..(29): n is a, c, g, or t
  misc_feature (31)..(31): n is a, c, g, or t
  misc_feature (87)..(87): n is a, c, g, or t
ctgaggtcctggccctttcccccaaccangntggcttcctccccatgacccaagttctttccaaggctacacagccccttccctctncaggtccccggtgatggagaccccagcggcacaaacccaggcccagcctcctactgggtttggctcagcaggggcggggccggagcaggagggggaagagtcacttgaggcctacaggggtgtggggagaagcaccaggcctgggggtgaatggccatgggcaacaaagggtgtccttggccaccaatgcctccctccaggctggacagtgaccggtccctctgccccttcctctccccagcccctctgttctagaggctaccccaggtttcaggtggggggaactggtccacatcccccatctcgttgtaggtctggtcacccatggtgaaggtgagcttgtagcggaggcgaaccttctccttctgggggttggcaagcagcaggacctgggtgattgctgaggggtggacgatggggttaaaagctggcagctccgtgcccgagggtggctgcagcttcaccttcataaccttggggacagctgactggaacacgatgttgcggatgggctggggggcggtgctcagcatggaaaccaccaccaccagcacgtcggagcgccctggcagtgggtcccgggcaaaatggaagaggatgcggaagccgtgctggtcatacacagtcacgggcaggatgttgctgggtttgatggactccaggggcacagtgatgctggccagtgagagctcggttggtacgggctgctgcggaggcctggggggctctggggacacggtgtggagaaggctggtggcgctggagctgggggagctgcagctgctgctcttattctgcaggtcccggagtgtgagccggggggttggctgctgcttctcccaccgcacttgctgggattccgggggcagcgactgctgcaggagggtcttccccaggaggtctaggtcgtccagaccgctgcttgctggcagggatgtctgcgctgggggtcggctttccatactgggggcctgggccagagcaggggctgggggctcagtggcatccgacgactggaagctgttccatccggtaccatccaggcttgggcctgaagggggtgtggggtcactgaggcccagagacatgagctcgtcgtcaagcagggaaactgaggcactgggctgctcagggctggcctgctcgccagggcgggtgggcatagctgggtaggtggtgcccgcaggcgggagatccaggcctgagagatccagcagggccgaggtgctcccagggatggagccggctgtggcatcaccgttgacctcctcaccccgcaccagctgcttatacaggttgatcacctgggtgaggttgtcattggcctgcaggatctccgctaaggcctcatcattgtcctctgtgtcactcgccagtcggaagagcgtgggccgcatccgctcacagcgctggtacagttccttcatgaggtcctcgctgctgccagctgctgcgccgccctggctgtggctcatcaccatctccgtgagcagtttcacattgttgttcacctcctcgatggcattcaccctcttcgagatcttctccatccgcttctggtcctcctgcaccatctctttgatgagcttattggctgcgcggaggtcttcgggatgggagctcttcagcaggcgggccagcatcttggatttctcctcatcttcaaagatcacattcttcggccgtggaggaggaaggggaaaggtagtgtcatctggaagcttggggtcggactttacaatcccctgcttctttagcatctggtaggcctctgcgattttcacctcctcgggcaggcccactgtccagctgtagaggagctccaagatcttgttcttcaccttctccgatgtccgagagcccagatacttgggagacacgaccttgatgagctcgttgagaaagcggaacttgcccacttcgtcgtggaaccgcttgccgcagctcttcatgcatgtttccagcaccgtcaaggcctggatcgcctcccactcctgtggggactggatcttgtgggccagcagccgggtggcgagtggaggcccctcaaagtcctcgttgagctgctcgcagaagccgttgatgctggcccagtcgagctccttgttcagggggttcgtggctctattgattcgcgcctccagagtctcc

SEQ ID NO: 145509 - DNA, 459 bp, Homo Sapiens
  misc_feature (133)..(160): n is a, c, g, or t
ttttttctaagcattataaaatcctttcctggtacacctcaggataatccaatgttttaatacttaggcaacactggcttataaagtccatggttgaatataagccttgaaaagtttgtttctctctctttcnnnnnnnnnnnnnnnnnnnnnnnnnnnntttgttcgtatatatttctatatatattttagtaagtaagaatgggaaattcaggacttgtgggctttgttggttttaaaggaaacttgcaacactctgtctcccaggcggtacccgttgaggctggcgatggccatggccgcctcatcatagttggtcatggtgacaaagccgaatcccttgcacttgttggtgttgaagtcacgaatcacctttacgttgttcactgctccaaaggggccaaagagctgccagaggacactctcatcggaatcgggggacaggttgtatacaaagat

SEQ ID NO: 145510 - DNA, 153 bp, Homo Sapiens
aaagttgatattcagacctatcctatctcagagagaacttaaacagctaacagataaatgttaattctgtaatatcctactaaaggaggactttcctatctttagaataatgccatacatgcatttgtctcaggtacagaagtttaatgcaag

SEQ ID NO: 145511 - DNA, 378 bp, Homo Sapiens
tttggccaaaatacaacagaataaattgcgactgaattacaatcaaactcccttttccctgaaaggtttatttcttggcagcattggataggtgttccctccgaggccacacaaagtgattcggcctggagtcccaggatgcggaaaatcttcaatctcctcttggagtttgtctgttccaggttccaggagcacccaagtgggctctaatcaagtgtgacggtccctcaaatctgtgtcaccttgcagatgttcaacggaaggaactgtgtgagcgcaagtgatagatgcctatcccgaagctcaatagcaagaagaaacgctgactccactctcactgcagagatcatcaagcactgtgtacttctatgctcatgt

SEQ ID NO: 145512 - DNA, 905 bp, Homo Sapiens
  misc_feature (67)..(67): n is a, c, g, or t
  misc_feature (781)..(848): n is a, c, g, or t
cattggagcggtgagtttgcatttccaaggcacaaggttatcctaaatactagagttgccgggctcncagctcagccccaagaattctcccctcctcgcagggagaagccaccgcctggccccctcatcttagacgcaccaagtccggcgcagaggaagggaggggacacgcggagcaggccaggctttcaggaggcaccggaatctcctagtcctggctcgcacagctcgggcaagcctcgagatccggcgaccccaaaccactccctgggtccccgccggaggctggcccagggcggtcccacagccgcgcgcctcacgcgcagttgcccatggccttgaccaaggagctctctggcagctggcggaagatgccccgcagcgtgtccagttcgcggctcagctgttccacccgcttgcgcaggcggtcattgtcactggtcagctccagcaccttctgctgcgtctccacgttgcgctgcttggccttgtcgcggctcttgcgcaccgcgatgttgttgcgctcgcgccgcacccggtactcgttgctgttcttgtccaccgacttcttggccttgcccgcgccgctgccgccactcgcgcggaggtcggggtgcgcggcgcccagccccttgagcgcgctgccagggcccggcaggccggcggcaccgagcgcgggcgcggggtgcgggctgggcacgggcgtgggcggcggcgtggggtgaccgggctgcaggtgcatggtggtctggccgcagtgcgcgatctggaactgcaggtnnnnnnnnnnnnnnnnnnnnnnnnnnnnnnnnnnnnnnnnnnnnnnnnnnnnnnnnnnnnnnnnnnnntggtaagggaagaggccggccagcgccagctgcttggcttcatcctcctcgcggggc

SEQ ID NO: 145513 - DNA, 639 bp, Homo Sapiens
aacttctcggtctaaatcatagccaagctcctcttcggcccactcggagggatccacggtgtgggagggcaggcagaactgctgacacactcctcgcttgtactgcacagtctccgactggaggctgttgtctttgggaatgtagctggcaataccattctggaactcttccgtggcctggtaatagatggtgatggctacccgagcatctgtgtcaaaggtgaactcaccattgtagtggactttagctttactggcctcttctccagggctcttcacttcctcagcacatttgacgagcctcagtgtgtcctttcggatattgaccaggcttctcagagtcttcacgggttcttggggaggtggggcggcgtaaggaaacacaactggtctgttccccagaaagttcagatcgctgttctctccaaacaggtaaccttcaggatgagttgagtcaaacttctctcctcccataatgaagtggctggcaaaatagcttccggacttgggcgggtagcggtacacggaattagacgggatgtccacctcctccacgcccgcgtgctgccggctcgtcagggcccccatggccgctgcggctgcagccccggcccggccccggtgcccgcgccgccctcc

SEQ ID NO: 145514 - DNA, 539 bp, Homo Sapiens
taaaattactttagagtttagcagctccacacacgactgacttggaaacatcaggaaacctctgtaatgattacaccaccttgtactttgctcccatttctggtctctggattttaatccctttccttccttctgagatggaactggaagctgagaagtgatttgttaactgaagtgcagagcttcataatctcctttggttaaatttctacctattagtgtcagactatattctggttcagtagttctcaaaattttgggaggaaagtcctctcatggtcactgttccgaaaaaggtaacatcaaagattttaaaaagatgaaccttggtagtgtagttctgtaacttgattgtagtggttacaagagtctacacgtgctaaaattgcaaatacacacatacacaagtgcacgtaaaactagcaaaatctgacaactctgaggaatgcaccaatgtgaatgtatacaggatgttacccaagatattatcactgggggaaactgggtagtgtgtccagggaaactttctgtgcattaaa

SEQ ID NO: 145515 - DNA, 454 bp, Homo Sapiens
  misc_feature (140)..(171): n is a, c, g, or t
ttttagtttaaaatgacaaacatttattatcttatggttctgcaggttagaagttcaaaatgaattttactgggctaaaatcaaggtgttagcaaggcagtgttccttctggagggtctagggaagaatctgttgcaggnnnnnnnnnnnnnnnnnnnnnnnnnnnnnnnnagcttctagaagccacccacattccttggcttaaggtctcttcctctaccttcaaagctagcaattgcatcactccaacctctgcctccatcatcccatctccttctccgactctcctgcttccctatttcccttatatgaaccttgtgattacagtgggtccaccagacaatccagaataatctcccggtctcgaggtccataatttacatctgcaacgtcccttttgctgttgaagtagcatattcacatgttctgggaattaggacatgagtatcttcaa

SEQ ID NO: 145516 - DNA, 526 bp, Homo Sapiens
acgctttttaaaatgtcttttattggttgtacattttcttatgagatcaacacaccattttctttcaagaacactttgctcctgaatacttaatgttacttgtcccagctatgaaagccatagcaagcactttgacggaaaaaggtggttgggtgttttttttgccattatcactgtcttctctatcgttaaactgttgtttgagtcagtttgtagattgacacaacattgaacacaacacacacggtgtgaagttttacacgcatatacacacatctggagaccagttacagtgtctgcagcttgttcctttctcctcagcagtatgaaactgaagaatatcctgagataggaagtcaacgtgaaagttcctcattaaaagaggaggtcaagcttgatttaatctcccaatttcattttctttttgaggtggtcagaggggacccagaacggtagccagatgaaccgtggaacaaccacatggtttaatatctcagctgtttccttggtcaagaacacagattca

SEQ ID NO: 145517 - DNA, 651 bp, Homo Sapiens
ggtggagcagtggcttctcttagtagaaggagatgctggatttgcctcccggtgggttcaggaccttgttgtgagagcgaggccgcggccccagccggggctcatggctgtcgactgtgggcatgggctcctgctccttggcggggcctgcttttctggcgctgcctttctcacctggctctgctccagccgggatgctccttgcagctttaagatccgattttggttcttctccttcacataagaaaacatgatccttgggtttgtttgggtgtgccaagcgtgaagtggcagtgaccggagacccaaaaatgtcgctggtcttccctccaggtgggttcaggtgctgtcgagtctgcacgggggttgattcgtcaaagataccacttcctttaccccctgggggatttgtcctcttgggtatgttctgaggttcttctgttggtccaaaaatattagatgccatcctattaggcctgctggaaggagtagcttcttctggacttccaaaaagattgctcgattctcctcctgggggcttcatggccctctgaagtggtgcccagggcccctgtccactcaggaggctgggggaggtggatgccaaacttcctgtcagcagtaaccatttcctggagccggcgcggccgc

SEQ ID NO: 145518 - DNA, 1373 bp, Homo Sapiens
  misc_feature (171)..(171): n is a, c, g, or t
  misc_feature (512)..(512): n is a, c, g, or t
gggtgtaccctgaccccaattggccttttttcctggaaaaggttgtcagaaaccagacccagagtccaccaatccttttatgtaaagcttggtatttaaaaatttagcttttttagattattattaaaggaatcccaaccctaaagaaccccaaggttccccaagcatctnttctttccacccacccaattaaggaataaagaaagccacaggaagaatttaaacaacccacttactcggaaatatctgaatagatttttaaagtcccgcagaggtcagcgggcctcatttatgggaagaactgtgacttgtgaagggaactgtctacatcactggagaacaacaaacgcctaaacttaaggctgatgagaggaaaaaagcaagaattcacaagcaaaactggcatgtaaaggaccaagaccagccctgtgtgaaaagacaggcagattccaaacatgagatcagatcaggccgaggtttcagatggcaggaactgggcacttcagagggtncagggcacccaaaacaatcttccatgaagtagaagacggataactattattatttggttttttgaaagctgccgaggaaaagcaatcaagatgtttcaagaaaagactccagaccaatatgctgggggtaaaatgaagtggggatgctggatttagcagccgtgatctccagaatggaagcggttctgctaagaggtcaatatactgttagtgtttctgcttacgcctcctccatcccacagcagcagtggacaggctgttttggtttctttcagtcattcctagacatccaatcagctggcgggctgttgatccaaggaccatgccctgccccaccttccccaccctgcaccccccttccagttcctctcaaacctggactacacatgagtgatggccaggggtgccccatttcatccccacagaggcatctcccagccatctggaaggcacgggtctccaagcagctgtcatgacggccaggagacgctgagcagccaggctcacataagactaaccctcttcccaccccgctcatttgggcaaaaggaaatgaaaacatggctaccctatctcttgagtttctggtctggctccgggtggagcagtggcttctcttagtagaaggagatgctggatttgcctcccggtgggttcaggaccttgttgtgagagcgaggccgcggccccagccggggctcatggctgtcgactgtgggcatgggctcctgctccttggcggggcctgcttttctggcgctgcctttctcacctggctctgctccagccgggatgctccttgcagctttaagatccgattttggcctcgtgccgaattcgccacccaggcctcgctacctt

SEQ ID NO: 145519 - DNA, 686 bp, Homo Sapiens
taattttaacaaaagacattttattttgagaaataaattggaaaaaaatattttaaaatgtttaatttgcaatatacataatactggaattgaaatgctgtctgatggaaatgttgcaatgtggagtaggagggtcaagttcgtgaagatattcttaaaattaatcttggaaactctgtgcctatgaggtttctctaaagtggctaaaatatgcatttaatatgttgtctaaatgagtacatttaattctagagactgtaaggagtagagattatatgctttggggctttttgtagcatttttttaaaatcagttgtacagatcccattaaacgaaattgtttcttaaccagcaagaatctgatcatttaactagttttctcagcaatataaaaggaatacaacctccactgtcatatataacttgttgtctcctagctcctatttgaattccacttggcttttatagaaagttattgagttagtcagacagaaggattcatgatatataatttgtcatttgttataatgggattttcttctgattccattgtggactgctacccttcacctaggataaagcagatatggttgctatgaattagactgtatctaagcttcaagaaatatgaataatgcatttaaatccagagaatcatagaattaaaggaaatcttagaactaaga

SEQ ID NO: 145520 - DNA, 447 bp, Homo Sapiens
ttttttattttggcttaaaacaacagaaatttattctcttgcagtttaggaagctacaagtttgaaatccaggtgtcagtagggccatgctccctctgaaggctctagggaagaatccttccttgtctcttctagtttctggtggttatcagcaatccttggagggccagagccattccttagtttgcagcagcataactgcaatctctgcctccatcttcatgtggccatcttccctctgtgtccctctcttcttatgacaacaccagtcactagacagactaaggtcacacagttagtaaatggctgagtcagaattcagcccctagcaggctggctccaaagtcacattcttaaccactgtgttacaagaccacgtctcacctgtgctttcagcaggaaacatcacactcatgtacgcatctcaagtccccaacacacttggtc

SEQ ID NO: 145521 - DNA, 449 bp, Homo Sapiens
tttgctattgcaggaaatattattttatctgtattactaataacatactccaatcaaattcttcaagatttccgacagaaattccaaacatctaacagacatttaatctctgttacaaggctctaaaaatattaggaaatatacatacagaaaagtacataaaagcacttgtatcatttaccaacagttctaagacaaacacccaaacccatccaggataagaaatggaatgtggtgacacctaagaggccccgtctctcctgtgtgtgtacttccacaggctctttcctctgtcaagagcaactttctcatgacttttataacaatttctttgcttttataaggctcttctgtatagctaaatatacctttcatcttgcaatatatacaatttttttcctatgtttcctctgcagttagtgtgaaaaaaagtgagttttcagacttat

SEQ ID NO: 145522 - DNA, 631 bp, Homo Sapiens
ttttaagttctccagatgtcctttatttatattcgtattcataagttctcatactacttctggtctttttagtagctcttttagggctgtagccacagaacggtcattctagtgattctgagcagggtggagaggagtgcagcatccctgggcgggtgggtcagtgaagacacgcccagctcacctgatattctgtgactggttgcagaacacaagtccctctcgaaattgtttaggtttgtggggagatatctgcatccaggagctggagcaccgcagtgcttctgaacgcctcttccagtggcacctgcgggcctagtgtccccacacccgcttgggtgacagaggccaatcagttgtcaagcttatgacttccaatcagagtggtggggccctgaaatgacttgctctttgggtcactgtatgtaaagcaatttgcagctagcggcactgggcgggtgaccctgcctgagcccagtgaggagcaggtcgtctgcctgcggtgcttccaggaccgcggctggctggggctggactacgtggcggcgctggaagggatgtcgtctcagcagtgctcgggcgcaggtaggacaggcccgccctgccgcctcccctggtgctattcagaccc

SEQ ID NO: 145523 - DNA, 500 bp, Homo Sapiens
caaagcatgaggaaactcatcgcgggactcattttccttaaaatctggacttgtacagtaaggacttcaactgaccttcttcagactgagggctgttcccagtatatacatcaggtcactgaggtaggacaaaggagtgctacagccctattattttatagtttttatgaatgcctgggaactccaaaaggaacctgttcgtacaataacattcagtacaaagtatgtaatccaggaagtgaccagtccgatgtgtgctatgacccctctgaacctcccatgatcacagtctttgaagtaagactaaggactggtccttttctaggtgacacaagtgaagtaatagctaggacagaagaaagaggggtccccaaaaatgtaaccttaaaatttgacgcctgtgccgctattaatagtaaacagcatgggataggatgcggttctctagattgggaaaaaagttacacagcagaaaataagtacatttgtcaaaaatcaaa

SEQ ID NO: 145524 - DNA, 481 bp, Homo Sapiens
gcggccgctgtgcgcgccccgcctgctggaccacttcatctgtgagctgccggcgttgctcaagctggcctgcggaggcgacggagacactaccgagaaccagatgttcgccgcccgcgtggtcatcctgctgctgccgtttgccgtcatcctggcctcctacggtgccgtggcccgagctgtctgttgcatgcggttcagcggaggccggaggagggcggtgggcacgtgtgggtcccacctgacagccgtctgcctgttctacggctcggccatctacacctacctgcagcccgcgcagcgctacaaccaggcacggggcaagttcgtatcgctcttctacaccgtggtcacacctgctctcaacccgctcatctacaccctcaggaataagaaagtgaagggggcagcgaggaggctgctgcggagtctggggagaggccaggctgggcagtgagtagttggggaggggagaagtatt

SEQ ID NO: 145525 - DNA, 400 bp, Homo Sapiens
agggaattcatttgtggcataatagttatgcacggaatgataaagacagacaaattccatactactactaatgtggttaattatttctagttcgatagtgattgaaaatcagtggtcactatttacatttcctaaagagcaagcatcctccagctccatgttgggttggagcagttggcagtgggtctcagtgagctggcagaacctaggtttgggtgggaagcagaatgctcgttgcatgaaatgaatgtacatttaatgtttgttctgtgaattgcaactcagcagcaccacaagacaatgaaggctgctggctaatgtggaaggaggcactttctcctctaaaacacaaaactgtatttgtattttttgtacagataatacagcttatttatttaaa

SEQ ID NO: 145526 - DNA, 663 bp, Homo Sapiens
atgttttaaattaccatattttattgaatataagatgccttctttgtaagatgtacccttattttgtatattgctaaaaaagttaacatgttgcccattataacagtaaattctgcacactgagagacttcaaactttcctttcacatcaattctattttctgcaatatcaactgggccattttcagattttaatggtgatttacattttaaaatatctttccttacttcattcaaataattgaacacttttgtttgtttctcagccagcatcctcttcatctcagtttgccatgtaatcttgggcctgtttatgtagaatctatgctttcttgaattttattcagagtataagcagatggtttctcttgaaatgattcaccagcactccaacaagttctccaattcgactctcatgggttggctgtttgctgaagaggcacacaatgaggtctttgttgtctttcgtatggaacactacaagttggtcctttccattggagacactcaaaccagtcaaattgtataaagggatagtcttcatcaccttgtactgtttagtgggatccattttatacaggtgacggtcagtgacaaaaaatgctctggcttccaccttactaaatcgatttaccttaccgacgtgacaggaaaagaagacatt

SEQ ID NO: 145527 - DNA, 496 bp, Homo Sapiens
  misc_feature (51)..(59): n is a, c, g, or t
tttttgatagacccctcatgtgttattttaaaggtttatttctggcaaatnnnnnnnnntaacttatgtggttagataaattaatgtatgtgattagatacgacacagggcagagctgaacgttcctgttttcttctggatcttgaaggttggtgagaggccgctgaatgagacccagcctcgtgttttgtgggatgaagagatgcagacaaagtgactcaggtacactgatgctccctggagggctgggaggtgggctcagaggaagaggccgaatccaaaccttttttattgaaaagaaatagctcttgtttgtagcatttaaaagaatcaacccaaactctgcacacactcatccgtagtgaccataaacatgacataccaagcagaggctcagaaagatggagcaacagactgaggacattttcaacatggtacttggggatacctttgggaaagatgccttccccagcagaggccagcactgtggagagat

SEQ ID NO: 145528 - DNA, 438 bp, Homo Sapiens
actttgacaaaagcatgttaaattgcaccagcacaatttaacagaatatttattgcaaggtatgatgtacagtgacatgccatcttttgtctgtatgaacttcattactggggacagcaactgttgaatgtttgctcttacacctttatttcttcaaaactcaattcctagttcaatttttccatacactaaagctgctagactgggacagagcaggaccacatcagcgaacagctgttaaaagcaaccattatacatgaagagaggaccaagagaaaagaaattaaaacctacaaatttctctagaatgtggatcaaacataactagccacacttttcagtacattgtgaaaagattacaaagcagttttgagtcaaagttaccaatcccttaaaggttatcctttggttttttgagacaggagtcattttaaacta

SEQ ID NO: 145529 - DNA, 460 bp, Homo Sapiens
ttttttttagctacaaaacgttttatttctataaaacatctcttaaaataattcaaacactgaaatgtccacatctcatacctttcaggagaaaggcaaggagactacttgccttactgtcatattattgagggaatcagcgcaaagcctgaggaaatgaacagtagctgtgggtcaaagccatgtctccaggttcacggctcactcccccaggacaagcctagttaggtagtggctgcatctggtatccctgggacagaaatgcaggtgagaaggggtatcaagaatgcctcgagggggagatgggtgaaccagaaggtcaacagttgcatttcttcatctagaatgttctctagaagggaatgatgatcatgagagtccccttaaggcacaccgcaggtactgactgatttctgtgggcccagaattatcactttaatacagagaggataaattggcg

SEQ ID NO: 145530 - DNA, 534 bp, Homo Sapiens
tttttactttgttaaaactctttatttcaagtttccgaactgacctagcccaggtgaaactctcaaggcactggggagaggaaagaggcggagagagagagaaggacgagtgtggcacagcccgcgggggcgcaggtgccccagcagggtggcaatggcagggacactgtacctcggccgcaggcggcaggcgtcccagagccacgcggggttcgctcgtctcaggcgggtcttgcctgccaaccgctgagctcccttcaatgtcaaaaggaaaagcgttgtcgtccccggacgcggcgcgggagcaggcagcgctccagaggagccacagaggcagaaccgagcgccaggctgagctcaaagccatttctccgctgacatccagtagtgctcttccagggctcgggcgctgtgggtctccgtaggtctcccgcgtggtgcggcggtgcctcgcttattttccctcctctccgtgtgcagtatcccgaggtggctgcgcaaccagcagagtacggcatcaaaaggcagacggat

SEQ ID NO: 145531 - DNA, 434 bp, Homo Sapiens
ttttttttgaagacaaacatgttttaatagcctttacattatgtaatagtgtaatataaataataatttatttacattattctgttataacttttgtacagagctttacacctagatattctgaagttggtggtctgtgagtggcatcaagtggtgagtgacacactctgaccttgggtagaacaacacgtgcccctgcagtttgctgaatttcagggcatcaccacctgttttcaagagtgttttttcctatcctctagagttttgcccacttaagcaatggttttactgtaataaagaattacactatttatcaaaatattactttggagaataccggttcacatagttcattttcaagttttcttaaactatcaggcccataactaatgccagtggctccaaggatgagaaggtaaaaaggcctttttttt

SEQ ID NO: 145532 - DNA, 458 bp, Homo Sapiens
tttcattaacattaaatttttaatgtttctttaaacataactctgataaaggtcaaacattaagaaagcattgtaaaaaggtaaaatgagccttggtactgtgttcagaaatgcctcctgttaacagagataatggatttagaggttggaagtaaaatttttttcaaatgcgttagcacaaattgttaaaatggtgaggacttggatatgccccatcaatttattaaattgagtgtaactaaaaccagagtcggaggcagccaataaatgacgggcatggtgcttctgccaacaattcaagaataattatgatgtaaatgttgctatcaagtcaaaagatacaattaacagtaaataactacatttccagaaagaaaccacttgggaaaatgctgcttttatacctttaaggcaataatattactattattaataaaaatgactgagcactatgtgac

SEQ ID NO: 145533 - DNA, 497 bp, Homo Sapiens
tttttctttcacaaactatctctttatttgctctttctctatttaggagcagatggaaaagttgaagcaaaaggcatcaaaggtgatcaaggctcaagaggatccccaggaaaacatggccccaaggggcttgcagggcccatgggagagaaaggcctccgaggagagactgggcctcaggggcagaaggggaataagggtgacgtgggtcccactggtcctgaggggccaaggggcaacattgggcctttgggcccaactggtttaccgggccccatgggccctattggaaagcctggtcccaagggagaagctggacccacggggccccagggtgagccattgagtccggggaataagaggctggaaagtgagatcgaggagagaaagggaaaatgggtgagactctagtcttgccaaaaagtgctttcactgtggggctcacggtgctgagcaagtttccttcttcagatgtgcccattaaatttgataagatc

SEQ ID NO: 145534 - DNA, 699 bp, Homo Sapiens
ctggtacatagtaggtgctcagcaaatgtccattccctttctctgttgtgcattcctcttttgaagttcagtgctttaccaaggcatttcctctctgccgtgacttgctttaatccaccatcctgttcaccggacgttcggttgagaaagaagaatgcaaggcactgaggaaagttctggagcagaaaagcctttgtttacaaataacttgggaacctgctagaggaaaacttgtatgacttgaaatcacattacttaatgttcatatgatattttcattttttccggttctatttagtagagaaaagtagtttagtccataaaaaaagaatttaagaattattttttaaaattagccctccagtttataaactggattttaatctgccagtaagtttattcaagtaaatatgtaaattgatgcataaaacagttgattatcaagtttgcaagaaaatgttacctgttaactctgatattaatttcaatggttaaaaagtcatgtaaagaaagttaattattttacagaatgattgctttatgaaagggaatgttgtgatttacctatataatcttttgtaattataatttgtaattaaacattgcagtgtttcctgcccttaaaaacaagtgttgactctttttaacagcttcttttaattataatttgtaattaaacattgcagtgtttcctgccct

SEQ ID NO: 145535 - DNA, 361 bp, Homo Sapiens
ttgggcattggctcattttcataaataacctcatcccagacaggggtgagggaaggtgttgtggctgttttgtttaaattggagctgtaagagggatcatgtcatattttatgcccttcctagaaaggggacgggacacctggtttgcattcctgtattgaccactgctgccgtcactcgtcacattgagttcacatctcctgagagtttgtataaattcaggtcagcgctgctcctatgcagccatccagtgtcatagaaaagcaattcactgataactgatctctccattcagaagtgtgcagttttaatgtatagcaataagaaattgttatttatctattacaagcctggtttgatt

SEQ ID NO: 145536 - DNA, 449 bp, Homo Sapiens
ttttttttacagctctaggacaagtcccttagacttttattttcagctagattactgtcttatactggaggtgctgcagtaagtcccacttctgtcttgcagactgaacggctcttgtatgtggtggacctgcttctgtcagggggacagccagtgttgctggctggagaggcagcaacagggaagtcagcctttgtggaggtgctggtagagccacatcacccttacatatacagccccatccaccctgccttcagttcctcccacctccgtctcctgctgagcagaggaatccagggccaaacacaagccagcccacagcctgggcatcaccaggattctaaaccctccctcctcttcttgctggaggacctgcacctagccacttctgacccagagaagagctgccagccagtgttggagactctgcgccagaaccacaaatatcg

SEQ ID NO: 145537 - DNA, 443 bp, Homo Sapiens
tagaggatcccccgatatttgtggttctggcttgtgtttggccctggattcctctgctcagcaggagacggaggtgggaggaactgaaggcagggtggatggggctgtatatgtaagggtgatgtggctctaccagcacctccacaaaggctgacttccctgttgctgcctctccagccagcaacactggctgtccccctgacagaagcaggtccaccacatacaagagccgttcagtctggatagaagggtgaaaggtgcccaaagttcctttgatgtggctgctcaggtattggccagtgaaggggaccagtgttccatcttcagggcttacatgtagatcaaacaccaaggctgagggtggtggctcagggtagttggagaggcgactaatagaatcccttatgaaggtatctaaagatgggccagatccacaaatatcg

SEQ ID NO: 145538 - DNA, 413 bp, Homo Sapiens
cagggggacagccagtgttgctggctggagaggcagcaacagggaagtcagcctttgtggaggtgcttggctccttttttggctccctcaggaacaatcctgtacactttgtacgggtctgagatgtccagctggctccgctcaaccagttcctcaaagtcattgctcttgttcaaagcgcaccgcaggcgcgtcttccaggtgggagggtccggcttgtcgatgccttctcggaactttcctttaaacagtgcccaagccttgaagagcgcggcgtcctcctcgcggttgtagtcctgcctgcccgcgtgcttccaggggatgcggaagatgctcttctcctcgttctcccacaccagcccggggtacttgccgctgtcgatctggtcgatcagccagaaccacaaatatcg

SEQ ID NO: 145539 - DNA, 781 bp, Homo Sapiens
  misc_feature (47)..(76): n is a, c, g, or t
  misc_feature (656)..(656): n is a, c, g, or t
gcacagcaaataaaaactttgctttcattgggtaaggtataacactnnnnnnnnnnnnnnnnnnnnnnnnnnnnnntgcattccattgacgtctgtgcaaactggaagccaacttcttgttcaatgaagtttcttcattcaaggcaaagattcagacagacattcttcagtcctgtttatggtttaaactgttggtaagaatatgcaggtgcatgttcgttggatgtgtccactgctatctgttgctgctgaccactggtgtcctgggatgaaggtgccactgtctggggagaggtatcagcaacaacaccttcaatagaaacagctgtcggaggcacaggcgtgtactgaggaatgtaggtcccttgcataggagcagcagcagtcatatactgacacaacagctggtgggagtatcataatcctgtcttgggattgaatcgttccttgttgtgcccaacgaaaaggtgattcatctgctgtgtccagtgggcccttcatgttggcttgctgcattgacatgggatggtccatggttggtgtaatcacagcacctgttggttgcataacgtatggcggatgacgcatccatgaagtactctggacctggtatgtggagacaggggaagcaccaataatggcgtgtaaatgtctgnagatcatgcggttggtgcaaactgtacggggaagataaatccatctgtatggaactgtggggtcaaagtcaagcaggcaaccccccttcccggggcaaggccccatccggcctccgcaattctgg

SEQ ID NO: 145540 - DNA, 484 bp, Homo Sapiens
tttgactttgaaatttatttatttttcctacctggagtagagacgggaatgagggcccagcacagggtgggggtgaggaatgagggagaatacaggctctccctggccagagagacaggtatgtctttgcttaagcaaagcctttatttaaaaattcagattttccaaacaggcaattcatcctggaatccttgaatgtggaacttttcctcactagaaatgcagctgtacagtcaagcaggtgagtcctgagcctctccatgccagtcccagattagcagggagtgggcacataggcctcctcatttccctggtgacacgatctactcccgtctctgcatctctggctccctgaggtgtccaagaagaacttcccgccttcgtcatctgagtctatacagtgagcagatacacgctcatttgctcagaacagggtttggggaagctgttctcctggatttagttggagggggaacaaaagccc

SEQ ID NO: 145541 - DNA, 306 bp, Homo Sapiens
ttttagactttaaaaatactattcatttatactttgattcaaatgtcagtttggaattgtgtaccactagcaacagtggttaaatctaaagtttttgttaccttgaaataaatggctgatgtaaagaagggctgtgcgggacgatcaaaaagaagtggtttcacctcagagtagctactaaaaggaatccatctcacaagctgaaggaactgtgaccgacaacagaggccatcccagagaggaaggctcttatacaggaatgcttcacaggaatgaaacccctcttgtaagaaggactctgctctg

SEQ ID NO: 145542 - DNA, 473 bp, Homo Sapiens
tttcaaagagaattgaagtaattttactgtcattacactagtaaaaattatctgagtcatgatgcttaattgacagatattctaacaattagaaaaatgctaattgtatattataacctgttaaggatcacaaggattgatgcagtctaagaatgggaaacttaacaatcatcaatggctagttcagaccaaagtctgctccttgactgaatattcccatgaaattctcaattcaaaaatctcaagtcttatctttaaactgcttgcttgtactacagccttatcatttctttcaaatgatcaagaagaaacccttcgcatgtcatgaagaagcatcctggtatgtgtcaagaagtacattatctagttttaaagccatttcttcaatatccacatcttcagttttgtcataattgtcatcactctctttacttcgttcttttcttactgcctttaaacacctgtcaagtctc

SEQ ID NO: 145543 - DNA, 1060 bp, Homo Sapiens
tgtgatagtccccctcagatttgtgtttcaggacaagaccacttttggtggccggggttttttgcaagaggatttttccgctgccgaacccgggtccggcacacacgtgttgcttgcaaatgtgaatgatcgcgtgcactctgacgaggccttttgtcccctccttccagagaggggggcaccggttgagggggctaattccgggaacaacggttccgttcaataacctgatgttctcaactctggatgggggacctctgaactttgttgctgctggctgccaatattggcaatcgtggctgaggtggttcaatctggcttcattgccatggtgacagattgctggaggtagctgacaggaataagaggttgggggcatcatcataaaaaggaagttccagtccgacacttgaattcatgtccccgttttcagagtctgctccatgcttggttattactggcatgatagttgctcatggcttctaatttgatttgctgcaccttcattgcattcagcaatagctgcattggtagcagcagcagctgctcgcagcggctcgctgtcagacctgttggtggaattatcccaggagacatgagaccagggacagaatgcggcatgatgtgagagttctctggggaggtgacactttgagtcctcctaggaggccttcccggtctaagaacttgcgttagttgcagtcacttgtagagggtctcgaagtccttcctggagatgagtttgcagcggttcactcctggctggatggcgcccagtcccctcaggatgcgaacttgttccacattgcacaccaccggcgtgatctccagccgcttcagcttggtgtagaccgtatgcaagccccccaccaagtgcttcaggaacaggtcgaaagcctggggcaggcagatcagctcgcagccctccaccgtgaaggaagccactttggcccccctcagatccaccattttgcactcattattctgaggggtgttttccactggggacggggttgagtacacgggtttcccggggaggggccgcagctgctgctgctac

SEQ ID NO: 145544 - DNA, 440 bp, Homo Sapiens
cagtatcattttcttttcctctctgcttcttgcacagtactttttatcaaactgctgaaaacccagttttgtaaagatatgttgttatagaaaggaatataatgctatttaatgttgaaaatgtaaactacctcaaagtagtagtttatgtgatgtccaacaggtgttgctatgtttttctcaaaaattttaaaatattgtgtggcacccatgttaatttgctaaggtgccctgctacacagtttgggaaccatggctgtaccaaaagaaacaaaatactcctctcctttgtattagaaatctgaactttgcatttcagctttggacctactgacactattttattatacaaattatttaaagcctaaaataaggaatatcctaatactattattttgggaatcagaaacatctaataaagctggactttatacatagaa

SEQ ID NO: 145545 - DNA, 563 bp, Homo Sapiens
  misc_feature (401)..(481): n is a, c, g, or t
tttgtttttattggattttattcagatgcctgtgagaattttaacacatatcattccaaagttcattaccttaaaagtgatatctagtgacatctaacttttatctttcacaaatgtatttgacagtgtttgttcaagttagaaataaaagtttgttttaaatgaataaattgaaacatggggagatttttcaataaataattctgactcaaatctctcttttacctctttgttttggcccaccataccttcattgaaaggtattactttccaccatttagtaagactgttttaaattcttttactgcagccaaaagtcaattaaaatgtcaagtttaaaaccatttttgcaaagagagagatggggctcaagtctttagagctgtactgtctactacctnnnnnnnnnnnnnnnnnnnnnnnnnnnnnnnnnnnnnnnnnnnnnnnnnnnnnnnnnnnnnnnnnnnnnnnnnnnnnnnnnatattgcatattcttactaatgattttcatactgataacatgttggagatgattattccttggaattaaatggaatgtttca

SEQ ID NO: 145546 - DNA, 522 bp, Homo Sapiens
ttttttttagaattgaatatatttctttttattcctttgttataaaaactgaaacaacaaagattcttagaagcaaatggtaaatatcttagtccccatcctgttcctacccttcattgcctcatcctagtaccaagggctgatcactctttgtagtatggagcatatttttttctacacttgggtttcttttgaagttgtcaagctatcttccctgttctaggtgctgctgtgaacttagaggcaggagattcctgggtgtgctatagaagtactttgcccaaatttcctgggggagggtctgaagaggctccggttagaaaccaagtttctgctccctcaggagaactctcaccctataaagagacattaaagtagaggacttctgatcctttgtgcaaggcatgtttctattccaacaggtgggtcttgtgagtttgtctctcctttgttttgctgccagtcttctcctctctaaggacccttcccatgaccacttcagagcattgaaatcctttgact

SEQ ID NO: 145547 - DNA, 296 bp, Homo Sapiens
agctgttcttaaattttattttccaaaaaatggcattttccaggtgccccagtcctcattcctaaggtcccacctcagttggcacctgtgcgtgtatatggatacactttccccccagggccctgcctggtatgggccagggcagcccatgaactctgggcctcaccacgaggttttgggtgaggccctcgtcccgcctcagtgctggcccgagctgccgagccagggccgcagcccccgtcttgcctctgtctgccggctgctcccggggcctgatcctctggcccccactgggc

SEQ ID NO: 145548 - DNA, 383 bp, Homo Sapiens
  misc_feature (296)..(296): n is a, c, g, or t
tttttttgaaatgtccaatctccagcctttatttaatgctaaagaataacaataaaaaaggctcctgtcttgctgaccttcctagagacgtggctctactagttggacttatacctaggaataggaaaagtccagtggtaaaactggttacttgcttcaagctatttcagcagtaactagtgtctttcagcattctggctttccttggtgtgttggcttcattccgatggtccctatagtggcatgagagctccagtgactccagctttctattcaagttcagcaggaaagagcanagtgtcttttccagtaatttttgaaagaagtcctaagattcattcttgctgggctgacttagcttatgtgcccactcctgaaccact

SEQ ID NO: 145549 - DNA, 535 bp, Homo Sapiens
ttttagtagggctttttattgtttttaggccattgcctgctcagtcccgacagcattcccccttcttgaaacttcactatagctgctgacactccaaatttttgtccacaacaatatgcatttcaatatatcgagggaataacttaataaagtcagttttttctgaactttttctgacttgatactctgaattaaaccaagtataagtgtcattttcttctaagagaatattagtgtcagcatatttttcttcataaatcttgtgtataaatcctgatacagcctccatcggttcaattccatatgaagatgtttttcagctgcaattgttccccctgagtcctgaacatacgctggagagtcacaagagaaatttggaatacccgcaacatatccattataattgcaatccatctgaactagcagaggtttggaatgacggatgtcattttcgtcataagaattaataacagaagctgaagataaaattgatattatgtttcggaatcgtttttgcatccgatgatgaaatctt

SEQ ID NO: 145550 - DNA, 313 bp, Homo Sapiens
ttttgtcattcctcacagagagaattatttatttctgttgtctagaaagctgaccgatcgcatcagttttacttggatggaggaaattctctttacataggagagacgaaaagagcccaggtcccctgcggcattaaacagtatctccattgcgctgcatcttctatttgtccctgcagatccactctgcattcttctccttctgctctgaatggactacatcaaaggatcctttgccttctgacttcaacttaattctggtctccatttagtatcaagattatgacaattatctgctaatggtctgcttcac

SEQ ID NO: 145551 - DNA, 320 bp, Homo Sapiens
tttgtaacaccttattttttctgtatatgaatttgttaatataaaaaaatctacttaggaaattataaaaacatcactacagtgtcataaggctgtacattctctaggaaacacatctttagaaatacaactattaggaactcgtaatgaaattcaagtcctggatgtgctgcagatgcatcccaataatcagggtggcctcaaaaccctgtctgtcctctgtagcacttttagaaatggcctgcgacattcactgagtgagactgaattcttctttcttcaaatatcaccattgatttctgtggatatccttagggtga

SEQ ID NO: 145552 - DNA, 478 bp, Homo Sapiens
tttttttctgtttctagagctcaattgaaaacaatcctacagatcaaaacatgggcctgaactcatgtgtgagccattaatgaatgtaactaatgtccatgtgaaaaggattctttcattcctctgagatttggttttgtttctcatccttgcattctttggcgggtctcacccacagagagaggcttttggagagcctggatctctcggccttcaggaaatgatcttctttcaaagaaaacaaggaggacagccgctctcaagctgaagagtcattttagctttcagaaaaagagactcttcctgctgagtccagctgcctgcctgaaacctgaacttggataggccagcacacggaggcaggatgagacgtgacatttctaggacgagctgccaccgtagctgattctcacttagtgacactcttcactcctatcgcagagcttactccgttagaggagaaactggatattaggaa

SEQ ID NO: 145553 - DNA, 436 bp, Homo Sapiens
  misc_feature (298)..(298): n is a, c, g, or t
gtttttgttgttgttttttgagacagagtctcgctttgtcacccaggctgtttatctgcatcctttaaaatatctttcataacaaaccaatagacataagtgtttccctgagttctgtgagctgctctagcagagtaattgagcccaaagagggggttgtgggaaccccagtttgaaaccatttggtcagaagttccaaaggcccagacttgtgattagcgggcagaaggggggtggtcttatggcactgagccctcactctgcggtgtctgatgctacctctggggtggagaagtgnttggaactgaattggggggacacccagcttggtgtctgctgcagaactgattgcttgcttgctgacggggaaaatttccccatgtattttgctgtcacagaaatcttctgtgttgatcatggcagtgtgagagcagag

SEQ ID NO: 145554 - DNA, 438 bp, Homo Sapiens
tttggagttggacaggagggcaagaggtttttctgtcttcctagaatgccactttcctgttgtccacctgtgtgatgcgcagtaagactctcaagaggtatttcgacttgtaaagcttccctgcgctttcataatactttatgtattatctattatgtatcatgcttatttcattgaattttgttttcatttaaacggtacatttttttcacaggaattttaaacctgagatctacaagaatgggtccagggatagaatcaggggtctatgaatttaaatgagaaaaagacacaactctattattattaaacacagcctgaaatttgggtggtttccttcactctcaaatgcaggcaattaacaaggtagtattaggcagtactgggtatattagtaattacacagggtagtatattaggtagtggtgggtagtatac

SEQ ID NO: 145555 - DNA, 401 bp, Homo Sapiens
actatagccatgcagctgacaacattttgcaaaatctctcgcctctaacagcctttctgaaactgacttccttgggtttcataataggagtcagcgtggtgggcaacctcctgatctccattttgctagtgaaagataagaccttgcatagagcaccttactacttcctgttggatctttgctgttcagatatcctcagatctgcaatttgtttcccatttgtgttcaactctgtcaaaaatggctctacctggacttatgggactctgacttgcaaagtgattgcctttttgggggttttgtcctgtttccacactgctttcatgctcttctgcatcagtgtcaccagatacttagctatcgcccatcaccgcttttatacaaagaggctgacctttaaa

SEQ ID NO: 145556 - DNA, 673 bp, Homo Sapiens
tttggacataagtaaattttattttgttctatggagaatagaggaagaaatctttcatgcttggatcagagtgacaaagtggaagaggaccacccctctccaacaggcagtagagtcacggtagtgataataccaggaacccccaagggcaaggtgaaaccagtgctagagtccagggttcttagtccagttggacttcccacgaggatgttttccttcatttgcccctcaacaggttctacatcttatttttgttaaatataaccagagttacctacagggatcccacttcagttcagccaatatatggaaattttatataccagggactaatgctaatagtagaaaaatatgagttagtgtcgtaacatgggacttcctttgtatagttgatcacttggcagtaatccgcatactctgcaggcccctacctgtattcctctggcagtcctgtgaccctgtcactctgctttatatcctgcggcatgagtggggcagtgataattggcacaaggaccacagatagaggctggctctgcaggcagctttgtgcttggcgttggcaggtaagaagcggcagtcagtaaactgaagggctgcctgtcaacttggtctgaagtttcttccttgcttgtcacagtgtttctttttcactgctttctcctatggcctg

SEQ ID NO: 145557 - DNA, 880 bp, Homo Sapiens
  misc_feature (803)..(837): n is a, c, g, or t
tttctggttacatactgacagaaccccagagatggtccaaacccagagatggtccacccagctcgcaattgctaagcactaatgaaacccagtgtaaaaacaccacttacttgacatactatctaaattttttattccatgtctttcctaccataatatggtatcaataaggaaaaacattttgtagtgctcacagtttacaaccacagcccagaagttactgcccggcagtcattcatagtcactcaaggaatgtatgcatatatgagtccttccaacatttcttcatatataaatgacttccaacatttcttctaacttcaaatccaagtttaagtttgagccaggtcatagagcaaaagagcttttacaagtaaggtatctaaatttccctgtcttcgggttgctgtcgtcattatccaaagctgctcatttctttctataggtgatacatcttgtttgaagggtggatgccccactgacagcaggttcctaaagttctccaccatcacatctcggtacagcttcctctgggcagggcccagcagccccaattcctcctccgtgaaggccacagccacgtccttgaaggtcactgcttccttgaacatatcatttttattctttcttctggggaagtgcagagtcctaagaagctgaagtggggttctgctgcctcctcctctgtgcagtgctttttgagaagtcagggctgaatcaccaaagccagggaaaagatggctgctacgtcccccggccgtaatggccgaattcccgggcatatgtccggtaccgtcgactgnnnnnnnnnnnnnnnnnnnnnnnnnnnnnnnnnnncggccgcttcctcgctcacctgactcgctgcgctcgtaccgtt

SEQ ID NO: 145558 - DNA, 341 bp, Homo Sapiens
agggttgaaatgatgtgcttttatgggaaacaaaaatatccaacaacaataacaaaagcccttcaatctcgccaagttcttaaccagtgacaataaggcaacttccatgattgcgtctggctggggatgattctaaagggtcaggaaagtgaaaagacattggccaaaaagagaagttgcagggagggctgacatcctacatgagaacacagcagacttccctctggcccctcaccctatcaccccttcaatttagaatctccccccaatctacaaagatccttcctgaatttcctcagatgcaatctcttccagaaagctttcctgggtctgctctagct

SEQ ID NO: 145559 - DNA, 586 bp, Homo Sapiens
  misc_feature (26)..(26): n is a, c, g, or t
  misc_feature (146)..(146): n is a, c, g, or t
  misc_feature (211)..(211): n is a, c, g, or t
ctgggaagcgggaggggggcggaatntggtcgccactcccttttgaccagccacccagcggcgcctacgctgatgcctgctgtcaactatgcccccttggatctgccaggctcggcggagccgccaaagcaatgccacccatgccntggggtgccccaggggacgtccccagctcccgtgccttatggttactttgggaggcgggtactantttcctgccgagtgtcccggagctcgctgaaacccctggtgcccaggcagccacccctggccgcgtaccccgcggagactccccacggccggggaagagtaccccagtcgccccattgagtttgccttctatccgggatatccgggaacctaccagcctatggccagttacctggacgtgtctgtggtgcagactctgggtgctcctggagaaccgcgacatgactccctgttgcctgtggacagttaccagtcttgggctctcgctggtggctggaacagccagatgtgttgccagggagaacagaacccaccaggtcccttttggaaggcagcatttgcagactccagcgggcagcaccctcctgacgcctgc

SEQ ID NO: 145560 - DNA, 426 bp, Homo Sapiens
  misc_feature (274)..(274): n is a, c, g, or t
  misc_feature (315)..(315): n is a, c, g, or t
tttggtttaacaacagacttttattttctcaatgttctggaggccaaaagtcaaagatcgatgagctcacagagttggtttctggggaggcctctcttcctggcttgcagaaggccactttcttgctttgtgctcccatagcctttcctcgtgcctcctgacagcatcttccatggccctggctctgatgaccatctcccaacacaatgtcatcttgcaaaggtgatctgagcagtagctggagcaaggccatccactccttgactttgtgtgngcccttggtgggccccaggagcacttcactgcttctcaggngtagtaggtcttaggtatggcatgctttctggtatcaccatgcagagcaagagcccatccaacgttaggaggagccaccgccttttttagaacaactgtgcaggctctaaa

SEQ ID NO: 145561 - DNA, 424 bp, Homo Sapiens
ctacaagtggattataaacattttcaccaaatcataacaatactccagctttccggtccgacttcctaggagcctggagttagcaaaggttgtctctggatttcattctctgagaatatcacagagcctgggagaagatgaatttacatgaaattgcaacatacacacctttttattttctggtgttaagctagttgtctttcctaccttacaaatcatgttagttttatgatttgttccgcatgttttatgtttattgtagaaatgtttatataacatacgctttccatatcagggaaaatcatatctgtttaataaattggctataactttaatatctgtggacaacttgtaaaatttggaatgtatcatatgtaaaaagtttaaagatatccaaataaatgctttaggtgttggcattaaa

SEQ ID NO: 145562 - DNA, 1976 bp, Homo Sapiens
  misc_feature (235)..(235): n is a, c, g, or t
  misc_feature (332)..(332): n is a, c, g, or t
cggatttaaccccttttcacccaggaaacctccacgacccctgggaactaattcctggttttatatcccacccagccaggcacaaggtgcaattttctcccattttttaagggaagaaaaagtttaagaaccattccccttttgttatttgagatgtgggctactttcttcataggggctgtgatgtcggtgggtaaggacagtggggagtttctgtttcctctgcacggacccnggtgtggaaatcaagcatagaggctgctgcctcactcctcggcctcttttgctttctctccagcttctccaatcccattttgggacatgcggggtcncaggctcctgagcttccctaacttcccactggggaaggcagggaggatggggaagctcccagtgagggaggcgagggctaagcccgtagcaccgcagcctcgagtgtggtcggcccgcccagggctgctaatggcagagaagccgcatgctgggggatggcaccctcctgtactgggagaagcctgatgccacaggtcagagtctgcagcctgggaggggagccggaagctaacatgaaggcaaaacactctgcatgaaagcacggcaatgaacctccaaccacgactgactcctccacggcagccaagctgccaggcacttttaccacctaaaagctaggaaaccgaccagattcagctcgccaccattcaagaaaggacagggccttggctgctcggcaggtcccggggattgcccttgtggggaggatattttcagccctcatttccccgctgtcgccagcagggggcgatgtgctcacaggctcggtcaggggagaacaggcaccggtcacccgcgggatgggtccacaccattccagcggctctctccacggaagtgggacactgccgggctgcactatgtgtcactgaaattcagggagacctctcagacggggttccagcctacgcatgttcaagggaacccctcattcccaaagcccgccgggcgcacagaattctcaggcctggctgcgttgctgggaagcggaggcccagttcctcctgcagcctggctcacacccacgcctcacagtggggccctctgaccgtggccgcagcccccagcatctaccccaagctagtggcaacatcctgcccagtccacgtgctactgcgctcctggcgcctgcctccaggccaccgggcggaccctttctcagccccaggggccttccaggcccttctgttcaaaggaccggatgcttcacaccgctaagggctttatttcacagatcatggtggtgagtttggatttccagccctcaccacggttaagtcacacatttcccgacacctgctcatttctccagatctgaaacatctcacccaacacatcctagttgttgtaaaccccaaatgaactttccagaagcaaaaacaataacagattcagagaaccctggtcacacctgctgagcaggtcccctctactctggttgcatatagaatgcttgtttgctcaaaagagaggcgctctcaacatcaaggcacaaagaaagacgtctccaggggcaaaatgatgacgaagtgaccagcggcctctgcgaggcccgaggcagagtcacgggggaggcgagttcagcctgacgggcattgggaggaagagccaaggacaggtctcccgctggtggctcaggcgtcctcacgcgtacttctccaggaagttgatgtggaacgtctttcatcttctgcagcaccgttttcagcttctccactggagggaggataagtcatccctgaagtggtaagtggcttccctctgcccaaagccaagtggcgggcacgaaacagatgcaagtctcctccaggaggcttcattgccagtagaacatgtcttggagccaattttgagggcctgagcagctccaagtttgggaggaatgacgatcggggggagggcgtaaccatggcccctgcacg

SEQ ID NO: 145563 - DNA, 1030 bp, Homo Sapiens
ccacgcgcctggggcaaagaacgggggggttttcccaaaaaatcggtggaatttttttgacgcgaagaatttttggccaaccttttgttttccccgataggccccctttcggggaataaggcaccttgccagagggtggagtaaagcccaagccaatggaaaaggggggggagcccgtttctgccttgggagggagccagatgttcccctttcccgggggtccttccttccccgtagggtcgccagagtaggatgttggaggaactttggattcaatggccagtgcagtttccagctccttggtcttccaccccacggttttgttttttaaattcattaggttggcatttaaaggaggccaggggggtatttattgcttcctggacaaaggtcaggtccaaaaacacggctattgaccaggaggtggcaggcccgctggttctggcattcgtccagcaccttctggaaggtggtggctgccacacaggttaagctgtcttccctctgggaggcaggcttctgggaactacacatttggtaatcttgcccataaaatgccgattggacacttatcgtagaatgccgagggcactgtagattcaaatagtccccatcacaggcataggtggtgtggttttgcaggagtttggttaggtaaccagagaagtcggtgagcgctgagatctctttggagcagaccaggacagtgcagtagaagaggcgcaggagctgccccggcaggctctacctgccggcggaggccgggatgctgcacgggctggggcgtcggcggttggcgtgcgcgtcccggcagaagcatcgtgcgctgcgcggcggggcggaggcgcaggcccgggacgcgctgggggtcgcagggctaaggacggcgtcacatggcggggagaatcgatggccagcggctccgcggccccccgccgcccggaggcgtggacggacgcgtggttgacgttcgccggtattccccaccgcgccagctgatttttcaacactctggcagtatcaccgatac

SEQ ID NO: 145564 - DNA, 882 bp, Homo Sapiens
gtggctttaagtaagcaagctgccagagagtgctaacaagattccatctttccctcagaacccttcgatccgcttgggtcgaagttttataccaatagtcacccatctttctgcttcaaagaaggttttagattagcatggctggatcaaatcgctgtgagtatgtttcttgggaacacatgcgtaggtcacagtgaggtattttttcacgcctggcaacacaggggcttcccaaatggtgatttgttgacgatgattttgcatctctgcttcccatagcaccttcgggataggacttgcaaaagctgagtaagacaagccatcgaaaggggggatccgctctgccttggaggagcagatgtccctgttcctgggtcctcctgccgtaggtcgcagagtagatgttgaggaacttggattcatggccagtgcagtttcagctcctggtcttcacacacggttttgttttttaattcattaggttggcatttaaaggagaccaggaggtatttactgcttcctggacaaaggtcaggtccaaaaacacggctattgaccaggaggtggcaggcccgctggttctggcattcgtccagcaccttctggaaggtggtggctgccacacaggttaagctgtcttccctctgggaggcaggcttctgggaactacacatttggtaatcttgcccataaaatgccgattggacacttatcgtagaatgccgagggcactgtagattcaaatagtccccatcacaggcataggtggtgtggttttgcaggagtttggttaggtaacagttatcgccattccacagaagaggagactgagccccggcgccgtgcccaagctctcgcagccaggacggcgacgagctggag

SEQ ID NO: 145565 - DNA, 383 bp, Homo Sapiens
acagttgccttccacccttgttgcatcataatagaaatagtaagtcctgatctttcaaggagagggaagcctgtaatccagactagacctctggctatagaatttcccattcatggtttttctaagatgggattgtcatgtgcatgccctccccagtctgctctttcagttagatctccctatgagggcataggaatgatagatctctttctctggtgtattcaagatagtgtagtctctagaaaagagcctcgattagggatgactccagatgatgctgccatcttggtagaatttaaaaataataagtcaggaactagtgctactatagtacaagttcccttccaatgccttgggaggattcaatgtatccaggagccaca

SEQ ID NO: 145566 - DNA, 458 bp, Homo Sapiens
  misc_feature (404)..(404): n is a, c, g, or t
ggttgtactaattgttctattttattatgagttattgtttttaatctcctgtgcctagtttatacactcactttatgataggtaaggatgtacaggaaaaatcataggatacatagagtttgttattatctgtggtttcaagcatcctctgggggtcttgggatacatcctccatggatatggggaaactactatatataaaaagtcggtaaaatgacaaatagagaagaaaagcagacatcattttacatatgctgaagaaggctaatcacgagttcaatccatccttcattgctcaggtccttcactcacaggatttgagtctacaggtgatgccaatgtttttattattttacgtctttcttccctgtgtagccaaatgttggcactttctatgcctcctnttttgtctctccacttctaaagccaatcaccaattccaggtttctgcaagtctg

SEQ ID NO: 145567 - DNA, 408 bp, Homo Sapiens
atggagaaagatcattgtcagcgctgagaaaggcagggagggaggcctgagcaaggaagcttggagaagcctctggaggatgcctggccagggctgaatgctcagaaatggaagggaaagctcaggagattatccctgaatcaaagtgagaacctctgaggatagaggaattggatggaggtgcccttcagaactcatggagaaaagccctgctcccagtaaaatatctctcattttaatgaatgggaggactcttctccaggaggctgtgactaccaaggttgcaaatgctccacctgaacttgggtgcatgagggatctctctctctcacacacacacaccccccccaccgggtaagataaatttctgtttgtgagctgcctacattaaatgctttgctcctgaaa

SEQ ID NO: 145568 - DNA, 552 bp, Homo Sapiens
gagcttctctcctacatgacccagattgtgcacatgtggctgtggaatctccctgaacctcctggcccagtgtcagcactggctgctttatccttggtattaaatgcagcctcagcaggggcttgggggaaggacaactaggctactcccctctccaaagctaggctggggaaggcaggcgggcctggcgacatcctggggcacccagacatattaccctgtgggcatcgcagtaggtgacatcatctgaggagaagagcacggcgtccttgatgaagttggacagggcacgaaggatgaaggacacgaacaggtgcatgtggatgtagttgcgagtgcagtggagcctcctgcagggagagaatgtagggacatagaggccagagcctgaggggctgggactcagccaggcccacctgccaccagtgcactggggaaactgaggccctagacttcagctctttccgggtaacacattctgtgagcataacctgaatgaggacctgggtctccaggtggccagtctaatttgctacatgctgcagtgagaaa

SEQ ID NO: 145569 - DNA, 479 bp, Homo Sapiens
tttagttataatttctgctttattcatgagaaaatttcaacatagggaattaatttcaaaagtagtaaggggaatggacaggaatgtatttccacagccaaccgtttcttacaatgcagcctccaaagtctctcaaatgacaaggcagaatggagtgtgagcactaaacgtactaggcgcctgtgactggtagacttccgtgcttactctgtcatcatctttttgcacattttaaggccttcctgagtcccagaagaccaagtggagttgtggctaaggcgagctattgtaccatggtgagttggacatcgctgttttctcgtgggagccgtttcgagagagctctctgtaatgtcgccgtgtccttcgcccccaaagaatctttccttggtaagttctgaagggtgtagttctccaaaagaaggatgcatggatcaaaaacagagttccaacaccacatgggagtagggaatctccag

SEQ ID NO: 145570 - DNA, 583 bp, Homo Sapiens
tcccgcaggtgacgctgcagacagaccagagactccagtcaccctcgccatctgtgcaatcatattctggctgatctttggtttcaaaagtccggtggcctggggctgtatggtcccaccccctgggggggttgaggaagttgctgtcgtctgaggtactgtcgtacttgtagtcctggtccccgctgtttgccctggccaaggacagggacctctgccaccaggcccgccagtcgggggatgggactgaccagctgggcttattctccggatgctgatctttatctgcttcagagtcaggaccgtcgaccacctctatggtgacctggatatttggattctgcccattgatatcagctttggaaagatctggaaagtttggtagatcaaggagaaaggatctggggaaatctctttgcaatgaagggtgccccgtctcttgtcggaatcgcggtctggggaagggttggtgtgcagcctggtggtccagatgctcccttggtgcttctttggagagagaaaagctggtttctgatgtggtgtcacttcccacgttgaggttattctgcagatgagcttggct

SEQ ID NO: 145571 - DNA, 757 bp, Homo Sapiens
  misc_feature (387)..(412): n is a, c, g, or t
gcttccatctcccagcccttcttgcaagcaagggcaggccatttcctccggtcctggctagtatgaatatgagaagtcactggatgtgactctggggaagatattgtgttcagggatggtttcatgtagccacatctctccacttcttgccttttggacaagtagacatgatttctagacctagaggagccctcctgtgaccataagggtaaaagccgcaagctaagaagagggtggccggaagtcataaccatcttgcttctgtaatctaaaaaatatttaggatagatttaatagaattggcatatttatgtgattgcagcagccctggactatttatttctggatgtcccatacatgaaaaatatgcacttcttactggtacannnnnnnnnnnnnnnnnnnnnnnnnnggtgggaggtttatttcacctgaatataattcctaactgatgcacttagtatatgtcagtttttataaatgcttcatggatggttgaaatcaatgtattgtattctacaaatgtctgctagatcaagcaaatgtgtttaaaaaccatctacacatttataaatgttgatctgtgatctagcatttacttgagagaggtatgttaaactctcccaccatgattatgtattgttgaaaaatctttgtcattctgtcagtttttaaattctatgtatatacatacatatatatgttttgaagcaatgaaattaaatatagatactgacattttttacatttccaaaaa

SEQ ID NO: 145572 - DNA, 681 bp, Homo Sapiens
atttctggttacccttttattagaagggtattccaccacagagagccggaggttttccagatgtgtgtaagagagcaggtgcgcaaggcaagcaaatgagcgcaaacagtattatggaaaacatttgagaagttagctccatgaggactgtgggctccacaagaggactcgactgggtagcctggtctgacacaggaacgtgaaagcagagtattgcttcaaagctggaaaccttccataggagcctcacactgttggaagatgtactgctgctggttaaggtcaacctggggtgcaatgctgctgtcttcatcttcggtcccgaagtaatgctcaataagatcaaaggccttttggtagatctcctggttttcatgactctgtaagaactcaattttatccagaccataagcttcttcaatcaaagcacagtaagggttaatgccagtgccattccttttggcttcctgttctccaagcctcaggatattttccaagccatttagggcaacctgtacaatcttagagtccatgaccgtgaggagatcacagagcggcttgatacaacccagttctactaggtacctaaatacaaagaataatgtagtcaaacaaaacttttaattttgttaaacttatgaaattagtgagcaagtcatcctcaacttcactgcagagact

SEQ ID NO: 145573 - DNA, 529 bp, Homo Sapiens
tttaaatgtaaactaatgaaatatttattgatattttcataatgaagactctaaacatttacacatcgatatatagtacaaaaattatacaaattaaagaaagggggtaaagtcggtaaagtagtaatagatctattttgcttcctgtaaatattttttacgaacctatacggtgtcctttctaaaaagataaactctaattagctagcaagtttgtgctaataaaataggattatacctcttgaagcatccaacactgcactatttcacaagccagctaattctttattactcgatttcttttacatccacactcaaacacatttccatgcacaccatggagaatgaagaaatgtgcatcttccttttcacaacttataaaaacccaaagcaccaacacttgggagacaccatcggaaagacatattatttgcctcctcctggccttccagttttgcatactcttcaaagtaccattagcagtatattgatttggtatttttagccagttttcagtattgcattgaag

SEQ ID NO: 145574 - DNA, 673 bp, Homo Sapiens
tttcttggtgcaggtggtttatttgggaggagatcccaaaaagcagaggtgaaagaaaagggagagagtgagacagggaagaatgaaaagccactgagtgtgcatcattaaggttgctgctttgggcaacaggggctcaattcttctgtgacctttggcaagtgtgcagaatgccttctagaatgttccctccaaaagaggagtggctagacttgcttactggctctcattcttcactggttagagatggctcctagggcgttacctctccatacttgcaggttgtacttgcttgggggctgactgggctcccagtttcagagatggctgtgtctggaaggagttgtgcaacctcaagtggcctcagtgaaagctgcagttgaagagagcaattcagttgaccacaaaggaatgtgacagagaatcatccaacgctgcctagaacatctctcctgctcacctcacctggcatgctcacatgcagccatgtggtcagggcaataccgaggctgagttcagtgccaccctgtgctgccccttgccggtgaacttgtcacacttgtttacacatgtttgcaggcctctttcttatgggcatcagcagcttgttgaggaccattctatgtcttcattttgtgctcagaacctaatgtagtgcctggacacaaagggt

SEQ ID NO: 145575 - DNA, 1465 bp, Homo Sapiens
  misc_feature (56)..(56): n is a, c, g, or t
  misc_feature (80)..(80): n is a, c, g, or t
  misc_feature (110)..(110): n is a, c, g, or t
  misc_feature (114)..(114): n is a, c, g, or t
  misc_feature (133)..(133): n is a, c, g, or t
  misc_feature (138)..(138): n is a, c, g, or t
  misc_feature (152)..(152): n is a, c, g, or t
  misc_feature (160)..(160): n is a, c, g, or t
  misc_feature (165)..(165): n is a, c, g, or t
  misc_feature (227)..(227): n is a, c, g, or t
  misc_feature (1346)..(1404): n is a, c, g, or t
tttctcttcctcgggggtcctctttctccttcctctcctccggttttccggtcttnagacttctttccttcaacattttngtggggtcttttctcccccttattttttgnttgnccacaggccccccaggtancctgntgggcagggggcanaatggggnctcancccgggcctggggctgattttctggggcaatggcaggacccaccctcccagttccattgagnctgggggagctcggggcaggctgaggcccaaggtccgtgcgggaggggtcccagggtcccgagacaggcaggaaggggctcagaagttgctgaagatttcacgcttcctgttccagtccatctgtggcgcgcgcttgttgactcgcatggctcgagccttctccttggcctcggccgccgtggggctcaggtggaggccgctctcctggaagggatcttgcttccaggcactgccatcctcagtgtccttgtcggaaccaggcaggtcacttcgggacgagcacgcagagccaccattgagctgggcagggctggttccattggtgacgggtgacggcagaggaccttccacgtgctcctcggtgggtgtgacccgaagccgcttgaagtgttcatctgtctcggggtccacgaccagcagccgggcctcgtcctcccgtgctttgatgctggccaccacctcagcatggcgcagtccctccacattctgcccgttcacctcaatgagccggtcctgggcgcggaggccagagcgggcggcaggtgagcccgggtccacagagcggatgtactggccgggccgggacttgtcactatgcaggttgaacccatagccctgaggtccctttcgcaggtggcagagccgagggcgcagctccctcaggggcccactgacatccttcttgccagcttcggagctgtggctgccggtgtgtgcccagtctggcttcggctcccaggggtcgtgggcgggtgggagccctcgctgggccatctcctcggtacaggtcagctgccgccggcggagctcctcatctgtctcctggtccaccaccagcagccgagtctgcccctccacagccttgatcctttgcaccacctggtggtgcgtctcgccctccacgttgacgccgttgacctcgaccaggcggtccccagcgcgcagcgcggcggcctcggcgggggaaccgggttccacgcgccggatgaactgcctgcggcggcccttgtcgccgtgcaggtggaagccgtagccctgctctccgcgcaccaagcggcacaggcgcggccgcagcggctccggcgcggccatggcgcccgctgcccaccggccgcccnnnnnnnnnnnnnnnnnnnnnnnnnnnnnnnnnnnnnnnnnnnnnnnnnnnnnnnnnnnttcagcggcggcctcgtgccgaattcgccacccaggcctcgctacttaggaccgtatgggg

SEQ ID NO: 145576 - DNA, 1705 bp, Homo Sapiens
  misc_feature (391)..(424): n is a, c, g, or t
  misc_feature (474)..(494): n is a, c, g, or t
  misc_feature (633)..(716): n is a, c, g, or t
actattgtcttcgcccctctcacagggcgtgcttctcaaaaatctgcgccctgattagggttatatcttgctggcccccaacgattatggggtcaccccaacacaccacaccaataattgtatagagggttccctcgtttcccctccacatggttttccctcacggattatgctccccaagtttttttccaaccccaagtgttccgatcaacacggtgttgtttaatacaagtcacgggcgcccacaacatggtcgcctttgtgccgtttatatatattgctggctgccccgcaattgggggccacccttgtgtgccacggtaaccctggggatcccgctttaacctgggccgccctccctggggaatactcttgttgcgggccgcccccnnnnnnnnnnnnnnnnnnnnnnnnnnnnnnnnnnctgcacacgaaaggtttgttttattgcaattatttagagcgcgtcccaannnnnnnnnnnnnnnnnnnnntctctggtattaagtggaaacatgtgtggagctggagatctttttggaaaaaaagcacaaacacacattccctttcagtcagcaggccccggcagagcagcaaaggccctcgccccgcggctgccgcgcgctcgctcgnnnnnnnnnnnnnnnnnnnnnnnnnnnnnnnnnnnnnnnnnnnnnnnnnnnnnnnnnnnnnnnnnnnnnnnnnnnnnnnnnnnncccctatcttgctgccacaggcccccagtacctggtgggcaggggcaggatgggggctcaccggggctggggctgatttctgggcaatggcaggaccacccttccagtccactgaggctgggggagctcggggcaggctgaggcccaaggtccgtgcgggaggggtcccagggtcccgagacaggcaggaaggggctcagaagttgctgaagatttcacgcttcctgttccagtccatctgtggcgcgcgcttgttgactcgcatggctcgagccttctccttggcctcggccgccgtggggctcaggtggaggccgctctcctggaagggatcttgcttccaggcactgccatcctcagtgtccttgtcggaaccaggcaggtcacttcgggacgagcacgcagagccaccattgagctgggcagggctggttccattggtgacgggtgacggcagaggaccttccacgtgctcctcggtgggtgtgacccgaagccgcttgaagtgttcatctgtctcggggtccacgaccagcagccgggcctcgtcctcccgtgccttgatgctggccaccacctcagcatggcgcagtccctccacattctgcccgttcacctcaatgagccggtcctgggcgcggaggccagagcgggcggcaggtgagcccgggtccacagagcggatgtactggccgggccgggacttgtcactatgcaggttgaacccatagccctgaggtccctttcgcaggtggcagagccgagggcgcagctccctcaggggcccactgacatcctgtaccagcctctggggtgggctccgtggaggggctcccggagcccgggcaggtggcgtggcactcccggagcgtgccatgacagcggcacagtgacagcaagtggcaggcgtccggccggggtggcctgaactctctggccgacccaggctgccaccccacttatccctcgtgccgaattcgccacccagc

SEQ ID NO: 145577 - DNA, 505 bp, Homo Sapiens
  misc_feature (285)..(417): n is a, c, g, or t
tttaaagtttactgcattgtaattgggaatgtgttatttccatggttcctttgagtaacatagacataagcaaagagagtatttatgttctgcacgagtccatccatgtctctattggtgtgattaccctccccacccatgcaccttccgtccaagcaggagtgcagcctgcttgggctcaatgtcccctcttctgagaagcagcccggcccaatcctgagcgcccctggtgccgcaatccctcctcacgcgtatggggctggccgttgatgtcgcctgggctgnnnnnnnnnnnnnnnnnnnnnnnnnnnnnnnnnnnnnnnnnnnnnnnnnnnnnnnnnnnnnnnnnnnnnnnnnnnnnnnnnnnnnnnnnnnnnnnnnnnnnnnnnnnnnnnnnnnnnnnnnnnnnnnnnnnnnggaatcctcccagatggaaggtgtggtcaccactgcatctggcatctgcctgctggggaagactcattgccatgtcgtcatggggacg

SEQ ID NO: 145578 - DNA, 407 bp, Homo Sapiens
ccacatgtccctggagaaagacatgtatcttcagattgaagaaacttgagtccgtggaaggataagcagactgacagcagatctctcagtggcaattatagaggtcagaagacaatgggatgacatcttcaaagtactgtactttggataaacccagtcagttgatcaaagtcaaagcactgaacttgatggtagtaaactgttgcctccaggcaggctgccctgaggcccccatgccatggggaccatgagcatcagcagttgccacatcagcaggtgtttgcccctgcataatatttgaagccagataacttcatccaggggtagatgggttgtgaagcaatgagtccaggagccgaggttgttcattcagtttaaactcctccttggtcacttcttctttgggg

SEQ ID NO: 145579 - DNA, 589 bp, Homo Sapiens
  misc_feature (514)..(514): n is a, c, g, or t
ttttaagaattaaaatagtgcttttaatataattttcagcaaacgtacagtatgtactttacatcacatatttctaaactgctcatttggaaaataaacgctgcaaaaatacagagtaccacactcaaaaatctattgagtatgtgctttttcccccctccattctatgcaacaggttggtttttaccctctcggctgatttcattaaagctgttggagccctcagtcagaggagcattcccaagaggggagtttctaaagcatgtcggcaagccatccccagaggaggtagagggatgggtggaagggaatttgcacaccaggtcagcatgactctttagagacccaggaaagatgcctactctgagagctgtttggagtactcctgaccataagtcacctctttggtcctcatcacaggcctgcgcttggggcctcaaaggaccacacactggctggataatccacatggggaccctcgggttctcggaccaggagagcacgcttagtgagnccgcgaagtctgtgggtgggggaaggtgtcttttcagaaggaagagaggccaggccttagttctacaaaggagct

SEQ ID NO: 145580 - DNA, 422 bp, Homo Sapiens
tagacagaacaccacaccactacatgtacacttacaggctttcacattttatgtcagttcatacacaaatgtacaacttgtcagatacgtaaacacattttgccagaaatatgacagctgctttcagttgtacagtgagtgtctttaagagagaaaccgactccctagtcaacacttgaaggaaaaatagttacatttacattaagacagagtttggatacctttatatttttcaatcttgaatgagaagtaataatacagcatgtctgagaatagagcgcttcaaactttttttggcatagttaagtgcaaacttgataacctgtacttgtcacaactctccattgtaaaatggcgaaaatataggttgttcacgataggattttaaactgctgctaaaggcaatttattgtttcggcaaa

SEQ ID NO: 145581 - DNA, 460 bp, Homo Sapiens
ttttttttggggaaggagaagctgttgtttattcttggtaaaggcggagtcctagttttctaggatctcgaaccactagcctccttggtagaaggaatggtcctgtattcttgtaactcttgtgaaacagacacccctgcaggattttcctcctgcatgctttcctgctcagcacctctgtcagcctgccctgccagccccaacctgtcccaaagtaccactctccctgctgccgaagtaggctccctaatagtaaattggggaaccctgagtgtcctggctggttgggcatgaatactgctgggggatacatagagacacttcttggcattacttaaaatagactgagtatgggccggtccaaaggccatggtgaatcggtaggaaggccactgggctgacttggttctgctgggttttgcctccagctctgtgattgtaggcacatcctgtggcctct

SEQ ID NO: 145582 - DNA, 450 bp, Homo Sapiens
tttttgttgctatgagaaccttctattttgtattagacattgcagccttgacgacgcaatgtttgtgctattttgcgcatgttttcctgcagctattcctctcctctagcaatagtcgaatggctctggtttcctcttgcgcccggcccagtttttccgttttagcttcggttgtcataggctgtgctgtcgctttctctgggaaaggacggtgaagactggacgggagaaaccgggagggcaggcgcggccgttctgcagcagccgggccgcttcccggcgggaggcgggctgcgaatgggaagcgggaggaggaggccgggccgcgggctggttctatcacccccttgggagcccagctcttcacctagctctccggcgcttttcaaaatctcctgcgcgggctgcgccagaggcgccggcagggggtgctgataatggcgtcgttgt

SEQ ID NO: 145583 - DNA, 503 bp, Homo Sapiens
tattgctgtgttttcatgctttaattcagagttgtctgctgcaggtacaactctgtctgaacaaaaggacaaaggagacaagagtcaagatccctccccgcctccccacttcccacatcccctgaattcttcgtgaaggggatggcctaatatgggaatgcactgtgacctgtttgcattgtcccctaggtcagagagggggttgtgagttctctgggcagaggcccctgggtaggccttggccccagaaccttgcagtttgtcccacccctccccaaagtgctgtaagatacccctgcgcttgtggcaattgggaagggtgtgtcagtgagaagctaagtgatccccttgggagaaatctacaataaactccactcaagcccagctctctgtgcagagcccgggccccagcgtccgattcctgcctgagcctggactggccgggcagtagtgccactctggcccgagccctagaactcaggagaagccacgtctggccgcta

SEQ ID NO: 145584 - DNA, 380 bp, Homo Sapiens
  misc_feature (221)..(230): n is a, c, g, or t
ttttttggcagaagaacacaaatttttattttcttttgttaatagccttgtaaatgtgtaaagtgattcagtttgttttattccagttgggtctttgtcttctgaggatcatgattttgaccccactgctgagatgttggtccatgactatgatgatgaaagaactcaaactttggccacttggcttagcagggaaccaccttcaggcctcacatatgtcnnnnnnnnnngcctggaatactcttcatgggactggccttctcagacttcaggcctccgctgaagattgctgactgtctttccctgctaccctctggaagtgggccccgagtgttactctgtatctcagggctctatttgtttgttacactcatcaaact

SEQ ID NO: 145585 - DNA, 443 bp, Homo Sapiens
gaggtttaatgaagcatttaatttagaaagcatcatttaacattttctcagattatgatatcatactcttccaagccagtgaggagagtttgtcataatggaacattagtataaacaggtattcataacaaagaaaggaaatcttagcatcctgctttgattcacatattctcagtaatagaagacagtcacattaaccactacatattcatttctaagtgacatactcttagaaatttccaaatatcagtaatttataatatgccttcacttaacaagtactttggaattttattactaccattttaagggaaggttcaaatactgtcatttgcttggaagatcactgcattcaacatcagacagaagacttgagctatggattaagagttgaaaatcgtcaagattccaaagatatacattattatggaattaagagtact

SEQ ID NO: 145586 - DNA, 420 bp, Homo Sapiens
gtgggctgtctacctgtgatgtcgcgtccttgccattgcctgtagagggtggtgacctgcagggaaaggctgcagagagccgacctgtgggactcagtggaccaggtctactcagggatgatgctgttggaggctccaaccccatgtggcagcagctgcgaagtctgcagcccagcgtccctggaagcaggggaggtggggaagatgcactgaggggccccctgctcactggaactctggaaagggtggctcagccaggctctaaaaaggtcccaagcgtgatctggtgtgactcctgaaagcccctgtccctttggtgggcatgcacacttggagggcagggctcctctgccctacgtggttctggcccaggggaaccacatcccatatgcctggaataatttctatccaattttctgt

SEQ ID NO: 145587 - DNA, 504 bp, Homo Sapiens
ttttttttgtatcttaattctatttaatgacaatttctgttgccatgatgaaaaatcagtagacccagaaatgataatcataccaatttttggtaggcaattgagaatacattcaagatgaatcgacatttaatataattaattaacatagtgctacaatatatttaattgtgcctcagaaatgatttaccaaagtttgattcctgtgtgctatttgaaatgacttgtagattttgttgtatcccctgatcttagaatcagaaatttgtgggtttcttcaacaataggtatcgcttgcattcaacagttttgcctcttcttcagaattattaatatttagatggaaatttgctcacagtcttttgtaacagtgcttgacatagaggaagggagagatgattgtgtccagtctgctcaggatcctggaagctcccccagtgagagacacctcactgttaaaggaactctgagctacacacacctggcacttgggaacttcctgcg

SEQ ID NO: 145588 - DNA, 418 bp, Homo Sapiens
tttatattgtattagatatttattgtgatttttaagcactgtgctaaacgtattcatgcattaacttattcattctcaaacagccgtaagacatagctattaatatcaataccacttaatagatgaggacctcaaactcggtttcagagaggttgaagtcacctgctctcaaggctacccatggaacaagtcccgggttatgatttgtgtccatgctcttcatcactgctgcagaatccctgccaatgtcccaggcatggaggatgtaaagatgagttgtctgtgtccgtcaggtcttccatgaagcagaagacgaaagactgattggaggaaatgcctgtgaaggacaaagggggagggtgctggagaaggtggggagagtcttcagaacacggtacacatctgacaccttttcgct

SEQ ID NO: 145589 - DNA, 371 bp, Homo Sapiens
  misc_feature (104)..(104): n is a, c, g, or t
ggaattaatttccctcaacagggcaaatctaagagttattggccttaaagaggaggtagagaaagagactggggtagaaaatttattcaaagagataacagagnaactttcccaaacctagggaaagatatcaatattcagtacaagaaaggttgtagaacacccaaacagatttaacccaaataagactaactgaagacatttaacaatcaaactctcaaaggtcagggagaaagaaaggatcctaaacgcatctcaaaagagaaaacaaacaaataacatatgaaggagcttcaatgtatctggcagcagacttctcagtggaaatcttgcaggccagaagagagtggcatgacacatttaaagtgatg

SEQ ID NO: 145590 - DNA, 418 bp, Homo Sapiens
ttttttggaagaccttgacagccacaggaaaaggctttattttccagtttagaaaagtcctctaaagtactccctgtgaaattaataccagggctaatccaggaaatctaaaaccaaattaatgccttttctcaaacagtctaaattaatttgacccaaataatttggataattcaggcatcctgacatccctgcttcttgcttataggcacccaggccagaaatgagttacttcatgggcctggaatcacgatttcagatggaaggatttcttaattttatgagcctgcgccacccccaccccccagtccttatttttattgcattccagagctttttgaaaggggggtggtaatcagaaataactgtaataagcagcttgggtgatggaagtgagtctgccagccctaggaccttc

SEQ ID NO: 145591 - DNA, 499 bp, Homo Sapiens
caacaggttcattttattttcatcaccatgaggggtaccctgttgtgtgtaaaatgtaccatagacccttttggctatttctctggggttagacctatggagacctctcagatagatctagtcctttgaacttgccctgaaattactggctgtccagggagacgctggagatggtggaagtctcctcactttcctggtcctgctgtggctccttttgattgagttcctcgttcagctggtcagagtggctggatagcgttggccctctcccttcctcaggttttcttgaagcggcggtctttcgggagtggcttttttcctggaactccctcaaagactctcttttcccttccgggttgtcttgggaatcttcagagggcttctgaatcttggttgagagggggccttcctcttcttcgcctctttggtgttgtgggtggttgtccctcgacaactgggttggaggcttgtgctttactggccatcttcaccacatcag

SEQ ID NO: 145592 - DNA, 227 bp, Homo Sapiens
agatggctacatttcttccagcatggtctggtttctgtcccattctgttccttatgggttttcagctcctctgaagtagagaaagcacaggccgcctcaggattcctctgtggatgttgatcatgttgatgatgacgatattgatgaccaacatgtattttccaaatactcgtgccttccgtaactcagctaagtctccagagaccctggttcctccaggagtgatc

SEQ ID NO: 145593 - DNA, 386 bp, Homo Sapiens
tttgctgggctaagctgatctgtttattaggaatgccaatggtgcaatggtctaactgtgcaatgatcttatcgtgttttcataattaggctttgggactgccatagggagaatcaactcgaacacagttcactcgtgtcaaacacacttgagagcgctctggaagatcactgccatacatcatgcaatccagttctacttaggctctgacaggtacattttgcctgtttcaagtttgtgatgagctaataagtggtcccctctggtccttcagacctctgtcatacttgttttttacatagcaagaatctggagctattgtttgggctgtccatggagatgtctttgccaactgtgtccagttgtggcaggtgagtccttcaggg

SEQ ID NO: 145594 - DNA, 443 bp, Homo Sapiens
gcagtgttaaatattttaaatggtgctatagccaatgtatttgaatgcttgcactgctggttgtgtatcatcaatatgaactttttatccaatgactcaactctaattacatctaagttagacttgctcacgttcagtttgtacagttgtgtgttgacttactatgttttgaaagtggtgacttcttaccgaatgagtggaagttcccattgtcaaaaaaaataaagacctgcttgcagtattcatgttgacaacagagtaaaagagaatactgtaaagaattactgcaaatatttcctgtttatgttatttgccgttgtttgaagatattataaagggttaattgtatatttatatcatgtgctttatcgttttcccctcatgtatccaagtaatttttatttacatacaactaaataaatgttgtcctctttgaagacggt

SEQ ID NO: 145595 - DNA, 650 bp, Homo Sapiens
ttttttttcacgtagataattgggatacggttttattgtaacaatgagcatggcggaaataaatggaaggtggcaacctgttgacagtgatgcctgtctggtgtcaaccgatggacttgggtttcttgtggcaggagtctgatttgcctttttgcatgcttgcatgtaccttgttcctgcacggcagtcctgtctttggctgtcgactgttcgaggccaaccaccaggcgaggatccactgtttcctggccagactagactcccagctgtgggagtggcccaaaccctgctgcaggccttcactcacaaaagggagtgaatggccagcccggggtacccagtgttgcctctaagtgcgggatatgaggcctgttggaggatgacaaaaggaacggatgaggtcatactgccgctgggttgggcgggaggctgcagcgggagagacttgaccaaaaggcagcctccatggcgctggcactggtgctggcccgtcacagccagtgcctctgttagccaacacagcaagtgggctaggaggaagggtgctgtccaagtgtacgggttttctccccgtgccaagggtccaggggagcttgccgtgagcccgttcctgtccgatagtcctgttggcaaggcagggtttgcatgcg

SEQ ID NO: 145596 - DNA, 1882 bp, Homo Sapiens
  misc_feature (606)..(620): n is a, c, g, or t
tttgctgtacaaggtctttttctttgttgtcatggttgattttgtacatttcagcatttgcatcatacaaaggggggagcaacagccatggcttttggtcaggttcaggggggctgagggggtgctcctcccctccccccaggcactgacacattgaaaggaagcagagcaacaatgacacagcacggatgtgggaaaggggatcccccacgcgggcaggatggtccatctcaccggggtctcaccaggactccccgctcccacccagggccagcacgagcacctcccgttttctccccagtgcagagcgtggggtgacaggagtgggactggagcaggggacatttggtgggaggcatgtcctcaggcctgggagaccaggctggccccagcctccctgtgcggtcaggggcctgtggaaccctagaggatggagcaggtggacagcaggggtgggcaaccctgccagctgggtactagggctattggggctggagggtccaccccactgtactctagccacaaggctgtggggtggctgctttgcccaccagctgtccccctgataggggatctgggctgcaatacttctgtatcctccctgtnnnnnnnnnnnnnnntacacacacctgggatggtgtctcgacttcctgattccatctggaggagtaccctgcacagctttgcagttaaggacaccttctgggagcttctggatttggaggggaggacgtccatgtttggagatcctgacctgtcactggtgcccagcccagggcgatccacagccgcctttttgcttctctctggcagctcctcccaggcatgggagcctgggcccttccctgagagcacacacgctcacctcacctggtgcacgctcccttgaacctcattcttttttcacccatctacaaatgattgctccttcctattttctcatctgggggttctctcccttgtgtgttgtgtgcgtgctgaattctggggccactcctcccctaagtgtgttgcatgcacactgccccatttgtatgtgcacactcattgccctcccatccagatgggtcacacacacctcacctcccaggcgatcctgtgaggatcctgcccctgccagagcaactctcacgtattctgtgcactacgtgctccacacagacaggctctctgggccacacattagctgctctccacagccaggtctgcatcagtaatgatagtcattgtgttccctgggcctaagagtgatcacttggcagtggttggagccaggtgtgtgccaggcagaaattttctcctatatccacccccaggaagacctgaagtcctgctgtcctggagcagaatagaggggtctgggacatggacccagactaaaccagccatcctggagggcaggcatcagggtggggctgaaagccccgatcccactctgggaatacagagggactgcactgtggagaacaccagggcagccctctgaaggtctggggtccctccggcccacctggggtatctggttcgactgggttctcttgctcatctgaagcaccctgcgccttggtctctgctacctatctggtactctctgtgtccttgcatcactgtcgaggtttgaaggtccctgtcaagtggcagagggggacctctctgaacacttgtgtccaagtggggctcgcacactgggactggggaggcctggggcccctggactgggccctgcctgtctctggcccaggaccccagggtttttgagaatgaccatcctgcccaggataacagacacaaagagacaagcagacaacaggggtgcgaggcggctccccatcacagacacagacacagacaggctctctgggatcccgggaattccggaccc

SEQ ID NO: 145597 - DNA, 642 bp, Homo Sapiens
tgttaattcagtgcattttatattaaggttgcaaattataatcacaagagcaatcatttcaaatataaaacaaaggggctattttatttttaatctcttttcttctctctcattggagagaaaaagtgaagggacatgctgcccagatgtgccatcaggatgggagcactacttcccctagctgctgcaagatgtagatattgtagcctcttgctgagcccctctccagaattaccattggtcctaagaagcagtctcacccaaagatacatcccttacctggaggcagcctgcatcctattactcactgatgaaggggcacagggttccagccgtcttgcctcaactggaaagagtccagttccagagctccccacaggattggctgagtctgctgttgcaactggatcatagtttattccccctgcccacttctgcttccctcacccctcgcaggggctggtcctgagaccactcataggaaacctcctgcacacagtctgttttctggggaacttgacctatgaacgttggtcccagcagcatgttggagctgtcatctgctagctgcttcagtgaagacctcatcactggtggtaggcacttgcagttatgattcacttgttaaaattttcactggtg

SEQ ID NO: 145598 - DNA, 381 bp, Homo Sapiens
ttttgcaaaaaataggatacgcttttactggttggtttaatgagagagaaccacttttggccattatcaccttacgttactacaaatcctgaaaggaaagcagctttgagtcttgggctcggctgaaccccctgcatggaccggggctaacagtaccctctacgactcccacaggtctctctttgtgtccagatggatggcgactgtgagtcagcaacgccagccaagacttcctcgcctttaccgtggcattggggcagtttttcaggctctctacggagagagaagtgggccagtaagggagagggctagagagaggacaccagtttacatagggttgactttcacttgtgtgtagtagcagttcagaatttaaaagaa

SEQ ID NO: 145599 - DNA, 362 bp, Homo Sapiens
tttttaactcacttggcacatttattaaccatcaggctatgtctgcggccccacgtgtttgctgccccatgcacggtggtggtggtgggaaggcagggccgggtggccagcgcctacttgctgtccatccatttgagctgctccttgccgttcacagtcaccgacttgagctgcccgtcttcctccacctccacgcgctcctgcccgttctccacgatgcgcttggtggtgaccttgtggccattgatcatctcggtggacgacatcaccgacttgaaccccgagctgccagaactggagcccccgaagagggtggatgagaaggtggtgtggctgccccgctgcagcgcagcatgttgaag

SEQ ID NO: 145600 - DNA, 429 bp, Homo Sapiens
tttttttagctatgaggttttacaagcctgaggatttaatgtgatttactttttcagaaagatgaaacaacggacgtactgagtgtcctcattataacgcatccagagaatgcacaaatatgccattttcatccgtcaaaagaactgaagccgaactgacggactgtacatcagttacgaggatgtggcggggggttggggggcaaaggatgacgagcaccccctaaaggcgcggagacccgctggcataggagaagcaaaactgtcagaagaggccgccgaagtggtctagaggaaaaaactgtttttcttaggcggggaaggaaaacggttaccgggggccggcgagttgcaggaattaggccttgacggggagcgtccgccgtctaggctgcggcgagcgagggaccaggcgactggcgccagccc

SEQ ID NO: 145601 - DNA, 554 bp, Homo Sapiens
  misc_feature (176)..(223): n is a, c, g, or t
ttttaattttcacaatacattttatttaaactaatatgttcacaatgttaaaatttcaacatgtaatcactataaaaactactagtgagatatttcacattacttttttcatgtaagcctttgaaatctggtgtgtattttatatttactgtacatcctgatttggaataaccacnnnnnnnnnnnnnnnnnnnnnnnnnnnnnnnnnnnnnnnnnnnnnnnngcagttctagaacaaaggagtccctttcaaactattttgaagtcatcgtctataaggcaatatgaaagctgatctgaatgatttctccttttccaggaaaggaaacaaaaatgaaatcatgttagggctgcatattttatgggtcccaggacaaatagacatagtctgaaagaatgatctcagtcagaaactcagaatgaatcatatgaattaaacattggacaatgtccaatgctcagcatgtgtttttggtttatactaagaacatattatgccaccaaatacagatatttactattatacttagtgtagggggtatattgagacattg

SEQ ID NO: 145602 - DNA, 980 bp, Homo Sapiens
  misc_feature (39)..(39): n is a, c, g, or t
ggtgatatctttctattaactcccctccggataatttcngatttcggtccgcccgcccacatctagagcatccaggtcagcgatcagccccgagagcacacaggataagtgcctgcaggtctcattgttgttcacacccatcagaagtgcaatcaggacccctcgggccttgttcacctcacacatcacgaagttgattttggcaaccgaaggatgtgcatcctcggaaagcggcagggaaggctgctttttcatgcagtcttcgattatctcttgcaccgcacagattttggttaaagtgtgataccttgctttccgcaaggagatttttcctccagttttaacatgtgtcagcctcagaatgatatcttggatgccttcttcaaactcatcagttacgcagttgcctccattataaaatggcacaattttctctctcacgagggactgggcttcctcaaaaatgttctgtatttcaatccggtgtgggtggtttgcattctgctccaactctttgagaagacgttctgtctcctgtgctgcccgcttcctagcttgctgaatatctccttttccttcagtatctacagagtctatttcaaaaagctgttttgttagaatcctctccagtttcttgtaattcttgtcatctgacagaccactgaagccgataacttgctgttctacactttttacttccttttggatttcctgaagcctactaatagaaggatgttggtttcccatatccatacttttgttgtgttcagtttcacaagcactgtcccgcccgcgccatcgcgcgatgcgtcgccgacgcttccacgacttccgcagctccggcagtcgcccgggcccggcagccccgcccctggccgaacacccctaaacccggggacacctcctccggcgtccgcgcctagccgccggcagcgccacgcccaccgccagcggcgcagcgaggcagcctggagtgaccg

SEQ ID NO: 145603 - DNA, 458 bp, Homo Sapiens
actataacacatttttattaaaacatgttctttaatgaagcttgctaatttctttgaaatattctgttttgttagaaagcattcaatatttttatttagaaaatccaaaaaacacaatcaaatataaagaacaatttgcagtttaagtggatttcaaatgttaaaacactaagattccacaagaaatgcattataataaacataaaatttagaacttataagaatgcagtggactatatctaaaaacaacagctacaagaaatggtaatgaactagaagtgactgctgtttcattatttgatattaaataacaagaattctttagtgatgaagtatttgattcattccatacccattctcaagctaaatatcaaacttgtaccaccaacagctacttagcaatctgcaattgttttattatgattacaattaagaaatattttattttctcattttct

SEQ ID NO: 145604 - DNA, 529 bp, Homo Sapiens
  misc_feature (301)..(348): n is a, c, g, or t
cattcactctgtctgggctggatggaccttccacccctggcccattttccccagacctacagaagacataacctatgcacttgtggaatgagagaaccgaggaacgaagaaacagaccattcaacatgattgcatttgaagtgagcaattgatagttctacaatgctgataatagactattgtgatttttgccattcccccattgaaaacatctttttaggattctctttgaataggactcaagttggactatatgtataaaaatgccttaattggagtctaaactccacctccctctgtnnnnnnnnnnnnnnnnnnnnnnnnnnnnnnnnnnnnnnnnnnnnnnnnaaaatattttgagctttgtgctgaagaagtttttggtgggctttagtgactgtgctttgcaaaagcaattaagaacaaagttactccttctggctattgggaccctttggccaggaaaaattatgcttagaatctattatttaaagaaatatttgtgaaatgaattggcatctttaggaaa

SEQ ID NO: 145605 - DNA, 164 bp, Homo Sapiens
aagtgtttgtttttcagtgcaataatttttgtgtgtgtgtgattcttatcagaaagttgaattgttttctgcctacaccgttcatcagccccataacccaggaaggaacaggcattgttagcatcagattatacctcattattaaaaggagcatggccacacat

SEQ ID NO: 145606 - DNA, 520 bp, Homo Sapiens
aatcagtaaaaggctttatgataatagttaatacttactgagtggttactttgtgctagtattgttcataaccctttagataatatttacaagacacttaatgatatagatacactgtatcatcctctttctcactccccattttatactagaataaactgacaacgcagaaaagttaagagattttcacactgtttcactgctaagtggagatggtggggtttgacgtctgaaatttggtactaatgtctgcatgtttaatcaccactctgtgctgtctccctgtgtgttgttttgagttttcagcagcagcatttacagaaaggaataatagcaggatagttaagaacactatagaacttgctagaattttatgcatttattaaaatgttcatttttgaaaagctagtgttaatatgcaatgtacttaagttacatgcagaaacaggatacaattttatgtcaagtaattacaattatgtaacaatataactctctgcttagaaattaccaaaaaaaa

SEQ ID NO: 145607 - DNA, 357 bp, Homo Sapiens
  misc_feature (312)..(312): n is a, c, g, or t
ggtcacctatttgtcccagagcactcagtaattactttgttttgaaaagttagagtcgtttttcacaagacgtgttattcatgttaacatgaaatgggttcactactttaaaaaaataaattgataaaggtttacacttttgcttaatttttaaattgaaaatctcgtttctaatggcacatatggatatatgcataatagacatatccaaaagctttctgagctcctcagtcagtgaaaagtgtgaagcgtcctgagaccaaacagctgtcagaagaaggagttccgctaccagagaagcaactcacatcntaaaaatatgtgaaatctaactccacggaaacttcaagaatcagc

SEQ ID NO: 145608 - DNA, 567 bp, Homo Sapiens
  misc_feature (196)..(205): n is a, c, g, or t
tattaggccttgactactcctgtttttacagagtgatgctcctggctctgttgggttggtcagatcccttcctattgtgcctcccttcccctaagccaccacctccacagaatttacctctgccaagatgtcagcacagtatttgtgttcatcaaggaaataatatgcaattccttcctctcatatctgatttgcnnnnnnnnnncctagctcatatctgattttcacgtgtgccttgggatcacagggatggaaaggctgggcctcacggggacctcctaggtccagggcactgagtaggagggcacagtggaagacagcaagactgtctcacatctaacaagcacactcaccctcacccggttttcctaggtcagagcttggggaaagccaaagggtaagggcaggccatggtcttcttaccccctggacaccgggcgggaagacgtactggatgacaatggtgccgtacttctcatagctgggcagtaggagggtggcgtccttagagaccagcatccgcccattctggggctggttgcccaccagctgcccatagaagcggcc

SEQ ID NO: 145609 - DNA, 839 bp, Homo Sapiens
  misc_feature (50)..(50): n is a, c, g, or t
  misc_feature (94)..(94): n is a, c, g, or t
agaaaaagcaggcaatggaggggcaggaaatcgggagtatatgtacacgnggaggggagaacagagccttggaggtcggcctctgccagaaggngagtggctcacactgcattgaaacacttggccagtgggggatgggggaagggattgcccctccctctcggaactcccttcccagtcagacaggtcccctacaggtgtggtgtggggggcagggggcagagaggagaaagaggcttctgctgggtcctagtagaggcagacagcaggggccttggcaaaggcgatgtccttcagtcatctgtgatacccttcgctctcagctcctcttgcacccgggtcaggtaggtggggtctgggtacccaaacagctggggtccccctgtgcagctggtcttgtggtggatgtcgttccaggtgatgacattcggtctccctgtggttatggacgtgccgatagtgaaggtgagacgctggtcaaacgccttgcggaacagggtcagcaccttgttgccctcagggcagtccgggaggtaggccacccgtgtggtgccaggataccgaactcctgggtttgggtgttcagccccctggacaccgggcgggaagacgtactggatgacaatggtgccgtacttctcatagctgggcagtaggagggtggcgtccttagagaccagcatccgcccattctggggctggttgcccaccagctgcccatagaagcggccgcacatggggcaggcctttgtcacctgcagagcccgggtgatgcagccctcgcagaatgaatgccggcactctccagtctggcattctggatctcccccacagagtga

SEQ ID NO: 145610 - DNA, 473 bp, Homo Sapiens
tatattacaaaacattttatagttttgcaaatattaaattccttgccaagctgtattcacattatacttggagtaacagtttcgggttatttacatgttttaagtggagtaccaagaaatgtggtggttattgtatacacgtgcatcttcatcataggaacgaggaatgtgctggcccttcccagcagcaagggagaggcccctggcctgcctcgactcattccacttctaactctgacagactatccagcaatagtgagatgaaagccccaaaactcaaaagcacaatgaatcactgcagttccagaacagcctagaggcagcaacccagggaagggagccattctgaaccatgagttcccccaagcctgaacttgtccttcgagcttcactcccttgctattgttgacccattctgaaaggactggggtctcctaatcatgccctggggcccactcttctgcagtgctgaa

SEQ ID NO: 145611 - DNA, 567 bp, Homo Sapiens
atgtagaacataactttattcaagtttgctcttgttacttgatccatgaatatttaaaagatactttattttataaaaacttaatctgtaagtaatggattgatcataacagagggcttaacctggaatacatggataggcttagaggcccatgagcccctaaaattgtatgcaaagtctaacatgtatttaacatgttgcatgtgtatctttttggtgagagttcatagtttaccaaagaagtctatgacccaagaaaggttaaaaaattacttaactagaaacagtcacaaagttttttaaacatgaatttgtacaataaaataatatccaacagctccatctatgggtaaatcattatcacctagaagaactagtgacaaccaccagagatcagcgcatcttatgaatgcttgtgtttaaatcttcagtgtcactctagtgggaatttattaactatagtatcacagctttttccccccagatgtagatgcaaaaattaggagaccgttgatgaattctacttacagtacttcagcaccaaaaaaactggggcagttatgctga

SEQ ID NO: 145612 - DNA, 495 bp, Homo Sapiens
ttttttcattcaacactggctaggaatttattggctaacaaaatacaagtgatttcctggtccccaatccagattctccacctcttcttcacttctgactgatggaatgcataagaactaagatcttgagatgttatttgagggcagccttgcttgggtgtggtctatcatagctcctctgactaccgccgttgctacctggctgcaaatgattgttgtcaaggatagagggtccttcagaattcctgggagatcagaatcagtctctgaggtgtgggccagttgtcatggtgattattctgttgtagcatcactttatgaactaaattaaaaaaatcttcagtcacatctgttcagtaggagccatttcctttggagtcaggacacgcgagaagggcttcaaagtgttgcctacccttctattcctttgacttctcctccttttggtcaaatgactgattacagagatgattcccaaacccgtgatcagtatgc

SEQ ID NO: 145613 - DNA, 688 bp, Homo Sapiens
ttttgcaaattcccttctttccctttaatgaggagggggctggtggagaggcggaggaccagggaatgcagccatcgggagggttgggtttggtgtggggcatctctcacagaggctgttggagcccggctcacgtcccacatgtcccttctcggaccagtgtccagggctgagtcacgggtatcgtcattctcagacctccactgagccctgctgcctcaggtgttgctgaaggagctggatgtggtgcagcagcttcttctggtggccagccagggtgatgcccagggcaggcaggtcttctaggctgagctgagccacatcactgaaggtacagaggccaaacttggagaagttgtcctggtagcactccagtccaatggctgaaagccaggcctggggtgagtccagacaaggaaagtccagggccacaggggtcagaagggcctgggaaggcctttcccctgggtccccgcccagcctgcagggtatcttgcttgcggatcattttgtcaaatgcagccaccagcttgtcaaaatgaggccggcgggcccggtccttctgcccagtgtccaacataagtagatgtaatccaagaggacaacctggaagcctgggccagccgaactcctgctttattgcatttagttcctcctgctcactcatgtcccaatagggccgtcctcc

SEQ ID NO: 145614 - DNA, 523 bp, Homo Sapiens
tttaactataaacattttaatttcaaaaacaaaggtgtgtgcgatgttgtgtgcacagtaagggttgcggggcttggagaacaagcacgcgtccctgtgaagcccgcagggtgctggcggcccaccaatcgcctggactacagtgaggagcattgtgtgactccgcggtggatttccatgcaccgaatggactcagtttctaaactcacatcctaacgtatcctggcttttcacagaatactggagacatgactgcatgcatgatcacggttcttgttgtgaagctgccaccatgttacgcttaacagctgcataaatattataaagaaatagggttttcttgacacttagatttaaccttaatgcatctgcccagctgatggtatcagacgtgctgctgttcatttctttttcatggtaacagtaatgtataaagtgccgatgatgtaacatgcagttgtcttattttcatcagggcatttgtttcatggctctgttgagttgttttaagttggcggccgca

SEQ ID NO: 145615 - DNA, 566 bp, Homo Sapiens
  misc_feature (530)..(530): n is a, c, g, or t
tctgcagttctaattttctgtattattgtaaataaaagaggtgtaattgactcatggttctgcaagctgtgaagaaagcatagtgtcttctgtttctgggaggaatcaggaagcctcctcattatatcagaaagccaagggaaaatgagatgcctcctaaagcaggagcaggaggaagacagagtgaggaaagaggttccacagcctgttaaggaatcagatctcatgagaactcactcactatcaggaggtgatggtcctttatcaaggtgatggtcctttatcattcgtgaaggatctacctgcaccattttatgactaaatctttttccacctaggccccgcctctgacatcacagaatataattccacatgagttttggtagggacatagagaaaaaccatattattctgtccctgaccccacgaatctcatatccttctcacattgcaaaatacaatcatgccttgccagcagtctcccaaagtcttaactcacttcagcattaactcaaagttacaaagtccanagtgtcatctgggtcaaggctacagtctcttttgct

SEQ ID NO: 145616 - DNA, 524 bp, Homo Sapiens
tatgacggttgtttgcagggctcttggtctgggccgggtgctcgtcggagtggccagtggccttcgggggtggccccacagcggcctggctgtccccgtagggcatcacacatccaaggacatggtgaggcctgcggcagccctggaggtcagaatgcctcttcgccggcacagcagccatgaagggcagccacgggccctcatccgccacgaaaatggcggcggcggtggcggctgcggtgttggagccagcagtgtggcacctcagcgcggcgctgccgcagggagacgcgtcacaggagaaggtgggacagaagcaacaggatcttcattcccggtcccacagccatcaccggaggcaggggcagcctcattgttctgccttccgggcactgtgtcctgctactgcatctgctctttctccgagccaccccgccagtccctgcttaccgcagaggtgcatccgggccaagccctgccctcaacgctgtggcaaccccccaggccctgcccttcgcggccgc

SEQ ID NO: 145617 - DNA, 420 bp, Homo Sapiens
ttttggctttgcaacaacagtgatcattcatttgtatcccaagtccgcagttttgatgttctgctccctgatgcctagggtctccgctggggactgaaaccgtttccatgcatttctctccacaaagcctcgggtttcctcacgacacggcagcctgcgtagtcagccttcttccatggcggcgcaaacctccaagacgattccggtagacccagatgggagctgtaaggatgcctccgacccatcctcgggagaccctggacatcacttctgccacatgccgttgtgcaaggtagtcacagggaagatgctcaaggaaaacgatgttctgtcaagctgcttggggaaatcttagtgcttaatgtttaaccggggggaggaggcgaacctcataataattgtgccctgtggggaagactt

SEQ ID NO: 145618 - DNA, 628 bp, Homo Sapiens
ccgattggcacgtatgtgtctaggctccggtgggcgagtggcgcgtgaagccagtttctctctgggcacttcaggcttcatgtctatttgtaatggaacccacttgtgtttgtttcctttcttcttctgcccgcctcgctggcaatcctcatctccattcttttcctcccctgattcatctgatttggtttttggactctccttactatcactcccttctcctttctcctgttccttcatgtccttcttgggtggcagtttacgggtaggctgaggcttgtgggactgtggctgaacactcttgtgggctatctctccaggtgtgggccaattgattgcatctccaaagtcaccaaccttgctgcctttgcgctgtttaggaacagctgccctcaccaccttggctggagcagagtgttctgggggggactgtccgttcacggtggtcaggaccggcggcaatgcgttcttagtccacgggttcaccttgggcgggggggcttccacgaagtcccggcgccccgcgcccgcggctccggcagctcctccgccagcgcctggctcgccgccgccctcctccccgtcgctgatggccgggcctaaagcgccgggcagatgcagcggccgc

SEQ ID NO: 145619 - DNA, 457 bp, Homo Sapiens
tttgaaaaatctaatacaattttattattaatagttatctactgccacttaacaaattaccccaaaactcaatggcttaaaagaacaaacatttcttttcacagcttttgtgagccaagaacctgggagaagcttagctgggtggttctggctcaggttttgccatctagagacttgacaggtgctagagggtcctctttctaactgtctcatgcagctgttgtctggaggctttcattccttgtgacggctcacagaatcatcttgtggatctcacttcagagctggtgtgtagcttcacaatagggtagttggcttccctcagagtcagtgatccaagagtgtaagctaccagtgcttcctgggactttctcccaaataaactgcttccattcactttcttgtctcaggttctgcttctgagataacccaacagctctggagactggaagttcaa

SEQ ID NO: 145620 - DNA, 327 bp, Homo Sapiens
gctacttgaccaggtttaattcgagttgtccatgtcgggaatctacagggaagtgacgcaggctgccatcttgctcagcaccccagtgtggcgggcgccccagtgtggcgggcgccccagtgtggtgagcaccggccaagtcagtttgggttgggctgcaccctcgtgcctgggacacccaggaagacccacctctctcgtgttagtggaccagggaggcagccacagacaccaggctctgcgtgctccgctggcacccgaatggccactgggtaccatcccgtgccaagctcagcaaatgtaaatcgctctcattgttattttcta

SEQ ID NO: 145621 - DNA, 649 bp, Homo Sapiens
  misc_feature (143)..(157): n is a, c, g, or t
cttgtattctaagttttatttcccagacatacaccccttcataaatacacaccaatattcatggctgaggccacattcccctgaaacgtaaatacttttttttccccaatggcaacagttgcttataatgtttttctgtaccnnnnnnnnnnnnnnnaaagcagggagtaagggagagagaggaaacccaggactttgccctggccactgcagcctgcagaatgagctccccgggggcatcctcccttttaatgccagcagggagaagggaaataggtcaaggcagcagcctgagttttcagctggggctgtccagcatgaggacatcatttttcaggcagcagcaaagagcaattctaatgtgtcagaaaggacaaaggggtcatcgaaaaaggccttataaatgatcaccaaacccacatacattgcccctgtcctcagaaactgtacctcctacagcctggaactgtgaagacagttaaactatgacactgatctctttaaataataccttatggccctttaagacttcgggtttctccaacacagcagtgaaaacactgctgtgcaggcagcaactggtcagtgagtatgtgctggctagctgccttctggaagaaagtgagaagagacatgaaatcactgtttt

SEQ ID NO: 145622 - DNA, 423 bp, Homo Sapiens
gcggccgcacgggggtgcgaggcgtctgtgggggcctgcgcttcggggcgagcgcagcgcaaggctggcgcgcgcggatggaggatgctcactgcacttggctttcgttacctggtctgcccccgggctgggccttgtttgccgtcctcgacggcgatcggtggggctcgagctgcccgcttcggtgcacgccatttgccaggccatgtgctccaggagctgggcccggagcctagcgagcccgagggcgtgcgcgaggcgctgcgccgagccttcttgagcgccgacgagcgcctgcgctccctctggccccgcgtggaaacgggcggctgcacggccgtggtgttgctggtctaaccgcggatactgtacgtggcgcactgcggtgactcccgcgcggcgctgagccgcgctggagccgtg

SEQ ID NO: 145623 - DNA, 462 bp, Homo Sapiens
tttgcaagaataatcacttttattttgagattttgaaacacaggcactggtacaggattgggcaaggcagatggcacagatcttactccagacctcccagcatggtgactcccatccacagcctccggaggatgcagtggctgcccacgtgatagcagggccaggattcacccgggttgcagcctcatccaaagctgcagggtgctgcaagtaaaatgtgtccctgcctcagaaccggggtgtgggccctgagtcacttcacctgaggtttgagagtcagctgacttcatcttgacttcagtttcaacaaaacatttgctctcagtcttgtggaattttcaaacttgggaagcctcagtgactgctcactcatttttcagggtgatgtcgtgatgggttggaaacagtttttaggttctattgtagaactcagatctagaatcacgacttggcctcgtgccg

SEQ ID NO: 145624 - DNA, 582 bp, Homo Sapiens
  misc_feature (540)..(540): n is a, c, g, or t
  misc_feature (565)..(565): n is a, c, g, or t
tttttttggcaatgctttaaaaccttgtttctgtcctgcagagttacagtctttctctcagggagctacagcggggcattcaccatgacaatgcctgctgctcttcctcatttagccggtgtccactaactcagtgttgtgggccatttgtaaacccttatggagtagaccccaggcagacgtagggaaagaaagagaggatctgtatagacaagaaagctggccatgtgggaagtccagagctcaaaccatgtgccccagaggactggtgctggcattaagcctgtaaatcaaaggcttctttggcaggaccctgggctgttagaatcaccctagggagcagagccaggggacattttggcccctgactagcaaggcacaaccctataatggcagaagcccttctttcccctccccgtttcccaccagacccacttccttgatgggcctctagcacccttccaagctgatggggtcgggaatgtgagctggtaaaatgggcagtggaaggggctgtactgtttctttacatctcacggngactagagccagtactgaatggctnttctaggtagtgtgtta

SEQ ID NO: 145625 - DNA, 502 bp, Homo Sapiens
tttttaacaatacctttcctttagtgctataaaacagggaccaagagaaccatacattaattttatagctcggtttcaggagtctcttcgaaagatgatcgcagatttggctgctcaggatatagtgctgcagttattagctttcgacaatgctaatcccaattgccaggctgctctgcgacctgtgaaacaaccattcagggaaagaaatttaaaggtttggtagatacaggagtggacatttcgatcatttctctgcagcactggctgtccacgtggcgaattcaacccactcaatttaacataggtagagttggtaaagcccctgaagtatatccaagtggttatattttgcattgtgaagggcccgatggacaacctgggactattcaaccaattataacttctgtacccagtcgaagaaggggtggcctgtctcacccgcaatcacacctcaccatcctagcctagtgccggctctcagccggtgtttaagggagtt

SEQ ID NO: 145626 - DNA, 964 bp, Homo Sapiens
  misc_feature (58)..(98): n is a, c, g, or t
ggtccaaggtagcgaggcctgggtggcgaattccgcacgaggtgaaagccagttctcnnnnnnnnnnnnnnnnnnnnnnnnnnnnnnnnnnnnnnnnnacaagataccgttcgggaaaggcttttgaaaggacggaagcgtattcactgtgcgccagtactcctggctgtgctgtggtttctcccgacgtgcacatcgatctcgtatgtgtggcatctgatattaaacgggaggttttaagaagcgtctgccgtgatcatggagcttcggaagcgggaatggttcttccgggtttgctgttttgtctgtttcccccttgtgtggtttccgcctgcgacagttccagaatttgctctcccactcagtgtgctctgcagctgtgaggaaacagccttcgttagaggcgggagcagagacgagccgctgctctgtgtcgtgtttgctgtggccgcagggagaggagcaggacacgcacctttccaggggcctctgtgtcccgcactgtgtgtgagtggaccgcagcgcgcagccacatgccctggctgccatgggccagaccgcctccacctcccccgcccgcctggcctgtcctgagtgcatttccctgcactgtgtcgtcactgcacagccagtcaccgcggtctcagtcatcggcgcggatggctatgctggggtcccagggtggccgcagcagtcagggtcactgtggggagccctggggtggagtgaccaacccgcattgtcctgtgccccgccatggcaaaaagcgcaaccttttgtatggagggccaaccgcgctcccgttttggagaaacggccttcccggggtgggggctgcccgggtcccgctcctggtccaccggaacggtggcccgggcctgccaggttgtttgaaggacctttgaccctccggggggcgctcaaccatgctcccagccaggggtcagaacgttggttgtataca

SEQ ID NO: 145627 - DNA, 863 bp, Homo Sapiens
ctatgaaaagtcagccactgacgtttatttagaaagttaagtttcaggtaactgtggggcagcttggatcttatattgcacaaaagctgctcacttacttccacatctgtgaattcaggtgtttttctaccatggagtttagtgcgaatcgaaaacgatcccatcttctatcaaacacatattaccctcgtcccatgaggcgactcccaaatgagcaaaacgccagaggtctggggtggtgcgtggagaactgacagtctagcttctcggattcgtcggctccgtccatctccccttcatcactggacagtcggctggcgaggtcacctccaaccggtgggagtgggggctctggagtgtggccgctatgatttgaagatgtgctgctgcttatgctatttgcagatgatggtctaggaagtacagagttgggtggtctggattttgcaggggatgcaacttttggttctggcccagagctccctgaagaccctagcagagaatcctgtgccggcccggattggcttggaagtatttccctcgtggaagtcaggagatgctctttatctttaacttctttttcccgggactttgctttgtgttctgccaggaggaggtcaaattgctttttccggcctgggactgccctccgatggcttagcgaatgtgtcttgcaggtgagggatcttgtgcaaggtttctttgtctcggcatccaatactccacagtgtttatttgggtcaaattctctctctgaaagtctcctgtaaggcttgttgctgtctgttggtgccatctttgtgtttcttgtctatggtggttggcagaattcctttgccatttaagatcttctctggtgaagg

SEQ ID NO: 145628 - DNA, 1065 bp, Homo Sapiens
  misc_feature (850)..(850): n is a, c, g, or t
tttgagcacctgattatatttagttttgcttttccagatattacattctatagttaccaaaaatggttgaagggagggatttctcattgcagagggtggggtgcaagggaataagacacttgtacggaacactgaagctttgccaacttctacacatgccttttttgcagtcctttaactgtccaccctaccaagagcttataaccagtatcagaactggataatgacgcagtttttcactccgacctccatcatgcttgcctgatttaaaagccctcagtttgcagtccagggactgttcaggcttgtcctcagctgagaggacacaggctagagggactgtgcagaaccaggctgggagaagggctgggaaaactgggagtggagggtggatcctcatggagcaggagagtagctcatggctccaggagcctgaggccatgcagttgatggtgagctgacatcaattctaagactcatcctaattgaggggtgttaaaaagtgtgctgcttagaatgaccaaatatagttattgtaaaaaatgatatttatgaactttttattttagaaaacatgaattttattgctccctgtattatttgtttgatactaggattcatgctaaactttttaagaatgtattggatatcaagaagcattccttacattagtagcaataaatattagaataaatatgaaattgaactattttcagaaaaagggcagtatattaagagcagggactgttctctagttatcgaggaaaactggactttgtttgtgtttttggtggaggaagaagtttaagatactttagtcttaaattgaggtttgccaaatgagaagttncaaaacttgggctttctaatcagaattccaggaggaggaaagtgtgtgctgaatattttaaacatttcccactgatcatacaaagtcctgatttttaaatttacacttataatgccctttgtatttaaaataatttttaacatgttgctttttccaaattaaaaatggaagaagagtattcccaaatgcgataaaccttttcatttagcttaagt

SEQ ID NO: 145629 - DNA, 120 bp, Homo Sapiens
ttttcattgagcaatagttccattacaaacaggaaaacagttcaagtgaaagttacaggggcctgactcagtactggggtgcctccttcctttagaatgctggataaatggaatttcacc

SEQ ID NO: 145630 - DNA, 417 bp, Homo Sapiens
ttataattttgcaatatgtatttttccctttaaggaaattccaaaaattatatcgttccaaataaaaaaatcatctccagagtcctgacgcagcaaccattacattcccagtaatggaaatgttaagtcagtccgtgctctggagaaatcccacgacagaacacaggccaggagaccgggcctagattccggttttcgaaccgtgggggcaaacacggaggctgcaaatccatccccagtccggcaagattctcgaacatgtcgggagagggctgcataggaacttcaaaaacgagtagcggctcccctggattcagcgtgagggggaaaccgcggggcaggttcgaaactcaggagtccgacgtctgaaggagcgggaggctgcttccgaggagcccggggcacgacgggaagggc

SEQ ID NO: 145631 - DNA, 370 bp, Homo Sapiens
ttttatcttgtaagatatattttattatcagttgataaatccatgttttaaaatttagcaatatgcacaatttccatataatctgttttcacaatggctaatcaccatccagctcaagaggaattcaagattactagttttatggctagatcgtctcaaattaaacatcacacaaggtgaaaaggaagaagccatacatcctactatcagattaggatggttcaggcttgcgaaaattagaaattaacttgtatgctttattcctccctcctcagtgctttacatttgttatcaacctaaaagcacaacatttagaggttaaaggaaatctttagaggatggttcaaacaacaatgaactcgggtagaat

SEQ ID NO: 145632 - DNA, 472 bp, Homo Sapiens
tttgttgtagaggcatatttattgacatgcaaagatgtttacagtatacagtggggggaagcaagttacaaacatttacagtatgatcttgttttagtttaactggcagaaaatctcaaagcatataactccatattttcacacatagaaactttcatatcagcttagaccagggattataattcccaccctgagtcttagagaactcagccatagcctaaatgtcctgggaatgctttctggtccataccaacttccaagaatcactatcttgtaggttgacacagcaacctcttctagctttcctgttttgtgttgttgaagctgcaattctgggtctaaatttctctaattaagtctattttgtagtgttagctggcacaaatgcagaaatgcccaggcttgcctactagtaaaagataaagccccttggcctttcatatgacacataggagaataaatcataaatggt

SEQ ID NO: 145633 - DNA, 390 bp, Homo Sapiens
tttgcagtttttgctctcagctgtagccctgacatgaaacgcttgctacgtttctgcagcaaagtgggccgagcgcagtacgcacaggtgtggtgttagccagggagaccgaagccacacagaaggggagtcagtaaatgtccatctccacggtgtctgcctttgccattgggaggcctgaactaatcaaacgttcattaataggatcccagcctaacagcaacgcttatgtagcaccattcttagaaactaccaagtatcacacaggtacatgtgtatggggaccttcctcttgactgcttgtcaagaaaaggatccagagggaacttctgcccctacttccatgaagtgagatgcaacaatcatttccaatctatttttttatctcat

SEQ ID NO: 145634 - DNA, 697 bp, Homo Sapiens
ttttttttcataaagaaatgccactttattattttcaagtacataggtagtacctcaaactaatgtcttacaaaaggtcaccaataaagatcctgtagatgtttctttaacaaatacataaagattgatgataattagcctatgcactcgctgcttctaaaaggatatttctaaagtgcctgaaaagtattgtttttggtagactaaacatgccacctctagcaatattgtttatgctcttaatttactaaaaaaatgccatttttattgattgtgcaaagataaacttttgtccacagttagtaatctccaattaatcggatccaaattaatattgtctcccacttagattcccaggcccaaggcaatgactcccttacttccttgcttctgataaagcaaaattccagtgcaatgaaatgacagcctttgggaggtggtttatgggtctgacccaatgcttgtcttttgtgcttccttcctgtctgccttaggtcttccattttcctcagatgtctttctcacttgcatgacctatctaggtctctctctacaggacattcccagtgccttctaagccaggcttagagaatgggggcagggctgcctgtatagcataaagtgttagattgggagtaaagggcaagaaagctatctcctgtaggaacctgagacccacctcttcagcccagggtaa

SEQ ID NO: 145635 - DNA, 769 bp, Homo Sapiens
ttaagttttaattaaatttttatttgaccaagaaaaaactgtctagaattgcctgacatttaaaatccacttaaagcagattagcaacttcaagcatcacaattattcagcataaagagcctttgttgaaacatctttctcatttatttagaagaaaacatctagaacagaaccaagcaaaacttttgtatttttgtaaaaaatctcaattcctgaaactactataaacaatctactgaaactgtattcagcaagggacagatttacctcaaggccatgttcacctgcaacctgctgataagtctcttttagattacttcagtggctatactgcaatcattgacttgtgtctgctccacttgactataagcaaattgaaggcagggtttgtgccttcataatctctgaatgatctgaagatggaaataactgctttgtgctttcagggagctcatatacctcagctccgtgggctacgaagctcgttcttcaaatgaggtggagaaatgtaagcgcgatgaatgaggcccaagtcgctggtggcgctgaacccccaaaagatacacaccgcgacagatgcaacgacccctcacctctactcccgttcccagccgcatcctctgaaacctgatacgcctgcctgcctaccaggacgctgctgtcactggctctgctcggtggccagagacagtactcactccatgcggccacccctccaacgatcccgggaattccggaccggtaccagctgtgtctgtaaggtagaaga

SEQ ID NO: 145636 - DNA, 526 bp, Homo Sapiens
tttgagtgcagattgaatcataaattatttcttggctacaataactctctagagagtaccagattataatttttcttcatatcttttgttggtgccctaatggaataggtttctatttccgttctgacacacaaatatgcttatgattgtcaaaatattaatgttattgattgaaccttgttttacttccaaggaaacaaaaatcatggcattctgaaggccagagatgcgaccctctctcatttggcatcccactgggcccaatctgtttttcactgcaaatgccctgctgctaaaactatacaatcaccctccctctaggcccaaggactgtcatggaagaggtgggcacgtgagattgtaagggctggttttgagggatagaattagatcaagatcaaaaactccaaatcaaggatggctgcaaagatgcctaaacagctaatagaacaagcgactttgccttcttagctatcgtgcctgggtcacccttgcatccagtcagtttcataaccttgccttaatt

SEQ ID NO: 145637 - DNA, 630 bp, Homo Sapiens
  misc_feature (273)..(282): n is a, c, g, or t
  misc_feature (527)..(570): n is a, c, g, or t
tttgtgaccttgcatttacatttttataggaatacttctaagcactttttttatggtttgctgacattcacaatcccatttttgggatgaagtgattaaaccttctgggtttgaggagatttctcagcagtggatggaattatgaactcttaaatctaaagaagcatcagagataatttatcctggaaaaaagtcaacgttcttcattcttccttgatgtttctagtcaaatcagtgaattcttctgattgttttctttgggccgagaattgnnnnnnnnnngagcagagacttaggggagtgcactgctgtctagataacattctcataggcaaatagccttggtgtgtctggcatcgtgagcagtgagtggggattttccatctttttcggtatttccacagtggagtaaaccgtatttgctggatcttcctttaggattgttctattagtgtgagggattgtgtcgtactctgtgttctctccagaatgggggcatatgttaggagtttcccgacgaatgtccnnnnnnnnnnnnnnnnnnnnnnnnnnnnnnnnnnnnnnnnnnnncagagaccaaagaaatagctcccatacaaagagactgagcatgaggggcatcaacaggag

SEQ ID NO: 145638 - DNA, 963 bp, Homo Sapiens
gagccacacacatgaacagcatttatttttcatgcactcaacacatgttcaagcctacggactctctgctgggccctgagcggggccctgggaacagaggtgtgagaaacctctaagctggtcgaggccagggccagtatcgtcccccagcacagagcctggtggccgctgtcacctagtgagtgtttgctgaatacacagaaggtcatgtggggtgagcaggttgggcagggcagctggaataaggggtgctgtggctgagaccaagaggggcttgtccccacctggaagcacctcagtcgccgggttcctggtcctccttgctgatggctgcagactctgggaacagggaacccccttctgcctcagagaacttgcctagggagtggagacggccaccagccccctgaacagtggcctcaactcctccctgtcctgagcccctgggcttctggcagcttggtgcctgctgcctgaggtcaggctgaacggcctgggaccacgtgtctatgtccaagcgcccagagggcccagccctgccccgtgatcaggttaaggcctggcagggctggggaagggaagggacatgcagcaggaggtcatggggcccaggagtctaggagggactcccagaccagcatactggccccacaggccccgagctgggagccctgaggtcagagccccacagaggagcccgaagcacagtccagctcagcagggccgcttgctgtccagaatggccttccagtcgtccgcccacgagtgcagcctgcggcgggggggctgcagctgcaggtgctggttgtggcaggcggtgaagaggacatgctcccagctgggggttggctcggcccctgtgatgtccggccggtcgtctatgagaaggtcagcagagaccacggtcttgtctctggtcagcacaatctgctccagaaagcgccacccaggcctcgctacctt

SEQ ID NO: 145639 - DNA, 632 bp, Homo Sapiens
tttataccttaaaatatcaaatgtttcatttttaggtgatatcccaagtgacacagaaacacagctcctccggatggtgaagtctccgctgcaaaactcacgaaacagcacagaggatgactctagggtgctctcccacttgctccaagttaggcaggtgccctgatggaggcaaggctgagccattaacatgcacagctccatatcctggaagcctctgtagccttgaggagataggctctatccaacaggactcagaataaatgactgccacctcaactgagcagtatgaactgcccacctcaactgggcagtctgacctcttccacagtctttaagaaacagaagagccatttgcattatttaatcaccattcaataatctcctccctccccatagctgcttgagttaactgtcccacaagtgtcctgtgttttgtaaagatgagggttattttctgaaatgcagatgggactaggatgaagctgtattatcaattacagagacagccaactctcatttctcttaaagcaaaaattcattccactgtgatttctccaggtatttcctgcaattctaaatccgcccttgatattagagaatattaaaatcacacagttgtggcaaaaaaa

SEQ ID NO: 145640 - DNA, 463 bp, Homo Sapiens
tctgcgggggtgtggcgtgcgcagccagccattcaactgggcggtttcattcgcttccccgctccaccgcgcttgtaactcgcgctctgattggcctcgctgctcttgccccgcccgggtctgtccccccacttgttccctaggaatagaatcattggtctctgaaggtggagaaatgttcttgtgttgagctttttattttttgtgttgtcagcagcgtcataaaaatcttgcagctgtatgaatatgccactgtagtgcttgtgctcctttctactgtacaatatttgttgaacgcagtagttgattgatgagtttcacactgatcttgtagataacacaataaagtgctttaaataggcacttttcttttgagctcggttaatcttgcattacagtctcatttcttttgtgaacttggttaatgtttctatataacttgcttttatctatagttacagca

SEQ ID NO: 145641 - DNA, 191 bp, Homo Sapiens
ggcatattttcccttttttgtagtaagtaatcaatatggattatctttctggtttaaaaaataaatcagtattgccactaaaaaacttcagttttattattattaaaagtacggcaccatcaaatataaaatgccttaaaaatgtagtactaacaggtccatctggttttctcatgttttctccattcatt

SEQ ID NO: 145642 - DNA, 291 bp, Homo Sapiens
tgacttcgtgtttttgtgtctctgctcccacaccagtaaaatgggaataataataagatatcttgatggactgttgtgataaatgagaaaatcagtgtaaagtgcttggagatgtgcctagtgcagagtgggcacttgctgaatgttaattatttgtataacttgctggtgtgggaagcctgactcttctccggctggaatcccacaggcctgcacaacagtaaatggccccgctgctaacccccaagatctatagtgaatacacagggaggatggtgagttatatccttc

SEQ ID NO: 145643 - DNA, 731 bp, Homo Sapiens
tttcgatcattacgatgtttttatattaagacaaatgttatgtaatagaatgcagaagcatgaatttcaaagccaaaacaggagacttcagagttttacactacagataggttactttgggctatttctttagtgttctgcccccaatttgccaatcagctggccccctctgctgagggttgtttagatggagaacttcgagaagctctgattactccatttcctttattactagaggtgagggaagggaagaccagagtggaggggtgattagactgaagacacacagcttggaggagtctaaattggaaacccggatctgttcttttctctgtaccaagaaacgctgcatagacgttgcctactacagcaagaaaggaatcaaaaatagaaaagaggctctgggttgacccttggttttccagaaatgcaattcgaagaacagtgttaccaagagtctgggctgtgggttgtaagtagagctgactccattcaatgacagaagtatattcctttaccttaggttcttttaggatctaatgttctttgggaaagaggctcaggtgaagaaaggaggaggccgatgccagcaccgggaagtgagaggaaggagacccagatagcagcagggccagccggagcccattccggatgccaggctggggaactggcaggacttcccttgctcacacatcctggggtgtagctgcacacgtttgtgaacacacgca

SEQ ID NO: 145644 - DNA, 942 bp, Homo Sapiens
  misc_feature (171)..(171): n is a, c, g, or t
tgggaaggggctgcctgggcctgggggcccctattcttcggggtcagggtcgggggtgggccctaaggccttgcacgagcctgttccagggactgcagccagtgtgttggggctccagcaggcatccagggaggggcaggaagggtcagggcgtgcagaccttccacacanttggtgtccgtggggatgcgcaggtagaaagcgtgcagcatcattctgaacggccggtcctcccggcccgagacttctccgtaggtcaggtcgcccaccacggggtggcccagggcactgcagtgcacgcgcagctggtgtgtccggcccgtgagcggcttcagcagcactttggagacaggatcgcctgcgtacagcccgtgttccagaaccacgagatctgtgaggcttggctttgggttctcacaaccctgcgagccctcgatgcacatggtgtgggcccggccctccgtgctgttcctgccaatggcatggctgatggttacccggctctcctggatgtgcccccgcagcaatgccaggtaagccttggtcacgcgccgctccttgaagcacctgtacgcgctgccggcggctgccttgtttagggccacgcacagcgccccgctggtggagaaatccagctggtggcagaacctgaacccgtagcaggtgtcagggtcggccagctcgggaaagcggtaccgcagctgcttctgcagggtcagagtctcccgccacgccttgctgtcaatgcgaacgtcccagtgcttgttgaccaccaggaagtcgcggctccggtacacgatggacaggttctccacgctgcctggctccatggccggcctgctgccgggccgtgcagtccaggcccccgatgccgtgcccggcgccggctccagccgcgcgcccgcgcgctggcgacccagagaccctggaagctccgctccg

SEQ ID NO: 145645 - DNA, 1891 bp, Homo Sapiens
tttgccagtcactgaacatttatttggagtccctggagccctgctgtagccaggagcccaggttgtggcatgggggacagaggaggtgggacctggcagacccacagctcccaagctggggtcccggaggcagagtgacaatgcatggctgtgtgggagccaggcaggcggtgacgtggcagagctgccagcaggggcccaagagactgcagcaggttggtgctcacagtggatctgagggatgggcgtgcgtggcagggccttggccatggcccctgaccaacccctgtgcaccaaacaccacactgagctcagaatccgggcagagagggaaccactggtacagtgaggccaaggcacacgcagccgggcctgcagactcgagcccagcagggaccattaggtctcgggaggaggcagctgagggcgacaggatctgcacagagcagtgaggggcagaggacgcagggaccagatgggtctcccaggccaggtgagcccagaacggcccttcccagcccctctagagggtaggttgggggcagtagctcaccaggcccaggagcagcccatcctggaggcaaagcctatcccaaaacctggccctgcctcttcctgaggtgaccttgagtccgtaaaactgacgcccctggggtgacgcttgagagccggaagctgttccaggaggagggaggggcctcggtttctcccggggcatgtgggcaggaaggccctcgggatcccgcatcagtcccacggccgcggtgcggtcgtcacctgtgatcacggctgcctggcgccccctgccggccccacctcagcccttcctcgcaggcctggccggggcaacccagtgggcctgatgctgcctggcacctcgaggccccagagccagtgagcagacgctcgctcgcccatctccctagagtcccgctgtgcagctgacaccccctgccccagccccacggctctcagctgtccggttccagcgtccactccgacagccactgcaggcaggggccccgctgtgcctcagtctcagggggcttggttgggggtggaggaggccggccgggcccaggcaggagtgtcggaggtgctgcctggcctggggcccctatcctcggggtcagggtcgggggtggcccgtaaggcctgcacgagctggtccagcgactgcagcagtgtgtgggggctccagcaggcatccagggagggcaggaaggggtcaggcgtgcagacctccacacactcggtgtccgtggggatgcgcaggtagaaagcgtgcagcatcattctgaacggccggtcctcccggcccgagacttctccgtaggtcaggtcgcccaccacggggtggcccagggcactgcagtgcacgcgcagctggtgtgtccggcccgtgagcggcttcagcagcactttggagacaggatcgcctgcgtacagcccgtgttccagaaccacgagatctgtgaggcttggctttgggttctcacaaccctgcgagccctcgatgcacatggtgtgggcccggccctccgtgctgttcctgccaatggcatggctgatggttacccggctctcctggatgtgcccccgcagcaatgccaggtaagccttggtcacgcgccgctccttgaagcacctgtacgcgctgccggcggctgccttgtttagggccacgcacagcgccccgctggtggagaaatccagctggtggcagaacctgctgccgggccgtgcagtccaggcccccgatgccgtgcccggcgccggctccagccgcgcgcccgcgcgctggcgacccagagcggacgcgtgggtcgacgatatcccgggattccggaccgtaccagcctgctttttacacactgttatatgtacatgg

SEQ ID NO: 145646 - DNA, 450 bp, Homo Sapiens
tggggcgtcccggcgcgcacacgctcctgaggcctcggcgttctgaggaaaggggctggcgtggcgacccgggtcctcgaggccgagatctggctgtggcccgcgaagccccgcttgcccgcgccagcgtcttgtcaccccgagccgagggcctgcgcgcggccgtcagatatgggatgctggaggacatctgggggccacaaatgctccttctcctggagacgcaactcaagttctcatggagttttcattgtctcgtgcaatgccatcgaccttgaatttcagcataggacccatatgaagtgccactgttaatgctgggagcactccaggaagcagagaaaagttatgacatttcaagaaaaatctgaattgcttgatatgttccacagattgaggtctgtacctatggttgcccactatttcaatagtcagtgtaaggactattgt

SEQ ID NO: 145647 - DNA, 650 bp, Homo Sapiens
tttttttgatgatttgaagacttattttacccaaacttagaagatggcatttggtttttgacaaagaaaggattagaaggaatattgttcacatacagcacttctgaaagcattctagcttctgtgaccaaattttaagatcttcctgatttgctgctttgcttctctcagatatcatcccatgtaaagaagattcccatccctttctcccgtctcacccccactatttaagagagtggtagtgtcactatggaaagcttcattgggtaaatcttcaacctttggaccaagggagtggtacattaactgagtaaatatgaataacagacttatctattttgatagttggtttaggaaaactgtcatgtgacaggatgtaatttttaaaaatattttggagtttttaggattataatttttagccataaatagctaattcattgattaaataaatcatctgaggtaaaatgttgtatcagcagataccgtgctctaaagacacgggcctgtcttcagaaaatatgttataatgaaaatattctattttcagtgactttctggctgatcaagctgcatgttatgttcaggcaatacagtggattttgcactattactatcatggagttcagtcctggagctggtgagagaat

SEQ ID NO: 145648 - DNA, 355 bp, Homo Sapiens
ttttttttattatccttcactaaggaagaatgtctttaatatttagaaaataaaagtgattaaaacaatcattcccatccctggagggccacgggtcctagtgggtagccccttgaggcctgccccagggctggaagcagctccaggcatctgtctctgggattcacgattctcaggggcttggggtagctatgctcactgagagatcctgcagagattgtaaagtcaggcctaggaagcaccagaaccctgaggctgctgagctcatgccctgggtgtgggaggcactcagaaccctcctaccccacctccttcccacagtagactgcggggcgggtttggaagtggcaatggt

SEQ ID NO: 145649 - DNA, 426 bp, Homo Sapiens
ttttttgtatgtagaacggactcagctaagtttattatattctccccggaggagggaaaacacaaaacaaggcacaaaggcagaaggtgcagatgtagcacaacgatgagttaagattccgcacgcaggtaacaaggagggtatggtatatctctgccagaggtactggaaggtttcaaaggcagaaaaaaatgtgttccggacacctggacgcagaattggaggcatgacaggaacacagggaggcccatctaagttgcctattcacccaggtgacctctctttcatttctttaattgtccttttaacaatatggggaatttcacccaaggaaagggtcctcttctcgccccagcaggcaaggggtgttcctccagcgcaagttccggccccagctgcccccacgtcccacaggtctcctgcctt

SEQ ID NO: 145650 - DNA, 513 bp, Homo Sapiens
ttttgtacatgaaagagtatttattgaaaacatggttactgacaggaagctcctggctgctctctggttacaatcttggctcacaactggaagtgttacatactttttacttcccctcaattttatttttccccaaggttccatcctaagataggtagatcttatataaatatatatacacgtctgtataagtatggcctatagtaatgaaaatatatagtacactcttcattgggtagtacctaccatgccaggccaccaatactgaatgccaatgtgctaacgtatgtccagggagagaggctgtgtgtgtggtttacaagtgctgcagcaccagggaagccccactggcacaggtgtggcctcagccggcctcagccagctccctgaaatcatggccaatggcagaaaccatagcactaggaagggaaggccaacttcctggggtctggaaggccaaaggaaagcaaactggagggggctgcaattcaggttaggggagatttctctctg

SEQ ID NO: 145651 - DNA, 515 bp, Homo Sapiens
tttgacattttcaagagaagcagggcatctagattttaatgtggtaaacgatgttgccaatttaaaaagatgggcaaccgatttaaatttctaaaacaacactgggtggactggttacagcctgtggtaccacaagagaacaatctctgcttttgtctcatgcccaggctcctgagagacaccaggccaggccctggcaagagaggggagagtgggtatgagacagcgtctgcctgagctggtcccatccacacgcctgcagcctggctctcctctgctttttctgtttcctcccagtcagtggttctgcctgggcctttctgcctccagggccggggaggctgcctgagtgtgcccctcatcctctgcgacggttgactgccctgagccaatgcaggcagtgccgaaggacccagtccacttacacatttttagacaagttttgcgcacagtgactggggccagctcttgagtcctggcatccaacggcaggtggcagtgcctttccagttgct

SEQ ID NO: 145652 - DNA, 121 bp, Homo Sapiens
acttttaatatatcggcaagcataaggctatctttggtttccatgcaactggcattgatcatgttcgtgaatatagctaggataccagggccaaaccgtgtgtgctcacttgttttcctgt

SEQ ID NO: 145653 - DNA, 482 bp, Homo Sapiens
  misc_feature (29)..(29): n is a, c, g, or t
tgggctgcttaccgtgtgcaaactcagcnagtgcagtgaatggaaagccactttatttccatagccacagggggaagtggccaggtttacacctagagaaactgctttgaaggttggctgagggcaggggtttaagaaggaaagcttgatatgggaggcatttcacattgtaatggtaagcgagtgatgggggtgtgacatctgtgtctcttttttcagtggctatctcgggtcacagtcctcctggagcgtggactggcataaccacaacaatgaccaggttgtggacgaacggctttaaggtgatatttgaaattttgcagctgggtctccaggtttgatctgtctcaaggttaacccctgtaacttcgggcttaggatgcagcctgcttgagttcggttccttttcaaagtcaggtgcttctcatctatcaactgggggtcccaagaggcaacctcacccagttaaaaaaggattaaat

SEQ ID NO: 145654 - DNA, 1038 bp, Homo Sapiens
  misc_feature (53)..(53): n is a, c, g, or t
  misc_feature (104)..(104): n is a, c, g, or t
tgaaaaaaattgtatgaatggctccaacaccatacttttccaataaccgcctntggcagcctcgatggtttggcagctttaaacccaatgggtgcttcaaattngttcaacttctccccggccggatcttaatgtaaaagttgttcccgtttgtatgaaatctttagaacccttgggcccaggcaaatctgtttattcgcagccggtcgcgatatatcaacagaccacttgcacaaactcctaacataatttctaccccttctgagtccttagcatgatgtaaatctaccccatacattgataattttttggcattttccaagaaatgcatctctgcttctgctggcgtcattcctctgtggctcttgtgcagctcgatcactttgtcttccagttctttagtgtggtttggtgcaaagcggaactcactaatgtaatcgctcccacattcatctgggtcatagtctccgagctctgactggacagtgtaggagcccagcaaggccagggtaacaaaggagcagggcagccttccggacacgatgtcatctcgcaactgcaagcagaggtagtacctggtgatatcttcagatagttgggcagggtctggtggataaaatttcacattaaatgaaaagtgccaagcaccacttcgaactgtttttttatttccttagcagggtccaaccaattcttctggttttcagcatctcgatacgtaagcccaaagtagtctttctctagcaagttcaagtgttcacacactttatcaaacagcacttgtcctctggagcgtttctctacatcacaggtatattctgatccatcgagaagtatcactttgcactgcatgcttttaggctttttgacaatctttaatggagaccgagagagtttactgctagatgatttctgagaaagtttatcgtcttctaattgctgatattcgagctgttttgcagccattctgtggttcttcattttttatgctgatattactcgcaatgcagttcaacttgagaaaggagtctcattgat

SEQ ID NO: 145655 - DNA, 729 bp, Homo Sapiens
tttttaggggatcatagaggagtttattgcaatagtcttagcaagcaatgttgagtttttgaactaacatgttagtgcaaaaattcttcacagattgttgaatttagggttcttttgtgtgtcaacagtgtttgtacatggattagatatagggtaggtagaaaaggaaaacaatcaatcttggccttatcaaaagggggatgccagtgtctagatacaggtaagcattgacactcatgagacttaggcctcagggctcctccattttgcaggctctttccaagtctcttgtctgaccctaaaagtgcattcatgttgttacatattttttataccttccaaaactaaactatcttaactgtgattggttaagaccaccatctctttacactgggtcacatcacccctaaggccaagtggcattgcagtagtcgtagacatttctggatccagctaacaggcagttgcgctggggattgtggtaaattgttaaacatgattcctaataaatcactcctttttttgtccagatccctttgcaatgtaactctactcctccctccatcaagaagtagggtctatttctccaccccttgaatcagtctggtcttgtgacttgctttcatcaataaaatgttgcagaagtgaagtctgaaagccctgcttggagaaaacatgtagcttctactttcaatcttggaatccagtctccacaaaaagaagtccagg

SEQ ID NO: 145656 - DNA, 594 bp, Homo Sapiens
ttgacaagagacccatttattaccctgagctgtagcatttctataacaggaaggcagagtgaatggatacaaattctgttttataacttatccagaaaaccaatgttttcaagatatcataatcaaataatatatcttaattaagaaagagcatttaaagcagaattaggattttgttactaagagcagttaccaatgagagttatgcttctcaactcataaaacaggttggaaatacagctcaaaactttaatcaacaggccatttcaaagacaactataccacttgttaaatataacgtgctcttaacttttagcactcccagagtacacttctttttgtggtttgtttctggtaacattggatttactagtctatgagtctgtttgtcttagaaaggtgactaatgccatttcaaaatgtttcagcaattttaaaatatgggtttttctttaccagtttagcacctcttatcatacaacattacataatgctttttatatttgagctttctcagtaggctccacgttgatgaactttaatactgcctccaggcaaacaactttcaggttgccagtgaagtcattatttcat

SEQ ID NO: 145657 - DNA, 418 bp, Homo Sapiens
  misc_feature (393)..(393): n is a, c, g, or t
gtaaataaagttttattagaacacaaccatgcgcattcatttatggacatattgtcagtggctgcttttgtactacaaggacagagttgagttgttgcaacagaggctatggtgttgcaacagttaaggcctacagtattcactgtttggtcctttaagaaaaagtttggcagcttgaacttttccaccatttgacagcaaatcagtgcttctgtgagttgtacaaaaggttgcaggctgcatctaggatcaccaataagctactggctgttaatgagagacagggcctgagtgaaaaggagaggtcagggtgagcttctggagagtgggaaagattctgtgcttggccaagctttaatcagtcaggcccctgagtcctctcctaggcccatnctgtgcacttccttttaaaatccag

SEQ ID NO: 145658 - DNA, 914 bp, Homo Sapiens
cctttttagccagaagcatggaagtcattcacggcaggccctactgttgcagggagcttgaaggagctgacatactgtccaacaccttttactctaatgaattgcacaaccccctccagacggttactcgcccaactgcctcagaggacaggtatcaggaattaagggagtcacttcaacaatgtaggcttccttggggcgctgaaagagagtatggtgggataataccgatttcactccccgaggaccacaggccaaagtatgagcctcctcgtgtcatgggcaaaggacatcagcattatggatttggtggagaaacctggccaagaaagcttcctgttgaacaattttattatttgacccagaacaaaaaaagtgatgtctatggaaatgattctttgatacccaagccgcctaattcaacagtaggagagatctgcttgccatatccaattgaacacccctaccacacacacatctgtcgcggcaccatgttccccaccttcacgtcacctgaggacctctacacgggcattaaagcccgcacccagcagccctttcctcccacggtgccaagcaaggcttatgattcaacagttttgaagacaagaggtaatccttatagatatgaactgattgatattcccatggattcaaagaagaaagcactgacttggccaggtcaaggtgtatattatgattttcccagaggtgttgagaaaaataagccagtattctacccaaaacctcctaaaaccttcgctcctaacacttctttaaattcatgggaccctatttgctctgccaaagaagccaacatacaaagaaatcttgagaggtcccactggctcacttcgtacactcatgattttacaggtctggggcccatggacccccttgaactggatgattac

SEQ ID NO: 145659 - DNA, 558 bp, Homo Sapiens
gagggccaaaggctttaaaaaagagcagcaaaaggcagccagttttttttccgccttagccaggtcttggatctggaacaggccatcacttcaccaaagatgccttcaacaccgtttgtgagctttttgccaatgaacccagccaggaagtggactcagtcatggacctgttagtgctgtctcagggacaccagaccaacatcctggacatcatccacatacacaaggaagctcttaccaaagtcatggagagtaggcaacatgtggcagaagggaggacagaggtgcagaggctgataacgtcagaatcacaggaacaggattttttgggacactttggctgaaattcaccacttccatccaatttgagtgagagatatgaactcacagatgcaggatttcttgcaactagagatactattttttcaaaaagtcacccaggaattgatagtgttgaatgaatagatactcccctgtggactatttccagttcaaggatactttctgcagcagaataataacactagcaaagagctagtgctagctattggtggtagg

SEQ ID NO: 145660 - DNA, 745 bp, Homo Sapiens
ttttgaattttaaatgcttactttattatttacattgcacttatgcttgaaattatctcttttacatatttacttcttaccttattttactacttatttgtttattcacttattttttagtgatcttgccagttttgtttgtcatcattgtattaacagcctggtttatagaagacataaagtaattattaagttaataaatacattaactgttgcaaaagaaaagccattgctttgatacctataaaatgtaccaatatcttgaaattaaaaatgatggattattctgtgttctcagatgtcagcaattgacagaaccaaggcattccctggtcagggttaggcaaatacttagctgagtcctaggggtttcaaggcagtaaggtatgatggcttccagcttcaatgaaagcagttctcactcagcagcgtttcacagagaatgttctgcataagcttttgtttgaagaaagagttccattgcttaaaaacggggttggagtacagtggtaaaaaccactgttctagggaatttggagcaaatggtagccgaaatgagtttacatgctaagttatatttacttttccctttaaaagtcaatgtgctatcttattaatgtttttatactatagcgacataaaattatttctgccttggtttgaagatttgaatgatttatgctttttagaattttagagataaatgaaacacctaggcaagattcagaaaaccgtttacctttgg

SEQ ID NO: 145661 - DNA, 1219 bp, Homo Sapiens
ggcaaagactgactacagccaaactgtcacagcaactaacagtaatcaatattccaagctgactgctcccttcaacttctcttccctgccctcagtagaatatgagttattaaggagctaggcagtctttatccccaacactttttaaaatcactccaccacatgaacttctaacctgtccaaaagataaacaaggtattcaggttcacaacaaatggattaattcccaaaccctttaagtaaaacctattaggtttgggcataaaatgaaccaagtaaaagggtacaaagcagctctgaaagaaaagtacctgtaataaggaagttgccgtgttccctccaaagggttcactgtattttcggacccacatgatttaaaccaaggtctagctcatagaaagtaagtgtctgctgggtattagctgctgcttcccctgttggatcattgtctgtttcctcataatccatttccagacaagcaaacattggattttcaaatccgacatctactccaactacatgatacactaaagtgtttgctttgtgggcttccagggggagatgaaatggtaagtcgggctgcagcatctctgttcaaaatatacaccaatttctgtttctcaatggcactaatcataacggctcgccctttgggatccacagctaagaactggccaggaacgatgcgacggcatccactcttgccaaaggtttcttggtgaatcttctcaaacatattcttagatggctggtattccaaaataacaattcgaccagagtcactgccaactacaatgtagtctttggtgccacctgtcagcctaaaggccatgagtgaccggataacaccgaatacttccacagtgagtagggtatgtactttgccagtgttggggtctgggcgaagcagctccaagatcttcccacgggaaacaacaatttcttgttgtttggttccagaaaagtttccatgaatggcaaagctgatgccagtggctctctgcaaggttaagttgtacagaaacatggctgcaggaaacctgagccacccagacctccaggccttggttacaccaacagtacggagtccaagaaagcctgcagcgagaaggatggtgtggatatccaacggatgctacctcccttcaaaacttaagccaccaccaactccaacatactggcgtccgccattagaccggacgcgtgggcggacgcgtgg

SEQ ID NO: 145662 - DNA, 941 bp, Homo Sapiens
  misc_feature (23)..(23): n is a, c, g, or t
  misc_feature (312)..(312): n is a, c, g, or t
agggcgttttcattcatttaagncagcagtaaaatactgcctggtttatgccgcttattttcaccttacagtcttaatacacattccaagactgatgcgatattcattatttctttcggataactggaagaggagggggagtaaagctgtacaattaaacagtccacttgggtaattgagaaaaattcagcagtgaaataatatcatgagggcaccaaagagattttgccggggagggcagacaaaagagaaaacagccacagaacattaagccccggaagagatgagaatcggtcccatatacgtaactcngtcgactggacaaaaccccgcttgacgctgccggtgggtgaaacgaggtgatttgagattcagggcgttctcggctctttccctctctcgaatcgatcatctccaacaggaagtcagagcaaggcagggttcggagtcagagaaagctcccgggggagtctgtctaccacgacaacaaactcctaaggctccttccggagctccacagccctctgggcggcctctctagcgctgtacttcacgtccccgctccccaaaaaagtcgtgcaccccgacttcagctatccgcgttcaagagagtgcggcagcagttgggtcggccccctcagcggtcccgggccgtaagggacctggcggagcggctcagggaggctgagacggcggctacacgactttcattaccttctcgcgctgatcccagctgtactgctttggccgctcctcctcgttctcgggccgcgactccttgtcagccttccgtctcttggagaagaagcagcccatggtcccagcccgcggagctcgttggccagctcactagctcaggcacttcctagagtgtggcgtgaacctgggaaccccggcctcgcagctctccggacaacgccccgcggaccgcccaacggtcc

SEQ ID NO: 145663 - DNA, 597 bp, Homo Sapiens
tttccagtttggggagcactttattttccaaactcagaaagtcagagcccatatccctcatcttacaggtggggaaactgaggcttgggaaagggaatgtggtagctagtccctcatccctggagcctgctggcactgttctactcctcagggtgtctgggaaggggcattttggacccctgtgtttctggaggtgcatctgaacaagactgggcagtttgggaggctgctacaggcttagtagttggctctgagttcacagagctgggggtagcagagacaaggtgggaacccaggcaggttcgagctttcactaagcaccaaggtaagtgctaggaatgcagagatgaatcaggcagactcagtccctgtcctcaggagctcctggtctgttgatggagacaggcacgtaaaccgatggcaggagaggaacaaggaggcataccctgtggacgggcagggaaagcttcccagaggaggtggcacctggtcctggggagaaggggaaccacattcagatagtgggcccatggaggccagcaggcagggtcatgcacgagcagccctcatagtctcagccatgaccccatcctgagt

SEQ ID NO: 145664 - DNA, 555 bp, Homo Sapiens
  misc_feature (137)..(137): n is a, c, g, or t
atgatagtgagtagacttaaagtgagattttcagacaccttttagaccattggacatatccaaataaacattgatttctattagctgtatggattttacaaactaatataaagttattttaaagttttgtaacaaanagcattttccaagtttatagaatttggttgtcatgttctagttctctatataaaataccttgccaggctcagcaaaagtcatatttggatttgctaccatcccttaatgaggacataggtcattattaaaactatcagacatgcctgaatacaagatgacctaagtggaagccatgtggtcttttatgacccagcttcaaaagtcaaatataatgtcatttctgccatcctctatttgtcaaagcagttacaaatacccagattcaagaccttacctctcaatgggagcagtgccaaagaagttgtggcttttttgtaaaaccaccataataagccatgtcatatccatagaatgaaacaacatgatgctggaaaagaaattattaaactctatatacagttatggaaagatacactg

SEQ ID NO: 145665 - DNA, 596 bp, Homo Sapiens
  misc_feature (20)..(20): n is a, c, g, or t
  misc_feature (30)..(30): n is a, c, g, or t
  misc_feature (91)..(91): n is a, c, g, or t
  misc_feature (125)..(125): n is a, c, g, or t
ttttggtagatcctcagggntgagtcaggnaactcattattagcattatgattcatttctttggtgaccaaagcttcacatgatcagattntaacatttagtttcccttctgtttccatgggttntgcatccaaagttggccaatcagtgctgtagtctatttcctttgggtgggagggtttcttcagtatcgtcccttcagagttcaccagaaagatgttactggcccctaccacttaccgaaagttagcctttgggtgggggttttctgcactatagtcccttcagtggtcaccagaaagatgctacaggaaaggagtcccaattcagaccccaacagaaggtttttggatcttctgcaagaaataattcaggccaagtctccttcctcctgggcatgtagctacaattcatttcccagcctcatttgcagtttggtatgtccacatgactaaattctgaccaatgccacatagcaagaggatggtagaccaagcagcgttcaccacttctgcatttggtgctgagcgttagttgatatttatactctccctcctctgcctgtgttctagattcccctcagccacacccaacag

SEQ ID NO: 145666 - DNA, 554 bp, Homo Sapiens
  misc_feature (541)..(541): n is a, c, g, or t
gcaagcggatagctgacatgccacgggtgtttgtgtttcgtgcccttttgttggtcctcatctttctctttgtggtttcctattggcttttttacggggtccgcattttggactctcgggaccggaattaccagggcattgtgcaatatgcagtctcccttgtggatgccctcctcttcatccattacctggccatcgtcctgctggagctcaggcagctgcagcccatgttcacgctgcaggtggtccgctccaccgatggcgagtcccgcttctacagcctgggacacctgagtatccagcgagcagcattggtggtcctagaaaattactacaaagatttcaccatctataacccaaacctcctaacagcctccaaattccgagcagccaagcatatggccgggctgaaagtctacaatgtagatggccccagtaacaatgccactggccagtcccgggccatgattgctgcagctgctcggcgcagggactcaagccacaacgagttgtattatgaagatgcctaacatgaacgggnagtgaagaagcgg

SEQ ID NO: 145667 - DNA, 728 bp, Homo Sapiens
gctctgctgttctctcccagttcattccttcagtcagatataatgcaaaccccgaaaggatcaagtgaaaaccagctgattgcaggccagccctttggaagcacagccaggaagaccatccccaaggagcaggtttcgtctgcccaagacctggacaccgtctggtctctgggggtgagattgatgcttggccacactcttgtcttgagggaaggggtgaatgggccacagttctgagaccttcagtgacttgtcttatctttagaaggtggagggttgtggtctcgggacttcaggggcttttccagtcctttaagcttagggtataatccccaaagtgtcagaaccatgttcctgcatggggcttccatagtcctgggagataggctgcaggtcacccacagccagggcaggttcccgaggtccgtgggccagcccagcaggaggaaggccaagtcggggcaggagctgaccgtggatctggatgacttgatttgttcaaatgtctaggcttcctccagtgtcccgttcctagaggtcaggcccctgttggagtgctgggccagcacatggcatctccctttctctaatgcaaatcgcaccactgtcccgcaggctgaaagcctcggtgcactcaggacaagagtccacgcttcttaaacaaacggtcgacgttgtccgcgacctggcccggcccaacgggtcagaccgtcattggccatctcaca

SEQ ID NO: 145668 - DNA, 581 bp, Homo Sapiens
  misc_feature (416)..(416): n is a, c, g, or t
  misc_feature (496)..(496): n is a, c, g, or t
tggcatatctttgcactttcccacttcccaaatgcacaacagtcttaaggatctttcaaaactaataggtaaaacagattcacctcaaacacacctgagatgcaaagagagccctttgtgcagttatgacagcataataaattaaacaaccaaatgctttcaaagcaactgggagacacagaagctacagagggaaatgacaacattcatttccatttggctgttgtagtggacgtttgttttcttttatccagaattcattccctttctaccaaaaacagctttctgatttttctcaacaaggcatgtcctctaccaccttaaaatcttgcacttctggttgggtaacctcaccccttttcagggttggaacctttaacttaaatgtgctgcatcacagcatctgattcctcagngtcgcactggggaattctgttgaaccatgaattctccatgaactaatgatccagcagagccagtgaaatatagcaagagntttctgggatgcttggatatattgtggtggcctcaaaatggggcaggcatataaatatgtagcctccaagggctaccacagataa

SEQ ID NO: 145669 - DNA, 482 bp, Homo Sapiens
  misc_feature (468)..(468): n is a, c, g, or t
ggtctgagcactgttttcaaatatttgaagggctgtcatgttgtaagatgaattagatttacttggtgcagctccaaagacctgactcatcaccatggtggttagaagttagttcaagacagatttgaggctcaagagcaagaactttccaaaaagtagagaggattacaaattgaccggaaggcagtgaactccctgttattgcaagaattctgacttcacagccaaagggaggtcttaccagggtgacccctggctctcaaagcatatcttctgcctgactgtactgcctgcaaagtgcactgatgcttcttttcctaaggggcaactcacttacgtccccttgtgactttctttacttcgattctgaagctgatgagagaactcaagaagcagaaatgcagggcaggccttcctttgaatggcctttttccaattagtaaaatgtttgccctggtgactctttgnctttcttctcctac

SEQ ID NO: 145670 - DNA, 527 bp, Homo Sapiens
tttaaggtctgtttctttattaacatagtgtatttaagcagaaatgagttaagtcattttctatagagaactacagtggagtttttctctgttgaggtcacagaattttttcagactctggaaataactcagcttctggtgtgcacagactagagatgtgctgtaggaatgtgctcagcctgccccgcgggtgatatgagcccagcaccgcaatgctctgggaggttttggaaggatgctaaagctatagatggatattttatgcatcacttaataagggagaaggagtttgccttaggcagttttctttaaaagtctcattgctctaggcacaaaagttagcatttcaaagttaccttggccggccggcaggtttggtacggcgcatcctgtagacatgcctagcagcacacactcaggtgggggctcatggtgattagtagattcagcatcatgctcaaagggcccagttgcataaactgttttttgtcttaaatgatgtgctgctgactatggcagtatgtaag

SEQ ID NO: 145671 - DNA, 496 bp, Homo Sapiens
agagtggcagcccaggcaggtgcagtgaccagagagcagccctggggctgttggaggagcccctgggagcctccatctcccgagtgagcccagcaggactgtgacccgttcggccaggtgtcctacaggggctgctgggctcagctacagatgggcgagaccgcagcatagtgggcgcccagcgggaagaaccagggagggacaaagtgagtttgcaggtgctggagaggctctcttcttgatgtcggtgctgaaccagaagtgtgtttaaggagaatttcctaaaattcaaagagttccacgggagtcgcggctaggccggggcgcttcttcagcatctacctgctctaaggcctgaacccccgtcatcagggccacgtttatatggggttcactgtcagccctgcttgtcaggtccagcagcacaatggggaccacacaaaaggcagggcccaggcctggcgcggtggctcaagcctgtaaacccaacacattg

SEQ ID NO: 145672 - DNA, 858 bp, Homo Sapiens
cctcagaagctttataaatatgcattaaaaaattattttttgggtatactctggcagaaatacaagaaaaacaaaggcccagaatttttccaggagaatagatccagagcgaacatgatacttacttcacacccagattgagtttcccatgaacatgactcgttctcctgagggagaacccctctttggaaagcatgttcacccaggcatgtttgacacaaggaagactcgaagtctggctcccctggagggatgtgcaccatggaggagccggtgtacttcaggctgggactctgatgcttgtccacactgaccattgggctcttgatccaccttcgtacccgcttcttaaaaaattggaaggctgagcatttcttgactgggaatccattcatgtctttgtttaccattttccaccgtggggaattcacagttatagatccaggttggcacccgcctggttagtgcatatctgtttccccggtttacctcctgcagacagttaatgaagactgagcgggatggagaatctagcggggctcagttcttcactcgcgcattctgcagcaccagctactgcagcaacctctccccactttcagttgccaccgacagcggcttttctccttccatcattgctccgaaacatatgcatcaccgctgcaggaccctgggggccggacggtgggatacggccaatctccggggagatgctgtggctcttaccgagcgggagaagggtacgcctccccgcccccagctacctggctgctcttccgcggccggcgcggggagcgagtcgctcttctccaggtgatgcgctcctggaggcggcttgagagaggagagttgtttttg

SEQ ID NO: 145673 - DNA, 598 bp, Homo Sapiens
taggttcttgtgttgttcgagatgccactggaaacgttaatgacactatcgtaacagagctaacaaactgtacttctgcagcctgcaaattaaactttgatttttcatcttgtgaaagcagtccttgttcctatggcctaatgaacaacttccaggtaatgagtatggtgtcaggatttacaccactaatttctgcaggtatattttcagccactctttcttcagcattagcatccctagtgagtgctcccaaaatatttcaggctctatgtaaggacaacatctacccagctttccagatgtttgctaaaggttatgggaaaaataatgaacctcttcgtggctacatcttaacattcttaattgcacttggattcatcttaattgctgaactgaatgttattgcaccaattatctcaaacttcttccttgcatcatatgcattgatcaatttttcagtattccatgcatcacttgcaaaatctccaggatggcgtcctgcattcaaatactacaacatgtggatatcacttcttggagcaattctttgttgcatagtaatgttcgtcattaactggtaggatgctgtaaggtccgt

SEQ ID NO: 145674 - DNA, 340 bp, Homo Sapiens
gagactccgtctctaaataaataaataaaataaagtaattatgaaatatgactatgacaaggtaaaaaataacaggaatcttttaaacccaatttttttaacaatggggaagtagttgggctgcatatgtgttcatccctgaatgttttctcttgttagaaaaataagaggctgcttttcctatcctcttcacactggctttgcaaagactaactgctccatcatccagtcccaaactggccagcaactttacttcatgaggcacagctgccaacacatgtattgaattctctcatggaaatcaccctgacactgaagtcaggacaaacattgcagcttt

SEQ ID NO: 145675 - DNA, 1396 bp, Homo Sapiens
  misc_feature (129)..(188): n is a, c, g, or t
tttaggtatttttgtttttctttactctattagtttcaaagtgaaaggtaacttaatttctttcacaatagcaaccaaatctttgaagtgactattaatacatttcacaggaaaagagcaagatcagtnnnnnnnnnnnnnnnnnnnnnnnnnnnnnnnnnnnnnnnnnnnnnnnnnnnnnnnnnnnngtgtgtatacatacatttatctgtcctgaaggacataaaaactgaataaatagataaatcatgttcatattgggttctctgaagggccccaaataaatagcacaatttccccccatctaaacgataaaaaattaagtagcagacagggggcaggccatgtctgctacttaatttccccccatctaaacgataaaaaattaagtagcagacagggggcaggatgaaacttttattactgatcaaattgagttggaggatgcaacttagtgtgaccattcagctaatgggccaattagctgaatgacagaattagaccaatttaccaatcacaggcaatatctgtgacaagaaattatacttgcaggtcagcccacaatgaagagggagttcagctgagcaaacccagttacccatcactatcttaccaactagataagcccacttccttcatgcctggggcagaatgcataatgtggcagagaagctaggaatgggtatagggaaaatcccactcatggaaatcagaacttgaatggtaaacatttcccaataaccccataaaagtggcaatcctacctcatcatatatatccatataatgtaatcctaatcagcatcccaggcgccttttgttctcagaatttgatcagtgacttctaaacaatacctctaatgaacatgttgattaggaaatccaagagatttttgaaaacatactaattgacataaaccactggtagatggggttgagtggatattacagaatactaaaaccagagaaataaacactttttggattcaaccatcatccaaattctctttgttgttcaagaatgcttattttcccatgtttttcctactgcaattgccgtcttcttgacttagctgaaagcttcaggatcatgaactagttatcctgtgcctatcttccattagaaaggtcttaggaagggctttcactggctcagctttacaaaatgctcacctggggtataattaccatgggtgcatagagtacaatggttagttctcctgagttgtcacctttgcagataaaggtatacagtccactactagaagactatggagttagcagacaacaaaaaatctgccaaatctgaaaatacaccataaattgagaaactgtaacttactcaactatcaaacaatggtattgatttgaaatgaaggtcagatcctcacacctcg

SEQ ID NO: 145676 - DNA, 408 bp, Homo Sapiens
ttagtttatggctagcactgtgctaagcattgtcgaagatagaaatgatgcttcataactggtcttggctcttgcttgagcttattcttttttaaggagacaagacttggttgcagttgtggaaaaggtgggcagtgacatcagatgtcacctttagaacaccaggcagaccatgagtggatcagactcacagtgacagagctcacagagactaatgtatataagcttcagtgtgctgtgtcacaaatttctttgtacgcctcttgggctaccgtggttttctttaaatagtcctattcagccttgtcagatatttcagtactaatcgaattttctttcttgtaggtacggaatggccacatcaaaagaatcactgataatgacatccagtccctggtgctagagaat

SEQ ID NO: 145677 - DNA, 547 bp, Homo Sapiens
  misc_feature (531)..(531): n is a, c, g, or t
cttaaattaatacaggatttatttgtcttttctctgtcaaaccctgagccaaccacgttcctgtaatcagttaactctctgtaatagctcgatacattacatgtttaagatgtactctaactgtattaggtgctttatatctattatctcttaatccttagaataactccataagataggtatccaggtgccagagcaagagtcttttgctcaaggattattgccttaggcctagttatcacacatctgagataaagcagattggccaaagcccttccctaaaaccttagtgggcagggaaatcttcatttgcaatcagccctacactcagtcagcaagtctctaccccaacatagagatgaaaagtactgtttcaccaacccctctccactacatattaagacccatcctgaaaaagaaaacaacaaaatgaagaaatgttacctgattttgtatttatgcatcatacaactgtgaggttgatctcccgcttgcccaggttgtaggccagagccgccatcttggttcctnccatgacaacagtgcg

SEQ ID NO: 145678 - DNA, 837 bp, Homo Sapiens
  misc_feature (71)..(71): n is a, c, g, or t
  misc_feature (78)..(78): n is a, c, g, or t
  misc_feature (80)..(80): n is a, c, g, or t
  misc_feature (123)..(123): n is a, c, g, or t
  misc_feature (259)..(259): n is a, c, g, or t
  misc_feature (305)..(305): n is a, c, g, or t
ttggctgtgagggcgaggaaaaggggatagcaaatgacttccagctcctagccttgaacaggttggtgagntgcagantnagggcagtaaaagtcacagaaaagtggtcttaacgtagtaacnctcctttaatcaacatatgcattcttccagagaaaagtaagaaatagtttttttcctctgggactggttagaatcttacgagaaaagtatccagacttcttgccagtggtgcttgcacatcaaagggcgtggcganaggattatgttacgagcctctcatctgggggttcacaactgtgatntgcaggctgcaacttgcttctaaacagagctaatttttcttgcatttttcaactgggattttctccacagaattcctacttttcatatttgaaaaatcaagatgatttgctaatattctgacatgacaacaactggctaaaattgaggggtgaccttctccttccgaaggcatctgcacctttggttcaccacaaacctcaccactccctaatgtctatctcgactgcagactgagtcctcagtgactgccatgttgcagggcccctgtgcgataagtgcagggacatggaagtctgagaccacagagcacatgggtgatcacggctgtaaacacacaatccatcttccctaattgccaaggaggcttgaatttcctccaaggtgctccaccagctgcctttcccctggtagtgctcccaggccatagctgctctccccacccagtgtatgctggtgtcttggttggattgaactcaacactgcaccctgtaccaaggagtcctgcaggttaactgcagcctatcaactatt

SEQ ID NO: 145679 - DNA, 1057 bp, Homo Sapiens
  misc_feature (857)..(857): n is a, c, g, or t
ctttataattgtttttaatataggaaaagtatagggtgctaaagatcaatttgtggctttcttttccaatgaactgctaaagttccacttttatgcccaagattcttatcatacttttgtaagatcaagaacaacatgtgaagtttccactattatatatccacccattatatgtagttgtactggaaaaaattaaaagctgataacttttaatttgaagatgatggtatatactatgtatatatattaaggtgcttaaagataaatcctagcacctgaggaggtgtagaaatcattcaaactctttgattacaatgacaaactagtcagtaacttactaaatattgtactatatattactaagtattttactcttcaacatagctttttaaagacacaaagcttttcaaaattcctgcttacctgggagtaaaatttggggaagcagatttctccagtgtttaaagaagccaatttggcagtgtaccagagttgaatacatttttcccatcacaagggaatacatttttcccatctaagttaagttgtttttctctggtaaaggaggaaatcaacacccatctgtacggagataaacgtttcagagtgtttttatattaaataattagtatactagtctagtaagtgataatccacgaataagttaagaagagctaagaaagaaaaagaaaagcatccatccatcctttggttgcaaataatacttacattagcgtatggcaaaatttaattttgtacagagtaatttaacccaggattgctgactttttaagagctgagaaagcatagctatggagcgcaaggccccacccagcagggtctaagtattccgtctncaaaactggcaggccaccaacggccgcgtcccaggtcggcctgaaggatgcatgataaccgggagccccgccctgggttcggctattccgggcaccccgggccggcggggcgaggctctccaattgctgggccagagcgggacccttcctttccgcaccctcctgggtatctaccggtcttcaggcctccttcggagagc

SEQ ID NO: 145680 - DNA, 437 bp, Homo Sapiens
ttgcacttgttgagttgtttattagcccaaaggcacacatttctaatggtgggattttagcagaggaattgaaggctcccgagattaaggaacagtggctgtttagggtgactgtcaggccagcactcatcacagatacacagtataagggcatggagtttttcacatgccaaatgatgcttcaacagggagctgttttctttcaacagggcaatgccttccagggccctcgggaagcagatgttgtggcaagagaggaggtcactgaattgatccaactccaggcggaaaggatttcggccttaaaggaggagattgctcttttgcgtaggaaaggcggtcttatcctcccacccattcagtctccacgagagaaagagatacagcccgcagacctttgagtttgctattttctcaaacccatacaagatttctga

SEQ ID NO: 145681 - DNA, 1082 bp, Homo Sapiens
  misc_feature (780)..(809): n is a, c, g, or t
tttttgtattttcattttatttaaccataagtcacacacttaatatttaacttattggtcctatccatttaaattaaattactaaacctcattttataagttactaaatctcatgttatataaataatagaaataacactttaagtcatctattgttcatctcatactaatcatcaattaagtctatccaaattcttccagaataaggagggaactaatagcatcatttgcaggttacagactgataaactgaagtgcttcttgggaaatatttaatataggtcttaagaagagagccagactcctgaattgcagcatgttccgtgtttcggattggataacagaacagggcctggggccagagttgaggcagggcacattttggtcccacaattagctgatcagcctcgtgactgaggttaacacataaatcacacctggataagcacctccacacatcctatgcaactctgtgggaatttttaatacagctagagagggattccagtatacaggttacaacaagtcaaaacatttcacagtagtctaaatagctgaagagtttaattatgcaaaaaaatccttctttcctttgagaacaacagcttctttccaaaatagctgctgtggttcttttacaaatataatataaaaggtgcctcatctctaacccagctttgaagtaatgctatccagaggcagccctattgacccgctttccttatggcaaagtggactcgcgtcctacctggccagtaatttagcacttagcaactgacnnnnnnnnnnnnnnnnnnnnnnnnnnnnnnggttttggtaacaggaatgtactttcctgctaagacagtttatgcatgtttttacaaaataaacttattttaaaataaatgtagaaggaatatttagctttcattttctgttagggatgaagaccttcactggttcactgaccttcctcttcttcctggagcactcagaacttgctgactgcacacaaaattcattctttgaatatggtcattgcattcttcttcctcatcacagtctagaccctgatgggcgatctcagtagtgctgttctc

SEQ ID NO: 145682 - DNA, 429 bp, Homo Sapiens
  misc_feature (213)..(213): n is a, c, g, or t
aaagaaagaaagaaattagaagcagatggggcagttcagcctcttctcgcggaggcggggctagacggagtcaggggcggaccgccacagcctgcaccaatcaggacccggttgattggcagagcctggcgacttcgaagactcgcccccagtcaaagagccccggggattcgtttccgtatgcagcctggaaaccagcctgggcctatcctngcgcgccgctgcgggctactattggctgccaagaaaccccgcccatcttcctgctcattggccggtgcggtttacgtaagaggagcctgttgctgagcgaaaagtctgttctgcaattttcgctaaggagttgttaacgctgaaaccgcactgggcgtcctggggtcaaaaaaacaaaactagccacagtttattaaactgcaactaaatgccaaa

SEQ ID NO: 145683 - DNA, 751 bp, Homo Sapiens
  misc_feature (567)..(568): n is a, c, g, or t
  misc_feature (576)..(576): n is a, c, g, or t
  misc_feature (578)..(579): n is a, c, g, or t
  misc_feature (581)..(583): n is a, c, g, or t
  misc_feature (585)..(586): n is a, c, g, or t
  misc_feature (591)..(594): n is a, c, g, or t
gggactactgagcgccgggcgcgttccgttggcggcggattcgaacgttcggactgaggtttttctgcctgaagaagcgtcatacggaccggattgttttcgctggcccagtgtccccggagcttgtgtgcgatacagagagcacctcggaagctgaggcagctggtacttgacagagaggatggcgctgtcgaccatagtctcccagaggaagcagataaagcggaaggctccccgtggctttctaaagcgagtcttcaagcgaaagaagcctcaacttcgtctggagaaaagtggtgacttattggtccatctgaactgtttactgtttgttcatcgattagcagaagagtccaggacaaacgcttgtgcgagtaaatgtagagtcattaacaaggagcatgtactggccgcagcaaaggtaattctaaagaagagcagaggttagaagtcaaagaacatattcttgaaagttatgatgcattcttttgggtggtaacagatcataaagacattttttacacatcagttaatatgggattattaaatattggctataagtgatcnnccccaccnanncnnnannccgannnnccgtgtcgggccgcctcggcccctgaaaaacctttctaaacccttcgttttggcgccgcgggcccccggtaggtaagggaaccatgggtcataggctgttttcctaaggaagatcctgggccatggaactaggtgctttggaattcctcccccaaat

SEQ ID NO: 145684 - DNA, 578 bp, Homo Sapiens
ggaaaaaacttttataagagaattggaaatttggacagtatcttggcagtaacctcctccatatatttccttggccctcagcttacatctagcaaaatgactctactggttccaggcttcacatgcatacaacatggtgttggaggaacagagatgttttctcttcctggtgttttcccagacatttcttagctggcatttcaaacaagggtcctgaaattcaccctggttgggtcgtgttctccccttcccattccccatccccaccctcaaccgaaaaatgatgtaagcaggggaaattgaatgtaccaatgtttgtttttaaacaagccacagacccctccccaactccccgactgaagcttgaagtgggatcagctttccctaaagtacttgagcttatggtaaagcatatatgttatccaagttaaagtctggacgctgttagtaatgggaaggcaagtaatgaatgttagctatggagccaacagacagtgtccactccattgtctttaaggcccaactaaagataacctctttaccatgtcggtttatttaatcaattatttattcaggga

SEQ ID NO: 145685 - DNA, 680 bp, Homo Sapiens
  misc_feature (598)..(607): n is a, c, g, or t
ttaacagtttacaataataaaactttatttaatgttttaataaacgttttgaaaaaggatgaatcatgaaatggtcctctggatctgtttttcctctttatgaaatagagagcaggtaatcaacagttacattgagactttcacacattaaggaggataatgaggagagagaacaattcagtccaaaacacttttcctaaaggccaaatattaggaaagactagagagtgattgtcagaaattccataacaatggacacaaacattagcccttatatattcaaatccttagtttatctttatgcttggtcacccatggtagcatacatattagatcctgcaacgccttctggcctgaagctagcctttcctttaacaaagatcgttcagtggtctgttaattagaagcactgggaggaactcgatattgtgttcattaaatatttcttttggagaaaaatcgttaaacagtccataaatgaaaatgactaaaggcattccatttcactgggatcaggcttaataatcagcccagcagtcattaaaatcttcatggtaaatccttttaagtctgcatctttactctgtcataggactgnnnnnnnnnncttcaaagtcatttatgtatttgggagaaagcccccatccaaccagtttttaaaaatataaatacatattttt

SEQ ID NO: 145686 - DNA, 349 bp, Homo Sapiens
tttgcagctgaactctcatttattggtgtagattcaggatctagagtggtgcatgcaattcttggagctcaaccaatggttgttaagttagtggataaataaaatgctgacttgatgtagcatcagcatcatggggtaaaacattgtatctcaatcttacttcaaaggagattttggtcaaggctccgctataaacaaaaatcttccttctcttaacatgtaaagtctatttactaacttgtaaagacccctttctaacttggagagggtgaaggcctgacaagataagacagaaggcaggttatctgagggaactcttgagtagaaaaggaaattgacagcccaaagc

SEQ ID NO: 145687 - DNA, 860 bp, Homo Sapiens
  misc_feature (444)..(444): n is a, c, g, or t
tttattaacccatagacacgtttattttatctgtatcttcatgcattctccacgccccactcttcatacataaaggatcattttgaatcaaatcccacatctcacatcatttcacttgtaaatatttcagtaggtagctcttctgagggcaggtccaaatccataatgtctgcaattccaagtttctgaaagcttgggccactgaggtgtcaaatttgatgtcaaagtcgaagactgcagtcctggttcagtttcaaataagggactgtgatgccacgaagcagaacgaagactgagcctggatcacaatgcaatggcctggcatgaggttggggaaaggatgtgcaaagacacagaggagtgagaaggccacaggtgttcagagggcgatgagcaaatccgtgaggctccagcatgtgggctgccaggtgccagatgatgagngggttcatgtgccaagcccaggagtttggactggatcctggaagtgaaggacgtctaaaggaggttcttttgtgttgttgtcagagcttcaagccacatgcacataaaattgcagactgctacttttggtatttttagtcttgtctaaagctcagttgtatggtcctttctgatccaaacaagattaagatggcccattcatcacttgtcaagaggaggtctgaaatcctaggaagggggaacttggaatcaatcattcagtcaacgcttgtacagatcattctgaaaatgcccagtgaggttgcaggaaaccttgatcttttcccacagtcacctgggacccaggcatataatgtgggcagtttaatgaggtgtaaacgaagtgcaaatggcctagaagccccttgaatgtgaag

SEQ ID NO: 145688 - DNA, 768 bp, Homo Sapiens
  misc_feature (100)..(100): n is a, c, g, or t
tggtaagtgaaagaagccaactgaaaaggctacatactatatgactccaactacatggcattctggaaaaggcaaaacgatggagccagtaaaaagatcngggggttgccatgggccttaagatggggggagggaggagtggggagagggaacgaggaaggagtgggtagaacataaaagatttttagggaagtgaaactatcctgtatgatactggtaataggggaaacatgtcattacacatgttaaagtccatagaatacataacacaaagtaaactataaaattagttaataataatatatcaatattcactcctttgtaataaatgtaccacactaacacaatatgttaatgaggtggaaactgttgggatgaagaaggtatatgggaactcactgttttctgctcaattttctgtatatctaaaaaatgaagtcttttaatttagaaaaatatatctaagctatattttaaggccttaatactgtgacattaaagtgtttagacacctaaataggacacacgtattttacagttatcatgggcattttttcacattagcaaagagaggtgtaattctggcagaaatgctcagcagaatgtcatctagaatttgctttaaaataatccagttggagatgaaaggatagcaaagaggcctagatgaaaccagatgggccatttgtttctaattatagaagctgagtgttaaatatgtacaaatttattatactatgctccctatttttatgtgcttcagaacgt

SEQ ID NO: 145689 - DNA, 485 bp, Homo Sapiens
ttgttgcataatcaagatttttgcaattcatctgccaacacttgcagtaacaccagtaatgaatgaatggtgttgccccaaaatacagagtccaggcatattttaggtatccctttaagagagttggtttgacagattcttgcagagaacatccagaaataaataaataagcccacaaacaggggaacaattgtttgttgaaccttggcattaagccaataatcttgatgtttgctcattcaacacaaactgggtaaatacagagagtaaaacaccaatgctcagggtaataactcagagaacggcagtgtaacagtaaatttagctataataatctcatagaattataagacttccatttacatctatgttaagaagcagttctgaactgcatttagtatattgtatagagtcctaatactgtgctgcagcaatttaatggggcatgtgtacaaatgtagaagacaatgacttgtctgtaatgg

SEQ ID NO: 145690 - DNA, 647 bp, Homo Sapiens
  misc_feature (423)..(423): n is a, c, g, or t
  misc_feature (466)..(466): n is a, c, g, or t
  misc_feature (534)..(534): n is a, c, g, or t
  misc_feature (549)..(549): n is a, c, g, or t
tcgcgcatgtcagtggacgtgccgtctggaaattgttgccgtgtggtacattttgtgccagtgcggtctattcctgctcatgatgtggttttttctacattcagactggaacatttggtagcctagagatactcagaaataggcaaagaaaggtaaaacccgaggaggggagattgaagtcatacttccattatccctccccgtggttatcagattcataaaatttttacaccatcaaaagacatttttagccatatatgtttcctttatgtagaaaatgagatctcctatactcagttggcatttgttttcatgtatctgataagtacctgttagaattataggtcaagatgttgtctagctctggtaacctagatcctgaacttcaaagcagagttcttggaccttaagaaattcaaattngtagaattatagttaggatgtcatttactgaccttgaacaacncattgtttaggtagcatacaatgggactagttcaaggggctgggtggagaacaagttacaattttttntgatggagaacattnctggagacagtaccctttaaaactttcattccctttttattagcagctaacgtcttgtatgcctttactatgtgacaagcaataaaataatgtcctgg

SEQ ID NO: 145691 - DNA, 537 bp, Homo Sapiens
ggcttcccagccccaccactggcagagcacggagtggcaggggctgtggcagtatttcccaaggaccatagttccctccttcaagggaccctggctgagcattttggggtactcccaggacccagggaccacgggggccccacccaacgggacctcaacggccctggccttagccgtgtacgagagagcctcaccctaccctcccattctctggaacacctgggcccaccccatggaggaggaggtgggggaggcagcaacagcagcagtggcccccccttgggtccctcacacagagacaccatcagccggagtggtataatcttacggagtccccggccagactttcggcctagggaactttttctcagcagagacccatttcacagtttaaagagacccaggccaccttttgctaggggccctccgttctttgcaccaaaacgcccattcttccctcccaggtactgatggaaaccaagggaaaggcattttgaacagtctagagaacattggaagtaggagtttggtttattg

SEQ ID NO: 145692 - DNA, 735 bp, Homo Sapiens
  misc_feature (442)..(442): n is a, c, g, or t
  misc_feature (452)..(452): n is a, c, g, or t
  misc_feature (663)..(663): n is a, c, g, or t
  misc_feature (674)..(674): n is a, c, g, or t
tttttaaaaataaaagcatgtagtctttatttttttgtgttcatttgtatttttatgtatgcgtgcatatgtctgtgtttgaacattgtctacatggtactgaatagacttataaataaaggagtactcataaattaagtaaataagcccaaatgcttttcaggtcaatgggactttagtcatgttgggtaaataaagctagtttttaaaatcattagtaaaataaaattgaaatttcttcggaatttaatttagacagttttacctggttctattagcagacaggtttatattgtctctgatagatgttttcatgtcataaaactgttgcctttgtgatattttttgatacctgcttaattttttcatgagcctgtgagctgggctttgaaccttttgatgctggcgtctagataagtggccatggtgaggcctggagacnccgtcctccncagcccagccgtgtctcttggccttgctagaagggatcagatcctccaggcactgttttcacagctccgtcctttgtccagggctctgcatctggatgcaagggccgctgggcgggtaggtgccccatggctggtagcagcttccagcaaacactctccactgtgcagccagccagctctgtcctagcaggaatgcgttcccttgggcctnttcctcctgtntcagctgtcacatgcagattgtccacagcagggacttgaaagccctcaaaatgtccccaag

SEQ ID NO: 145693 - DNA, 786 bp, Homo Sapiens
  misc_feature (23)..(23): n is a, c, g, or t
  misc_feature (316)..(324): n is a, c, g, or t
atatttcccattcacaaaggaancaatcattgagatagtctaatctttaaggacaatggtgtcagatctcaaagcagttttatcaactgatacacagccaaaatgttttaattctctgtaatcattgggatagtctaatctttaagtacaatggagacagatctcaaagcagttttatcaactgatacacagccaaaatgttttaattctctagaaacgctggttactagtaatgtccatcacctcccagcaagtcacatcaggtatccccaaaacaggatatgcggcggaggaaggtaggatgggagagaagacnnnnnnnnnggatttctccatttaataatcagggagagtcaaaggcaaaaacgttaacaataataacaaaaacgcctgttactgtggtgtttttctttccacaacatcctacaccagaggtggctacatttcaagaatggtggaaaaggagcagtctccagtttgtgacatcagtttgcaaagcaatttaagggctgtccacaaggttaagggtttgaagaaactgggcattcctgtaccattatgagaagagtgaacaaataccccagtgctctagtgacgtcccttaagcgtaaatacaccctatgggggcctccatgtccagcttcccaaataacacaattgtttggggtacccaaactacagtataaacaggaagctaaagacagcagcaaaaacatattccaagaactgggttggtgagaaagaagggagggtaataagaggagctacaaagagccggaaacggag

SEQ ID NO: 145694 - DNA, 616 bp, Homo Sapiens
cgataacgcctaaatagcattgtttatttgttattgacttcaccttgtatttgcctgtctttgtgcctcagtctctaaaatgagcacaaaatcaacattcaagggagataagtgtgcactggcctggggagtggggggagacagcttcaatctgtcaaacagcctattccatgtgagaaatgtcagcagatagaaatggattaagtctgccactgagttggttacaatccagaggtgagggtctttggagtgacctttatttaagaaatatcacagcaaagtctgttggaaagacgctctggtgaatgatggagcctgatgcacggtgtgttcactgggctctccggaaaaagagccagcaggaggtgtccatatcctacatacagagaaagaggttgagtttaaggaattggctaatgtgatcctgaaggctagcaagtccaaaatctgcaggctgggcaggttcgagacccagggaggagccggcgctgccgttcaagtctgaaggtcatggagctggagaggggaggagccagtgctgccgttcaagtctgaaggtcatggagctgaagacccagggaaaagttggtgctgccattcaagtctgaatatcgtg

SEQ ID NO: 145695 - DNA, 570 bp, Homo Sapiens
tttttcacagcagcaagaacgtttattataaaaataggtgaataaaataagtgtgctttaacttccggctggatgacaaatgctactgaaatgcagtttctcagtgcagacatgtggctcgcaatggcgggggtggccaccctagtgtgacgtgcagccgcaatactccatttgactggttcgaggcagagaggcgacgctttattccatagaacaggatggggctcccaccctggggaccatacaagtgactccctcaggcagccacccctttctaggcaggctgggggaggggctggcacaccagcaccagatagctctggcttaagcctgatggagacacagactgggacctccctctgccagatgttcctgaccccatctccacctccagcctccagcctcactggcagttccctgtgacccagcctgttccatagccaaagggaccaaagtgaacgatcagagtgccccgcaactattctaggggccttgctctcagtagagctaaaccatggcatctgagagcacccacctgtccctgaggcagctgcacgggccaggaggcaa

SEQ ID NO: 145696 - DNA, 545 bp, Homo Sapiens
  misc_feature (294)..(303): n is a, c, g, or t
agatagactgagacacggttccagactgaaggagaaaaaaggcatgttattgtaaatataagatgtgatcctggattgaatccttctttagagatccacccttggcactggaggatttcttcaatgaggtagaatgtcatcacagttttaaactccattcttctgaggtgcagttctctgcaacagtcattccacagagaaaagcctgaggtagctcactggactttcaacaataagctgcaaaagatgctgagaaatacagtccatgcttttgttgtccataggctgagcttnnnnnnnnnntcctcttaatgccaggcacttggttgttttttccttcttgactaaccagatttcagtttctctgtgtagaccattcattcccactgagtttcttggtggggtggtgggggcgggggcgatgaatgggaaagtggaattgccattaatgttccagctgctttctgaaaccaaggcactcctggggtgtgaggatgggtgttcattcctagatctttccgagcggccctttccctcagtatgtt

SEQ ID NO: 145697 - DNA, 748 bp, Homo Sapiens
  misc_feature (251)..(264): n is a, c, g, or t
cgtgcatgctcacggcactggccaagtgtgtcctcaaagcagcttgactctctaaccttgagtaaactcagcaatccagggcccatgacaaatgcgcagtaaggacgacgttacaacagaggcgttgcttgatttattgtgtcttatgaaatagaaacctcttcacatcatgggaattagtgatggaattttaaaaagaataacaaaatgaaatcaggaacggaagaaaaaaaatgcctgagtccaactcnnnnnnnnnnnnnncctttctaataaaaaatgcaaaccagatgcagttagagatgactgataattaaggatgataaatgactaatgttttctattgaattaccaagtgcacagcattgttcctacatgagggaatgatttacatatggctgctgggctatcttttcgcctaaatttgatttcacaggcaattttcccattctcaaagtgccctctctctcccagagtcttgcatttccctcaggaaagtgactcttacctttcagaggtctcttttataagaatggatgggctagattgtgagtaaatattctctccaatgagcataaaatttatgcaatgaagccacagtaagtagaatacaaaccctgtttcctcagtggggtgatgcattagcacagagctacccatattcccaaaccccagtctgtcttgaaactaaggatgtgtcttgttcagcagggggataggtacacagtctatgattaagcatttcttt

SEQ ID NO: 145698 - DNA, 696 bp, Homo Sapiens
  misc_feature (584)..(592): n is a, c, g, or t
ctgaagtggcaaaatcctacagcaaaatgtctaaggtctgtgcaagttctctgggtgctgaaaaccgtgctcctagtcttgtgccatgtcatggcaaaggaatctaactcctagccacgcaacgccacacagattgaggaaagagtctgtcctacacatgacttgcagatgttctacatttttgatgcctacacagatcatctctatcctactgggtctggagcggaagagatacattttttagcagctttgtaacaaaagaacaggtagtcagtaaagccagcaatgcccactttcaagaaagaaagaagaaaatgaagacagcagtgaagcgtggtgctggcatcaggggtctcccagcaggtgagtacacagaaaagcagcgggagtacaaccgggagtccggggagggaacaggggagggaccaagaagagtggccagagcagcaagaggaagacaaggagcaagtccgctctggcgagaatggagcttgcctagactcacccaaggcagtcaggtcgctgggttcacaaggtcgatgctgtgggtgtaggccgagtgactgctacacctttcacctacnnnnnnnnntaacctcactggccaggtcacattcctccaggtatttactgagggcccactccattcagcggtgcttcggtgaattatccaatgcctgaagtgggagcggccgc

SEQ ID NO: 145699 - DNA, 1641 bp, Homo Sapiens
  misc_feature (1480)..(1562): n is a, c, g, or t
tcctctaacccccttgcttgaagcagcctctggaaacattattttggtttcccggctgccttttctgggtgggcgtttctccttctgtctccttgtggctggaggtcccgcttcaggcagaggccccgggctgggtggttccctaggctgagagtcaagccactgagggccctgcaccagcgtctccccaggaggaggaatgtggggccctgttactctccccagggatcccagaaagattcggcctgtggctctggcagtatcgacattcacatcggaatcgattctgacttctgtcacctaatggggagattctggcttccctcccaacagcatagggggccatgtgatcgcggtgtctcctcctcccatgccgcagggaatgcttttttcctctgaaggaattccagcttttcccaccgccggtttttccagggtcttctcctctctgtaccgctggcggagcagccccctctgggagaggcacggcctgggctggggccaggaccggggctcaggttactgaggcccatcatcggctgttctgagtacgaaggctgagagggcgctggaccttcctgggaagtctctgcagctgtcatcggggaagatttggaaggcgatgctggattccgtttctggagtggatccatggaggtctggtcccagctggaagctccgccaggccctcgggtccagaaaaggaggtgaagctggaggttctcagacaccaagaaggtggcgaggaatgtgtgcgggcagaacccagacgtcacttcctcctggccagttctgttcccatgccagaaatgctgcaccaaacgcacctctcacactccccactctcattcgcttcaattctcccaaggcagtcaggtcgctgggttcacaaggtcgatgctgtgggtgtaggccgagtgactgctacacctttcacctacaaaagaaaataacctcactggccaggtcacattcctccaggtatttactgagggcccactccattcagcggtgccttcggtgaattatccaatgcagccccatcccaaggacgtgtcttaatctgaggaataaaatattgtccaaggagccaggaatggtggctcacgcctctaatccaagcactttgggaggctgaggtgggaggactgcttcagcccaggagtttgaggccagcctgagcaacagggcgagaccaccatctcaacaaaaaacttaaaaaattagccaggcatgatgctgcacagctatggtcccagctactggggaggctgaggtgggacgatcacttgaactcaggaggttgaggccagtgcagtccaacctgggtgacagggtgagtccatctgaaatcacaaaacaaaacaaaaagacaactatggcaggcatgagacgggggtacttctgacacagaggaagtcaaaatcaccatagcccaggtggtcaggaacagcttctcccagggcatgctatgatatannnnnnnnnnnnnnnnnnnnnnnnnnnnnnnnnnnnnnnnnnnnnnnnnnnnnnnnnnnnnnnnnnnnnnnnnnnnnnnnnnntggtgaccatttctcactgaggtctgctgaaatacaaaagtcactccaccatttgtgacaccaatctctctttatatgt

SEQ ID NO: 145700 - DNA, 779 bp, Homo Sapiens
tttaagtggtcatggtaatatttattcccagataattgcaacaaaccatgtagaaattatatatttcttagatgaatcaacaattcaattgtattatactgtgtattagtctgttcaggctgtcagaacaaaatacaatagacttgatggcctaaacacagaaatgtattttctcataattctgaaactggaagtccaaaagcaaggagccagcagggttggtgtgtggcgagggtttgccccttgggttgcagatgattggatgcctccttgctacatttgctacatgctgtcttgatcttttctttgtgtcctcctggagagacagcactccatatgcgttccttccaaagctgtgtgctcggtaaaagaggatgaccatccgcgatggagaaggacccatcttcagtcaagggcacgtgagtagatgggcttccctgctagaacttccaaacaagctctccatcacacccaaagttcttgctgcttttcctcattctttcaaaaaaattttttatggtttcaaaactccatgctgatagtttttatcttttgtaatgatataaatcaagaaaatatgtcaggaaataaaattgatataatttcaatacatttatttttatattgttttattttgtattagacttgatttttatgataaaagtcaatgaaagttatcaaaatttagaaaaataaaaatgagatgaaatgtattaaaaggaaatctttagacaaatttaaaggagtttaatgaagcagagaattatttgggaatccag

SEQ ID NO: 145701 - DNA, 1040 bp, Homo Sapiens
  misc_feature (958)..(980): n is a, c, g, or t
tttggcgcccctttttattttagggccggccggttggttttccggtcgggggccccccccggttggttccgtgggcctttcagaggtattgtgaggagaatccaggcgggcacaagggagtttccgctttggttcccaactggttccagaaagggggcgaatgcagcagggccttagtaatgcacgggccacggccaggtggctagctgaaaaggccggcctcctctttcttcttgtggttctaaagcaagtctgtataatcttccttcagcctccgatcctggaccggccaatgtggttcccacggtttgtctacccccgatcagccggagctagttcgccctcctccctcaggcgagcacccggggagagctgtcctaggagagtctgtagagtccctcgattaccggtcgcaaacgcctttgggagcgcagtctgctgcgagcgccgaagggtgagacgcacggcgttcccgagtccccggcgagggtgtctgggacgcgcccctccctgcggctgcggcggcgcacagacctcggtcgagcgaggcgacgtgaggagaggtggctacaggcttaagccatggcgcagaggaggggccgggcggtgtggccgcagggtccgcggaccgggctcgagtctccttcctgccggcgtcctagtgcagccggccacctagcagggctgggaggccatcacctccagcggagaccgagcattgctgcctccgccgctgcccgcgaggatgccgcagccgccgccgccaccgcctcttctcctgggaagcgaccccacccttttctgcagctctcggtctccgccgctgcccgcgaatgatgctgcagccgctgccgccgccgcctctgcctctgctgcagggaagcggccccacccttttatgctgctcagcagtgagaaaaaaatccaggaacgatgctgactgaaagagtgctgcagnnnnnnnnnnnnnnnnnnnnnnncacctgctgtcgtcagcttgcgctgctgggagcttgcctatccgcaggaattccggaccg

SEQ ID NO: 145702 - DNA, 522 bp, Homo Sapiens
ttttttttagtcaaaacaaattctttactcttaaaatgattgtttcttctaaacaggacatgaccccttacttgagtttattccccaacttgtactgcctcaagaagagtactgcagtactcaattaaactgcttgctggacaacagaggaaatggtttccggtggattgcaggccactggaagaaatagtaagacacaacttcatagctgttttagaccttggcagcagaaataaaccccaacatagatttgagggagattgaaacatcttccttcccaaaaatattttggcctggtcttgtcagtagctggaattcttaagcctatccacaaatattaactgctgcatcctttagttgcaagggcctgcatggtctggtcattcttatcttattacaaaccccactgggctaaggtattgaagacctgtgttaaaatgcaaaagtatgctccatttctgtggtcctctccctcttggagtttatagtaggttttggtctacagtttcctggctcataatc

SEQ ID NO: 145703 - DNA, 511 bp, Homo Sapiens
  misc_feature (415)..(415): n is a, c, g, or t
  misc_feature (480)..(480): n is a, c, g, or t
taaattgctcctatgtcccttgtacatctccaagctctgaacaggataatgtcacaggccattttgcccctttggctgccagcattatctgacttaattctccatgttttcccgcccccctcccaatcccctgcaataaaccatagcctttaagattttgtttcttcggttttgatcgcctgaggtttgattggtccagttctaacaggtttggtggctatggagggtgcagggggtggcttttcttctactttttcctgacagaccccaggagggtcggtcagtgtttcaggaggtttacttgaatcactgtccactttctgggctttgcctcctcctatctgtttgctctgttgctgttcagagaagaaccgttgcgtggactgaagaacctctgctctctgctttgccttanaaaatgagaaagaacaactgaaaatactgcagcattaccaaagcctgtcaaaatcaatccttggntcaaattccttttaccaatcacaaaatcaag

SEQ ID NO: 145704 - DNA, 1714 bp, Homo Sapiens
  misc_feature (792)..(800): n is a, c, g, or t
aagtcttggcttaaggtttattcttaacggcaaatcaaggtttaaacagttatttaattaagaaagttaataatttagactatgaagcaatttaaatacttaaattccctcaaaacgacatcattttgtacacaaatagatgaagtacacaggaaaatggtagtcaaaagaatttttgtggccagctgcttcttgctgagacctatacatgatataaccaatgaataatacagtttgcaccacaacaaatataatgaacgtgggaccgtagacaaacatgatggaaatggtggtagttctggggcatttcggcttttcatttgatgggcatactttcgctgcactaagttatctatgtccctctttactatgtgcaggtgctctttgatgtcaatgaagtgctgtgttgtctcatagacgcctccagcagagccagggtgctgcattccactgaccagtctgacggtttcactcatggaatttttcatttcatttacttgtctcagaatctcatgctgagttttcacaacagtatccagttcttgttgagtaatctgcccatgctgcccaggcattcctgctcctcttttagagatttcctctgttaaggaagagacatatcttctctgttcatcaagaatcatatctaactgccggttcagctgcttgatttcaagatgaatacgattctgtccttcaaagacttgtcttagctctcgatctcctacactctcaaatatttcctccgcaggctgcccttggaggtcggggtggcccttctggaattcctcnnnnnnnnnatccattcttgttgaaagtgctcaaattcctcctgatacttttctttttccttttccgaaatttctttatctggtgtgggcggctcttttccaggttcagtcaactggaaagtcagaaaagaaaggacatcatggtcatctgcaagacctccagttgcagcagatattccaaaatgcccttgtgcagggataatcatattttccactttggcacaaaattcataatcatttttatctggtgtaaagccattattgatcattactgtcagtgtgttctggtaataggtaatctttgctcggacaggatagggtttgttgcggaagtccctctggcaacttgccaaagcttgactagccccgtcattttgatggtcataatggatttgtccattgttgcctataattactatagcaggattatttttctttccatcattgtcaaaagaatcaaaaaatattccaacaccattccacagatcagctgatccaaacacagggccctccaagccttgattttctgcataccaaattgctaggccatcagctccaatccgacctcttccagtcactcgaaatgtcacctcaacttcccagttctcaaaggccgcttttgtctttgtccacactgagcctctttggctttttaaagatggtgctactcgaatttgatctgaacttggaatagcattccccgcgtgggcccagaagggcacggtcccgtcgctctgcaccaggtgcggccccttgaagctgtatttgtactcgaaacggcgatgtggcaacgcggccgcggggtctcctcccacgccgtcgccccggacgaagcgaccgagtgacagcagcaaggcgcagaacagcggccgaactctggcccggagacccctttgcctggatcccgccatcttggattctgg

SEQ ID NO: 145705 - DNA, 799 bp, Homo Sapiens
  misc_feature (19)..(19): n is a, c, g, or t
tctcctggttttaagtttncctttaagcatgcaatttcatttagcccttttttacgaagtttaccaaagcatgcttaagaagcttcaggggagggaaaaataaatccaaatatatccctcactttccatgaaaagaatgtctgacgtaacaaaaagtataatagaatacctagaactcaatttaaacaaatataggagaagaaggattacattcaagaattttagtgatattttgaaaaatatttctatgtagttataagactttatttgaattttaattattaagaatccaataatgcttatgaattcataagcttagatttatggtcaaggcttttttctatcctggggcccaagatgaatttcaattaaaatgttctattaaactatggaatacagagttaccatgtgatccagcaatttcactcttaggtatacaccaaagagaaatgaaaacttgtacacaaatattcatagatgcattattcataatagttaaaatgtgaaacaacccaaatatacatcaaactgataaatggataagcatggatataaaaggtaatatacccaaatcatggaatgttattcaacaataaaaagaatgaagtattgatgtatgatacaacatggatgaaccttgaaaatgttacagtaagtgaaataagccagacataaagaccatataccgtatgattccatttatatgatatgtccagaatagacaaatccatagattcagaaaatagattagtggtttccagatgacaggggacagaggaaactgggaggtacaaatgtt

SEQ ID NO: 145706 - DNA, 641 bp, Homo Sapiens
ttttctcatcaggaatttacccctctttatttccagactctgcctttctcaggtttaacttaattctcggccccttcctcctgccccacctctgctcaccctcaggtggcaaagaagtcctcagcagtccccctgccttaccacccatctgtttccgtcagaaattgcagcaaaatgtccagggcccactctgattggccgtgcttggctcacgtgtctctcccagagccaatccctatggctgaggggaggagacattcaggccaggacgcctttcccccttacattatctcatgggattctgttcttgctgtaaacctgcaggaagtgaagtgctcggcctgtatgtcacctgtgtgatgaatgggtcatggccatgagtgtgctgggattgtggaggcaaactgaaggtcatcgtcccttcccaggtggtagaaagtggggccctgggataagcagggtactggctggattcccggatctgtagccctcctttgctgccgtttccacggccctttggcatcttcctctctcctgcatgagggactgcagggcgacgggcatccgcagctccctgctagtcggcaggaagtaggttcctggctgagagagacttggcaccacggcacatcgctgctgat

SEQ ID NO: 145707 - DNA, 764 bp, Homo Sapiens
  misc_feature (508)..(508): n is a, c, g, or t
  misc_feature (520)..(520): n is a, c, g, or t
  misc_feature (523)..(523): n is a, c, g, or t
  misc_feature (536)..(536): n is a, c, g, or t
  misc_feature (751)..(751): n is a, c, g, or t
tttcttttttttattctttaatagagacaggattttgtcatgtttcccaggctggacttgaactcctgggcttccccaagtgctgggcctcccaaattgctgggattactgttgtgagccactgcgcctgtcccctcttggcaactgctgtcatgactggttgctgttggtgccataacttatcgcagagctctccataaactgaacttacataaatgtattaaaacatacattttctatttcttataaataggaaatcaggattgatgcaataattgccagtaataatattttaaaaatcaaaaaatgtttttgcatgctagccaatgacttttgactgcctactcatggtggcccaagacctgatctttgttaaaaagggaggttggcaggttcttaatagtgttggagagaagctagccccaaatggtggcattctcctagactcagggaagggagtagaaaaaggggtcaccatcccatagcacaactctctgccactgtgtgncaggtctgaggnccncctgaggccactnccgtattacgcaccttctacgcttgaggaaatccaggcctagagaaagagagactagacacgaaggaaatacagtcatccccaacaattgtgccctcaagcttttaatgacaaactcaaaagctgagccccaccctcaacacatgtaggaggaatcaagttgtgagccaggtgaggcagaggccacgcctgcccctgaggcctcccttatccagnaggggagggggca

SEQ ID NO: 145708 - DNA, 701 bp, Homo Sapiens
ttagtgactcatccttttgttgcctttaggctttattctcacaatagctttttggaattctgtgacttgtgtggtatagaatctgaccccatcaagaaaggcacagaaagattatataacatgttactcaccatcagaatatcaatatgattagataactgcacactgacgtttcaagatgcctggcactaagtacttgttgctccaagaatagcgtcaggcaagtaataggggccttttgatcaggctttagcattatgtcttgatctttttgaagcatcagagtagcacactgtggtagtgatcatttttcctctgctactatgtcaggagctccacattttctctcatctattctcactcaaggacaaacttgattcagtatctggttttagctttatattgctgaaagaggcattgaagagggtaggaaagactgtcctgaattgccaattttactcctcggacatctgttggcagtggccatgtgacatggagagaggatctgtgggctgtaatgaccaagtggctgtgtcctctgccatggtcttatataatcctgtatgctagtcacagttaattttccagggaaacattccagggaataaagtgaaggtgagacccccaaggtcctgagtattcattcacaggtgacatatcttcagaaaaatatcaaagctcttcccctgagagaatcagat

SEQ ID NO: 145709 - DNA, 727 bp, Homo Sapiens
gctggcagccatggccatggcagcgggtggcatccaggctgcccgtgtgtcgcaccaggcactgctgcacaacaagatacgctcgccacagtccttctttgacaccacaccatcaggccgcatcctgaactgcttctccaaggacatctatgtcgttgatgaggttctggcccctgtcatcctcatgctgctcaattccttcttcaacgccatctccactcttgtggtcatcatggccagcacgccgctcttcactgtggtcatcctgcccctggctgtgctctacaccttagtgcagcgcttctatgcagccacatcacggcaactgaagcggctggaatcagtcagccgctcacctatctactcccacttttcggagacagtgactggtgccagtgtcatccgggcctacaaccgcagccgggattttgagatcgtcagtgatactaaggtggatgccaaccagagaagctgctacccctacatcatctccaaccggtcagaagccgcctccctcgctccctgctcctccaggaattcccagcaggctctctggtgttcagggtccttgtccctcctttcccctaagcagaaaactggccctgccctgcccctgccccatttcctcctcatctgatcccccataggtggctgagcatcggagtggagttcgtggggaactgcgtggtgctctttgctgcactatttgccgtcatcgggaggagca

SEQ ID NO: 145710 - DNA, 1008 bp, Homo Sapiens
  misc_feature (64)..(64): n is a, c, g, or t
  misc_feature (892)..(926): n is a, c, g, or t
tgctttcatttttcttgggtggattctaagagaggaattactgggctgtatggaaattatcaancttttctaagggggatctatcacttatggtaaattttttaatgaaaaccttctaatagtaagaataatatttgatgtgaagttaggaattctttataatgatcctggcttctactggttaactgggctaatgtgaccttaaggtccacttattcattgtggcccctcagtaaaacaaatggctggtaaagataatctctaaaacaattaatatcatttcctatgaaaatcctctcaccaaaaaataatatacatgcaggatcaaataaatgtacacttcactacttcttccccttctatttgctatcggtctcccatggcttggatttcccctgtcccaactttaagcatagtgatggtatcgctactaaaggaggtaaatctattaccttatggcctacaatgtctgctatcttaagccctctggcaaaaaggcagaaagacatcagtcagaactgatgaattcttcaggaatgctgtgtatagaggaaaatgatgcttcagtaaaggaagccaaggcatgtgatcagaatacatagtttggagcaccccaatccaaaaatctgacatctaaaattctccaaactctgaaactctgagcatcaacatgatgccacaagtaaattccacaactgacctcatgcatcgggttgcagccaaaactttatttcatgtacaaattacttaaaatattgtacaaaattacctttgggctatgtatataaggtgtatataaaacataaatgaattttatgtttagcacatgggttccatcccccccggccgtaatggccgaattcccgggcatatgtccggtaccgtcgactgnnnnnnnnnnnnnnnnnnnnnnnnnnnnnnnnnnncggccgcttcctcgctcactgacttcgctgcgctcgtcgttcgctacaacgagtagcgccctatagtgatctatacattctt

SEQ ID NO: 145711 - DNA, 388 bp, Homo Sapiens
atggaccattgcacttgcctggccaccagaataaatgaaagtgttggtgggccctacctggatccattgaggaatagaagaattgtttccctgtagaatatttttctagagacacatgtaaataaatgcatggaacatttcttaccacatacacttatgagaacatgcaggtcacatttaatggtactacctggacaacatgaagggattttgagattattttagggttagtgtatattcatgtcttagttatctattaccacataataaattacctcaaaatttagtggcttaaaacaacaataggcatttagtatctcacagctcttctgtgggtcaggaattcaggagcttaattgtgttcttctggacaggggtctctcatgag

SEQ ID NO: 145712 - DNA, 450 bp, Homo Sapiens
tttcaatcttcccagatggctccacttcttcacaacccttaaatgtggatgtggctcaagattaagccaatcactttgaactccaactgatcatcttatggctctaagtattatctatatgcagtaaactgtcacatctaggtcctttttctgacctttcccatgtactaattcagttctttttaatttaattgcccttcttgcatttaatctaactcttccaactgatcctaaaagacaaatttaactaaatcattccctattcaaagcactttattactacattttgcaagatatcctaatcatcttcaccttgcagatgaactcttcagcaattcaaccctttctgctttccagattcatagttcactatggtcattttcgtaattatgcgtatctcacatccttaaacgtcctctgttcttttacatttattctcgtctaatttag

SEQ ID NO: 145713 - DNA, 838 bp, Homo Sapiens
aaatggaggaaaaggaaaccgcctttcagttcaaccgactcactgcatgatatattggcctttctgggtctttggtggctatactcgtttggcttttctccttcccagcttggaggctgctttatccaaatgctttcttcagtcctcaacttggcgtttcaacccgaatccgccttttcttccatcttagatctgccttcttatgtgtttctccagctcttcgtttaaaactccttcaaatcgtatttcagttttgactggtatagcatacattggcaactgttacacgcagcggctcttttcctcataataccgtatttggtttaatttgtgtaagtcctgccttgcgaattggattttaagttcgagaagggcaagggcagaaccgttcttttgtctgttccacaccccgggtgcggggcctgggaagtagaggctttgcttactactccatactgcaaaccttagtgtacctgcctttgcagggcagctattctcatgctcttaataaccctgaataaacctcagaattgcatttccaagttttctgtagctaccacaaagacggacctccagtaacacttgttctgtccactttaggacctggtcatcagctacgaagtcccagtagctaaccgtgagggtgagacccaactaggtctttgattataggcccacttgattctcttcctattcctgtagaaatactcttgaccaaattattctgaaacttaaagtttacgaaaaatcaagggctgtgattttgtaaaaagaaaaatggactatcgctcttgaaatccgttattttatatgttagaagtttactttttctctttaa

SEQ ID NO: 145714 - DNA, 878 bp, Homo Sapiens
  misc_feature (541)..(559): n is a, c, g, or t
taggaagatctgaatgtcttatcaagcctctaaagcaattataaattatgtaagtacatcagtagtttcaaaattcttagactgtcagtactctcaagtcaggtattaaaatggattcgcagaatgtcgagatttagaaatgtgtagtaagtctattatatctaagttttgagagagcttatctgggctcagtggccatttgatttctattttttcaaaacaatagctatctgtatgtgagcgtattgtatgtcaaacattttacataaatctatgacttcatttaatcctcataaaagcctgccaatttgataataaactaatccaggagaagaaataattttggcaagttagatggtagtgggagaactatagatattagcacctccttgaccccaaaaccaaaggcctccaatgatccctgcctcctggtactcacaaccttgcatcctcttatcctgcagtatgcttggatttagtccctagcttctaaggaacagaatatgatacaggtgatgggatgtcactttggagattactnnnnnnnnnnnnnnnnnnngtagcttctgtcttagacttgagcttgcatgctttctctttcactttgaaagaaatcagctgtcttgtgaatggacagaggccaagtagcaaagaaatgagagaagcctccagtctctagccagcaaggaactgaagtcttcaatccaacatagctcacaaggaactcagtcctgtcaacaatcttgagagagctcttagaaccagatccttcccaaatcaagccttcagaccagaaacagtcctagccaacatcttgatcacagcattcttagagacactgaaccaaaggcacccaggtaactataaccagagtccag

SEQ ID NO: 145715 - DNA, 766 bp, Homo Sapiens
  misc_feature (290)..(290): n is a, c, g, or t
  misc_feature (347)..(347): n is a, c, g, or t
  misc_feature (350)..(350): n is a, c, g, or t
  misc_feature (388)..(388): n is a, c, g, or t
  misc_feature (429)..(429): n is a, c, g, or t
  misc_feature (503)..(503): n is a, c, g, or t
  misc_feature (537)..(537): n is a, c, g, or t
  misc_feature (544)..(601): n is a, c, g, or t
  misc_feature (611)..(612): n is a, c, g, or t
  misc_feature (621)..(621): n is a, c, g, or t
  misc_feature (624)..(624): n is a, c, g, or t
  misc_feature (628)..(628): n is a, c, g, or t
  misc_feature (632)..(632): n is a, c, g, or t
  misc_feature (657)..(657): n is a, c, g, or t
  misc_feature (735)..(735): n is a, c, g, or t
  misc_feature (747)..(747): n is a, c, g, or t
tatcctggctgtactatcagcagattctgtccttccctttacctgctcccaatgtggccttcatttatatgatgtgaggttcaattttcatttccacttcttttttgagctctgccagcttactttttcatttccttttgttgtcttttcatttattccatgaacccctgtatctctgcattgcactcacattttatagagaacactttttcattacatcctttgaattcttggaagagattctggttaatatcttcatgtgctccatagcaaaacttttctgctgttgnttcatctgccttttctttttcatattcctttattcctttttccttcttacagaattngcnctaaaacagcaagggaagctttgaacagtttcattttntgtttgtaaaatgagagaagtatttttttgtacaagcttcnttttttaatgcaccgcatatttctggaaggatagtgtctatttagggttagaaaaatgatctcagctagaaganagccttcttcgtccagaggtgcagctccatatancacaagnnnnnnnnnnnnnnnnnnnnnnnnnnnnnnnnnnnnnnnnnnnnnnnnnnnnnnnnnntgagcttctnntcagttgcnagnctgntaanctaccccacagattcccttctgtcntagtgcagagttaaaaacatggtatgtctgtataattcttgttttgttcttgttttgtttctgcccagttttcctccnctctaagatgtncagtgggattcagagaagt

SEQ ID NO: 145716 - DNA, 622 bp, Homo Sapiens
tttccttctgataaatttattttgaaagaataatcagatgtctcctagaattgcaaacattgtccaatccatcagagacagggaaaaacttctaaaagttcccaattccctatgtataaatggagaaatatgcaaatctggaagaaagatgaatagcacatgagtaatagaagacaggtaaaataacagcatgtatcatggaaaaggccatatgttcattttatgtttcttttgtcttcattttttctgagttcattaaataggcttttttttcctcctctccaacatatttgcctggttttcaaatactttcaacatggcattaaatcgattagtcattgaatgagcagtttccagaaaagttggtctacaaaaatgaaggagtgatactttctctgacaaaagctcagggagttcatcatcatcaggcttgccttacaaaaatgataaagggagctcttcaatgtggttctgttgcagaaacatctttaaattcatcagttgagtgggcttctaagaattcttcaattttctgtgccagagcttctcaacttttctctgcttctggtcgattttgctcttatccatagttttagcacaacagagctttcacggaggattt

SEQ ID NO: 145717 - DNA, 1043 bp, Homo Sapiens
  misc_feature (57)..(118): n is a, c, g, or t
  misc_feature (319)..(328): n is a, c, g, or t
ggcgatagtttgttgagaatgatgagacgaggtttcactgtgttagccaggatgctnnnnnnnnnnnnnnnnnnnnnnnnnnnnnnnnnnnnnnnnnnnnnnnnnnnnnnnnnnnnnntgagccaccgcgcccggcccaagtatcacttatggtttcagaacgccattattagtgtctgactgtcttggtcttcttatacattgattcccaaatcacgtgtggtaacagcatctcaatttttcatgatgacggtttgaaccattaatttaattcctcaggctatctacttttttgttaaacatactgtgtagaccatcnnnnnnnnnncccatcatgatagtcaaaattttagtctgtgtattcaagtgagaaaatttttagtcagcattatacaagtagtatttattatgtatacattcagtggagttgtttctacaaaagtatttcggaatgactattctgctgcaaacttgtgtaagcgcttcaccttattcctacaataaggagaagtgcactaacaaaatgaacaatgcagcaagggcttcagtcgcagctcaggtcttatcaaacaccagagaaccctcaatgggagaagccttatgagtgtgacaactgtggaaagacagttccttttttgttagtatcacttctacttattgtagaaatatgctttcattattgcatctactcacatttctcactcggtttctggcaccagcaatctcttccatatttataatatcagtcaaaaactctggaattcaaatataacaagacttttctggtcacctttgatagttaatgacttgggcattttgatatattatctcctgctgtatgtattttgtttagtagaaattgaatcattatccacaatcctttatagaactatccaagtccctgtttttatgctagtttccaaggcttggtccttcaaggttttcagggatctaggggacacaaatctaacaaatcctaatgtatattatttgtattatagtaataaaccatatggttactttgtttgagtggattcttaaaa

SEQ ID NO: 145718 - DNA, 649 bp, Homo Sapiens
aaaaggtaagaaaatcgtaattagagaatttacttttaaaggcatactgccacaaatatgtgcatctatgttctcaataccacacctgaacaagataatgaattcaagtaacctccatcaccatgacaaatacacgttttcagtttagtaagttctaactataaattcatcttgctatacttaacacattcaaaagagaaaaaatgataagccagtagtaattaattttatcacaaccaaatcctcaaaatgatgacagggcaaataaaacagtggctaatgatagaccacctttcaaatacaggaaatataaaccccaagaaaagaaaaagttcaatttctccactttaaacaactaacttcagatatacttgaactggtaccttttaaagacagagggattagtttcattacttactgctactttcatctccatacttgtaaatgcaggttgggtttgcaggacacagagctgagaaggtaggaggaacaatatctaatatacgctgatggtaagacaacctacaatacaaataacagcctcagaaaatatcttttatcagtcccattcttcggtaacacccgacttacctggaaagtcatgatctccaacaacttgaactcagctgacaaccaagaagtgaaaggg

SEQ ID NO: 145719 - DNA, 816 bp, Homo Sapiens
  misc_feature (72)..(72): n is a, c, g, or t
  misc_feature (144)..(145): n is a, c, g, or t
  misc_feature (506)..(515): n is a, c, g, or t
tctttttaatggccccacatctcaaggtaatgcctttgttttataaaatgctcctctttgacttatttcttnccacctgaaacaattttcttttaaagactatctcccttctcgaaacttcatactttgtattagagtttgatnnttctgtcccaaggaagttgctgggcaccattttggctcattaccataaactgtccagaaaaatatgcttgctttggttgagaacgaaaacgaagtaatgagatttttgagactaacctagagattatgacattttataccattcttatgtacctatttcaataaacctaagacagtagctataatatgaaaatgtacaaagataaattaagatttttataagactgtctttatgtggattggccaaggaatgtcaccaacattcagaatatcgtttttatgaagaaagactcagtaaaatgcacttctaagccattaacaggatggaggatttctctttttcccccaacaccctcccgccnnnnnnnnnncacccaggatcaagcctactaccaacgacaaaacaaaagtatcattaactcaaatcttaccctgtaaatgaaagaaaatgagtctaaacatgtccagttgcatttcatttcaatttcagttcagctcctgatgttaactggtaagactttcctctctttcttcttagtctgtattcttttgctgtccttgtttgaactgcctcctaggtggccgtcatacaactcagcaagtgatgtaaccaacctgaagttgcagggaaaggaacctagcaatactacatcccatacccttccctcttcc

SEQ ID NO: 145720 - DNA, 810 bp, Homo Sapiens
gtcgtatgggcactgctgaatttggaattgaggggcgagggaaaagtctttcctcaggtgctggctggggagagggaggcggatgccgggaaaccgtcagggacgcggtcagaaaggcgacgggctgtcggagttggaaaggtaacagttggatggctcgtgcggacgtcctgcctccgcgctggccacacccgccgcggctgcccggggcagggagggatctggctgattctccctgtaccctgtgccctcggagctgcccctccgagcgcccgagagtgtcccctgcctggcctgcttcctggaggcagggctaccatcagtcccacgcctcgcgtgtccggcccccgtaccccggggccaaggaaacgggatcgcggtctggactccccggggagttcccttgatgaggggaagggcaggtttggggacggcgaggacacgcggcgaccggagagaggctacctgacccgctgcaggccggactcccttcccttcccttccagggacgcctggtttccccccaagcgaaccgggatgggaagtgacttcaatgagattgaacttcagctggattgaaagagaggctagaagttccgcttgccagcaggcctcgttagtagagcggaatgagtaatacccacacggtgcttgtctcacttccccatccggcacccggccctcagctgctgtcacctcgagctcccacacccggtccgcgctccccggcctcttcctcgcgtagacccgtgggatcctaggcggcaggactcagagctaaggtatccacaggccatgaattccttccta

SEQ ID NO: 145721 - DNA, 573 bp, Homo Sapiens
gaggaaatatctgcttgctcattcaatatttgagttacgtgttcttctaaactattagatatagtgtcctgcttagtatctgcttctaaagattctggtacaattataattggtggttctttcagagatctaactgctacatctactggtaagggtactggtgctgccattagaactgttattggtgtatgtggcaaggccactggctctgttactggtgctggtgatgagagtgttgtggcttgggcaggtggaggcggtggaggcggagatgagggcggtgagtctacagttgttgattctgctatcactgctggtaatggtgctgcatgagtaggtggagatgctactgctgtggtagtagccagcagtggcctggatgttacatgaagcagatgtttcttaaaatgaattttgcccaattccacccttgactttggtggggaagattcttctgcagtagataaggtatcaccaatttccattttcattttaggagtcgagtctacctgaagaggtacagctggagggtttggagtatcactttgcttttcattgccaagtgcagtgaga

SEQ ID NO: 145722 - DNA, 473 bp, Homo Sapiens
ttttagaagaaggcatttatttattttgcatttttacttcacccagaggctggctgtgcagacaaatctctcttcttgggaacgacagggctctctaaagtaactctagggatgcagctgtctacaagtcacactatctcctctgctaaagtgtgatctatttgaaggcaggctccatgtcatcttcacctcagcattctcaaaacctaacccagtgatacaggagctgaaaccccacaggtgataaactttgattcgtgctctcactgttaccctgcgcttcccattcagcgtgctgaacaaactgcacagaaatgccagcccagcttgtttctgctactgcattgcctttccttagcctccagagctcatgctggaccagctggaggatgtgaaaatccagaggaggtgaggatctctaggaactggaaattttgcttcttttcctcatactgatttttttgtttgctgtt

SEQ ID NO: 145723 - DNA, 680 bp, Homo Sapiens
tggtagaaaagacaaatgccaattttgaaatcttgaatgcagtaggcagttgtgttgaaatagtatgtgagaattacttgcaagctgaacatccaggtctggggcatgaacctggcatacaatgtagatttctgtgttcgttaggcaacagctacattgtctgctgggtttcaggctacctggaaacatgttctccattggctgtctcaccaatgctacccctataatgtttctgaataactgttttccaggaggtataaaccagtggagtttatcattgaatagagtgcagagaaaggaccgcaagaaagctgatcacctcagcaatgaatgatttcaatacgatttcacccaaatggtctcacacaccagcctagtaaaccagagataaggtgtaatgtcatccttccttccttctccctgcctcaactgtcaaagattgacaacttacatgttgtttactttttggcttctatttctgttcataattattatcagaaggcatagcacccacaagcctaatcatactgccttacaaccttattcctcttcattttgtcttctcacttacctgcagaaacccagtttatttttgttctccctttaccacaccagccttgtaactgttatgaatgaccctcaatctcactggaatctgaatcactcaggaattcaagcaa

SEQ ID NO: 145724 - DNA, 426 bp, Homo Sapiens
tttgtgtacaagaattttatgtactttaactactgtggcacaagtgacatggccaaaatggacctttcctccaacacactggtgctgtggcgtctgctgcctggtgccacctataacaaccgcttttcctatgctggtgtgccctggaaggacttagattttgctggtgatgagaaggggctgtgggttctctatgccactgaggagagcaagggcaacctggttgtgagtcgtctcaacgctagcaccctagaagtggagaaaacctggcgtaccagccagtacaagccagccctgtcaggggccttcatggcctgtggggtgctctatgccttacactcactgaacacccaccaagaggagatcttctatgcttttgacaccaccaccgggcaggagcgccgcctcagcatcctgttggacaag

SEQ ID NO: 145725 - DNA, 358 bp, Homo Sapiens
tttggttgttgggtggccattgatgtaaattccagccaggatgatggccgccacgaggaggactgccagcacgatgcccacgatggtgcccaggtgcacaggagtgccctttgtcttgggggacaggttgttctgaaggcctgtggagagatcattagggcagacaggggctgcaggggagcagggaaggtcgaaccatggggtcttgggttctaacaaagtctcagagatgaaagccgacagagcctttgggtccacttatccaatacaggaagaggttgggtgggagttggaatcattatgagtaaggcattcatgttcttgacaccatctgggtagttttccaaaatcatgtaaa

SEQ ID NO: 145726 - DNA, 611 bp, Homo Sapiens
tttggatggttttttacaaaaggtaatttaagataatgtaaggtacttgtttggttgttaattcaggatggggtatacaaatcacttctttcattaaattttctcatccagatgatgacttcccacagctgaccagcgataccatcagcaaaggcatagatagcgttgttggctgttcctgattgtgcttcagtagagcgatatttaagtacagaggtttattaagcagcatggcacaggctttggcaacagctagtgacacggcccctatggccatactgccactgagtacaggctcaacaggctctgcaggcgcaataggtttctctgtaatagtatccttcctccctggcttttgccccttttttttggtaggaggtggagggggtggtggtggtggtactggaggtagaggtgtaggcactgttgagtattccaggctcttttccaattcttttctccccttatcttcttgtactttacttgcgaagaatatcctgagtaggtgatccacctctgcctggtcagagggtgccatcccctggagctcgtgcgtgcctcgtgccaattcttggcctcgagggccaaattccctatagtgagtcgtataa

SEQ ID NO: 145727 - DNA, 801 bp, Homo Sapiens
  misc_feature (65)..(65): n is a, c, g, or t
cataatacatttcctttacaaaatagttcacaatatttattaacaaagcgtggcattgaaaacanctttatgcaccgtgaagcaaccaccaataagcaaccagaaaggggtggtaaaaacagtacgttcacttttcatttccttccttggtttggattacacatattcttccatccttgcatttttggagctacattattagtccatccaataccaaagtgagcagatacttgatcccatttctggaaaggaaatgtccatcttggtgtaggagttcttgaggcagctggatttactgcaaattaagtaaacctttaaaaacggcattgtcacaggctatgtgttctctgacatgccaggctggacaggtgagaagagcctccaaaagacaaaacttcttcctggtttaaagaaacagcacgctaggccagataaacacaaaaggaaacaaatcacaggcgctaatagggagtcgggagctgttcttttctctgacctatacacatggctctctctcaccagacattcaaatttttaggccgcacatccacaaagagagacatatatttcactgtgtgttcaactacatatgcacaagactatagtacacacaaaatagaaataaattatataagtcttaaagtaaatgctagaagttgtcttgagtacagcctgttctatatgaataggtgccaggtgctggcacttccaactaagctaccaaccctgaagtaagcaagaaaagaatataaatatttaagaaaataaatcaaagtgtatttcaaataaggctcttccacc

SEQ ID NO: 145728 - DNA, 636 bp, Homo Sapiens
tttttcactcaacaaacatttatttctcttctttgctttcctctcagatgaaaccatagcagtcagagaccatacattggagcccacaatgtgtcagaagcatggcatgctctgtgcagcctttttcatcctgtttgcttccatatacaaagtgtctctgcatatgagtcccaggaggtttggtgactttttaatattccccagagctacctttcaaagcagcgaggttacttgagttccagcctagaggctggattcaatgctgagcagcaactctagagagaagatgcagactgcagctgttgtttagcatctttgagcattaactattctcactctcagaaaatggagtatttagagagcagtcactggaggaggccaaaggttttagcaagagaactgttttacattcaacagctattaaacaagtcgcacccttcttcctgcagtctttaagtatggtcactcagtggagctcatgggaataaatacacttggaggagatcaaatcccagtgttcctggtctatggggcatgagttccccagttactctttctccaagcactcagcaaggtgtggtgattctgagctctgaactggaggttaggatattgaagttcaaaattccagctctg

SEQ ID NO: 145729 - DNA, 791 bp, Homo Sapiens
gtttatatctgtatgtatatgaggacacataaggctggcaaaatctcctgaactggtctgccataggcggtgggggatccttagtcctgcagagattgacaatggacccatgtgacgttccgaaggaaggtgatggggatggagggactgatgaaggacagaagaggtttgacgactcgccagtgaatatgacataatctctacagttgaggaccatcacctataatgttgtcccaaagcccatactgcttgttcacaaacattctgatgtggtgaacgaagaagtctcagaaaaagaggtactgcattagactgcacaacagcttgagtctgtgcagaagttcctgatgctatgttagttaatgcccaagcagcttcaaactgtaatgaaggattatcatccctttctagacatttgactagaattggtaaaatcccagattttattaagtcatcaatcggtggatttctgtcactggataacagttttcttgctgcctggacagcactcaattggaccactgggttatcacttgtggcattctgcaatatagcttctagggttacattttgtgctttaaaatcagcatcaacatctgaatcttctagactttcttcttggggaacatttctctttttcaataagtgttcatctcttttgttcttccgcagttccactgtcacttcatttctatgtcttcgcattgtttccacatcgcggcccttgttcttgaagctcttgatgcggtggttctccaagctggggttcatcggccatggtgcgcgcggct

SEQ ID NO: 145730 - DNA, 742 bp, Homo Sapiens
  misc_feature (131)..(236): n is a, c, g, or t
ctataatcccacgctttgggagctgaggcaggaggatcacttgagcccaggagttttgagacccgcctaggcaacatggtgagacactgtccttacaaaaattttaaaattagccaggtgtagtgacgcannnnnnnnnnnnnnnnnnnnnnnnnnnnnnnnnnnnnnnnnnnnnnnnnnnnnnnnnnnnnnnnnnnnnnnnnnnnnnnnnnnnnnnnnnnnnnnnnnnnnnnnnntgacagagtgaaaccctgccccctcccccagaaaagaaaagtcccatgaaacagacctacacaggtgagattctgagattgatctggttctgacctcggtcaggaatgcagtgctgagcttcttgccaacagaatatgagacactagaaagccatagcatgcggtttcatcatgtttaactgtcacctgtggttgcctgagatgaagtgctgactgaagcgagcaccttaggagacacagtggccactgcactgagcagctggtagcagcagtggtgaccatgtggactggggggtgggttggctgcttttgacagtgccagagaactcaaagaaatagccacacctgtcggagaccccagttcttgcccacctctgcatggacgaacctctcgccgaagtggagcctgccgtcctccctggggtaagagcccatcctacatgtccccagacaggcctgggtggccggtggactatcgtcaaagggactgtgcagccaggttctcc

SEQ ID NO: 145731 - DNA, 415 bp, Homo Sapiens
tttagttttaaaaactggtttactttgaagggaaaggaagggaggagaaaagaacattaccaaaaattggctctggagaagtgttccacgtagagctgttcatcagaaaaaggggccaagtggatgtcgctgaatgtcgggaacatcattccatttgattttagccattttttggaatgaagataactctctagcatccgttcattgaacagcatgtatcccattggttcggaaatgatcacatctacagcctcaggaagtgagacgtcttcagtttttcctggcaaaacaatgatcttgtctgaaaggtgattgtttttcactagcattttgttttttaaaatcaagtaatctctgatctatggaggaataacgaagaaaactatttgaacatgtcatccattgtcagtattca

SEQ ID NO: 145732 - DNA, 535 bp, Homo Sapiens
ttttggtagttcaatagatttttactctctcttcatctcctgcccattccctctagggctaaaggcttgaagtttaagtctctcttgaagaaacggccatgcttcatttaatcctgctgcagccagagtgctgtggatgtcatgcttctgatgagacattaaatcaaggtaaacattaatcccccaggctggagcatctaatgagtttcatccgttctggtttcaggagaatataagttcagacgtagatttgcagagtcatgtggaataaagaagtcagagacttcgatgtatggcaggcacagattctggtaattggtgggtattttacttcgggacttctcttgtctggttcagccatcatgttggttggttggttggctggtttttctcaatctggttccatctgcattataagtcctgagggagtcgtcgcagaagtggatccttcagtctcaggcaaatcttcagatggcttgcttcttttgatagttaaaaccgtgaagtaaagctgaaagctgagaagctatcttat

SEQ ID NO: 145733 - DNA, 725 bp, Homo Sapiens
tatgtctcgtgtttttgtggctttgcttcttcttctttgctttcttttgcattattttctagtttaacaacttaatttcttaaattatttttaactatatttttacatatttccttaatgaatgcttgatggctcacaatctccttctcagtttatcagaatctacttaagtttatactaacttatgtccagtgagatagaaacacatttcttctttatagctctaggtcctcttcacttgtttttgtgctattattgttatacttactacctctgtatatgttacaagcccaagaatactattctacttatttatataattttatgttttttaaagaacctgagactggaagtgagggaaatagggcgtgcaggaaggaaggaagaggaaggaaaagtgtgtgaaagggggctccacctcctttagtggataccctgagcttatttccaggggcctttgtaaattcccagtgacaactctttggaagatgaaatccccctcttccctgcatcttattagaacagtgtatcctggaggacatcccttgcctttcaccaagtgaccctatactggcggcagaacttctcgattttgcggatttcaaaatggctccacgtactcatagttttcatgacagacttcattgcgatagtcaaatactgttccacttactgcagttgcctacagtctgggttttgttcagttgaaattaaataaattttat

SEQ ID NO: 145734 - DNA, 2139 bp, Homo Sapiens
  misc_feature (299)..(299): n is a, c, g, or t
  misc_feature (614)..(672): n is a, c, g, or t
cgtctggggggtgttgagagggtgttgaggggcgcagccccagggagcagggttaggggagaggttgtgcctccacccccaggcgtggggcacctggagatgatggagtgggtggggcggctcggactacagttcaatctcgaatgtcttttgcaggtcgccagaaaaggggttggagggtttctctacagtggctttgccttctaatgccgcccactgggctcaaaagggggtccaactctggagctggggcaggcgctggctcagggggccagggggccccatggggcgagggcggncctggctcccaggggcactgggtatggcagggggcgggaaggccccagctttcccaagcagagtggcaggctgaggctggagctgggcggctgagcagaaggcgtttgccaccatctgtgagggtgtgatgcccaccacgggcacccggggcatcggtgggtagcccaagcccgggtaggcgggcacaaaagggggctgcatgtgtgggggtggcaggaacacggccacttgggcaggtgcagcgtcaaagggccccacgggggcggggaaaggctgcagggcaggaggcatggtgggcactggggccactgagnnnnnnnnnnnnnnnnnnnnnnnnnnnnnnnnnnnnnnnnnnnnnnnnnnnnnnnnnnnggccttggccacctgtggacacctcctccagccatcgctcagcctctgaaggtgtccgcttgtgcccaggctggaaggcagctgcagggggcacggagggctcaccccaggcagaagtgcctgttgtgtcaggtggtggccctggtgctggcgctccagcactggcaaaagatgaactgatctgtgtgcacagagcgttgatgctgtcactgtcgccggcaccaggaggctccatctcaggcactgtgcccttcacctggaagtcagtgcggcgctgcagcgtggatggcagctcattcagccgtaggctcagctgccgtttgaaaggcgagttcttctggctgagtgctgggaacccacggaaaggagccctggcgaaccagctgctccaggggtgcatggcgcggggggatggcgtctgcagtggtgcctgcagccacaggggtgcctgcctcacccttctcaccaggggatgtgttggctggtgtcggggacacgtgcccaggctgggcagggccaggagccacagtgggggcagctgctgcctctgctttcttcttgtccggggcctctcgctcagcaggccgcccacccccagacaggcggaaggagccctcgcgggcgaagctggtgcggctggcatcgaaggcggccgtgaccccacattccttctcccgtcgctgttttcgctccaggcaggcggcaaaagcacagcccacagcgtggctcagcctctcgccggagtccttcagtgccagaaaacagtggcagatccagcggcgggtagttccgtcacggcagatataggagaaagccttgtccaggttgcggtcaggagcacaaaaggagaccttttcgatggtctggtcgaccagaagatccttggttttgtcgtccaccactcggagcccatcggctgacacccacaggacagacttcacgtactttcggcccatcgccttcagcttcttcaccgcatcttcacacacgtgcattccccgggactcctctacctccacgtgacccaggtacctgaccgggaagctgcacgtgcccttccgcaccgcgtcctcgtctgcctgccactggtgcgggcgcgacgcctcgggcacgtaggctggcttcctccgccgcaggctctgccgtaacttgttcatggtgcccgccccgtctggctccgtcctgcaggtttctgggggccccggggccccacagggggctgggggcaggtgccgctcaggcctccggggtccgccgctggccgccgcgctgcgggacatccagggcccgggcgcccccgcctcccgcggccctggctgggcctggctccccgactgctgctgctgcggtggtggcggcggcagctcggtctgacgccggccagggcccggggccgggggatggtgcgggatgcacgcgcgcgagcctcctcggcctcgtgccgaattcgccacccaggcctcgcta

SEQ ID NO: 145735 - DNA, 751 bp, Homo Sapiens
aggctgccatcttcagaatttgctggatgtctgccagctcgatggccgactcgccagagatgggcttgaccacaatgctgctgtcagggctggatgatgaagcccttctggaagggctgcagggacaggtgctttatgctgtccttggtcgcggggagaactgtgagagaaccgcctagggaagcagcttcgaaaggtgacaggctcagcaggttggtgcagccggggtcctgaggtagctgacacttgagtgtctggagctgaattgcctggttgtcatccggcaggggctcctcggcgggggcaggcctgacgtctttggtgtgctgcaggccaagcaaggccaggaagcccttctggtccagggcgtcaccaggcaggggcgtggcctgcggcttttcttgaccctggtctgccgccacatgggtctgcttgtgcagagccagtgagcagagcatggggaacgccttgtcacaggtgtcgcagacaaaacggtgttgctcgctgatgcacctccgcaggtttgtttcgcaccaggcctgagaaatgcgaggaaacttcctacaggagaagtccgtgaatcctaagtcgtggaagccagcaggaattgaagggttgttctgtatgaaaggtctgcccattgcatccctgggaagttgtttgtggacaagcgcgttgtgacgcagcagtcctcgatgtgttcgaaaggtgacacaacaaatgtcacatcttagtgggttatctgaatggg

SEQ ID NO: 145736 - DNA, 514 bp, Homo Sapiens
  misc_feature (394)..(428): n is a, c, g, or t
tttttatgtcatgactctatgtccagccacaggccagccctcaggacagaccccacctccacccttctctgcagcttctggcaaggatggtgcacagtggtcccatgtgcagggggctggcacggcactgggcatccggggcagtgctggtcgcctggcctccttgctggggccgctgggctcttggctagaagggcaggaagccgtccactttgaggcgcaggaaggggtccagcagggcccggagcttccagacggtggcacggctcagcaggagtggcaccagcccctcgaaaggtgtggggttcaccacgtacacgtaggcagcggtccagaccagcagggcgcccagcagcagcctcagggtcagcagcctgcgggtggcggtggtcannnnnnnnnnnnnnnnnnnnnnnnnnnnnnnnnnntctgccgtgcagtcacctaccagagctggcctgccaggcccttggagcttcccagctttggcctccctttctgtcggggaggggct

SEQ ID NO: 145737 - DNA, 509 bp, Homo Sapiens
gcggccgcaagaacagtagccgcccagggactaagggggcttctgggaggacacacggctggcccagggcgaggggtgtcactgcagggcgccccccaggcccagggcccgtcaggggtcatgggaccgccctgaccacagcccccgtctgtcctagtgtccgcagcggctacctctatgtgaccctcatctacaacgcctccgtcagcctcgccctctacgccctgttcctcttctacttcaccaccagggagctcctgcggcccttccagcccgtcctcaagttcctcaccatcaaagccgtcatcttcttgtcgttctggcaagggctgctgctgggcatcctggagcggtgcggggtcatcccggaggtggagaccagcggcgggaacaagctgggggctggcacgctggccgccggctaccagaacttcatcatctgcgtggagatgctgttcgcctccgtggccctgcgttatgccttcccctgccaggtgtacgcaggggaa

SEQ ID NO: 145738 - DNA, 603 bp, Homo Sapiens
  misc_feature (565)..(565): n is a, c, g, or t
ggaattagtaagcaaattgatgaatacttaaaaacaaaattggagatgtaagtagaggccagactgcgcaaggcctcctgaagcacgtcaaggagtttgaactttgccctgtgagcgtgggaagctgtcagaaagttttaaacaggagtctggcagtcgtggatgttgcagagggattcttgcatcagttgggcgtttgaactcctttcctgaggtcctttctgactcagagtgtggccccttggtggcttcagattgtcaccaaacgtcactgggcattcaagtcctccgaccgtatggttagctttgccaggaggaaagaagaatattgttagaactggattgtacaatgttgcctaagtaggaaattagcagatctttggccaacatgtagaacaagttttgtgaggtcgcctgccacaccccggaacagccatggaagcttccttcaaacatcagagcaatctggtctccaaggccagttaggcatggcttgcagccccaactacaccatttatgaaggcatatggacttggcgaagttactcagtttctgtaaacggtgnccggcccaagggccttcttaaaagtcagttaaaaaaaa

SEQ ID NO: 145739 - DNA, 520 bp, Homo Sapiens
actggaagcccttcctggtcaacatgtgcgtggctacggtcctcacggccggcgcttacctctgctacaggttcctgttcaacagcaacacgtagcctgaccctcctccactccacctccacccactgtccgcctctgcccgcagagcccacgcccgactagcaggcatgccgcggtaggtaagggccgccggaccgcgtagagagccgggccccggacggacgttggttctgcactaaaacccatcttccccggatgtgtgtctcacccctcatccttttactttttgccccttccactttgagtaccaaatccacaagccattttttgaggagagtgaaagagagtaccatgctggcggcgcagagggaaggggcctacacccgtcttggggctcgccccacccagggctccctcctggagcatcccaggcgggcggcacgccaacagccccccccttgaatctgcagggagcaactctccactccatattattacacaattttttccccaaaggggg

SEQ ID NO: 145740 - DNA, 1456 bp, Homo Sapiens
  misc_feature (164)..(172): n is a, c, g, or t
cgagggaggaggtgtgagaacacgaagtgtggcgacggtggttggatttccctcttttcctatcgccgagtccgcggggaaggggccccttttcgtggtgtgtttagtacccaccatatgaaatagtggggagggggtgggtagaggtgttgggtgtcatttcnnnnnnnnnccccctgggaggtagttcggaagcgtgcgcccgcctgaattattatatgatgcgtctggggggcgttacccgcagggcggttttttaattttgtcgcggaaaaatggagggctcccatgtaaggggcggggagaggattctgcattttcctgttcgcccgccgaaaacaaaatccggggaggtattatatatgggtggcgcggcgggggaaaactgtgggtgaggcggaagccaaaaggggaggggggtgtgagatttacgttatgtcggcgcggtaggggttttacaccaacctagaggttccggtgggttggtggtagggacaaaatgtgtgggttttggcgggccattattggccgcgccgcattcccggtgtgttcccttgaaggggatttttaccatgtcttggttcccaagaaaggggttaaacgcggggggacaaggttggtaagggggccttccttctttcctgggatgcagcaaggaattttccaaagggataagtggtctccatttgacgcttttggcgaacatttttttatgttgtgtgccaccgagggcatggtcaagcgagcttcagctttgcgttcagtgttggggccctgggagctctttcgaggcagaagtagattttgccttgccactgtggcgtttctccaggtgtgcaggctgcagccacctccttgatctctttcacagtttcatgcaggcagtcctccgccatgtttttttgggaggagctgtccttgagcacttcatagggcccttccatccccagcccctggtccccgtccacacttctcgccgtgagcatggtatccactgcgctctcgggagggattgtgggcagctcccgactctgatgacattttggtttccctgtgctgtcctgggaatccagcagatccgaggccgatgtctggacttcctcgtaatgctgcatgcaggtcagagtactgtcctctgaaagaatgtccccattggtgagtgccccattctgctcactgctggcaggagcatctgttgccaggctagtaactgaacggctgaacatctccttgtctgaaggcacgttcatcaggttctcatggtccccactatgctgtcgcggcttcttttccctgtcacaactagagcacaggaagatgaggaaggtgatgacgaagaaaatggcgacagcggccagacttccccacagggtgatctgcatctgtccgctgcccagcaggctccccgcgggccccatggcaggagcaggcactggcaccagccgagggaatcagt

SEQ ID NO: 145741 - DNA, 694 bp, Homo Sapiens
ctatcctgtttgcctgggactatcttggttttaccattgaaaatcgtgtatcccaggaaatccctcagactcagacaaactgggatggtttatcaccttattttaaacaaagattataagaaaaccagaagaaaatgaaaataagttacgtcagcctcctagtcaatgagtgcacttgggtttttaaagtttatttcctttgtggatacaacattatttttacaaaaatgcaaattgggaggaaaaactaaggctagagaatatatcttctacttcttggcaaagcatgtttactattggtcaatgttattatttgactctatattgccaaagggataatcggggagaaggtcataggaattttcatccttctttaatagcagacattaaagatgtctcctattgtaaggagttatgtgaggtcagctaaaactaattatttgaggtcatacaaatgactcaaaattcttagagaaaccatgggtttggagaggaatcctcatatatatttcagaagaggagaaaaaataagatagaaataagatcttgtatttttttaaagatttctgactttcatttttttctcaggcctgctcctactatgtccttttccttctctcatatatttcagtcgtctggagttctcagaataaggaatccattatcaatgacctatcccatgaacatttttttt

SEQ ID NO: 145742 - DNA, 359 bp, Homo Sapiens
  misc_feature (229)..(272): n is a, c, g, or t
agccaggaaaacagaacctactttatttattttccatttcaataggtttttggggaacaggtggtgtttggttacatgaataagtcctttagtggtgacttctgggattttggtgcacccttcacacaagcagtatacactgtacccaatgtgtagtcttttatccctcacattttctttatccactcattgattgatgggcatttgggctggttccatatttttgcannnnnnnnnnnnnnnnnnnnnnnnnnnnnnnnnnnnnnnnnnnnttagtataataacttcttttcctctgggtagatacttagtagtgggatcactggatcaaatggtacatctatttttagttctttaag

SEQ ID NO: 145743 - DNA, 334 bp, Homo Sapiens
attttacagctgtgtttgattttgatgagtatttcagtgtcatgtatttgggttgcagcagttgaggctggtgagaggagggtcacttggcaataaggtgggttttagtctctgtaacatatctactgcctgctgttggatctgaatgcgagacatggcctctgttggtctttgttggtcttctttggctatgatagaagatgaatttgcatctcttatttctagtggccagccctgctgggcagtcccccactgccagggctttagtgtcccagttggcatcctggcagccatgctactcattggacggtctccactgtgtctcttgtatcac

SEQ ID NO: 145744 - DNA, 439 bp, Homo Sapiens
ttttttcacactccattttctttgagtttttattttgtttgagaaaatagggcataagttaccattttgatgttatttaatgatacattaaaaaataaaagtcagcctgaaataatggacagcttgagcaaaaggtaaaatcagatcttcagcagttgaatagtctcacatcacacttcagtacagggaagcagtatgaccctaaatgtatccaggatttagtctctttgtttttcctcaacagataaaaaaagcagggtccatatgcagaccggcgaaagatgaatgtgattttcctgagatgtgcactggccactcgcctgcctgtcctaaggaccagttcagggtcaatggatttccttgcaagaactcagaaggctactgtttcatggggaaatgtccaactcttgaggatcagtgctctgaactatttgatgat

SEQ ID NO: 145745 - DNA, 118 bp, Homo Sapiens
tttaatacaaacaacttggggaaggtagataagtgcaatgggagggaggattgaattgaatagtaaaacgtaagcgtatgtgatttcttactttggaagagaggccctttgttataat

SEQ ID NO: 145746 - DNA, 550 bp, Homo Sapiens
tttttttcaggttgcattaagctttataacaacacggttttcatttagcgggagaaatgacagtttaataacagctgaacagatttaactccccccactcatacaaatttccagttttactagaacaattcctggttttggagatctgtgaacaagtgctttatgtcaaatgatgcattttaattgaatcaaactgatgggaagggacacttcattcagcagctcttgatgggggtttctgcagacagcccttgctcacccccaaccctcataaactggatctgatgaatggagtcagctttctcgccactacctcactctctgccatctctaaatagagaaaatgaagcccgaggaggtggtggtggggcaaattggaagaatgctgactgctcctttctccattacatggctaaggattattcctaataacagacttgtcaactctctggtctttgcccttctagggaccctaggggacagagtccaccccaaaaacatgctcagaactacagtgcttgggagagatggtcttcaggtaaggtaacct

SEQ ID NO: 145747 - DNA, 395 bp, Homo Sapiens
ctaatagtctttattatttttttatagtctttattgttttagaacagttctacatttacagaaaaattttgaagatagtggagttcccatatgtcccacatccagtttccctgattattcacatcttacgttagtatggggcatttgttacaatgaatttgttacactattattaaggagagcccatactttattcaagtttccttagtcttcccttaatgtcttttttctaggtagcccctccatgaaaccagattacatttagtcatcatgtccccttggctcctcctggcggtggcagtttctccgattttccttatttttggtaagccttagtccatataaatatattctgggggaattatagatgggtttgacagaaagcaattttaaaa

SEQ ID NO: 145748 - DNA, 570 bp, Homo Sapiens
tattgcgagatacccgctttctagggtgctaaagaaagactactttaaattgttattaaaaattacagaacatagaagatatctgcatcttgaactctgcataaaactgatttttctgtgtagttaaattcagactatactttttggggggcaatatctcagtaatgatgctgtgttcttcggtgtgcgtcagcacatcacaaaaatttgtccttgtgcagttgattttaaaatttacttcaagagctctcggaaatattcatttcactgtagagttaattatttttctcctcattattaagtatctttatgtagccaaagaagagctgtgcataaatcatcacatttaatctggcagctgcctttctttcttaggttttctttgcatatgtctatctttggaaaatgaagactcttatctttgtttacaggccagaaaaatggggtaaaacacaggctcttccacttactggatgtttgacaaaatgttctttttgggcgaaatacattggcattactagtgagcttgttagaaacttcagaatctcagactttatttcacatcttctg

SEQ ID NO: 145749 - DNA, 542 bp, Homo Sapiens
tttttttcagacaggaactgtttttattccaaccacctcacctccttagaatgggaggcgaacagtgaaatagtgcatttatcttaaaagtgaaataattccaggatggtagggcgagaccctgtgatgggtgaatttacctcacttgataccaagggcccttaatactcggggaagtgggactttgtcgacaaagccaggacaatccccctacccccaccccacccagcagtgattaaaaacccgtacggtcactttctatgtgatggctgtctccctctcaccagactgcatagcggttgcagatgaacatttggcacctagatgggggtcaaggagctggggctgtgattcagggaagatgctgagggggactgggagtctctgtttgaatcttgaagcaaggggtgaaggtgtggggtgtgtgtaggggagctgacactgaagtctttcaggaagcagatggtaagggtcagggggtgtgtgtctatgctggggtgagggtcctgtggtgttgctggtgatgctgaatgccttgccca

SEQ ID NO: 145750 - DNA, 1225 bp, Homo Sapiens
  misc_feature (283)..(317): n is a, c, g, or t
  misc_feature (1104)..(1138): n is a, c, g, or t
  misc_feature (1142)..(1184): n is a, c, g, or t
ttaactatatacttattttattgttgtaaaattaaaaatagtagacaagcatatatacagttcccaagcagagcaatacaaatatataaattattgcagttttcaaagaaaatgtaacagccaaataattgcctacttttttgaaacaaacttggtttttaccacagcagtttcattttctttttccaaaagtcttaacacaattttgtaaagtaaatttctaacgccagagagattaagttcaatgaccatagtatatgctactgttttaaagcaaggttannnnnnnnnnnnnnnnnnnnnnnnnnnnnnnnnnnaaatggaactggacaaaagtcactacttaatactttctaaattgcctcttttgggaggtacggtgaaagaaaaacattctagatgtgtctgaaagaaacaaggtacacacacttactaaaattcccctttgctttaggtgtattgagggaagttcaactaatctttaaaccttttttgggagagggcaatactcatcttcatgaatttttgtttactttggtaaacttaaaattgtgaaataattaaatattattaaaatgtattagtaatgtggactcaaactaaaaagaacagggaaagtgtatgttaacgaactagatgttttggagacttgatataatatggttcatatcaagtgttaccatagccagaagttgcttaataggttagactgcaccataatcaaggcaattatgaaaggatgaagtgaaatgaaaatactgagatgcaagcattatagccctcctccaagttacctttacttttagtgatgagggctctagtattctggtaaataaactcttccctgccccatgaccacagaactttactctggtaagaataaactgttggagggttttatctcttactaattctcaccacaaatttcctcaaatagttactcccaccaactgtaaaagcttaaaaatacaatcatacactgaaacggcatcaattatctttgccttacatctgaacaaaaagtattaacttttttatagcgtattacacttccccggccgtaatggccgaattcccgggcatatgtccggtaccgtcgactgnnnnnnnnnnnnnnnnnnnnnnnnnnnnnnnnnnncggnnnnnnnnnnnnnnnnnnnnnnnnnnnnnnnnnnnnnnnnnnnaacagacgagctagcgccctatagtgagtctatcatctttt

SEQ ID NO: 145751 - DNA, 698 bp, Homo Sapiens
  misc_feature (14)..(14): n is a, c, g, or t
caccttggagtctntgacgctactgatgcttccatggtagtaacagtgctctccacccttagagtactgtggtttcccattttcgtagtgaatctccacataatcagaagacaacaaaccattgttcagtatgaggtcaagaatgaatttggagcggaaggcttcaatctggaagcttgcctgggccagatggacagccttattatgtttttgctggtgtcttgcctttgtgtcaagaacgtgataagggctttccgagtcttggttgatgtaatatatgagtcttgaaggcagtgtgatttctttctgcattgcattgctgtaactgatattactgctgctattctgttgcaatgtattgtcttcatctgccaggactcccaaatttttttctgcagtttcattccaatgcggagcgctgggcgcagcagccccccaggcgcggggccgggacgaggcggcgagcggaggcagcaggagaaggacgagaagcaggcggcagggcggcgtgcgggccggggcgctggcaggcaccgagccggcggggccgcgttgggggccgcaggaagcgccggcaaggctgcagcccgccaggggcggctgccgcgagctgctgccgggcggcttcatggctcatagctcccgggcgccgctccgtgtggccggcgagagcgccgggctagctgcggggcggccgc

SEQ ID NO: 145752 - DNA, 685 bp, Homo Sapiens
tgcggccgcagcgctgcatgcccgagttcgtcaacgccgctttcaacgtgactgtggtggccaccaacacgtgtgggactccgcccgaggaatactgtgtgcagaccggggtgaccggggtcaccaagtcctgtcacctgtgcgacgccgggcagccccacctgcagcacggggcagccttcctgaccgactacaacaaccaggccgacaccacctggtggcaaagccagaccatgctggccggggtgcagtaccccagctccatcaacctcacgctgcacctgggaaaagcttttgacatcacctatgtgcgtctcaagttccacaccagccgcccggagagctttgccatttacaagcgcacacgggaagacgggccctggattccttaccagtactacagtggttcctgcgagaacacctactccaaggcaaaccgcggcttcatcaggacaggaggggacgagcagcaggccttgtgtactgatgaattcagtgacatttctcccctcactgggggcaatgtggccttttctaccctggaaggaaggcccagcgcctattactttgacaatagccctgtgctggcaggaatgggtaactgccactgacatcagagtaactctttatcgcctggacacttttggaagatgagtgtttaacgatcccaaaggtctcaagtcct

SEQ ID NO: 145753 - DNA, 667 bp, Homo Sapiens
taaacatgagtaaacatcacctttaccattgaacattattctctcatgggagaactgagacaaaagatcaaaagattgaattacgcaccccgtaccccaaaatcatattgtaagagttgaaatcaaaatatctgaagctacatttggacactgtaataatgtaatgtataaggatttttcaaaataagtcttaatttcagttttcatatcaacaaaaagtactattaggagtacatagttgccacacttgagacatattccaaatgcatacacctaacggtactactattacagaacagcacattctaatccacatatacacgagttttaattaaatttagcactatgtctataatcagaatgaatacctggaatacatgtttctagcaggaatatttgttagcagctttaaggtacttgaaatcaccataatcatttctattttaaatttaaatttcactactggggtaaattccatgagggaaggttgtggctatgaatttttatttattctttttcttttgtggtaaatatggagaacttaccaaatctcttatatagcctggctgtagatggcaatgcgaggaaagaaaaatgacgcagatagtaagaagaaggcaatctgaaaaaatggcacgaagcaaagaagagttgcggtcacctgcaa

SEQ ID NO: 145754 - DNA, 328 bp, Homo Sapiens
agcaatatcaggatcctacttttgtttttgcaaactgctaccatggtgggaaattgtttatggcgggagagctaatcacatcccaattcattttggtattggatctttgagttttccatttgcttgttgctaatatataaccatataattgttttttataacaaactttggatcctgtaatattatgaaactatcttactagttctagaactttcttgtagattctttagaatttctggttatactgtcagtctctccatcattgcctttcacctcaaataagggcctgattgatgtcatttgtatttctcagaacaggttcttttca

SEQ ID NO: 145755 - DNA, 1021 bp, Homo Sapiens
cgggacttaaaggataagtgaagaggtgaaggccgatcattaacagagttttctggcaaaccatgtgcgtcgtgggaacttttacaccagcttctactcctgctattaactcagagtctccgtctgggacactttcccacttaaggcgttttataagtttgactccagcagtgacaggtatgtgttgttttaaatccactagccatgctcgagaaagacatattcttcatgttttaattttatacaatggctagcaggcaccttagtaaccagccagaaatcaatttcaaccaccatcaacccctaaactacagtaccaggatggctggctaaagaaaggaaacggactggctgcagtctgacgcgtgcccagtacaaggtgtctggctgactttgtcctaaataaggctaacattagtgaactaagaacagcgtcacgtggtggccatgcctggccttcaggagcacccctccccgatgcgctggcaggagcgccccactttccggtccagcttcaccattttcatgatggcttcctcccggccacggcccatgtggtcgaatgtgcagtcgtgctgctcggggaggcgatgtaacatacagaacacataaccgcagcgacacgatcccaattcctgctgcaccagctccagtttggtttggcactggaagcaccgacgtcgactcttctgtttagatcgactggtttcctcggaccgttccgtattctcaagtagtcgtggccgttttactggtgaagcctcattctcagactgtgaatctgtaccacaggatctttttgttggtgtgattaatgagacatgagctgtgtctgtgcatggcccacactcctctttactcggtgaagttacattcagttctgtcggaagcggctgctggctgggactaagagttggcgtggttatcgaggtattgttgttgtcactggtggtctcttcggaaaacaaatctgattggctcctcgtgccgaattcggcgcgccgtcgacttcatactctcc

SEQ ID NO: 145756 - DNA, 1360 bp, Homo Sapiens
  misc_feature (121)..(121): n is a, c, g, or t
  misc_feature (126)..(126): n is a, c, g, or t
  misc_feature (129)..(139): n is a, c, g, or t
  misc_feature (1186)..(1195): n is a, c, g, or t
ccgtgaggactcgcccccacccgtcctcgggcctttagaggggaatcctcggatcctggggggggcagggccccacgcgcccgcctggcccggctagggactttcctacccctgggggcangcccnggnnnnnnnnnnnacccttttcccccacttggcgtgcgcagttgcagctgctgaaatcctctgtgaacatgatggggcacaggtgagaaaatgtaccctcaggccctcacctaccagagcaaatatcactcttcggagctgggccacagccaccaaaccgctgttctagacagatccaaaccccactgtccctgggacgtatgctgccttcccttactaaacttgctatatggtagatgtggactgggtgtccttggactacggggctgcatagaaacgagaatggaggccacgacatcatcctcttggcccctggaggcacgggcggctccagctggaaggggcagagcccgtgggcggcagcttccccagctgctgctcccagcacttctactgattcttgttggctatgaaatgtctttttaaaaaactcccaatatagaaatctggctgcagaggccagtgtgcagacccagccaccgcgctgtgctgccattcgccacatctggtccgtgccagatccctgcactggcgaatggcagaccagagccggcggaggcggggcactctggctgcttctcgtgaccttggatcctgtgtagaaaaggcgggtctcgttcgtggactagtcttgagtggagctaattttcaaagtgaggttactgtttctcttcttgtgtgatgagttttttcatagcaagtcaggtaaaaaaatttccgtaagaatctgtcccccaccccccatttccagctctgtgggagagtgaggccaccacccagcccagccacgtggccaatctcagcagcctcccatggccaaggcacacgtggccatcaggtatcctggctactgggactaaggataagtgaagaggtgaaaggccgatcattaaacagagtttctggcaaagccatgtgcgtcgtgggaactttaacaccagcttctactcctctattaactcagagtctccgtctggaacactttccacttaaggctttttataagtttgactccagcagtgacaggtatgtgttgttttaaatccactagccatgctcnnnnnnnnnntattcttcatgttttaattttatacaatggctagcaggcaccttagtaaccagccagaaatcaatttcaaccaccatcaacccctaaactacagtaccaggatggctggctaaagaaaggaaacgcctcgtgccgaattcgccacgcaggcctcgttcttgggcc

SEQ ID NO: 145757 - DNA, 478 bp, Homo Sapiens
  misc_feature (88)..(99): n is a, c, g, or t
  misc_feature (182)..(182): n is a, c, g, or t
ctcttcatttttatttctttattctttcaaagctcttaccaccacctgaagtcatccagcctgggcgacagaatgagactccatctcnnnnnnnnnnnngaaaccaaggatatagaataaaacaagagtgtagatttgggcattgaggccttcaaattggattgttctcaatgtccagaagnaaaaaaaatttagaagtgaccccaatcagaaaaccaaagttgggctgaattcaatgcgaattattttctagctcaatattaatactgcttatgtcagctgaatttcagcctttcaataacagctagtcaagtatttttttagttggttcctattgatcgtcatcttattttagtggaatccattatattgaagatgtcaagttcctcatttcccatacaaagaatgtgagattcatctttcttgaatctttgctaagtgttgaaggggacttttggcatcttttcaggaggactat

SEQ ID NO: 145758 - DNA, 912 bp, Homo Sapiens
  misc_feature (100)..(268): n is a, c, g, or t
  misc_feature (426)..(436): n is a, c, g, or t
  misc_feature (792)..(826): n is a, c, g, or t
  misc_feature (829)..(872): n is a, c, g, or t
ggattacaggcgtgaccaccgtgccggccagccaccggaaagttttatgtaacaggggatgatcggtttatcatttagaaggatacccacctcttcttcnnnnnnnnnnnnnnnnnnnnnnnnnnnnnnnnnnnnnnnnnnnnnnnnnnnnnnnnnnnnnnnnnnnnnnnnnnnnnnnnnnnnnnnnnnnnnnnnnnnnnnnnnnnnnnnnnnnnnnnnnnnnnnnnnnnnnnnnnnnnnnnnnnnnnnnnnnnnnnnnnnnnnnnnntaaaccagacctcatttgtccatctcccccatcccccgccccaccccacggactgtcctataagtgcccatacaacaggtcactgtttagaaagtgctacaaagttacaaacacagtcccttctgagcctcccaccaatgttggtgggtacaaggtcnnnnnnnnnnntctcatctatctaaggggcataggagactttttagttagagggcccaattatagtcctcctgaaaagatgccaaaagtccccttcaacacttagcaaagattcaagaaagatgaatctcacattctttgtatgggaaatgaggaacttgacatcttcaatataatggattccactaaaataagatgacgatcaataggaaccaactaaaaaaatacttgactagctgttattgaaaggctgaaattcagctgacataagcagtattaatattgagctagaaaataattcgcattgaattcagccccccggccgtaatggccgaattcccgggcatatgtccggtaccgtcgactgnnnnnnnnnnnnnnnnnnnnnnnnnnnnnnnnnnncgnnnnnnnnnnnnnnnnnnnnnnnnnnnnnnnnnnnnnnnnnnnntgaaagcctgaggccctatagtgagtctatacatgtcttt

SEQ ID NO: 145759 - DNA, 549 bp, Homo Sapiens
tacttttcttgaaaattttattttctttaatttcgtttgtttcctgttacataatttatttaaatttacatttatttatccagaaactatgtccaaattttatgtcctcttttctgttatcctggagtttggtgaagaaatctgtacttaatttagaaaagaaatccctctaactgacaatattgttagctaactatatatttcttaggcccatgtcaaatatcattgcttattttaataaagattgtttagttagactaagaaaatagtaaataataagggatggcatccgttaagtataaacactggattatttttcataacataacaggtcaacaatatcgttttgaggctgaactcctttactccttttactgtaagctattgaagccaaactccttcctacctttgttcatttatgatggtgtaaaattttaaaattaggatctacatacagaacaatgcagaattatataaaaatatttgaatattgaaaaataaagtggaaattattattattatttaggtacagggtcttgctctgtcacc

SEQ ID NO: 145760 - DNA, 476 bp, Homo Sapiens
tttaattgtattaaaaataagtttattgatatcttgtcaccactgggagaaaggagggggttgagctctggaagtcagagacagcaatggtaggcagagaacccaacctgtacctctcccatcagaactcggcgcctcctctccctggggtatacacggctatatcctctttgtcatccgtattttgatttgtcttacaactcccacccgctccaaagtctgggttggggaggtggggagtcccccacgggtcaattctcttcaagtcaagaacaggaactgttagggaaggggagctagggtgcagctgggatgggcagagagcatcgcccccctcgactgcgccaagctggggagaggggttgcaggcaggatcatagatagtagatttcacggagatttccatcggccgcgccttttccgtgtagggaaaccttttctccgcttgtgtgggggggagtcgtgcggagggagcg

SEQ ID NO: 145761 - DNA, 381 bp, Homo Sapiens
ggattaaaaataagtttattgatatcttgtcaccactgggaaaaaggagggggttgagctctggaagtcaaaaacagcaatggtaggcagagaacccaacctgtacctctcccatcaaaactcggcgcctcctctccctggggtatacacggctatatcctctttgtcatccgtattttgatttgtcttacaactcccacccgctccaaagtctgggttggggaggtggggagtcccccacggatcaattctcttcaagtcaagaacaggaactgttagggaaggggagatgtgcatacccgagaggttccctccccaccccacatagggcaataataatatacatgaaattgatggcttagaagtcaggattaagggagg

SEQ ID NO: 145762 - DNA, 226 bp, Homo Sapiens
cacgactcccccccacacaagcggagaaaaggtttccctacacggaaaaggcgcggccgatggaaatctccgtgaaatctactatctatgatcctgcctgcaacccctctccccagcttggcgcagtcgaggggggcgatgctctctgcccatcccagctgcaccctagctccctgctccagggatgtgagcacccactccctgtgcttagttagtgcctgattct

SEQ ID NO: 145763 - DNA, 1459 bp, Homo Sapiens
  misc_feature (1340)..(1374): n is a, c, g, or t
  misc_feature (1377)..(1419): n is a, c, g, or t
aggaagttttagaaactgttgtttatttcccaattatttccccacttctccacctaggagtggctgcattagatgtaaggaagagggccctggtttcatgaagaagggaattagcacccatttcagacttcctacactgaagaggggttccagtatggtggagggggctcagggaacactctggatggaccatgctctgtgggctctgcctggcttccctgacagaggagcaggaactgctggcatcacctgtccgattccctccatgtgttctgggattggaaatgaactaattagagctaatgttggaaataaacttacttattggataggctgcatgatttgggcctgaatttctcaaacagctatgcagaggcagctgacgatgcaaatgttccctcaccctgccatggtggtaattaagttgcactcaggagcttttcaaagatgggggcttctgctctccagcttcagaaagagaaagaagatgagtgagaacagcgggggatctggctgcttcttcccaatccaactgtaacttctggatggcagtagccccctgctgtccccaccatcctgcctgttgtcagctgcagctgcaagggcagcctgcatatggggagacatttatcactcatgagcagctgggtcatggcagtggccctggcagctggctggatcatttactggccacggcagagagttggtctcggatgcggcccaggccatctaacatggtgtccagtgtttctttgctcagctccacggtgacagctgagatggagggtttgtctccgcataggctgggatcttcttggatcttcatctggagcaggcaggtggggacggccatgcggctgatgctgtctgaggaggttttgatatccactctccagtccagatcgaccaggcgtggcagagagatctgatttgcctgggcttcggttctccaagtagacacatgttctaggatgatctttgtcagcaggtttttgaggttttggtggaaattttctggaaagagagccagaattgcctcggcagaggacaggtcacggaatgccaccagcctagtgaggcggtgcagagcctggagcagttcctctgcctcctcctgggtcacagacaagctggaacatgtaacatccaagagttttttcaagccaagggctgaactggaaaagctttcttgacacagctgtctgacaacatctttcgaggaggccttgagcaggctctggagtgctgcaaaatgctccgctgtcagggcagccatcttgccgaagtcccccggccgtaatggccgaattcccgggcatatgtccggtaccgtcgactgnnnnnnnnnnnnnnnnnnnnnnnnnnnnnnnnnnncgnnnnnnnnnnnnnnnnnnnnnnnnnnnnnnnnnnnnnnnnnnnaaagacgagctagcgccctatagtgagtcgatacattgtt

SEQ ID NO: 145764 - DNA, 486 bp, Homo Sapiens
tttttatgtgtctttttttgtttaatgtatgattttctaagaagtaaaattatgactctactgcaaatataagataaacacatatcaacaatgtttttcaactcaataagcgatgagggttccagtaaataggttcaaatccttgcaaggaacattaaaggagctttacagccagtgttaacgtcagatcgttgggtacttacagtactggttagtatccaacatagccagaagctgtcatctttgtgagttctctcttccatggcacagaaatgatgtgtttttctactgtacaaaatatttatcttttctactacttctgcacataaaaatattgctagtcagaaaagaccaggattgcactgaaagaaaatctcagtaatatctctcacctgtattcttactttttcttcctttatgaaatatctttcaactgcattttctatctgaaagtttatagagagatgaaaatgaataaaagcatag

SEQ ID NO: 145765 - DNA, 573 bp, Homo Sapiens
aaaggttgtgtacagctcaccccgggtagctgcagcacagtctaggcaacaggacaatctgtctcttgtcttttctagtcctaacgcaactctgtcaaccaagtttctttgccctttttttctattcctggccgtatcctttctgctccccaccagcactatcaggagtaggaagtgacatgcttagatttggaaggaaccttaaggatcaactaatctgtaacacattgatcccctcattttacagattaaaaaatagaggccctaagataatttaaattcataggttatgagtgactagccaggactaacaacttaagctttacttttactcaatcgtactaacctccctgaaatcttgttcattttcttatactaagatgggcacaggcctctcataaaacagtagaaatgttcttagtatggtggtataaggcctctgatagccttccattcaacgagagtacacgttgccacagtgctgaaagtgtaatgctcttcccagggcattagagaactcagtgtagagatagtttccctgatgaccttttcccagcatcaccattggctgac

SEQ ID NO: 145766 - DNA, 446 bp, Homo Sapiens
catttctcttctgaagtgtacattttctatggctctctcctagggagttttccgctggtcttcttgacccatcgttgccctcacagtcattttcttgataagaacttggaagatacatctgtttcaggcctttcaatcatgagcctctacaagtttccagcatcatatatgttaattccttacttggtatttccaaccctagaatccagatggaagaaaacatacattcctgatcctgacaatttgacttctcaaagaagatagcattcgtaacaagaaagactcaagaccatcttccttttggtttcaaaaggtctctagttcagaactattcacaacactcaattcttgcctctccctggcagccgccggcgccgcccctaggcctggggacagcacttccggttactctccggacactcgaatctgggcttcctggcggccgc

SEQ ID NO: 145767 - DNA, 1327 bp, Homo Sapiens
  misc_feature (105)..(106): n is a, c, g, or t
  misc_feature (124)..(125): n is a, c, g, or t
  misc_feature (135)..(135): n is a, c, g, or t
  misc_feature (146)..(146): n is a, c, g, or t
gtcacgcccactagactcatggatttagaaaggtcagaggctgtctttgcgttgagccttctcacattgtatttcctgaaggatgctcttccaccgtccttgtcnncttgttttgcagcagtannacagcaggcngcgctttctcntgagtcggtctccgccagccgtttcagcagtggtccttgttgctccattagtctttcagaatcctctttgcagtgctgttccctcaggaggtctcggagggtgcggttggtctcctcaaatgtgctcagcttctgcaggagaagttccttctgccttgtcagggtgttgatgtccgtgcaggtcatttgtttctccgttttcagcttcccgatggtatccttcaaggccatgacctgcttggcagccgcagccccatccatttccgcctccaccagcttggacatgaggcactccttctcctgttgtaggtgtttcttctgaagtatggtgaagtccttctcctccttcatgcgctcgatgttgtgcctcaacaccgtgttctcgtgctcagtctcagccagttcgtgggccacctcctccagctcttccttccgttcctccaggaaccttttggccatctggcgctcacctttttgcatcttgacctcagacttcagacaaccaaccgcattcattagactgtcaatcttcttatcgtaacggttcattttacagtgacctgagtcgtcgtcttctgtagagaggtcacttaatcgcatcactgagaccagcttttctgaagatggtggtgtgatctccaggcaatgaggtggattctcccacttgcatcccacatgccgggcagatgattttccagggggcatccaaggtaccttggttttcacccggacactccgccgtacattcacggtgtcccctttcattccgcgcttatgagatttcgtaacagttacactgggtgcgccacaaggtgttctcaagacttttttctgtgtgagactcgttactccgttcttcccacacgatggaaacctgggggagccgcctgaggatgaggcagacatggttaagcatcaaagccgcaaagatgggcaattgggtcggcaggctctgctcagggggacccagaggggctggccaatgagaatctcaggggccgggcatcaaacgtcctctctctgaggggaggagggtggaagctttgggggtggcagttggatgaaaacttgggaggcgctcctctactgtccaagtcgcacagcaactgtcctgccaaagtggggagggagggagacaggagaggctgagcgacctgcggggtgccgagtgcgccgccccc

SEQ ID NO: 145768 - DNA, 819 bp, Homo Sapiens
gttccctcaagagttctcggaggtgcgttggtctcctccaatgtgctcagcttctgcaggagaagttccttctgccttgtcagggtgttgatgtccgtgcaggtcacttcgttgccgtccgtgttgcagcttcccgatggtatccttcaaggccatgacctgctgtggcagccggcagccccatccatgtgccgcgcgtccaccagcttggacatgaggcactccttctgcctgttgtaggtgtttcttctggaagtatggtgaagtccttctccgtccttcatgcgctcgatgttgtgcctcaacaccgtgttctcgtgctcagtctcagccagttcgtgggccacctcctgccagctctgtccttccgttcctccaggaaccttttggccatctggcgctcaccttgtttgcatcttgacctcccacttgcatcccacaggccgggcagatgattttccagggggcatccaaggtaccttggttttcacccggacactccgccgcacattcacagtgtcccctttcattcctcgcttgtgagatttctggctgctggtcgctgatggtttcgggagtttttttatgtggacgtggacaggggtgttctcatccacgtgaacatgtaaggggggagttgaagagcggtccttcatggttggcttctggcaggtgggggaggacaacacaaaaatggttgatcgtcacagttacactgggtgcgccacaaggtgctctcaagacctttttctgcgtgagactcgttactccgttcttcccacacgatggaaaccaggagcgacacggctgcgcccagaa

SEQ ID NO: 145769 - DNA, 476 bp, Homo Sapiens
agcattctgatagagaatgaaggcattttgcttatgttattagctgaatgattccttagcgatataggtaggagtccacaaaaatctatgaaaattataaattgttattttttaaactagacattaataaactcccttaatagtgataaagagctcctcttgactaaataagtcatcctaacatggagttcaagttttcacaatcgcttttaacagaataatacaagatgacagtatagctgacttgcaattataatacaatttcaattacaatgagcatactttctagattttctttcccaaatggagagcccaaaaagaagtaacaaaagactcattcatcaagtgaagaagaaaatcctttattttttgatgagcaaaaataataaattgctgttcacactggataagaccatatcaaaagtgacagtaaacatgtacactgttggtgttatatggggatggggttctcggta

SEQ ID NO: 145770 - DNA, 802 bp, Homo Sapiens
  misc_feature (135)..(145): n is a, c, g, or t
  misc_feature (218)..(230): n is a, c, g, or t
agcctttaaatctattttgcacaagtgttctgttgtacaactcaagtgctaagcttatctcagcatttctgtttatctttatactgtatcactgaggcaatttaaaagtacttttacaaaacagagtacctgacnnnnnnnnnnnccacacacggcacatataatgcatatcgaccccccttccccattaaggtatagcacacacacacactgcaagnnnnnnnnnnnnnctagtaagtaataatctgatcatgttgcccatccttcagaaagtcgcatgcgcttgactgagggactttccctttcgtccggcgaaggtctgttgagtccaatgggggagtggaattcgttccggtgatcctctcggtcgctcccgtcgtacgaactgctacagctgctcaagctgtcaacaggagatctccccgcctcgtggcgcgtgtgttgtgggtatctcgaaggggtggtggtacggtctcccaactgactgagggcagatggtggcatgttatgtaggtgttgctgttgccagccagttactgaaccaaggtgaagagcgctggcggtgttaaacccagacagagatgacaggtctgcactactcagagagtactcggtaccatatgttgttgaaatggctgatggatatcctttgattcactgatggcatcgtattcttgctgcctggtggaataagaactcggagatctggtttacggttattcatttctaaattcattgggggaggagattctgcttgcatattcttgttcaagttaccaagtgagaacaaccgaccctgtga

SEQ ID NO: 145771 - DNA, 574 bp, Homo Sapiens
cgcatcatggtttgtctaatccgtaggaagcgaccccgctgattttcctttaggtctaggtaatatttcctattgtccctctcgatatagtctgttttcaggacactgtgaggatgctcttcggaccccaccgagactggtggggagggtgccgagtgcttctgcctccttctggagccttgctctttgctgtggccatgctcttgccggtggcctttcaggcccaggtgggcatagtgctcgatgaagtcccctagacagtccttcagctccgctgccacagacagggagagggtcagtttactctttctgatgttgtcctgccggcctctccctatccagacttcggctatctttaggaagcggccccgggagctttgcttcacgtctaggtaaaacctctttttctggatgtccactcgtttggaggccagctcctggatttcggctgcgcccccggcctgattaggggtggctgaggccgcgtagtgggggtagtgggagtgctgggcctggggatagagtctactcttgcttaggccagagccccctacattcttgcctccgcggccgc

SEQ ID NO: 145772 - DNA, 383 bp, Homo Sapiens
ttttggaaattgcaaaggaaagagtttaattcacacaaagttggttaaacaggagaccacagttttgctgttactcaatttaccctcctggaaaattcagagactagggtttttaaagacagtttggtgggcaggtggctagagggtgggtgtggctgactggttggggatgcaatcataggggtatggaaactggtcctctctactgattccacttctgggtaggggccacaggaccagctgagtcctgagtctctggctgggtggagcacctggtcttcagaaatacaaagtcttggtagagctccctctgcgttgtgctgtggctttagggtccccatatcagccccggatggccgtcctgttactcccgtcctcgtgcc

SEQ ID NO: 145773 - DNA, 667 bp, Homo Sapiens
atgttttctttacaattacaatttattgaatgactaatgtacacattattaagtgaaattttacaagcaactagaacttatcacaaaactgctaaagaaacatccaaagcctgaattgtacaccaaatctctaggattaaatcttgattcccataatttaaaaaaacttgtgcaaattgcaatcactgagtgattatggaaaggcaaagtatatacagtaatgtgagagaaactcaaaccaagtaagggtaaaaatgaaatgattaacaccaccagaggaggaagctactatcaaaataaaaccatacttcctaataaaggtaaggccatcataaccccagaaaatgcttcatactttagataattaaaaacacattataaccaaaagcagatagtaacattgagtatgctgatttcaaaaagaagatgggtctagataccaggacagctctttttagtgccttccttaaaaagggcaaaactttttagagccatgtaattgtttatagccatggcctggcttcaggcatctcataagtgaggcttcagaaagtccttgaagagtatatggcagtgaaactgggctcccatctttaccataaagatgttcttcttgagaataagtgcatataggaagtgatcgcttatgacatcatttcattgatct

SEQ ID NO: 145774 - DNA, 485 bp, Homo Sapiens
ctcgattccagagttatcaaataattttcctattgtttcttcttgtgtttttagtttctttttttaatatttaaaaacctgatatacattatttggtagaaggtaagaagtatggattcaacttgagtttctttctagatgactactcatttgtttcattatttattgaaaatgcaatctttctactcatggatttgatatgccatctttattatataccgaattggcatagatattttagggttgtttctggaaattctattctattctggaaattctattctgttgcatgtctgtttttgtgccagtagcatacttttgattattatatcttgataatatctgttagaactaatcctactcctactctctgcccctccccacaacacacacatatgtaccttgtcacacttctttttcattatgacatttggctattgtgccttcttccccacataaacttaagaatcagcttatgtggttaa

SEQ ID NO: 145775 - DNA, 555 bp, Homo Sapiens
tttgctaggcacagctaaagtccattttcagttggatgaactaatctagctaagggacagaacagtcatgtacatagaagggctctctcaagtggcagggagggccactccagtttgcttccctgtggcctgtgtagagtacccaccggaagctgccagcccgctgaaggcccctgaagagactcatgttgcacatttgctattttagtccaacaatgcaggccccttccggtttcaggagctggtctcctggcactcagcaaacgcccggcttcaagaggcctcagagagccaggggagcgagcttccagcctgaaggtagggagaagctttcctgattttaaatcctcaactaaatgccagccatatcttgttgtcagcagagaggggagatcaagagggagcgatggaggagaatggagaggtggtaacaagagctgaaatttattgcctggtggcttgcattctccccagggcaggtggcactgtccactgggcggagggtctgctgtaccatgagagggttctttgcatggaaccaatcacaggttggta

SEQ ID NO: 145776 - DNA, 431 bp, Homo Sapiens
ttttactgaagcaactgtcctaaaatcatttttatttttagtgtttagctgctgagaatcacggtgtagttgatggaccaggagtgaaagttcaggagtaccacataatgtcttcctgctatcagaggctgctgcagatttttcatgggctttttgcttggtaagtatgtgggaagtgtggagagaactgagtatatacttgcttttatttgacagtcaccaaggcaagccagagcgtccattacttgcagaatttccatcaaagcattcccagtttccagtgtgctctttatctcatcagacttttgatggttattttggagaaatcaacagcttcatatttggttggtccctcacagccctgggaaacagggcgttagcgccaaagtgcagctgaggtcctgaactgtaaacggagatcccgagggtct

SEQ ID NO: 145777 - DNA, 439 bp, Homo Sapiens
tgtagactcaagagtcactcaaactcataattgcgtgtgtgtgtctactcattctccctctatctctccaataaccctttgagactcagaaactttttatccacatacaccctttatcacattttcttccccccactacatgtgtctcactttctctctgtatctgtctcgcttcttccgtctctgtcctacagcttggcggtaactgacgacctgtgagcttttagctgcaaactgcaactacgcggcaaacaatttatttagcccgacatctaggcggtctccggcaggaccctgcaccgcgtcgggatcggaccctttcgctggggcggcctcctgcgtcaaggccagcaggaaccttcctgtcgccctccccggccgccgcttcgcctccttcccgcccccggaggttgtgcaggcgctatggtccgcctggagg

SEQ ID NO: 145778 - DNA, 716 bp, Homo Sapiens
cagtatcacgtatttatctttaattcacatcacagcattcaaggaagtggggaaagggggaaaaaaaatcaagtggcagatttttacatctaaaattcacattacttgttggattttgaacatgctaccacaatatatacagtaaaatacctcttgggacaatggtccaaattttgtttcctttaactttgcttttctggtacaggtaagatcatttttaaatcactttttttctttaaacatgaatacaccaaaagaaatggttagaagtttccttgttttaaataagcacagaatgcgggaggttaaaaacacatttatagtgctgaataccaattggacatcacactctatacattttttgctcaaattcctgtacaaatacacagcattcaaataggtatttacaaataagcttgaaagaatgaaaatcagtattttacaatcttttcaaagggttctcatctctggcctcccatttcccctcagactgacttattctccaacaaaagggatttcagaatgtgtccttttcatttagttagggaaaatggagagggaaaacaaacggtttcaccttgcataatgcgaagccaaatgaacccatactcccctccctacctcttgtgccaccaagtggagaaggtagctgttcttatgtgatgactgccttgtccagggattgactttcagaagtgccttaaaatctaagccct

SEQ ID NO: 145779 - DNA, 910 bp, Homo Sapiens
  misc_feature (83)..(83): n is a, c, g, or t
  misc_feature (107)..(107): n is a, c, g, or t
  misc_feature (368)..(368): n is a, c, g, or t
tcaatctgagtgtctggcataggagtaagaatggctaaaggtctaagtcgtggacacgcagcaggagaagcagatgttctgcntttatggtattatatacgtcaggnacctgctgtgctgagtgtctgacgtccatagatacgggcatgctcagcaccagaagttggcagtgtaccgttgggtttcgtgtatcaattaccaccctagatgcctcttgaaatcgatgtaaagtgcacgtaggcagcaatgatcgtgcacatttctagagcaataggctgcatccaaagcacgcatcttcagccggttggtctgttgtgactcaagtctgtaggaggccaataacattagcagaagatgtgcggtcatcncactgtttagtgtcctagtggactttatagttttctgatcaccactggtatatgtggaggtgccatcaatacctgcaaatcttgcttctagttcttcacttttatttgggatgatgtaattattagatggtacaaaagtgcagcagggacagtgtaagcttattttaaatcccaggttcctgtctttatggtgaagccattcatgaacagcatcagttacatcgaaggagagccattcgccttctgctcttgttttcacaactttgctgtcgatgtagcgctgggttggagatgttaaatctttggacttgagaatctgatatagctcaatccgttgttcaggcactctggcttttgggttctgcaaacgaaagactctgaactctgctttcaccaaattggaagcattcttctccattgctgagacgtcaaatcgaacaattctgaagtagggtctgtagaaagtgggcgggatggcattttcggaggggaagaagggcggcatgtctattttgtccacctccttggcgtagtactcttag

SEQ ID NO: 145780 - DNA, 489 bp, Homo Sapiens
tctgcaaaatgctcataataaacctcctgtctacattgtgttccaatgaaaactttagtcatattttacatttattattaatataacatgctatgtaaatgtacaggagcctgacaaatgacaatctacttacataatttaaataacacaagtgcttgctgcagtctttattagtacacagctttgttatggcttcttagaaataattttaaaaagtgcatgattcttgtgggctactctgtttaggaaagattacagataacacatttctaagaatgaattagtcagctgtatatgggttcagattagaaaatattaaataaatacagggaaaaatatttttaattagcttaatttatatatgaagatattttatttaatttgtttttgagacagggtctttctctgtcacccagactggtgtgcaatggcacaaacacatctcattgcggcctggacctcctggcctcaggtactatgcctagctaa

SEQ ID NO: 145781 - DNA, 470 bp, Homo Sapiens
gtggttttaatagactttatattttagagcaattttaggtttacagcaaaattgagagggtacagagatttcccatatagttgttgtccccacacatgcatagtctccaccattttcaacatctcccaccaaagaggtacatttgcagtaattgatgaacctacactgacacatcattatcactcaaagtccacagtttacattagggttcactcttggtgttgtacattttagggggttggacatatgtacaatgacaggtatttataattatagtatcatacagagtagtttcgctgccctaaaaatcttctgtgctccaattattcctccctcccctcccccacccactgctttttactgtctccatagttttgccttttccagaatacatcccagtgtcatatagttggcatcatttaatatgaagccttttcagactggcttcatttagtagcattcatttaagt

SEQ ID NO: 145782 - DNA, 447 bp, Homo Sapiens
tttgaatatgtttttataattgaatgctatgtgtgcagtttccctctaatgaagttctctggtgaacaggaaatgggccatgtgctttacttgggtcagaaggaataactcgttctttaagctcgtgttcttattggaagtccacatggttgttcccccaggaagggagaagagctgggtagagttcaggatttggtagcattttttctgtgagtccccaggaagtctctaggccaggaccagagaaggaaatggcccttgaccattgctggtttgtgagccatccaccacccttctcttggaagttgtaatgtgggccttgaactattgagaatgcccaagcctacgtagcattcggcacttccctgcgctcaacacgatggatggtcttctttatgcttttcctcaacaacactagggttgccttgcacagctgggagacatgga

SEQ ID NO: 145783 - DNA, 244 bp, Homo Sapiens
ttttaattttacaatgtctttatttaatgactattggtgttttcaaacaagtctctgtgtacagtaaatatacataaagttctaataaacaacagtgcaatgcttcccaaagtcttaagcactagtatcagattcttacaacacagaaaccttttagtttgccaaatgattggattaaggatacagaatatgtcaaatactcacttgtggctttccaggtcaccctctcccgccaaacaaacac

SEQ ID NO: 145784 - DNA, 370 bp, Homo Sapiens
ttttataatctgtgttttaataagatcccccaagtaattcacatacacattaaaatgtgatagtgactggcttgggaaagcagtgggagagaggaagacactgagccttgtccctcgaatgcagtgtagccctcttggatattggtcttgtctcaaccagcagaatcacttctcctagtgaggagtgaggaaccggtgaagcagggggcttgaattgtgcatgccaggactgttacctcctgaaatggagtagaccttttcccatgaagctgtaggaatggaaatttccctcctaacgcacagatttccaaacaggattcaagagaccagggttgtagtcccagccatttgccgattttcctgattatga

SEQ ID NO: 145785 - DNA, 635 bp, Homo Sapiens
  misc_feature (620)..(620): n is a, c, g, or t
actcggtctacttgtctgcaaatggggatagaatgcctgttgtaaggacagtgaatgatctgctcatgccaacttacagaaggtacgaacataaacgccgatctcctttattctgatctcacattcagcaaatgtgagagaaatgtgaatgtactgaaatgtctgccagagaaaagaaaatccaacccctcaaaagaatgacatcaggggttttgatatctattcacctacacttccctcttccacaggaagcggcccaccttctgacccacactgcccatctctgtgcttatcatggagctttcaagagtgaggatcggaggctgtattgagcagtgggcacaaaccacagggagcgctgttcaaaaatggaaaagaaggtgggcctgacaccgggtgctgctgggcaccctctcagacctgccctgcaacagcatcaggaggctgagggtccccagccagaaggcccaagaggggcccaggctggaaactttactgcgaagcagccctcatcttaaggtggctcaacaccacacctgagatctagcccatgcgacagtatggaagcaggaggccctactccaccacagaaagaacatttatgggcgcctaagccctgngagaatggcacctga

SEQ ID NO: 145786 - DNA, 863 bp, Homo Sapiens
  misc_feature (22)..(22): n is a, c, g, or t
  misc_feature (73)..(73): n is a, c, g, or t
  misc_feature (147)..(190): n is a, c, g, or t
  misc_feature (302)..(310): n is a, c, g, or t
  misc_feature (584)..(595): n is a, c, g, or t
ggggcgaagtgtaggggcaggnggtggatactgcgcctggggggcggttctgttagcaattgcgggtgagggnacaacgacgggcgctgcccaactccccggagagggttaggggcagtggatcttcgccggttgttcagcgaagtnnnnnnnnnnnnnnnnnnnnnnnnnnnnnnnnnnnnnnnnnnnnaaacgtggagggcgcgccggaattacgtcgtgaggatctgtgtttaaaaggttttgtgctgcctggttagtccagggaattcacagggtcattaattaccacccggacgtcnnnnnnnnntaggccgcctaggaggggataaggtgttcctctccaaactttgtgtgaaatggtatatttacctcccctgtcttgttggccatcacctctccttaaccctaacttcttgcaaaccctttaaagcatggacttgggaaatgtcagtgaccacctgccttctctgaccaggttcaaaaggctagccaatgcttgtgtaaaaaaaagaacaccacatattgttgtattatatgcaattggaaatgttcagttatcgcactttggtatccttttcagnnnnnnnnnnnntctcaaaacttataaacataagcatggcattttacattgtaccaactgagtaacagtaaatagatgaggtgtgaccactataacttcttgaccaactttctatcttgaaactacacacatccaaccctaccagctaccattctaattctacaggatattttccagtgagacaagctgtacaatgaccactcttttcaaaacattccagaccatttccattttcttggatcataatatcgtgctttttctctttctgttttttaaaccc

SEQ ID NO: 145787 - DNA, 450 bp, Homo Sapiens
ttttttttaaagaaagctcaagctactttttatttcaaaaaaagactgttaataggagtttcatatcaagtaaagtttgttctaatgaagtttttctatacatggaacactggggtacaactgaattagaaggtcctcagagatcaccaagcagtacaagctaagacaacctggtcaccctcctttcctgaggtgccggtaaaatgcacagataggtaggagtccagaaagatcccccaaatgttatatccacacaactgtgaaaaggtggctaattgagatttctcccataaacttgaatttttggaacaaaaactagtggagatcttctgaaaaggctgtatctatcttctgcataatatactgacatactcttcttccctctcttggatgtacaatgttattttagcaaattatcggggattggaaactgaacagagaagaactgtc

SEQ ID NO: 145788 - DNA, 970 bp, Homo Sapiens
  misc_feature (23)..(23): n is a, c, g, or t
  misc_feature (102)..(102): n is a, c, g, or t
tgcaccacttttcctcctccctngaataaatacgcacctttcccttttccctcaggccacccccaaggacgtcagacctgggggctcgcatccagtgccccncgggatacccgcagggaggcggcactgaggagctcagtgggagggagccacgctgccctcggcctcgcgtttgcctttgcccccggggggctccactgcgccgccggccttgccctctcccgaggccgccccagccgcctcctccttggcgccctcgtgggttttcatgtgcttggccaggtggtcgctgcgcatgaagacgcggctgcagactgcacaggggaacttcttggtgccggtgtgggtctggaggtggcgctgcagctcgtccgagcgcgtgaagctcttgccgcagaagagccagttgcacacgaagggtcggtcgccggtgtgccagcgcaggtgcgccttcaggtgcgacgtcttggcgtaggctttcccgcagcccgggatgtggcagttgtgcaaatgcttcttcttgcccccatcgggcccacatggagcccccagtcgctccgcctccagacagttggggcagcgacagacggtctggcctgagctgcggggcaccgaccgccgggagcctttgggacgcgccgccccgtccaggctggaatccagcccttgagactccggggcggctacttccaaggccttagccccgtcgggcggccctaggagatgctgccctccggcagctggaaggaggtggtgcgcatgcgggtggggtggcggggcacaaagctggtggtctccgacgtagccccccaagcccgcctgaagcgcccccgggtggccaggtgaggtcagcgcgccctgagtgtgggggaggtccatccagctggtgcccggatgaaggtcccaccacgagccatcctccgcgcctgggtgagtccctcgtccgaatcgccacccaggcctcgctcct

SEQ ID NO: 145789 - DNA, 443 bp, Homo Sapiens
tttagtttatgaagaaaagaggtttaattgactcacggttccgcatggctggggtagcctcaggaaacttacatttttggcaaaaggagaaggggaagtgaggcagacggcaagatgcaggggaagtgccacacttttaaaccatcagatctcgtgagaactcacttactatcaggagaacagcctaggggaaaccacccccttgatccaatcacctcccaccaggcccctccccatggggattacaattcgagatgagatttgggtggggacacagagcaaaatcatatcaccctggcttccatcagatttcaaagaaatccatgattcaaaggcaatttagaaccactgggagattgtttttcattcattcaacagtatttactgaatatccactatgggtcaagcgttttgctcagataaaccatgtccctgactttcag

SEQ ID NO: 145790 - DNA, 386 bp, Homo Sapiens
tttactaaacactttacatgctttatttcatttgttctcataataaccctctgggcagagctcaatgcccctattttataaaccaggaaactaaagcacacagtgattactaagtggaaaagctggtttctgttgcagagagttgggtctcctgtgaagtggcagggagaagctgacagataaagttttgttaggcaccatcccaggtcctttgcagtcatcctctcattccaacctcttatggtagaaactgaggcttggggaggttaagtaacttgttcaaaggtatttgatttaactgtgcatctatgatctgaatccaggtctgtctgattccagttgcttcttaacaattgcagagtttgattgtctagaaaccactggta

SEQ ID NO: 145791 - DNA, 331 bp, Homo Sapiens
ttttttacaggataatactttaattacgaaaagcacaaattatgtatcattggaaccagcaaacacacagtagcaggaaggatgcttgctcccaaggctcttcagtcatcagaggacacactcaagccccacctgagtcttctccccattccatcggccatccctgctcaggatgtggtaccagggccattcccaacagcctcatctcagtagactccagtttgtctaattctccttcaatggtgctccttcgtcacttctcgtgggctggcggatagagcccggcggctcccccacccactcggctcgcagcccacgctcccgacgcccg

SEQ ID NO: 145792 - DNA, 441 bp, Homo Sapiens
tgcccttacctcctagggtcacctctgctgccattctgaggaacatctccaaggaacaggagggactttggctagagcctcctgcctccccatcttctctctgcccagaggctcctgggcctggcttggctgtcccctacctgtgtccccgggctgcaccccttcctcttctctttctctgtacagtctcagttgcttgctcttgtgcctcctgggcaagggctgaaggaggccactccatctcacctcggggggctgccctcaatgtgggagtgaccccagccagatctgaaggacatttgggagagggatgcccaggaacgcctcatctcagcagcctgggctcggcattccgaagctgactttctataggcaattttgtacctttgtggagaaatgtgtcacctcccccaacccgattcactcttttctcctgttttg

SEQ ID NO: 145793 - DNA, 508 bp, Homo Sapiens
ttttttctacgtcacatttatttcatcagctgtttgccaaaccaagctggtttccttgctttggcagttggtttccttgcttgggtctcacttgatttccaagttcccagtttcagccatagaccctggcatctccactcatgggcaccaccctctcttctgggttcagtgatgatgtctgctaatatcttccccaactgaagctgtgctggcggaagcagagatgtccttcttccttgattgtagagttagggtccagggtagtaagctgattgactgaacagctgtgtcttcaggttgtggatacggcctcctgatggctgctctccagagctgaactgcaatcttctcaactttggggtcatcaaggaatctggaggccttatgcttccagtcctgggtgctgatgtcatgggtgtcatggagcagttgctcatccctcgaatccgagcatcttcctgcagctccttttgtatatccttaaaaactgtcagcacctggtcccaca

SEQ ID NO: 145794 - DNA, 865 bp, Homo Sapiens
  misc_feature (777)..(811): n is a, c, g, or t
aaaatgagattttctatggaatgttaataaaattaccaagtgtgtaattgatgacagtattgtgaaatgcatacaaaagggtcataaaaaaaacctgataaccactgtcccccccatcaatgtacacaattaggaaaatatttacacactgtaaattacaagcaatataagcagtattttatactttgagattttgtacactttacacaatgcaaaatgagaaaaatatgaacacgtataaaattacacacaaataatgtatctacaaaggattaaattacagaacgaaagcccccatcgttgggcagatagatgccagagtttcaagcttctgtcaaatagaactctttgtatctatctctttaaccataagtggcattttgtaacaatacccttgagaggtagtatcaagataataatattcttaccagtaaacaacacagaataaaacttttgttggtctgactcttggagcctcaatcagtttaggttcttggaaactggatttacttagtcttccctataaaatctctgactgccaatgcttgattgacatgagctcaaaagttactgatgctattttaaatgataaatttaggacaaaatgctttttactcctaagcctcaatttagaggtagaaagttattttattttcttgcctctcaaaccgcaaacatcaagtccagtttctgttcccctccatcatctttccccccccacaactggagacactagagcactcaggagaacaggtcactcaagccaatactgaaagnnnnnnnnnnnnnnnnnnnnnnnnnnnnnnnnnnngaccgcgtatgcggccgcaagcttattccctttagttgagggttaattttagct

SEQ ID NO: 145795 - DNA, 344 bp, Homo Sapiens
aagtttattctgcaacaggttgaaaaataaataacgaaccaaactgttttaaagtctcggtgaaattcttgatcttacagggacttctcaaatgataggtaatacttacagatcctgttctactttcttgtctaaagcgtattccaaatcggtaactagcattttctggtacaggtcctgcagagcctgcctggatgtccagacttcagctggacccagcttagaatctgtcatgtcagccttcaggacttctgctgccggaggtactgcgcgctctgcaggctcatcctccgccgccgccgccgcgtcttcccgcgaagcctccgtgggtctctcaggctcct

SEQ ID NO: 145796 - DNA, 602 bp, Homo Sapiens
ggccgccagcacccgcggtgccgcggggccgctccgaggagcctgagagacccacggaggcttcgcgggaagacgcggcggcggcggcggaggatgagcctgcagagcgcgcagtacctccggcaggcagaagtcctgaaggctgacatgacagattctaagctgggtccagctgaagtctggacatccaggcaggctctgcaggacctgtaccagaaaatgctagttaccgatttggaatacgctttagacaagaaagtagaacaggatctctggaatcacgcctttaagaatcagatcacaacactacaaggccaggcaaagaatcgagcaaatccgaatcggagtgaagttcaggcaaacctttctctgttcctagaggcagctagtggcttctatactcagttattacaagaactgtgtacagtatttaatgtagatttaccatgccgtgtgaagtcttcccaattgggaattatcagcaataaacagacgcataccagcgccatagtgaagccacagtctagctcctgttcctatatctgccagcactgcctcgtccaccttggagacattgtgccatataactcaccccttcttgt

SEQ ID NO: 145797 - DNA, 350 bp, Homo Sapiens
  misc_feature (78)..(78): n is a, c, g, or t
tttagtcaagaactgggctgaaatctcaattttgtcattaaggagataggtgacgctgcaccaggtgagatttaaccntctctgaagttccatcagctcttctaaaatgaatgacttggacaagatcatctataagacatccatgtgctctaatacttcatgactctggacaggatagagctcacactgggcagcaggaaagtgacgggaacaggtcagccctggagtaggagcctggactcaaatcccccctgccacgcccctgccatggagccctgggaagccacatgatgtttcctatcctcatttgtctcattaatgcaatagagatcacggcaccagctttgtct

SEQ ID NO: 145798 - DNA, 743 bp, Homo Sapiens
tttatcttggccaggctctttaatgtgttttactactgttatcatcaccatctccattaaacacaacatcaccaatctcattgcacagataagggaaataaagcctaaagaaattaaccaagtgatccaaagtcaccaagagtaaacgtgtggagcaggatgccatctggtcttcctggaggtcagtctgcgaggccacctagatggtccttcaaaccgcaggacagcagctcacgctgctgtgtgggcaagaagcggcctgcatctcatcagagtttggggatccaggacccagatctgctgctccgcagttgtgtgaccttgggaaggtcaggtcccaccctgggtgtgctcttctttcctgaagattcaatccggcctgtgtgctaggagtggagggcctgctggagtctgaggaagatggcagctgggtcggtagcagggtgagcagggtctgagtggggccaggcttcccacactggacaatgatgtccactgtaaagcccatgtcctggatttttgacaaacatcttagcaatcgacctgacactccactatgtccaagttgatttgtttccatgctggacatgtgtctaccaggacgtgctcttggctgccactggcagggcctggaatgaggacacttgttgtgcaccttgctttggagccccagacaggcaaaaaaatatccatgtggcttcacccaggtcatctctttgcttgtatgaacctcaggccaccct

SEQ ID NO: 145799 - DNA, 691 bp, Homo Sapiens
  misc_feature (606)..(606): n is a, c, g, or t
  misc_feature (638)..(638): n is a, c, g, or t
tttgcagttataaatataggttattatttaagtgttacgttaactttacttattaatatgcaattacagattatcttctaaagcaatgcataaacaagtgggccttcttgcttaatatctcttttttctcccttcacttcacttgggacgtttagtataagttgcagtagcaatcgcagggaatttctaccttgagcaccagtttcaccaagctctgcagtccttggctgtggtcaggagggtctgcttcgttcacgcactgtctgtttggtagtgtgcagagatggttttcttttgcacctttaaggtgtcatcctggtgtctgtggcattctctgacctcattattattggtcactcttctcaagatcagaaatgagaatattttcttctaaatatactgtactaaagttggttgcaggatagtgaggattccgaaaccctgcaagtctcctgaagaagccaccgttatgcttgtatatgcagaaggaaagtgtgcaaatggccacaatgactatcagtgtcagtacaaccgcaagaggaatgatgctgtgacttggtcctttttcttgcagcgcctctgcagtgtgaatatctgcctccattntacatataaagccttttttttcttgacacggngatagctgccataatccttcagggatcctcaaggccacacaatgatggggcct

SEQ ID NO: 145800 - DNA, 1139 bp, Homo Sapiens
  misc_feature (119)..(127): n is a, c, g, or t
  misc_feature (323)..(332): n is a, c, g, or t
tcatttgataccattgctctttattggcaaatgtgtagtagaatcaaatccattgatttgtagtctggaataggaatcttctaattatgtttccaaatcataaaaatgactgttaatgnnnnnnnnntcaaaagcatgctccagtaatggttgctgttcattattatggccaggtatagaacatacatctgaaatgaaatacttttgatttggggaattcaggatcaaacttggctttgggtatccttgaatccagctgcaatcaaatcaaagctttgagacgtttttgaaacggaagcagcaacattgtgaaagatcaaatnnnnnnnnnntcagtgcaactaagaatcgtcttgtgaatttttagccatggtggtaccttgcataacagcagggtctgcagtgaatacacagtacaaaagctgatgaaatggctccctgaaagcaggaaggtaatgttttgaagtctgaagagcatctaaaatgggacgtgcttgacacctatatttcaacagagaaatatccagagaaacaaagtggaggccccccggatcacttttgcaaaaggtcttttaccggctttaagtctctctgaagggtttgttgagaatccagtccaaagtttcccaaggaattttcttcctggattccacttttgaaagaattccctgccatgctttgccacatgccctcaccatcttgtccaggagtacagcacatcataaagctaaggattgccttcagtgatttcattctgatgttttaaagtacttttttttagtctcttgaccatctgaatcagcatttttctcagaccagtatctgattttctaacaaactctgtacaaaaaggagatacggaatcccttagggcttccctaaatttggggggaacataaccttttttttgatagtatcttcacaatatctactagagttaatgaactgggagattgcataaaggggtactgtaagcaggtatagcccatatcctggtttaaaatgcacactattcctcttattttggggccatcccatttgaattagcctccttcccttttggagctcgatcacagccagaggagccaattagtgagtggagggcatgcaccttgaggttagcctcgtgccgaattctt

SEQ ID NO: 145801 - DNA, 609 bp, Homo Sapiens
tttcagaaaaaaaggttagtattggtagtcccaagttttataaaagacatcaagtaaggccagcaatagaggaatcaagtttctttttcgggttccctggggtgatttcctatcagcttcacgttcatgagctggggatttgtaaaatgtgagatggcctttgactttgtttttgatgcgatcagcagcggcactgtctgcaatccaggcccagcattctcagacagcgtgcagtacggatgcttctggctggcagggaggtcgtggcagtgggctgactagtgtgctgtgttgggagggctcaaagggtgatggggcaagcctccgtgcaaagggagttcctttctggtcgtgcgctcctttttggctggagcttggccggagagattggctgccattctcatccctggatggggtggaggcgggtcgcgaacaacctcaaataattgaacagcagctgtgaccctcagaacagcgtttcttctttttcttggggtggaaaatggtgaggattgcttcatcaaaaaccgctttgagacctttctgagtcagagctgaacattcccagtagcactgtgctccgatcgcttttgcgagcttccaccatgc

SEQ ID NO: 145802 - DNA, 498 bp, Homo Sapiens
cccaaattggtatacagtccctttgagcttagaagttcctgctcctttctctggctggagcggcaagtaattttgccttagggccatgaaaggttcctacgagagtctcccgcgggtttgcgatgttcctctttccaagtcactgtgctgtttctttagctcctcgtgttggcttttcaacacctgatgttggacattcagggcactgtatctgctattggaatcttgccttcctgtatttaatgtttctgtggcttctaacttataaacaagaaaatcttcctttgcttttttatgttcaagtctttctttttgcaaggatttctctaatcttgatctgtgttcatatacaacttgtaactgggcggagagggactcctggtgctgctggtacttgagcgccatcgcctcggcttgtccgcagcgcgtctgcagctcgtagtagagcatcgcgccgtagagaaagccgatcacgacggtcagcagcagcagtgtctg

SEQ ID NO: 145803 - DNA, 373 bp, Homo Sapiens
  misc_feature (175)..(209): n is a, c, g, or t
tttttcatgtttaatttctttattttctccagaatatcttaatattgaaacccaagttgttactttgagaaagggaaagacagagaaacatgaagagacaaacatttcatttcatttaacttatggtattgtgagcagtcacttttgtaggcaacacttgttttctttgtagaannnnnnnnnnnnnnnnnnnnnnnnnnnnnnnnnnncatgatccctgaattctaaacaaaacactgtctaaaaattttcttaaatgcttgttgcactcagtcacatttagtcaggtatcaaagcaagcgtaacagtattaaattgtcgcagtcttactgaatcaactgctcccccttctgaggattttacacacctttct

SEQ ID NO: 145804 - DNA, 544 bp, Homo Sapiens
gaaagacagagaaacatgaagaggacaaacatttcatttcatttaacttatggtattgtgagcagtcacttttgtaggcaacacttgttttctttgtagaaaagaaataaaaaacaaacagcaccattaaagaatgcatgatccctgaattctaaacaaaacactgtctaaaaattttcttaaatgcttgttgcactcagtcacatttagtcaggtatcaaagcaagcgtaacagtattaaattgtcgcagtcttactgaatcaactgctcccccttctgaggattttacacaccttttctgagtttttcctgtgggaataatatattctttggtagaggactgaaggaggattttacttttctgtatgctgatataaaatgtctatgtaggttcagggccttcgcccccaatctgtgtttgtcatgcatgttatgtttgggttgatttcacattttgctgttacactgtaggagtaataccgcctttaaaaaaggcattaaatggctaatgtcaaacagatgtaaacattcagaatactgacc

SEQ ID NO: 145805 - DNA, 319 bp, Homo Sapiens
ttttttttagtctgatcagggaatttaatgaggatggataggatagccccacttttgtagtttgcagaagctttccccctctttactaatcagagctatattttgccatttctagcgttccaatttctttcacagtctccatgttctgtaaagattatcagcagaggctttacagcttcagaggcgagttctctctactccctggagtgtaatttgtcctggccaggagacttgagctcatttacggcagcttggtgctgttagaatcttttcactcatctagagcttcaattttctcttaccaaagttttctttttct

SEQ ID NO: 145806 - DNA, 447 bp, Homo Sapiens
ttttacttcttttgcttggtggttttattgagttggcgacctttattcttcctgaagtctggtctgttcctaaaggtcggagacttgcgagtggacttctttttgtctgatcgtcctgattgcttggacgggacacttgcagggggttcaattataacgaccttcttggcttctttcattttaagcatctgaattcgtctcctctccagggcatcacattgtatgcgcagtgcaacaagcagccaaggctccggattcttgaggagaggcacaaaagctctgtaagcattctccagcctggttcctggtggcccacgttccaccttacaaacgtagtaggtgcttcgagctgtaaggtatttgctggcatactctgcatgattgggcttcatcaggaaaagcatcttcattttccccgtttgttcacacaaatcgatggtgttttac

SEQ ID NO: 145807 - DNA, 494 bp, Homo Sapiens
aaaacttttctcacttgttctgagtacaaaccgaaatctgaagacgcattagaaagcccaggcagttgcaacatcatagaaggataaacagtttgtttccactggttagtgagctcattccaacaggaggcactaaaacaggcagagaaaacaagttcctatattagaattaatttttagaactaatggtgtgttcacctccttctgtcctcaggaacgaagggtctgagaaaattagccactataaagattatggtttgcatttttcaatcaacatatgttgagatgaccccccattcccccggccagatggacttaattaatattggtgtaagtagataagattaccaaacagtaattaaagtcactggtaatggcacaatgctgttaaaagtgactatatatctagtgtgactaatgcagaaatggaagtacaagcaacaacttcttttggatacaaatccttaattgaactgcattaaacttccaccaac

SEQ ID NO: 145808 - DNA, 587 bp, Homo Sapiens
tttttatgtcatgcattttattgatatttttaaaataaatcgcctccaagacagatatgggtgatcttgatagtgatttttccctctactggtttcttaagggatgatgagcataaaatagttggtataagtttgctctttcacacttggattttatttttgttgagctcctaatcatttagggttacttcagaggtgacttgattgtaccctctgtcacacgtaatgattataactttatcactgtcaacctcactataatatttcatcgtatcactgtcattcacatgatcaccgtatgcattgttcctggaatctaacttacgaaaggacctggaagaggacttgactttgcttgaaacatgtaggttttgagtgtttttctcctttgcctcagaaatatcattgaccaaaggcctataagtttggcaacaagatgttttttcttgtagggttgacaagtttcagctaattcagagttggataataaggctgccctgcctagactcactgacctttttggattaaaatgtttgggaggcttagccaattcctgtggaccgaatggcttggatggtgagatttca

SEQ ID NO: 145809 - DNA, 755 bp, Homo Sapiens
  misc_feature (439)..(485): n is a, c, g, or t
agtttttgtggggaaagatgattctgtattattcagtagcatagacattttgcatatcaaagatgttcatttggcactaatgttgattgaaatcaaatccatctgagatgcctagctcgtatttgcattctggaagcctccatcgcaggggagctcggcagggtatgtgagctttgttggaggtgcggtgtttcattctgcagctgttgtgaggacagagaggcatggcccacaggcaaaaaaagtcaccacccagaagatgctctgggatagaggaactgctccttttcatcagctcttccaatgccgtgggagaggtgatcccagtcttctctgtacatcttgtgcttttccattaagacttgttccagtgggaaggagctttggaaaaattgcaaaggtctgaatcttcagggcattttcatgacaggacttgccnnnnnnnnnnnnnnnnnnnnnnnnnnnnnnnnnnnnnnnnnnnnnnnagctccagaggcctaactggtttctcaagtcatttcagtgatatcattgaaacgtttttgtggtacttccctttgtctttcactgtttcatttttatattgcttcatttacttctttgcttttggctttgttattagaaaaaataattatgaggtctgttgtgcatgttgactgtgatattaagttatggcatgccattaagttttccagacgatgttggatgtatctgattagttcatgtcatctgtaaatacaattcttttttgtagt

SEQ ID NO: 145810 - DNA, 1088 bp, Homo Sapiens
  misc_feature (539)..(661): n is a, c, g, or t
gggagtgtatgtcgataggtatgcttgtgattatatacagcctggatgtggtaggttgctgttttttgtgttcgtggaatcgtctttatcgtatgtgtatattgttggttggtgtgtagacaggagtggatgtagtatgtgattgttggtgtgagtaagacaaagatcttgtggttgtttgtattttttggttgtcgagatttaatgtgtagtgtagtattcgtcgattgtgttgttgtttttttggatagtatgttaggttatgatgtaattggtctgaggttgcaatagagaacggcgagtgtatgtcattgttggttctgatgtgtgagcattagtgtgtgggtttgtgagtaggtggtactgcagtggatcactgttggtagctaatatgattattttggtggggaaggaaggggaatgatgtgaggggtggatggaggtagtgaggctgagtaaaagtgaggattcgactgaggtcaagggaaggagagggtgagtgtgcgtgcgtgtctccaatcaataagtagctgtgttgnnnnnnnnnnnnnnnnnnnnnnnnnnnnnnnnnnnnnnnnnnnnnnnnnnnnnnnnnnnnnnnnnnnnnnnnnnnnnnnnnnnnnnnnnnnnnnnnnnnnnnnnnnnnnnnnnnnnnnnnnnnaggattcatcacctaactttaatgctgaagcgtttggagatcattcggactaaccctcatgttttacagttgaagataatgatactggagaaggactcatcccaaatcacccgtcggtggcagagcctgagacaaacctatgtctcctcccttcactcgtttggggttgttgctggactgcagggactcgaagtaagtagagaggggtacagggcactggaagaagaggtattttgcaggagtctgttttttcctgctcccaaatcggtgggatgtcagcgaaggatgggtctctggaggagaggagctaacaaggtcttctgaaaaccatcactgagggtgctgtggttgggaactcgaaaccttgccagttaaaaacgtttctgcgaatgtggtttctgagggcgaggaagcctcccccgcccca

SEQ ID NO: 145811 - DNA, 344 bp, Homo Sapiens
  misc_feature (221)..(221): n is a, c, g, or t
tgtggggctcaccaggacttaggtaggaacatgaacctcaaggacggacgaccttgagattgccgcgctagcagtgagctccagcctgcgccccatccctctggaagcccgacttcttccgaaaaagcagcagctccaggaagcggccagaggggcgcgcacgcacctgctgcaaggagcccgagacgctggaagagtcggtactcctccgcttccggcgnccgtggctccacgctgtcccgccccaacacgtgccgccgctcaccccgccggtgacacttccactaaaattggcgttcccacagcacgtgacgtcccgcagccccctggcgtcccgcagccgc

SEQ ID NO: 145812 - DNA, 518 bp, Homo Sapiens
ttttttattcagacaggagctctaactgttcctggcatagttttttaatttcttctattgaacagttctttaacacatcaggaagcatcttctgtaactttttctctcctataatacagaagcactgctgaagcatttcttttttgtctgatatatagaaactaactggtttcaatgacacagtcaggtccagtccaccttcttcaaggtcactgtgctctgccaagaataattctttttccaaagttggcaaaatatatttagtttcctgctgcaaggagcccgagacgctggaagagtcggtactcctccgcttccggcgctcgctgcgctccacgctgctcccgccccaacagctgcggccgctcccaccgccggtgacacttccactaaagttggcgttcccacagcagctgacgctcccgcagcccccggcgctcccgcagccgctagtgcttccactgctgccgctggccaacgcgggtacgatgtccggggccgcgagcgctgcggccgca

SEQ ID NO: 145813 - DNA, 386 bp, Homo Sapiens
ttgctttcagtaacattttacccctactcccaaaggtagcttaaatagacagattacacaaatgtaagtgataagaataagattagacagattttgctttcacagtagagtctcattatagtcctaaaatagctcatgggcttctccgcatccagaagggagaattggtccctggagtggctcactaagctcttaatcagcaaacgcagtgagtatcaacctgattgttgccaggaaatccttatgaattaaaacaatgcatattttactacagtacagagtttaaatgaatacataaatgtagaagtactgaatgtatatatttaaaaggagcctcttgtattcaacaaaagatggatgcatatataagagagatgatttaattt

SEQ ID NO: 145814 - DNA, 455 bp, Homo Sapiens
  misc_feature (441)..(441): n is a, c, g, or t
ttgtggtttatatttttatttgactaattgtcaaggggaaaaaagagctttgggataaatctgatgagttcagttttggatttatgcttgaagtcctgtttaatgccagatggcaatggtcaacaatcaattggacctatggtttctggtattcagaagagttctgaactgcagatagagatttaagaatcacacttcgagagtggtagctgaagctcatcaggatggagtaaatatggatagctggtaaagaagaatcagaggagaagcaggtgcagacctggaatcccaagtcttctcatttttctggaaaacataaccaggtctttcaactatactgattgctcttttctggactttctgttttatcagaatcctttaaaaactgtgaggcccaaacaaatatccaagtgttcagtcaatttcaatatactgcctatnctgttgagcgtcca

SEQ ID NO: 145815 - DNA, 592 bp, Homo Sapiens
agtatatttgctgcagatatcccatattagcactgaaaagtcagctctgtgcttatctaaaccagcagctagccagttactatccagtggattccaggcaagggtattacattgtcgtgcatgttttggaacaaactcttttcctatcaaatctttgaactttgagttatgatcttgaccaaggcttgtaagtacaactcgaccatttgcttgtccaactgccagcagacattcaggatcataattaagataccaggcaacacatttcatatagggtgtatctgaatttattgacagtaatgtagctgcagagtcttcagataaacgtaaagatccagctttgagttctgaattcacagtagattccacatgataaagacttagttctgagtcacacacaacaaatctatcaacatggtgtggtgcccataaaatatcaggtttggtaccgctcatgtttactgatgtgatcaaagggtccactcaggtccattcactttcaagtttaacaagtctcacttcccatcagtgatttctcagcaaaggaaagccatgctgattctgtgttcattcaccagaatatgtgcaacag

SEQ ID NO: 145816 - DNA, 983 bp, Homo Sapiens
ttttttttcaaattaaattataatttaaaatatatattatacatttgcaattatttgaaatcattcaatagtttgttgcatgttaatggagtgaaatagagataaaaggcagtccacattcatattttcaagacagatttacttcagaagtcaattgaaatccttgctcatgttctaagtatggccattgtgataagacctaagatataagcagccactaatttttgattcacacttaagtggaggtagagaggcaccagcgattccacatcccccagtgtaggcagcatcagggctgcaatgcacaccactcccaggaagacagttagtaaactaggtcctgaggatacagctctgttttctggttgaaacgactgctcaaaacataaactttcagttaaatgttccttgtaatcttttgttcctcttcttccttcttgttgttcttcttgctgatgggagaagagtagctacaacctcttttcttcccaaagccttcctttggctttgctcggaaacttggagacggaatttgtctattacaccatagtgacaggatcgaacatctcgatgacgaatcacaatatccacacaacactgaggctttactgcacctgcagcatcaacgacaacatacttatttggagtagtacacaaaactttgaactttaaggcaaactcatagggattgtacagtgtcaacacttgcttatgtgttgactgatcatctgcataaaatatgagctccgtggggaacacgaaaacaggaagatttccttccactaactctggttgtcttttttgttgatgcattggcactgaatcccccttgctgcagtttctgtttttacagtctcaaatctattttggacttttcttagattcagttaaaaactccaaagcattttggcaatctcggcaacaccggcttcctcggaaagcagctgcgactgctcctccgctcctttgtcagcgtctctccc

SEQ ID NO: 145817 - DNA, 481 bp, Homo Sapiens
ttttgaagggagaagtgaaaatatacactttacaaattgattctttacatcttgaagatggatttacaacagtattactttatacaaattcctactttatacaattttttgtttaggcagcttttcagtaacatttctataataagttacacatgaagcctcccaaaagaaagctgagaagcttaaaatagccacatgcaaaggattgatgacagaggggcaaagagggcgaagccatcacactgctgcttcatagtcactaggagttgagggaccctgaccctcatacatagctcaataaaggccgacactgggatcttcattgctttcctcagcttgtcttcccaagaagcaatgtttcatcagaagggattgggttttcgccagcactatggcaaggaaagactattttaatataggctgacactagcatggactagtatgtagttagtctgataatgaataaccagctctggcttaa

SEQ ID NO: 145818 - DNA, 336 bp, Homo Sapiens
tttttagtgtttaatttaattttattttaggagcacagtctgtacacctttctcttagccagaagtcttacccttacgtctgtcatggggaagtaggaagggacatggatggcacaggatataacttcacttctaataacacaacttgaatttcagtactcttcatgggtaagcccacacagctctttagctctggttgctaagaacagccctttaccttgtgctccactctctctggaaaaccctccagttattttgtgagataaacaataggtgtctttgcttcagtgaacttttgcttgagtttaatgacctgcactgactggatgcagtttc

SEQ ID NO: 145819 - DNA, 889 bp, Homo Sapiens
ttcggatctccttcagtcaggcagcacatagtcatctgagggggccgctgtgctgcgctgtagcccacacactgcggagaggccatgaagtgcgagcctgcagttcccgtccttcagcatggcacaggcgttcttcccagtcagagccaatgcgcagatgaatgcccacatagtggccggaccagctgggcatgaatctgggcctctcccgtcttcaccatttcgtctgaccataccatgtacttctgtagtggcctgtgttcctctaggacggggaactgggctggggctcctggcagggcaagcaccggatgttcctttggagaaaatctctggctccattgttctctgtaggaagcactgaaggaaatgcctgtaaaaagctccgacttgttgaaactcacatgaaactgatcccagaatgggccaaaggggtttccttccttcatggggcacgtcttcttatctgggcttcgctgggctgccacctcaaagcagtatgccacccgcttctcagggggccagtgggtgggtgccagcttctccatgaaatcctccaagctgatgacccgatggtaagcctggaggggctccagcttgaagtacttctggtaggacacatggaggttggtgaaaggaggcttgtgatgctggtactcaatccaaggagggacagccaaggtacggtttagcagctttgcaaatgccagagagcccaagaagtgatcggcctggttcccaaagcgcgccatgcaggggcagtagagcaggtaaccggccgggtcccaggagcccgcgggcatccccgggagcggcagaagcagcagcaggaaagacacgctcagcggccgtgcccacgcggcggcgcccatgtcggcccgggaacccg

SEQ ID NO: 145820 - DNA, 394 bp, Homo Sapiens
aatcaaaaatttccaaaataaagtgagtgatttccccatcccccaagatgcagtaagtcttgttggctctccctcaggcttacagcaagtcaaatggaaagaaaagcaagaagcagctgcgagggagaagatgcggtcccacgcgaggacggatgggctttcagttcgggagggaggcccctgctcctggtcggcctctgcttccgggccactccgtcagggcaaagtctggctgggtctggcagtaagggacaatgactatgtgaaggcaactgacagaggtgtctgcttggagagcaggatcccttggttccatgatgtccccaggtcactcggtgtgcagcttggcacagaaatgatccctttacacagcagcatatgttctcatcgtagc

SEQ ID NO: 145821 - DNA, 477 bp, Homo Sapiens
  misc_feature (19)..(19): n is a, c, g, or t
ttgcagtggtcaactggtntagacatcccattaccactacttccttcattggactgcaaggtatttctgtttggaaaagtaatggagtccagtcaacttcattgatcgccaaggactgtcaaagttataaaacttgctgtggagctctgacatgccaggaagccgctagaaaaagaagtttgacattcagaaacttatcaagaggttctactctttggatagagaccaaaatcatactttgaaaaaatgagaagagatggaagccaaggaagggtgtgtggaatcaagtagcagttctcaaaacagcatatatcaagacctcagcacatatcaagacctcagcacatatcaagacagtggcacaaaagcatcgtagtgttgtcattcaccactatgcaggagggaaagccaatttcatttcagaatgtcctcaattaatctgtagaaattattaattttattaaatcccaacccttg

SEQ ID NO: 145822 - DNA, 389 bp, Homo Sapiens
gataaaagtaaatttcatttcattccaagaaaggtgttagacaactgctcgcctcactggccctctggagcctgccctgccctgcttcccccagaggaatacaatccctggggacttatgacaactgaacagtgcagaaggaaccagcagagggaaccgctgcctttcttcatcactgccggcagcaaaagctgactggaagccatgtcctagtccagatccgggcatgcacaccggctggtgttgagcaggcaacttgtgaattgcaagtcgattgcattggtggctttcctggcagagctttcggatctcagttcagacaaactcgtcagcacaccctgtcctgacctccccctaaactagggctggcctcttccgacccttcttgg

SEQ ID NO: 145823 - DNA, 179 bp, Homo Sapiens
ttttgaagggaaaggtatttggggttttattttgttttggtgggtgacgtgcagttacaaacgtaggcatgttttacagttaggatattacatctggtcagagatcagtaacaacagctgaagcaaaaaactaattccaggactgtgtcttgataaccttgtccatgtgtacatccatg

SEQ ID NO: 145824 - DNA, 938 bp, Homo Sapiens
  misc_feature (26)..(26): n is a, c, g, or t
  misc_feature (31)..(31): n is a, c, g, or t
  misc_feature (110)..(110): n is a, c, g, or t
ttgtaatacacggtggggttttaagnggaanataaccccccctttccttacctagggaaatattgagtaaaatcccttctgggtattaagaaaaattggttaaatttttncctttcctttttttaaggatttacttttcttaacaagtgaacaatttgcttctaagcgtcaatgaaaggcaacacctccctctaatggccaaaggaagagagtggcagtaagctggcttttccaatgtgtcacacaatccttcatgccattaagttctccttgttggaaaagaaattaggttgttttgataacttagaaaagttagttttagacaacagtgactttcagctacaaatacaaaatcaaatccatgtatataaggcttctgtaatcgatgtcttagaggaacatctgctcattttctccaagccccagtcctataaatcaaggcaagtcaagtaattaagcttcaactattttggcagctttgcaattaaaatgaacaaagcactatatctatccttccatatactgtatatattatagttctatcttgttacaccaaatctcacatgcagagagactaaaaatatccattttggtttcaggtataattaaaagccaataagggtcttgcatactattctttttcccctccccaaagtgaattctccatcagatttactactccctgactcaattatatttacctggaatatctgaatgcaggtatttatcctctcagaaaagaatatgtttacctgggatctaaacatactgtacacgaatatacataactgcaatacagcactgctgtttttaacagctccacttacacctcatcagtacctcacaaccgtgttttaggaaaaagttttgtgtaatgttatggtaaagagaagaaaattatgtctcttaaatattcctttagaacaaattcaggcaag

SEQ ID NO: 145825 - DNA, 825 bp, Homo Sapiens
  misc_feature (20)..(20): n is a, c, g, or t
  misc_feature (22)..(22): n is a, c, g, or t
tttcttcttttctaatttcncncaggataaaataggaataattaagtaatccctttatatagcttgtattttctagtatcctttgatttagatctatacaaggtatgcagatttttcaactatattctactaaagttcttacgattctaaaatcactaaattttaataagtaatatataatgctcacagcaaatgtgtgcttccttgaggaaaagagaaacaaaattattttggtaataatgtagcataaaaatctccatttggagtgagagacttgattttaagattgagctgttttgatctcattgtaactgtggccattttcttatcttctcggagtgttcttcttgatctttaagattggtctgttaattgatctctttgtaactgtggcgtttttcaatgcagtatcttctctaagtgttctttgtcatccatacaatgggtatgatactttgtgtggtggtgttccttagaagatgtgcctgtacttgaatggagcacaagattttattttcaacggcgaataatccttgcggtttttaaaacaattgctgctagttcggctattttcatcttcagccaccttcaagcatgtgagaatgcatatgagtcatcagacttgctgttaacttcctctgaagctcaaagtttaagagtcagtagctcataacactctatttaaggttcacaacccctggttcaacctctaggttttaaacattggagccacctgctgaaggagaaaagattggtgaataatagaagacttaagtgctccaggtctttcaacctgtcaatcagaacttttcagttcttagcttg

SEQ ID NO: 145826 - DNA, 365 bp, Homo Sapiens
gtctttcaacaaggtgctttattggagagtacagtgtgagatgaggcagatagaggtgatgcttttgagaggtgatattcaactctgacaatacttcttggtgtccaggttcttgtgtgccttgttatatggagcttttgaaaagcagatggcagcgttgcggtcgcagttgcaaatgaaggcctcacactctttgtttttgctgctacaggtgattgccgagccagagcatgagtatgaataggtgtgggtgtacgggttgtccagcagaaatttacagctgtccagcttcttggcctggtcatagcagttgtcatgtgtctggcagcacttgtccagttcatccacgggggtgcctgagcccc

SEQ ID NO: 145827 - DNA, 380 bp, Homo Sapiens
gcccacctctcttgagttattgattttgcatgatttacagcatatggtaactccattactaaatccaccagaaaaccaggtgtgccaggacagactattttaagtcccagagtgatcttgaaatagacactgttgcacatttagccaaggctcacagtaactgtgatggggtgggggccgggagctctggcttgcacccttaggccagagtccttgtgactgggacgggtaggcctgtggcacatgcagggattcactgggctggctggtgcccacagatatcacaaatgaccacctataaagcatgcgtccctttggagaggagaacaagtcactctgagcaacggtgatggagacgaggggtgcagatggacacaggt

SEQ ID NO: 145828 - DNA, 401 bp, Homo Sapiens
gggcagtggtatcaacgcagagtgtccattacggccgggcactgcgataggaatcatgtctggtcgcggcaaaggcggaaaaggcttggggaagggtggtgctaagcgccatcgtaaggtgctccgggataacatccagggcattacaaaaccggctattcgccgtttggctcggcgcggtggcgtcaagcgcatttccggtcttatctatgaggagactcgaggtgtgcttaaggttttcttagagaacgttattcgagacgccgtcacctatacggagcacgccaagcgcaaaactgtcacagccatggatgtagtatatgccctaaaacgtcaggggcgcactctgtatggcttcggcggctgaatctaagaatacgcggtctcctgagaacttcaaa

SEQ ID NO: 145829 - DNA, 416 bp, Homo Sapiens
tctggttttcggaaacatttattcacatttcttggggttggagagaactgacatgttttaaatttgttagagtcatagtgaacaaaggggaagagttgcaggtcctcaagtctagagctgtaggccctggaaaggaaaaattgcaaaattgtccagagaacagtgtgttcatggctttatttgctgttagtccgaggcctgaggtcaccctggcagatgggtcacttgcactgcaagcactcatgctggcctcagggacagggatgaggtcactggcacatttcaagaacagcttcctttctttatgcatacaccactttcctggtccttgttaagggtctccttcctcttgcggttcacatctctgcagctgaccccagttctgactgtgtctggggaaatgggttggtgagggc

SEQ ID NO: 145830 - DNA, 465 bp, Homo Sapiens
ttttttttgctcacacccatttatttcccattagctttacacattgtgagtactcatcattggacaggagagagaggtgacgaacaagctggttagaaagccagcctgccacagaacttgagtaaactgaggaaataaagccagtgcgcttcctggattggtgaagaggtttcttgtccctttaggggatgttctgtcaatatatcaacattgaaaagataaaccatttgctttgtttcacaacgtgaacagtgcacctatgcatggtagagaatagaaagacacaacagggcacatgcctccttttccacaggatcctgagctacaaccggctgaggtgcatccccgtccacgccttcaacgggctgcggtccctgcgagtgctgtgagtaccccaatgtgctgattttgacttacacattgctgagtgacagcaggaagcagactaagcactccccttcccca

SEQ ID NO: 145831 - DNA, 1081 bp, Homo Sapiens
  misc_feature (580)..(580): n is a, c, g, or t
  misc_feature (610)..(610): n is a, c, g, or t
  misc_feature (652)..(652): n is a, c, g, or t
  misc_feature (827)..(827): n is a, c, g, or t
  misc_feature (836)..(836): n is a, c, g, or t
  misc_feature (907)..(907): n is a, c, g, or t
ttttccagacctaaaaagaaaggtgtttattaaactagggtatttacaataatattttaaactataacttgtaagtataaatgaacttaggtcttaataatgtgaatttttgtgagaaaaaagtggtgtattgtattttctcctaacataaaaaccattcctttaagtagttctcatttgttaagttataataaatatttttcatatagaatatatagatgacaattgtgatgttaatataatgtaattttccattaaaatatgaaatttggcaaatgttattttccctaaccctaagggggaaaaataattcctaggtccctgaattaggatatattattacattagaattgtgattattcttcagtcttttctggaacttgttcagtcctgggaaaatcttctttgtacttcttcttgagggttacttaaatatattcgtaaactgtctgggtccaattgagagtttcgagcagtttgaacaagcctagtggctagatggttcacagctactctgtctttccatctcaggggtactcctttggttttgcaaaatttgtctcgtaatttgagttgtganttccttggcatccaagacaattgatggtgnaagtgatgacacctctgcagcttttaatccataatttttctnttctgtgagtcccttagaaagtttgtaggtatacaaaattgcttctttatttcttgaggtattctttacatgttgaacttcaaaatgcatgttttctacattaggatacagggcatcaatatggcatagttccaggaaatgtgtagcaaacagtgtaaatgcctttaagctcagnagatattcncaaacagcataacaaatgccaataccttcttccgtattagtacctctgccaagttcatcaattaatatgancgatttgtcattagcattatgtagaatatatgctatctctttcatttctttcataaatgttgatgaatttgtttcgatatcatcatcagtactaattcttgtaaaaatctgtttagcaattctaaaggaagaatattctgctggaacatatgatccaatctgggccataatctg

SEQ ID NO: 145832 - DNA, 282 bp, Homo Sapiens
tttcacttgtcaaattttaattcaggtggcgtttaattaatagaacaatttgaggaaaactgacatctcgaaaatagttttcttgcctattttggccctatttctgccatacacattttggaaaactttttccagtactaagaataaatattgggagctttattgaaattgtattaaatttatagaaacatttaaaggaaactgatattaacaatggtcttcctaatcattgaaattttactttatttttaatttttgtgggtacatactaggtgtatatat

SEQ ID NO: 145833 - DNA, 457 bp, Homo Sapiens
ttttttttggagagaaaacctttatttgcataacaacaaacatgggtgaagtaagaagaggcatatgaaaacaagattaaggtggaagaatccttggtgggaggagaggaggagaaagcagaggcactcttgtagccataaacgcatttccttgttggcatctggactgctccctcctcatgctccactgagacttctctttgcttggctcatagtctcactgctggccctgcttccttgtctcacagtcccagagtgctccctccccaaacccgatggaggagcgcaggttcataccctattgtgtgggacagcagctactcagaaggtgttacttggattttttgcagctgttagtgattctgacacccttggacctccaggagtagctcctcctgccacgagaggactctggcttttctaataaggaaggttctggccaatcagtccaagaaag

SEQ ID NO: 145834 - DNA, 506 bp, Homo Sapiens
tgaaaagatgggttaaccctcaaagcctgtgtaactacagcttgacaaagactctcgaggaaaggtaaacggaaagtgagttggcaacacaactcacctacaagttctccaatcatgaaaagcaagtactgaacggcagcaatggtcaacctggctttcacctttctctgcttcagtatctctctctgtttgctgcagttgtcacaggagtccaccttcaaactcagctgactgttggtcaaaggtaagtcttggtccagtaaggaatcatcgtcggcctggagggtcgggtgcgccccgttaacaggcctttccggggcttcggaaccgtcatcggccaccacaactcgaagtttgttgaaccgagaaagcccctcgtcccccgcctcatccgagaagtcaaaggcgctggtgtcatttaaaaacagcggcgcatcatccttccttagcatagatttgacgcttccacgcgccagagccggccatggcagaggctgagcggccgc

SEQ ID NO: 145835 - DNA, 229 bp, Homo Sapiens
caatttctgttcctttgataactgaacaaataacagagatggtgaaacccagcaagcaaattatcttccagattttatgtgatctcccttctctagtgagttggtatgtctactaatgacacagtagattataaggttatttggtttaagtaaatatttatgcagagcctatgatatgtccatctctgtcttaggtggggtgaattagaattaccaatagtgccttccg

SEQ ID NO: 145836 - DNA, 303 bp, Homo Sapiens
aattttttgtttttaattgcggtaattgtttttattaaaattgaatcatatcctgagcccccaacttgccattacatgaactaagttcttcccatctcaggaatcagaaaatccctagaatctttatcacaacagaatgttctgggagagtccccttggatttaggacacacaggtcaccaaggaaatggccctgtgcaaactcacaccatcatgtgaagtggacatctgcattctagtgctacacagactacaccatctgcttcagagagtttgcaggtgatcttctctcagtctgtcctcc

SEQ ID NO: 145837 - DNA, 664 bp, Homo Sapiens
  misc_feature (320)..(352): n is a, c, g, or t
ttttttggatcagccaagctagaaaactgaattagctttcaattctgtctctataaattgagaatggcaatgaggtcatggacacagcctatggtcccttaaaagccagcagcattctccttccacacacccagtgctcaggttcaggaatcttcgctgagactgggcccctggtgctgagatcctagcccttagatacaacatgcagccagcctctgctgatgcttcccggaaactgctgctgagcagtgtgagattccctgtggctccccctttctccatccaggggaatttctggagagaattaccatttctctccnnnnnnnnnnnnnnnnnnnnnnnnnnnnnnnnntatttgccctcttctctttcctccaggaaactcttcataattctcttcaagggccttgggatttttacaaaacccaagaggaggctttgactctattgctggtaaattttgcctgggaaaaatccccagtcccaggaaagcaatggaagatgtactttctcccattgagagaaactgggaacccactcaaaatagggagaagtgaaaaatattgaaaatgcaaattaatatgaatggaatgaggtagagggtataagggagtagaatataaaatggtgtgtgcgtggtgatatttgacagacactgccaaat

SEQ ID NO: 145838 - DNA, 858 bp, Homo Sapiens
tttttacagtttacacacaaatttatttgggagaaacatccagggactaggggacaagagaggaaacctggtgggcagtagggctgggggtacagagtagcagtaagtgtgctgaagggcgtcaaccaagaggaagagccaaggctggggtccagtggctggagggaggcaaggagggctggtatgagggactagaagtcctggccaagcccagatagaagtcaggaaggtggctggaaactggtggaattttacaccaaagtttgctgcagtcacactaaggagtatagagccctctgttttgagggtcattgcagaaatccaggaagcagtattgagagaatatccagaagccaggacacgggagaagttccgggtatttgaacaatcactcatctgctccttacttcggcagtcactcaccatgacgtcagaaccgctgctgttctttttgtggagagtgatgcagctgctgccagctggggtgaggcagatgtcagatcccagaaggcaccctaactccttggtctccaagaggcatcggtagcagcgcaggtatttggggaatggaagtggttgagggggttcccaattgacaggaacaaacttacctcatcctttttcctgccccgcctgtgctcagctgcggctcagtgggcctgaactccggagcccacagaatctggcgctgggcgtccgctctccgcgcctgaccgcacctcagaactccggtaggacgggggggtggccccccgctcaagctctgttccctggggaagaaacctggaaagtgcgaaccgcgcgtcgggacccaagcgtcgggccccagcggacatccggagcccgaagcggctcccc

SEQ ID NO: 145839 - DNA, 518 bp, Homo Sapiens
tttgaacttaaaaagcataatttatgtacatggtaaacactttaatcatactgagggctacaaagtgcaacagggagtttctctcccacccatggcccccatctcctatagagatgaccgcaggggactgtccttccgtccccctcaggagcagaagtccacgcttggttctgcagtttgctttaagagcaggggaagtccgtgggaagtcctgtggctgtgacctggaggttggttacagcggagaatctgaaagatgtatggttgtgcataaatttgtttttacagaaaacacaactgcacagtcattctcccgtctttgcctttgccatttgggtctgtcctattgctgtccttttcttcgaccaggagctgctaacttgggttccatattttcctttttagggaacactcagcacattgcccccactttccaatatggacttgggagggggttctgggaagagcagggaaaaggaaaagagcaatccggatgcaagatcctccagatttttatt

SEQ ID NO: 145840 - DNA, 899 bp, Homo Sapiens
  misc_feature (649)..(657): n is a, c, g, or t
ttaaagtttaagtaaaaattgttttatttgagaataatatacaagaagtaggactgcaatctgggacatatatacagaccagattggcctctggagtgtccacagaataaaggaaaaagttagagtttattgggaaaggcggaggctatgcgttggttttggaagaaagcttattggtgctggcagcaacaaaagagctggtgagttctgactggcgagtgtcaatagttattaggtaggacttgtaatcctggagttacagttaggcccttgtagttttggactgggcttgtgagactgtgtcaggcacatgttcttgtataagcagctagctgtccttatgctgcaaactgtccttgtgtgacccatgtaataagctgcagtttggaaaaatttcttctgatggctcctatagtgtttagtctaagttaccccactcttcactgtggccaccgtccaccacttgtagctcttctccaaaagcctgaacatttttccccgttaatgtgtttaggcaaagataattgctgtggtactaaggcaggaattggtgagtgaggtgagaagataacttttacttagtagcagtccagaagaaatgacaacattcttcacagcactcctcccttaagcttccctatcccctccnnnnnnnnnccttttgataatctgtagtagatatttgcattagattgctccagcagtctcattcgtgtgatctcatttggttttcttctgagaacgccaaagtctttttactccacaggagacagagcagtatacttctcacgtgccttcctatctagcaggggtctcttaacttctccagcctcagctccttcatctagcattgctctgtaacaattctcctctgcactatgtggactttgccatcccgt

SEQ ID NO: 145841 - DNA, 737 bp, Homo Sapiens
ttttaataaaattgggatttactttctaaacatattaagtctagaggcagccagtctaggatggctgcagcagtttcaagatgtcatgagtaacccaggttccatctttctgccccagcatccttagcttgttgcttccatctttgtattttccacatcatattcaccttcatttttgtcatgaaactccatctccatcctgttattactcttttctggagcagtagaacttcaacagtctgaggggcctaaatccaagattttgagtccagaatttggtgccacttttcccttcgaggcaattaacattcagaaagcagtaatggagagaggctgagaaactagccagagttttcaactgcctcaaggggagtgggtgtgggattgggtgggtaaaaatattgagttcaggacctaaggaggaaagattttaagttggaactgggctataccctggaagtaacttttaattattctcttgattggattaagggtggtctgtccctagtctaaatgactaccaatatgtcacacctcccaatattcacaatcttgtgtagttcctccccacactgacgctgagcttggccatgagacttgctttggccagtgacacattagtaagcatgataaaagtaaaggcttgcacattgaggcttgtctttttggaatgtcccctcttgcaatcctaagattatgatgctgtgaggaagcctaaattagccatatggagaagc

SEQ ID NO: 145842 - DNA, 781 bp, Homo Sapiens
atggtgtcaccctggagtcagggctgagtgagcaggcagcctgcaggcagctgaccttgtccacggggactcgcctgggcccaccttgtcgaggccgctcttcatgcggttcttggcagttttcagctccagtttcttctgcccgatgaggatggagaaaatatgaagcagctccaagtagctcttgggggtcacatagttgtggcgggtcagctctgccaggtactcgatgcacttcttggacaccgactggtggatgtacacacagacctggatcagtccttggatttcttcctgggaggattccagttctgggatctcattgaggaacacggtggccacagacttcagggcttctgccggccactcgttaaaccagtcgatggtacagcagttgaccagggagggaaactgcctcagacgagctcggaagacctctccgatggggctcatgcacagcaccatgtggatgttgctgcgcacacgccctgtgtaagcagccatgaggttggccttggtgggctgtaggccctgctcctggatatagggccgcatggtgctgacgatctggtcctgctcgtccgcagtatacagattgggaatgtcaccagagtttaggacgttgttgatatcttccaggaaggattcgttcttgatctgggtgtctgagaagaggaaggtgatgggtaggttctgtaggcccgccttgagcaggaccttcttcacatcatctcgccactcggacatgccgtagttcttggatagttcaatctggaagcac

SEQ ID NO: 145843 - DNA, 408 bp, Homo Sapiens
tttttaacaaaacaaaagtggtttattatacagaaaacatgcaaaagctcaacgctacatccaactgtaaaggtttcaggtctaagtttaaattttcacttaaggcacattaagccacatgataattttatacatgccaaataatcagacaatcaagtgtcatgtttaattctatttgctctttgagatatttcttgaaaaagaatgagggcataattcagattttcagaggggaaatattctgactttgcctaataaagaaatgagtcttggataatttgctcatcagctttcccaagagaggaaatgggtagtaaaaggaagaaagtcttttaaaaataattttgctactactttactataaagtcttggtgacaagatttagtttctagggtcctaaatgtcttt

SEQ ID NO: 145844 - DNA, 575 bp, Homo Sapiens
ccatcatactgattttttattttaacttcatataaatcacttttatattattttatttggtattttatcttcacagcttccaaaattatttatcatttatttaactgattgaaagtgagccagaagcaaatttgctgtcaataaaagtttactaaaaatcaagagaaatggcttcgtagcaccattactgcaatgttacaattacatacgttgttattagaatcatttctaaagttataaatttatgaagctttgagactccatttcaatatatcagaaaaggaaatcatgttaataaaaaatcattagacgcaaaataatataaaatataaatgaatacatgaagtaacaatttttaactcttttacaaacttatgtacaataagattaaaataagacagttgtgcattcaagttttcctgtggatctgctcatcttcattgcaagggttgctaggtaataacggcacagggatatggttattctgaatatttttctcactgtcaaagacagttgttagggacaaatagacaccaaaagagacaaatagggatcccttattggctccttacatt

SEQ ID NO: 145845 - DNA, 685 bp, Homo Sapiens
tttattataaatatttattttaaaaaatttcttggcagttaaaaggaagtggcataatgagcaggacaggacagttaccggctccccctcagatgcctctggctggcttctcacattctccaagatccagcctctaggctccagtctcggctacctctgctgggcggtagctcacaccccctttggttccccttctgtgctgccttctcatctgcacaaggaacgcgacgctggtgacagcaaaaaggaggccaaaaaccagggctaggatgtcaccagcagccaggcaggaattcagctggactggctcagcagcccgaggactgctgtccactccagcagggaaggaggcctcaatcactcgcccattcaaaggctgcgtcgctcggaagttcagctgtagccgagagtcaccaggtccccacagggtgtcagagagggtgtggagctgcttagcactcagcatcactgtctggttaaacacagtccagatgacaccctgggcacagggcggtgtagtcagagacccctcatattggaagtagcggctgaagtcagaaggcaggagtgcagatatgtccagtcctgggacctgagtctctgagccttcctcagcgatgtcttccaagcgagacagcaactgctcataggcactgttttcttccggcccttcttcaaaaagcgg

SEQ ID NO: 145846 - DNA, 1225 bp, Homo Sapiens
  misc_feature (743)..(929): n is a, c, g, or t
  misc_feature (1022)..(1031): n is a, c, g, or t
cagtgcagatcactttgtatttattacattactgaactttttcaaatgacagaattcaactccaaaataaagtaataaatgcctattaaataattattcacttgtatttttctctcctaaaattttaacacagcaaaacatcttaaagacatgtgaataggttcagtgcactctcagtggctcacaatcatgaggcaaatactacatttatccataaaaatataagataaacagatcaatattttaaaatattgctgacataaaaggaaaaaataaaatactacacttttaccacaattattttggtagatgatagttagaacattgttttaaaataatgctcctctacaggacacatgctgtgcttggtatacttggcacattagcagttggtaactgctcagcttccatctgcagtttctctagcaggacccttactcaggcccactttcaaaccctgagctctgatctggcctggcctccacaagggactattctggtacccatatcttccttccgatctactcttaaggctttcttgtcattcccttatattcccccagattcacacttgctgccatctccattttcagcaaagatgcctggcacaaaactcacaaagctgagcacctcctccatagctcttaccccagatgttgtcccttcactgactaaattatgactattaggtaaagagaatgaatctacccacaaaaataatttggccgggcgcagtggctcannnnnnnnnnnnnnnnnnnnnnnnnnnnnnnnnnnnnnnnnnnnnnnnnnnnnnnnnnnnnnnnnnnnnnnnnnnnnnnnnnnnnnnnnnnnnnnnnnnnnnnnnnnnnnnnnnnnnnnnnnnnnnnnnnnnnnnnnnnnnnnnnnnnnnnnnnnnnnnnnnnnnnnnnnnnnnnnnnnnnnnnnnnttgaacctgggaggccacgaggttgccgtgagcggagacttgcaccacttacacctctagcctgggccaaccaagggtgaaactctgtctccnnnnnnnnnnctccctactttacagtcacatctcctgcatgcaaaaataaaggttggtggacacctgatttacacttaaaatattcagtgagtttagacagaatatatactgctctgaagttccttaaaacggacgcgtggtcgacgatatcccgggattccgaccgtaccagcctgctttttgaaccactgttctatattcct

SEQ ID NO: 145847 - DNA, 1150 bp, Homo Sapiens
  misc_feature (140)..(140): n is a, c, g, or t
  misc_feature (162)..(170): n is a, c, g, or t
  misc_feature (600)..(614): n is a, c, g, or t
  misc_feature (630)..(631): n is a, c, g, or t
  misc_feature (691)..(766): n is a, c, g, or t
gcgagtaggtgttcgccccccgcgttaggggattttgaaaaagcgggggccaaaagtaagggagggacgtttgtgttgtcaaccgcgcgggtttaacctcgtgtggggagggattatttatttcgccggaagccgcgcanaggttggtttggtaggcgcctnnnnnnnnntgtagaggggtatcataaacacgcaggttttgtgggggggtttctcgcactctcggggcgagagaattgtttttgtagaatttctcacccacactcttctgcgggaaaagtgcacacgcgccgcggggggtgcgattatttataatattgggagggccccctcgtgaggacctccctttgtggaaggggtgccccgaaaaagagacctccgccgaaggggccctctattgggtgttttttgttaaggacaccccgcgggtgtcctcccgcgggggggtgttttttttgtggggagggatgccaccggccccttgttcttgttccccggggggtttgcttttggggaaacgagttgtagcccatgttgttccttttcttgtttgggggcgcgcggcgccccaaaggggaaggttttaagaaaatttttgcnnnnnnnnnnnnnnnccgcaaagaaaaatanngtttgaaaagggggttttaaggggcgttgttggggagggagtgatatggtgttgagtggnnnnnnnnnnnnnnnnnnnnnnnnnnnnnnnnnnnnnnnnnnnnnnnnnnnnnnnnnnnnnnnnnnnnnnnnnnnnccgcacatgacaggtttattgacaaaggctgaacgtcaccagcctcatcagcttttcttacattttatgggaaggtttttacatcatcaccgcagttgtccccagctgttatttctgtagaaacaaattcgtcagccacacgtgctggagtatttcattgtcctggcacccgactatcccacacggcagctcgcacggtcccagtccacatgagtgcaattgccatgttgatgtcaacaagcagtgactgaaccaccccggagcagacggcgggcgctccacagaggggccttcctgctgctccgggccgagcgctgctgctcctcgtgggcctggtgaggcgcacaggccattgctgccatcctggaagatggaggacgctca

SEQ ID NO: 145848 - DNA, 758 bp, Homo Sapiens
taataatgaaggcttttcccttttataatgaaagaaaaaagacacttaaaatgttaaaggtttttttcattgtcattccccattgttgttagtaaacgagtaggccttcttggggaccgtgtaataagagcctagagatgtaaactgccactgatgcaaactgagtaatataaacattttctcagaaaatggatttagattgggacaaatttagtatcaataaatgaagactataatattataaaataagactttgtggtcctaaaacaaggtctttctgcccatgctttctcttcctggtcctctgtgctggtgtctgccttgtaaggggttatgcacagactctctcccatgctccgtgctggtacagtgctgggtgaaggaagatttttcttccttcactatgatgccacccaatgtgctgactgtgttgttgcaggatttgatgttctggagagagaaggggtaagcctgggcttgcgccagacatgttgctgctgcctggtgccgtgccagactcacctagctccaaagaacacacctcattcctcttgtcccttttaacctgcattggtcaaggctctgtggatttataaagcacaaacctgggaaccagaaaccagcccctcactacctggctccactcccaaagtggagttttcacttgatttagattgctattttatttccagtctctgaagggccgtgtggaatggcaagaaccagcttcattgctgcatgcctgcactggcagctgt

SEQ ID NO: 145849 - DNA, 486 bp, Homo Sapiens
cagattttggcttcaagtgcttcctgttttttgccctcccttatccctgggagttccctctatttactttcacaaggactcttggtataaaagatatttgtatacctgggtgtgtgggaaggaattgaaggcaaaggtagcagtcatttcaagctgaacatgttaagtggtaatcgagcacttggtttttgtagtacctcctgtggccatctccacagtgtcatatttgaaagaaatcttgtgtaagtattggtctaagggtcactgactgtgaataatgaatgcggtgacagcatggccatcttagagacaggcaggccagatattggttactttgattttagttgacaaagtttatttgcttttaagttttaaagcaatacagcagtgtgaacttcaagttgtaaactttcatttagaaagtttaaaatttagttgaaatataaaatattctgaatttgaataaaaagttttaaaacttaaaaa

SEQ ID NO: 145850 - DNA, 434 bp, Homo Sapiens
gagatggggtctcacaataataaaaatgaaataatttattaaattttttaaaattacccaaactggatatacaatttgtaattccattgctgccgaacagtttttaaacggttgtttagtttcacggcagatgctgcatactgcattgcaactaacactgggaagggatacattcaagtggcaggacaaaggtgaggagctctaataccaggggtaggtttcaagggatgaatactcccctggtaccagaggagcagcaggaaatcatggtgtgcagaaaccatgctcaggcggttgcctgatgtggaccctaaattctgtgtgtgcagtcctctcttaggattggcccaggcatccaagaagcccacgatgctgcctaccccttaaatacacaaggtgcgtaccggaggccctggttctagttccagatgtac

SEQ ID NO: 145851 - DNA, 691 bp, Homo Sapiens
tttttttgtccatcacatatttattgcctgcactggacctgcagttgggatactgcagtgaacaagacagagtccaccctggaaagtggccacaggggaaggcaagaggcgatagctgggggtcacttgtcactagatggaagctccttggtccacacagtcccaaagaaaggtctgcccttgggcccacgaaacccatcccagccctcacaggctgaacctcaccctgggttttcccagagaggtgcccaagaagacccaagctgccccaagtcagaggagcagcaggaaacagcctcagaagtccgtcactcttcagtactcctcccttagaatgtccacttcctgtttggtgaccatggcaaccaaaagacaatggcagtgcagtgcgtgtgggatgggggagctccatcttccttgggtacatggggaggagactccagtgaccacggagaagcggggagagccatgggagatgttagagggacccacgagaagatgggggacaggaaaaaggagagaatctgtctcaagtaaatggcctcctgccttggacctcggctgaaatgtggctgggcttcatccgcggagggaggaaagaggtggctccacttgcccgtctgcttggccccaggcgtgctcttgtcctgtttgggtggccagagttccttcgctgaagatccccatcccc

SEQ ID NO: 145852 - DNA, 386 bp, Homo Sapiens
gttctccaaagtttgtgtgttagaaacttaatccctggtgcaatagtgttgggagttggggcctattaggtgattcggtcatgacgggtctgcccctgtgaatggattactgtctttatttgggagtgggttagttataaaggagtgtgcaccgtctcttgctcttctgccctctgacctgggatgatgtaaaatgaagtcccttatcagatgcagacctcatggtcttgtacttctcagccagaactataagaaatacgtttattttcttcataaattaccgagtctcagatattctgttatagcagcataaaataaattaagacatctactttgcccatttatactggaggctttagccagaattctgtttataaagtttgcag

SEQ ID NO: 145853 - DNA, 548 bp, Homo Sapiens
tttattgatctaacagtttatcttaatatagaattgcagaagtttgccacatacccactgtcttcagaaacctttagcgaaacagagatggctgggagaaattgaaaatccaccaagagctgaggcagcttttgcaccgcttctgacttggagaactatttttggtgactttccaacatttatttaggtggattccttctgccttcttgagttaaaaatttgattctaactgccattaaatgttgaatccttctccatcccacgcatgcagccaactcctttaagcaccagacaaatgttaggcacatccagtcagggcatggctttattgtagtttgtcccaatgcacagcctatggagaaaaaccatgcatgttggcaaagaatcaaattacaaggccaagatatgacataaagagtcagctcctcttgctcctctttttgtgacctgatgaatactttactgcttaaacatgtattgggtttttgtctgttccaattagaattcctattggccactggaatcatggaagggggaagaatcatgtg

SEQ ID NO: 145854 - DNA, 569 bp, Homo Sapiens
gtatatatgagtcaggggtagggagtgggggtgaccatgaaaagagggcaaagcaaacaagcctctgtctctcagtttcattaaatgtccagatggagtggcataggcatgggtgagtggtaggtcttgtagggaggacctgagccgtaggaacatggccaggcactgacagcatcactcgtcgccttgttgaaggagcagaaggtggatttcttggaatgagggacggttcttcgtatcttttcttcagcagctgagcatcagcttatacacagagtcaggacaaatggctggttgagggaggtaagtctgcctcccttggtctcggaagaactctgcagatattctcaataacctgttcatctgacagctgggaatagggctgttcttgacaaaatttgaaagctctcccacaaggtgaccccaagggcccacacatcacttgctgtgttgaacttgcccagcaagatactctcccaagacatccagcggatagggagcactggcctgccctggttcgggtaatagtcaccactgtacaggttcctgcctcttccaaagcaagcaat

SEQ ID NO: 145855 - DNA, 1480 bp, Homo Sapiens
  misc_feature (172)..(213): n is a, c, g, or t
  misc_feature (1345)..(1355): n is a, c, g, or t
acgcgtcgggagaatgagagaagggaacaggacagggcggggcagggggatggtagagatccatatgaatcaatgattcagctgtcgactgtggacagcaagagagtggggggaaagttacagcagacctgaccacgctacaaagggtctgtgaagaacacagtacaggtannnnnnnnnnnnnnnnnnnnnnnnnnnnnnnnnnnnnnnnnntgcaactttgccaaactgtaaacaaggtaaagcatttcacaggttcaaagttcaagggaagtaaacgtctttaaattatttttgtcagttcaaccctgatttaaaaatatggctagcaaaaacaaggaagccacagctgtcgacatcctgagcaagcatcggtctcctttgagaagctgcactcccaagcctcttctcaagctgctacacgaggaggagacacttctctcttgaattccatctcagttctctttatttccacactcttggaatacatcgattgcttgtccattttggtgtctacagttctggctgctatagatttagacgtggggatactggaggagggaaggcaaattctcggaggatgctccgggcaacttcgacattattctgggctatctctaaggctctcttcacctcgttcgaaggcatgaccctctcccatgagttttgcaattgtttgcatcgacagttttccaatgccgcctcaggcccatggggttttctgtggtgaatttctggtgcagtcctgctccagtatccccacgtctaaatctatagcagccagaaccgtagacaccaaaatggaaagccatcgatgtattccaagagtgtggaaataaagagaactgagatggaattcaagagagaagtgtctcctcctcgtgtagcagcttgagaagaggcttgggagtgccgcttctcaaaggagaccgatgcttgctcaggatgtcgacagctgtggcttccttgtttttgctagccatatttttaaatcagggttgaactgaccaaaataatttacagacgtttacttcccttgaactttgaacctgtgaaatgctttaccttgtttacacgctttggcaaagttgcagtttgttcttgtttttagtttagttttgttttggtgttttgatacctgtactgtgttcttcacagaccctttgtagcgtggtcaggtctgctgtaacatttcccaccaactctcttgctgtccacatccacagctacatcatttattcatatggatctctaccatccccatgccttgcccaggtccagttccatttctctcattcacaagatgctttgaaggttctgattttcaactgatcaaactaatgcnnnnnnnnnnngtatgtattcttcactactgagtttcttctttggaaaccatcactattgagagatgggaaaaacctgaatgtataaagcatttatttgtcaataaactgccttttgtaaggggttttcacataaa

SEQ ID NO: 145856 - DNA, 978 bp, Homo Sapiens
ttttttcctcagaaaagatggctctttatttaatgaaatattttactgctatcacattgtttcaatccaaatatggcattatagtgccattctaaaaataaatctaagtcccatgtgatatgcagccttttagctatgttcatttccttttagggctcaagtttcccacaggaaaattattcagtgtttggcaaaacggtcccaaatcatgtataaataagacataaatgctaactgcactgtcaaccttttcctggtttgctactgttgattctccttcacagcaatccatcatggagaggcccaagaagcaggaaatactcaagtactgttacctttgtgataagaatgcggtatttctctaccaggtggtcattgttatgacagcctgctagcaggtgccagacttctcctcgaagagcttcagggacaccgtttcttactagggatgaacaactgcttcggtctcacattcaagttgagatgccatttatgacaacagttctccccatgtttcaagaattttttgtgcacattctttggatacatcaccagatccactcaggagagggttcatcattatctttctcttcatcatcttctggaggagaaggtatcactgaactttgcgatccagactgtggcaggcgaactgaaggactggctgtagttttcctcctctctctttctgattcactttccaagcatacaacttcatataaagtgtcagtattattctttctctccctttgctttatctgttttagtttcaaaaagaaattttcagtagtactacgtttgctgaagggccagaataatctttcattaggtgagcaaacgcggacttttgtctccaggagaaatcgaacaggctcctgtacttctgttattaccaaatctacagctgtggtcataaacaggactttatctttaggagtttcttcatttacaacttgaaaatgtggggattttggattc

SEQ ID NO: 145857 - DNA, 995 bp, Homo Sapiens
ggaaaagtccgggaggtaaaggttttcaacccatttccaaagatgggttacagttgtttcgacacaagtgaaccggggcaccagggacctgtgcctgcccaaattttcttatttggattccaagtttctcggtgcaaaaaatccttcctgccccagctgcttggatataaaatggtccatttctggcaataaaagctccctgtttgtgatcaaggaccccacttggggggtacttatattctcccttggatcttttcttttctgaaataattggtttagacgagctttagcattttccaagggtccagtttccatgaagcccagcatttaaatccacttcttctgattctagagtcgcttgcacttcttgttcttcctttcttgagtagtaatccttcaagttggctcctcggtcccaggtgggcccaggaacaccatagccagaggcccctacctcagaattattttctgctttgagagccagatgtggaggaagaggtcctcccatggttgttggtaaatctccttcagcatttgctgtagtgtcaggagtatcagtaagtgggggcggagatgctaccccaaaagctggaacttcttcactctttatttcatttattcgaaccaaatagttaacaaagtctctggcagcattgctttgtgcatcttttttattggtggaatttcccatgccagtgtaattataaccttccacctgaacctcacacatgaatttctgcctgtttttgttccccactgctctaatttcataggatggggtcatcttccttttgccacaccaggcatacagaaaatttttaacgtcacccatgattcaagtgtcttcttcagatcagccttcgcttcctggtgcccagctcttaggaccgtgtgtgactctggccttctaccgagacaacagagaaacgcacagcaactcgcatcggacgcgtgggcggacgcgtgggtcgacgatatcccgggaattccggacc

SEQ ID NO: 145858 - DNA, 456 bp, Homo Sapiens
ttttcgtggatatgaaatttaatatccagaagaaaagcacagaataaaaagtcccaggcacaaggcaacaagcctttccaggtaagacgagacctgtgctgatgggacctcagaagcgcttaaagaacgagactgacactgcgcctggagacaaacggagctggtgcagcgggacgagaagtctcagctctcacctggcacctcaggagaggcacagcagccatcacggggtcccggcaaccctgagccaggaggggctggctcttctgtcctctgtcctgggggcccagaggctctgagctgggggagggagaggttcgcgctgccatggcttggatgggcttagagatgtaaacttggagtgagtctgaaataatgtacttgtgaacgcaggcatggctgaaggccgcgtgctccagaaccactggcgtcctcttacccgaaattcagtcccca

SEQ ID NO: 145859 - DNA, 526 bp, Homo Sapiens
aaggggctaggttaaatggatccaagttcacacctattttcagtgtcaaagccccaaatcacacttgagcgtctcctcaagttagaatgagcaatagaaaaccagacagccctgtatctatgggaatgttgcttgcatcagagccaccacaccttgctgtgaggttgatcggtttctcgcagctggaaatagttgcttcccgccccccatcttcctcactcttttaaactctcaaaaatcccccagcctcccaaatttgttttaatttttaagagaattcttttctacaaaagagggaaaccttctttcaaatggcccttcataaatttccctaaagaggtttttatctctgatagaaatatgaaaaacagataaccagataattgccctctatctaggctttaaacacttattcatacattgaatttctgcaagttacagatgattgttgctgtgtgattactggccctgtctgtttcctcagcatggatgcaaatctttctccctgagaaagtcattgcttcgt

SEQ ID NO: 145860 - DNA, 409 bp, Homo Sapiens
caggggccaaggcaaaattggtttattaaaacagctatttgcaatggcagattttaaagacaaagacacaaataagtcaatggatataaaaaactgtaaaaggctgtaaatacatgatcatcatttataaaatcaacaacatctcatgtatctggcactttatggaaacccattttacattttatcatttggaataaatgaagggttttttttcctaaataaaatactttcctaccccataagctacgctttcaaagtgctcctttcttctggtacagtacccatctgacaggtgctcaaatctcctttagtcctctgccaatggacacacttttatctcttcattcagcttccttcctgagtctgctatggagttggaaatcaaacagccatgtttgttagaattgtt

SEQ ID NO: 145861 - DNA, 216 bp, Homo Sapiens
cctcgctatctcgaccttgacttcgcatgtgcatccgccgaagtctttctagatcaatcggccccatctctcgtcttcccgattcggccatgacctcacccgtatcctcgacgtaggacctcggacttcatttccgccaccccgacacttccggaatccccggaagcgacccgttgccatggcgactatgtacacagccaggcagccccgcgtggg

SEQ ID NO: 145862 - DNA, 797 bp, Homo Sapiens
  misc_feature (451)..(710): n is a, c, g, or t
ttttcatgtgcaatttcacaaggtccatttatttaaaacaatattttatctgatgagtcctcattccatggaagaggatgtgaatggcaaagggcatggacttcagcctgcaaccaagttgatatttccatatatttccagattcatagtatgttatacatactttttttgtcagtggaagaaaatatgagggccacgtaatgcagcttgcagttgcaacagcatttacaacattatcttattaatacattttcttttgttttctcttcttcctccatctcttccgtgtcacgatgtggatttttcttaccaggtgtgggccttggatgagacttagatgtgtgctagcttcagatatgacccagcacaatcccagctgtggtggatatgtggagagactccttcttgagtgaacataagtggtcaccaggcagtgattaccgcaggcctnnnnnnnnnnnnnnnnnnnnnnnnnnnnnnnnnnnnnnnnnnnnnnnnnnnnnnnnnnnnnnnnnnnnnnnnnnnnnnnnnnnnnnnnnnnnnnnnnnnnnnnnnnnnnnnnnnnnnnnnnnnnnnnnnnnnnnnnnnnnnnnnnnnnnnnnnnnnnnnnnnnnnnnnnnnnnnnnnnnnnnnnnnnnnnnnnnnnnnnnnnnnnnnnnnnnnnnnnnnnnnnnnnnnnnnnnnnnnnnnnnnnnnnnnnnnnnnnnnnngtgctccctcatgcaaatatggttggaatagcaggagttccagataaaaaaggagcatcctcaaatgcagcagacatggagagtatg

SEQ ID NO: 145863 - DNA, 444 bp, Homo Sapiens
tttgaagtttagttatcaatattcatctctgagaaagttgtgaatcagttcctttagataacatgtggctcaggttgatttaataatggggctggggtgtctgcatctctatgctgcttttccagcactgtactgcctgtagtggaaaagactcttggagtccaccttgcgagatttctgcacagcttcagcaaaaagtttggtcacctgaaaattagtgaggagagggattccactatcaacagctgtcctccgaatcacataattatcatggacaaatttagtgtttttgttggggaggttaatcactaggtcaatgctgccatctctaatcaattttctgatggaagagaggctgggattctgtccttcttgagacggccatgccactggggtggcagggacattgttggggttgagcacgtctgatgtggcttccgtggc

SEQ ID NO: 145864 - DNA, 441 bp, Homo Sapiens
  misc_feature (311)..(396): n is a, c, g, or t
tttttgcagcagagaaagaggtttaatcacaaggcagccaaacaaggagactggaggaaacctcaaatccacctcctcaaggagtttaggatctagggattttaaggggtttggatggttagtgggccaaggtataaggatcactgattggttgaagaatgaagggtgacgtcatggaactaaagaaattgcattcttgcattgagtcagttctccttttggtgtcttcagactggtgggcatgagctgtcctgctagaattcaggatctgggccaggcatggtggctcatgccaccatgacagagattcnnnnnnnnnnnnnnnnnnnnnnnnnnnnnnnnnnnnnnnnnnnnnnnnnnnnnnnnnnnnnnnnnnnnnnnnnnnnnnnnnnnnnntcctgcgacttttccaagaggaaaggcgttagacggcctttcagg

SEQ ID NO: 145865 - DNA, 1050 bp, Homo Sapiens
  misc_feature (940)..(974): n is a, c, g, or t
caacccccaaaccaaggtttttaaaaacccccccaaatttttttaccgtttccataccccaagccaaagttgcacttccccccaggggttaatttacaaaggtccacaaattttaaaataaccggggagaagggcgtccattcatccttaacagtcccggaatttgtccctgctgtgccccattgccacatgagcttttctttttaggatacagttataagatattctttttaaaaaaacacaatgcattattttcttttgtttcaaacaagaagagggcatcactgaacacgagaatgcagcggcaacagtgccagccagggcgtgcagggctggggaggcaacagacgcaaaggaactgaggcgggcggtggtgggaagctgcggagcgctgtgggatgggggcgtgttttggaggggcgacttatttttttaactgcttatttcttcatctgttttattcagtttcttcagtgtgtccagcagtttctgtggggtgaggatgtgtgtggatcctatcagcacctcccactttccgttggcctgggtcacctcgtaggcgcagcgcatctcattcaggctcacacccccaaggatgaaaatgatgaggcgggggccactgcggtactcgcctggggccttgttcttatgccagtgcccatagcgggcgctgacggcggtggtgctgaaggaggcagaggaacgggtagagatataagggtagtgtttggtgtcaagtttgtcctcaatagtgtcctccatgatgtccttgataatcggagtccaccgtgagagctggtaggtctgctcgctgatgcgttccttccgctccggcttgctccggcgacgcagcgtggaatcggtgacgatgggcacgccgaggtgagcccccggccgtaatggccgaattcccgggcatatgtccggtaccgtcgactgnnnnnnnnnnnnnnnnnnnnnnnnnnnnnnnnnnncggccgcttcctcgctcaactacttcgctgcgctcgtcgttcggctgagaacgagctagcgccctatagtgagtca

SEQ ID NO: 145866 - DNA, 325 bp, Homo Sapiens
cttggagaatgagtgcaaggttttattgagtggaagtagctctcagcagatgggggagccaaaagggagaatagttttcccctgaagtcaggttattcagcggcccaggctctcctctggctgccccagccaaactctatgtcaatccattggtcggtggcctgccagagtgctggtgcctgttggtggattcctctcagcgtcgagagtttttccctctcaggaaagggagagaagtggcagccacccatgtgttcttgcactgatgtgtcctctcgacgtccaacctcctgtgtgtctgcctgctgtctcccgtagtctcagt

SEQ ID NO: 145867 - DNA, 686 bp, Homo Sapiens
tttagcatccaagatgacactgtttatttgtgatgaagtcagggctaaaggcccgaatccatcaagtctgtttctctgtcaggtgataatattggcgatgataacaaagttaatatgcagttagccagagaactccaaatcctgacctcaaccatccatctttctctacatagtcacttgagaatggagtagaaagtgagttgtgagcttgttctggccagtagacagtatcatctgtttttatttataagctatcctagggaccaacaatgagaccacagaggcaggtatacaactagagattcaccagtagtgtaaatatgaaaaacttcatatattagagactgtggtatctcatgaataagtccaatcataacataacatttctttgcctgctttcttcttatgtgactataaaacgatgtcaacagtgcatttaaattttcctgcagagaggaaatatgcagatcacaatgaaggtaagaatatgctcacaaccatatgtttgttctcacaaaaatatgtgccaatataagaaatgttccattttgaagtttttggcaccatgtggtggtggtgggttgaaacttccatggtgggttcttttgttgttttttttctcctttcatattgtatctttacatttttcagtctaaaggtttctttactaccacctcctcccttac

SEQ ID NO: 145868 - DNA, 424 bp, Homo Sapiens
  misc_feature (133)..(147): n is a, c, g, or t
taatgcaattattgcttttaactttgcgtctaccattgtattattcctttttaatttgtcctttctgtttttgtccctctgatattcttttcatgctatttattggtttatttgaatactttctagagttgannnnnnnnnnnnnnngagaaagttttcaattgttgatatttgacaggtaattatcttggttagactagaactgcaaactctgtttcttaagtggaagctctggtctcagttcaaatattttgtgttttgttgaactgctttgaaatttgttccgtacatgtgtgactcagtggttagccaaagatgtgagtagacagaatttgggtctttcttttctgattcttttctttctggaatccccttcgcccttggccaaaggctgtggttttctgaccttcagtgttccagttcc

SEQ ID NO: 145869 - DNA, 346 bp, Homo Sapiens
ttgacattttacttatttattagaaggaaaaataactgagtgtgttagaaagtatctaagtttaatttaatgataatagtagactcactctactaactttatttccttcctgcaaactcattagaaatactcagaaaatttgtctacatgacttcggaaaatgttaaaaaattttactatagtcaaattatggtcaagtgttcttatattattattagagctcattagaaacaaaatctcaattttcttcacctgattcatgaacacaaataacttgttaattacattatgaaggtaaaagtatataccatcctatagaaatttttagaaatctgattcttcaagg

SEQ ID NO: 145870 - DNA, 1031 bp, Homo Sapiens
  misc_feature (193)..(193): n is a, c, g, or t
ttcccatcttccccaggggtgggggagaaatggacccccccaagaatgggccggaaaagagggcctcacagaaggtgcctgcccacgaggaccaagggcttaggggtttccacccccttctgggctgcttacctttggaaaaaggcctatggcttcctttcttatgaaaaagggggcatccacatagtccttntacttactcccctcatcctgactgggaaaactgagaagaaacaagctcaactcatctcagggcgtcaaggagagcagagtggagaggtgaagaggccaaaagctggaaaaaaggtgagtggagctggggctggcatgcacacttgaacccaggaaaaaaacaaaccacacagaggaacagctgtttttctagagggtttttctcaggggcttctcttagtgctgtagctgctgcaggctgcgcagggcctccgcacatgcgcggataaggccacacagctggatgctagtctccagggaggtgctagagcccagttcagcagaggcccaggtcagcttctgcaagagggctgtctgtgtgcaggccatgacatctgtatttggaggcacagcaggagcaggtggcccctgggctgccttgagtcctgctgcagctccctcacagtgctccggacgaggtactgggggctggggcgcaggtcgagagcccagggggagctctgaggctgaggccagctggtgctcccgagcttgggagagggcagcctgggcattcagagcgggattatctttatccacgtctgagtcgagttcctgacaagccacgcagtagattttccgctgtttgtcttggaggaggatcgtcccgcagtccgcacacgtctcgcccagcatgcggtaaccgcgcagcagatagtcgcccatgagccgggagatgcgatcttgccgctcccgtcgcgcctgcagcaccttcgtctccgcctcagtcgggggctcccaggagaagtcgtcgacttcagctccgttcagggccatgttgccgttgtcaccgccggccc

SEQ ID NO: 145871 - DNA, 432 bp, Homo Sapiens
ttttgaaaaatcagcctcagaaacatctttatcttaagatagatttccgttgctctcagaacgtctctcccctgaccttctgttattaagttcatggacatacagcattttagaattaggtgggggctccgaagtctgcgagtgcagctgtgcacaggtaagtcacttcacccgcctggtgctgaatttcctttgggtcttgaagcagggccgcgttgaaacctgggtttctggacgttgtagctaccacgcagcctgtttctggaagcttggtgttaaactccctctcctggcaggttaaattcattgcaaattcttcaactctcctttgcctcccaacagaatttttagatttagtaaataaagtggcattttcattttgtggatggggcaaaatggactggaaagagtctgatgtgtagagatgtgatt

SEQ ID NO: 145872 - DNA, 529 bp, Homo Sapiens
  misc_feature (315)..(326): n is a, c, g, or t
gtatttcagcatgggaagtttttattgccatgtcttcaaccttactgattccttccttggctgtttccaacttactgatgagcctatcaaaggcattcttcatttgttacagtgtttttgatttctagcaactccttttgattctttcttagagtttctctctgtttagattagccatctggtcttgcatgttatctacttttattcatagcctacttagtatattaatcgtggttattttaaattccatatctgataattccaaaacctgaatttggttctcatgcttgttttgcctcttcagaatgtgtgtcnnnnnnnnnnnnagcatacgttataatttcttttgttgaaaactggacatgatctatcaagtaataggaactaatccaaagagaccattagtatgaggttttatgttaatctggccaggagttgggctgtgcttaatgtttgatgtagctgtaggtgtcagaagtttctgtttcttctactgtctttttgtctcccttgtttcctttggatttac

SEQ ID NO: 145873 - DNA, 553 bp, Homo Sapiens
ttttttttaaataacagtggagatatattgatctcaacatttcaaggagaaaagagcttgtgaaataggcttgtgatgtttgtgataagggccctgtgggggagctggtgggcaccccatgtagagctggaacacagggacatgatcccatgtgcaggagacagctccagcctctgcatacccgtcggctcactcctgggttggaacatcctcctcattttctctggcatgtccttttgctcaatgaatcattcccggccaggccagacgtccttgctggagagccagctctccgtgcaccagccctgtgattctctaatgccagcttgaaattcggtgacccaccttgggatgctttgccataaaacttgcttctaggaagcaactggtcagtgttaactccttaatgaggctgaagtagacatggtaaaactagttgtggaaagagatcctggttacagccaggcagagttgaaagggtgtcctttggcggggtgagaagagagcagcctccaaagattcccctgcaccccgccaggccctgccaggggcc

SEQ ID NO: 145874 - DNA, 677 bp, Homo Sapiens
tttttttcatataaaaattatttttattaaaatagaaaagctttccagtatattgcattaaagacatttatacagaaaaaaggcaattgcaacaagcatgctacatcagcactgacatattctgaaagctttaagtgcccatttttcagcaacattttggtataatacgcatatccctatgtatttcagagggtacatataatactgaaaaaatacttcatgtaaaatctaagttcatgtgcatacacacaagaagtattacatcaaatagcttatttcaaactgtgaaacacattcaaagtattcaatttcttagacaacatgcatacattttaatactcagcttgacacttttaaatatataaaccacaattctttatacttctatatcaaaaaagaaagtcagacagaacacttatctacattgtgcatatcacaaaaagcaaatgtgttttcacgaatggaaagcactgggttaacacacatgattgtcattttacaaatatggctattcaccttcttcataataaaatagaaatataatgtattatttacatgaactacacattatttcactttttggcaattatataagtagcagcaattggtttaaagattgatgtttaaaaactctacatttaacttggatgaagaccgatgaatatagatctggttaa

SEQ ID NO: 145875 - DNA, 396 bp, Homo Sapiens
ctcctttgtgttctcagttgttagcaaagggatcagactagtcattccccagaggtccttctaactttgaaattttgtctctgacatcacaaataatttcatgctttcattaaacatttgtgtttctacctctggcctgtagtccttggactcttgttccataggcgtagggttgtgaatggcaaaagaggatcttggtgttcttttatgaagtgataccaacatatttcacttttaggataatgccaatattggcaatatgaatcttaacatgagagttaactgattaactttttgtgtttttatggaattgctcaattggttatcataaatagattttgttaaattccagcctttatgtaatttctaagcccatttcatttgtatgtcttattt

SEQ ID NO: 145876 - DNA, 372 bp, Homo Sapiens
  misc_feature (234)..(300): n is a, c, g, or t
tttttattccaatttttttattctaacaattaatgtataacacattacatttaaaagaatgtaacttctttaatagtgttagtgaagctacccaggatattcagaactcaaatgaagtgtacaaatgccaaaaacgattatgttgctatttccacagatgttttctgaggaatttgccttgaagtgatttaagatgaatacttgattttgatttttattttttgagacagagtnnnnnnnnnnnnnnnnnnnnnnnnnnnnnnnnnnnnnnnnnnnnnnnnnnnnnnnnnnnnnnnnnnngctcaagcaatccgcccacctctgactcctaagtagctggtactacaggtgcacaccactgtgcctggctaa

SEQ ID NO: 145877 - DNA, 778 bp, Homo Sapiens
ggcttcaaacaacaatttattattccctgccatggttctgtgagagaggataatactaggctcctgcaggcagttcttgctcggggtgagcagtgtggttgcatcagatggtagctggggctgggcatctaggatggcttcttcaccacatttctgatgcctgaactggggatggctggaacaacggggggctggccagatgtctctccaagtggacagcttgggcttcatacaggaaagaacacttataagccatatggtgatttcttttaaggaatgatcttcctgtactggtgggaagagccagcctcaccactctgttagggacacattggagaaaagagaccagtccttggctaagaaagacaggatccatttttccagtgctttccaaagcagcatccactttaagtcagggaaggccttcaaattactttggaagcctgcgagggagggtggtgtccactgcccagttccgtgtcccgatgcccagcgccagcgccagccgcaagagtcaggagaagccgcgggagatcatggacgcggcggaagtgggtttcctcctttcctgggcctgggaggacagacccctgggccgggctgcgccgagggagggaggagggggagtggggccctacaggtccttgtcggcacgttctccgcaggctgcgggcgtggggtccgggcgcctagagcccttgccccagcagtggggccagaccctctccggaccgcgtttcttgcggggctcacctgggagtttggcctactagaagcg

SEQ ID NO: 145878 - DNA, 1117 bp, Homo Sapiens
  misc_feature (995)..(1029): n is a, c, g, or t
atttatttaagctgggtgggactggaggccaaggtatggcattatttttaaaaatatggccccagtaaaaaaccttggctccctccttccacgggcaggggaaataattttagggaggtttggatttcccacaaaaactttggttaattaaagtttctcggaagagatggcagatgccagactggagacggaagactgcctgactagttgatgtcctaagatcaatgactctgttgtctaatctggtatcctggttaacagtagctcttccttcctcttctccttctgcctcaggccgaacagcatcatccagctgcaggggcagacggggttcagccaaactgatcacataaatcttctgaacatgtaactcaacgtcttgctgtgtacagcttccaattttctgattcacttttctcacaacaccttctacatccacaatgctctctttgttgatgttggcagcaaatttaaccatctgcttgcttgcatggtctcccaccgccacaagagcctggacattaaactgctgctgacgtaggactaagaagcactgtttccctttagctctgcttgtatgaactcttgcacgtacccaaacaacttcatcagctttttgtattgtcaagtctctaacccgaaccaaaactcgatctggtttttcttgtgattgtatcattgaagatattccatatctctctttagcataatcttccgccgcgtccatgatctcccgcggcttctcctgactcttgcggctggcgctggcgctgggcatcgggacacggaactgggcagtggacaccaccctccctcgcaggcttccgtaaggcaggccaaaggggcttctccctccctcccagtctccgccctcccgaccctggggtctcagcacacgcgctcggactccgcgtggaggtgcggctccagaaagatcgcgagaccccggccgtaatggccgaattcccgggcatatgtccggtaccgtcgactgnnnnnnnnnnnnnnnnnnnnnnnnnnnnnnnnnnncggccgcttcctcgctcactacttcgctgcgctcgttcgttcgtctgcaggcgagctagcgccctatagtataataccaaaattcttt

SEQ ID NO: 145879 - DNA, 367 bp, Homo Sapiens
aaaatactgaagtttatttctggaaacataagtagttacatttacattatgtgtagcatgctgtctttccaaacgtcacccaactccacacaccgaactcagagcagagtctcctcggagagtgggggcattggcttgaggaaaaggatggaagcgtttcaatgtatatgtgatagatagaaaaaagagataacactcagaatagttaacaacctttgctccaacaacacaggctccacaaccctccccaggccagggtgaacagccttgtgtatttcagaaaataaagaagtgtggaaaaatactgtgtttgggatttaggtggtgagtacctagaggttctatgttgttctctgtactattctgt

SEQ ID NO: 145880 - DNA, 498 bp, Homo Sapiens
tttcataataagcaaacatttattttaaaagggattctgatgttcaaagcagccaaaatgacattgagcaaacctgggtgtcaccgatcacacatacacgtacagactattccatctctacactcaggcaggagcccatgcaacatgtgattattcctaaactttaggttactgattccatcttttctctcattacccccttgacagaggtacagtaggatgtatagccagaattataaatcaaggctgctcacctgatgttctctatctctgctgaaactcacacacatacaaacacatatctatgtgtacacacacgaggcagctcgtttaagctgccacctgaggatttaaatcagacacagatattttttccttaatactatctaccaccactgcttataagtatgtttcaaatggtattgatgggatcagtgagaaggaaaagatctccatttacattccacatttacatctgatcaacatatacatatatat

SEQ ID NO: 145881 - DNA, 449 bp, Homo Sapiens
tttgcagaggtttgatatttaaggtttcaggataaaataataagtcttacacaatgaccccagtcaggtacatgtacaaggacaggagaatcaatgtcattctccatataagaaccagagtgttttggacgttattcccatggggacagctctcgaggaagatctgccatcttctcttgggacaatttatcaaagtcttcagcttgggccactgtggagtgatttttccagtccccagatacaccttttctcagaagttgtgctttgtccactacataatcaacactcaggaggggataattggacatcttgttttctttcatgctctgaaaggagctgttcttgagaattaagttcagttcttcgggttctaacgtctttcccagggattgacagatcttctctatggttattcatgtgtactgtgtcagctcctcataactcagtag

SEQ ID NO: 145882 - DNA, 440 bp, Homo Sapiens
tttccagtttcccgttattaatatttcacattcgtatgatacgtttgccacaattaatgggcccatgttgtcatagattattattagagcccatgtttcattcagatgtccccagtatttccctcgcgtcctgtttctgtcccaggatcccatccagggtgccgcgtttcacttagccatcctgttgccttggactcctcttggttgtgagtttcttaggctttcttggttcttgacgaccttgacagttttgcagaggactggttgggtgtctctcacggttcgactggggttgtgggtttgcgggagggagaccacagagttaagcactgtcctcatcacatcatgtcaaccttggccccctggctgagggtgtgtttgtcagctttctccatgataaagttattattattttccccccctttccatactgtactctt

SEQ ID NO: 145883 - DNA, 1082 bp, Homo Sapiens
  misc_feature (903)..(903): n is a, c, g, or t
  misc_feature (1017)..(1017): n is a, c, g, or t
  misc_feature (1051)..(1051): n is a, c, g, or t
gtgtacgtcatggagagtgtgtaggtgatgccatgcgacttccatgggcataggtatgtatctagatgcagcgttctacatggctcttgcgatcctgggatgcctcatcctgtgaatgccagacaccatgttgtgaggaggcccaggccacaaggagaggccacctgataagcattcaggccagcagccccaggtgagttcccagccgacatcaacggccagatgtatgatgaatgatctcacgtggtcccagcctttgcatgactttgcatgacgccagctgatgccaagtgggacagagatgagctgcccattccaatctctgcccacattgcagattcatgagcagagatagatgtcactgtttgggggtgaatcatgacacagttacagtacttgaaacattttgcgaagccaggcatgaatgtcatatgaaattctaataaatccattttatttgtggcaccacaatattatcattaagctctctttttacacagtctgcaatttgtatcagctgcccccgtgtgactctgcccttattttaggaacaaccttttgctgggtggcgtcctagaaggtctgggcctgggcagcagccactgggaagcccacctgtgctttcccccatctgggtggggcggcagcagagaccctgagaatcagcggttatgggagctgtgtgttagctgtgtgttattggctttggcttcagcatgtcctgcctaggagtctccagcagctgtggtttccttggactggaggctttttctcctgatgacaatcgtgacaggtccatcaggcagtgccttgatgatgttccaggcttcaaaccgtgtgaggccctgcatggcagtgccacccagctgcaagatttcatctccaggctggactgtctcactntgttctgaggctgctcctttgaaaatcctgttaatggtgagaggcttgtctccgtgtagggagccctttccctcctccagggctgagcccagccctgccgacatctttctcagngtcaccgtgcagactggggcctctgctgtagatnctacagaaacatcactggctgccctcgtgcc

SEQ ID NO: 145884 - DNA, 526 bp, Homo Sapiens
ttgaacagaaacatagcttgtaagcacttaaactattaatggtcagttcatcatacaccagtatgaaagttatttgagggcagggatggcctctttctgaaccttgtatcttcaggccaaaaaaatgtctgttgaatgaaaccaatgttgatgtacagcaatgtggctggaatttagaaagcttaataaaaattgggtgagggggcatctaattcagaacatgtttttgggtgtaaggctagtatcatctacttttgaaaacataatttttatgattagcaggtaaaggtagcatgaaactgcaatacactggctccagacctttcctctctgccttgccacaggcatgcttggtggtctgattacaaaagtacggatctcaacactatattttttattctaaaatctcaaccaaaatgatgggatcatgggtgcaaagtgggtttttcctttaaattgtgagaaaccatttccacatttcagatctaatggtgttctcatgacattgcaaagtagtattttatgc

SEQ ID NO: 145885 - DNA, 391 bp, Homo Sapiens
tttagcagaggtaccatttttcacaggctattttctactttcataatcatctcataaaggcagtataggttcaaaaggcaaatttttaggagacaacctgatcagccaccaagaatcgtttttgatttggtatcaaaagacataacatttgatcagtttgcaattttgtttgggataaatatccacagtgatactttgactctgaaaaaacatcaaagtgccgctttgggggagatcatgaaaacacagcacgcaggcctaagagttgctaggaaggctatgacagacgggacagcagcaggttctctctcaagactagaccgtcaacagagcatgcagagaaagaggcacagaggctgttgcttcacaaaactgaggacggtcaggatca

SEQ ID NO: 145886 - DNA, 570 bp, Homo Sapiens
tagaaaccatcaatcctcttaaagggtaagcctagaacttgcacagcaaatcccaccacattccactcatcaaagcagtcacaggccagcttaggttccaagagttggaagaatcaatccacctcctctcaatgaaggattaatatttgtattcaatgagagaataaaatgatggcgccatcttggtaacaatgtagagtagcaggactgtggttgtgtgtcccaggctagaaatcatacattcaagcaagcaggaggatagtaaagtcaaggcctccaaggctgaaacacagtacagccactctacccaaccactgggtatctagaaaggctcactggtgagcagccaatctttccaaattaaaagtcctgataatgatcatcactttctaaatgagaggtcttgaggaagatgtgaatgggaaggaacagggtgccaaatttttcccaagggcttttaatttggttaatgtgactctacaaaagatgattgtatcactttcagacaattccggtagcaagtaagtaatttccttttactgctacagagttaatttgcgtgtgcagaaa

SEQ ID NO: 145887 - DNA, 490 bp, Homo Sapiens
ttttttaagcattatttatattttaataataaagtacataccatggacataaaatgaaaatgcatataaattgaatagattattatttaggtacatcagttaagtagcatttagttgtttaataaataacagactaaatctgaaataattcttagtttggtaagttctaagtataattatttaagaaataagagaatatatacaataatatatccattcttgtcgttcattcaaaggcattacatgttgacaaaccattgtagatttgggtcccacttctactgcaaatatgttgagtcctctgttgtttatgcagtttttacttagctcattgctgatgtgaataatcactttctcatctgacttgttttcaataactgacgttatccaggtgtcacaactgtaagtatgcacgattatattttcatagccatccattactttggcatcaccgttgctaagaacagatttacaaatggccttctcaagt

SEQ ID NO: 145888 - DNA, 423 bp, Homo Sapiens
ttttcagcatgtaacatgttggttttattagtactagcatattctgaactgttgaagtgtatctgttttcaaaatatgttgcatgcggattaacataaaaaggcaaacagaaacagtgctttcccgtgaatgctggttttgaatgacgagtgtgtttgctgtccatgatgaagtgcgtatgtgttgttggcgggtatcccatgcgccgtttccaagggtaggaacagtacgaggcttctgatcacaaccccacagaagggaaagtggttgagtaagaaccttgaatatatggaaaaacaggttgagtgtggtctgaacctgagggtagtgtgttaccacgaaacacaattcttcttcgggtgtgtgtgcatggggccctccttctctgctcttttctttcacattttcaaagctcatcatgct

SEQ ID NO: 145889 - DNA, 408 bp, Homo Sapiens
tttggtattagacatgcaagaaatttattggaggaactcacttgtgtaggacaaagcggagggagtaggagtaggcaggaagagccttcagacttccataaacctaacacctgtggtaagagatggaaggaaggaggattgggtaagaggaatctcagactgttggtgcagtcctacagaaggttgggccaggctgatggggagtccttaggccaaagttgccagccagaggagtttgtgttgtgcttgcactcatatcatcactgtgctgtccaaggcagggagcagccctggggccttgcagctaatgtagtgggaatccagaggggggcatctaggactgccagtcaactgggcttcctgtagtgagtcttttgaaaaattctaagcagcacatttctagatctg

SEQ ID NO: 145890 - DNA, 898 bp, Homo Sapiens
ttttgggccctccaagaaaccatgacagatgtaatttacaaggaagaaaactcttgtttaaggagggtaatttgctcaaggtcacatagctagcaagccacagagccaggattggaacgggtgtcccctgccaggaagcaggggatgcgcgctgagcggttgccttccacatactcagtattctcatcagcacaaacacacactcacataaatggcacatacacataacccatgaaacactccccatgttcagacaacacacacgcatgaaaagccaatttatatacttcgcacatacatgagcacacaaatgaacgtctagtcactcattttctcagctgcacccagaacagggctgggctcatctagggcaaggagatctccgtggttccaactggccagcccagatatacccctcactgctgcacccccttacctggcctctaggaggcttccctccaggaagccaggttcaatgcaggaagtgtactgcagttgacaaagtcccggggatatgagttggacatgaagatgttgttcttagacacggtggtgatgcctgtgttgtcgcagatgatccggggcaatgagatctgggccagggcctgtcgctgctgcatgctgaacacaccctcgttctcccacaaaaccgatcaccatcccggagcttcctgaactgggtacgatgatgcaggcgaggagtgggcccacgcggcctttgcgcttcagaggctcggacacgccgcccatccagatgtcgatgttgttgggcgtgcaaaactgctcatcagtttcctcgccaattttaggttcctcacaaccggccagctgggccacagttttaggcttggggagccacagaaagcgcctcaggattttattccgggaggcgtggtcc

SEQ ID NO: 145891 - DNA, 233 bp, Homo Sapiens
  misc_feature (144)..(160): n is a, c, g, or t
tttgtgactaaaattggtgacattttaatttgcaggcaattacctctacaaacacctcccttcattagaaataaaaattgagatgttcaaagcatcttacaggtcaaagagctaagccagatcctcactcaagcactcaagagnnnnnnnnnnnnnnnnncccgagaaaaactctggaggaacaaacaactttgaacattttcccactgaagtcctggcgttttggcgctgac

SEQ ID NO: 145892 - DNA, 548 bp, Homo Sapiens
tttttttaagcatattgagtccaacctttattctgataatagccagtaaatttgcaaagagaggagacaaactgtaattgtatacataaaaacacctagtcccactttaaaattttaatatctatatatagtactgtatttaatttttaaagatgaagacagcaaaaatattcacattaaaatatcttacagaaatcattattcttctattcaagaaaaccaattatactaagttaacagggaaaatttaacagaggaaattctccttgggacacttattgaactgaggatttcacttcatagtttaaaaaagtaaacaggtctcaggtgtctttttcatgggtaggtcaccttatcaatctgaattacagttcatgggtaaagctaactttttttgtgtgaaataagttaataatgccaattcagtttcttgtaaacaaatgtctgtatcaaaccactataattactgtgtaacaccttgtagtatcagtgaagtggctgagaattaaatgatcacttatgcccttatctttagatacagtaccttc

SEQ ID NO: 145893 - DNA, 392 bp, Homo Sapiens
tttttagggtaaaaaaggtgtgggaaatatgtgaagaacagaaggctcgggattctggtctgctgtcggtgatatgtgaggtgtccgcagggaaaccacaatagctggggctcaggaccggaagaaatgggggtcagagagtctccagcgagcttggaaaggaccctttcatgtcaggcctggggagggaggggccagctgtcaggacgagttctgagccctgtgacgtggctggcttttgttcttactttgccttttccacttctctctctttagtgtcgagttcgcaggctgtgatggtgatgctgacagcaaagtacttaacactttgaaagggggaagcgttccatacatcttcagtgaaatgatgagacacgtgaattagaaggcaa

SEQ ID NO: 145894 - DNA, 313 bp, Homo Sapiens
ttttaaaatagcagacatttattgtctcacagtttgggaggctagatgtccaaaatccaggtgtcagcggggttggttctttgtgagggctgtgaaggaggatatctgttccatgccccttgcctggcttctggtggtttgctggcaatcttggcaacacttggcttgtagatgtatcactcaatcctctacctccaaatggcattttcctagtctcttcatgcagtcttccctctgagcatgtctgtgtctgtgtccaaatgtcccctcccagtaggggcggccgggcagaggcgcccctcacctcccggac

SEQ ID NO: 145895 - DNA, 462 bp, Homo Sapiens
  misc_feature (124)..(182): n is a, c, g, or t
gagttgtttgagtccttgtaaatttggatatcagtcccctgtggatgcatagtttgcaaatattttctcccattctgcagggtgtctgtttactttgttgattatttcttttgctgtgtagaannnnnnnnnnnnnnnnnnnnnnnnnnnnnnnnnnnnnnnnnnnnnnnnnnnnnnnnnnnctctggtccttgattcagaatatttttgtttttcttgcttgtgcttttgaggtcttagtcacgaattctttgcctagaccaatgtccaggagagattttcccaagacattttgttaagtgaaatacagtaaagtgccaaagactatctacagtatgctaccctacatataggtaagaagggtattttgaaaatgtatacatgtatctgctcatttgtgcaaaaggacaggataaggacaggaaggataaaccagaatctaaggagagtggtttcctacag

SEQ ID NO: 145896 - DNA, 647 bp, Homo Sapiens
tttgatggtagtttttattgtttaccgccatatacaacagctgcaactattattctatccattttttttactagctctctaagaagcaatgagatcaaaagctggtttatagtgatgtgaagagcaacttcaaggagaggaattggagaccaagcaaagatgaatttgttaaaatggttgactgaaaaaataccttcattgaaaaggtggtagtcagagaatcagtaaagtcaaaggaaggtatttgtcaatgatgaaggaatactggacatgtacatgggttgaagaagcgagtccaacctgaagatacaggtgtggagttggatcagttctccaagcaggaggattgatcttgcaccgtggttacagtcctgcatgggctttgagcatagatctggtttgcttagtagctgtgtagcctcgggcacaattattaacctctctcgattttagtttcttcctctcattctattctgggaaaataaggagattttggttttgaaacagcttttctgtattttttttctttggaggaatgtataaaatttctcaggcagagtccttacattgagtcagccttttcccaaattatccagccttccagggatgtctggaactgacttcagaaaggtcttccagtctgagag

SEQ ID NO: 145897 - DNA, 1128 bp, Homo Sapiens
tttccccccttccctcccgattccccccggggccctggaagaaattggggtgagcccaattgctggtgccagggaagtccactgttcctcccttgaggatggccaggtctctgatcagtgggggcagggtggatgattttggcgttccccgcccttcagagccccagggaggccagcatgctgcagggatgggccaaatctgcctttgaggtcaggggccagaggctgggccaggttgagggtcccgcagttctttctcccaatacttccagggacaccattggcgatgggaggctgattggtggtctgggtcattggcatctgcgggaggctggacggcagggacaatcttcctcaggacagcagcagtgggcaggacagcagggacagcggatatagcagcagcaatactgaggacagcactggcaccagcacactccaatcagcagcaggaggaggagggctcccaggatgatgaagatcactgtcagccagtgtaggacgatgagctttacttccttatcggggtctcctgatgtgtcccctggagcctcaatggtgcagtaatacactccatggtcccaccacatcacttcatttatcacgagatctgctcggttctggatggtgatcttgcgctgccggtaatctacccccagcacgggctcattctgcccccgccgctgggccactatgcgaacttcccgctggttgtcgttgcagtcattggatgggtcctggcccagggataaagctgcctggtatgacgctgagtagtagtcaaagatagggttcttgcagaaggacttgaagcgccatgtcaccaccacgtcctggagctgggcagaggtggtgtagtcacatttgaggatgatagaggcaaacagggtgacatagcgttctgtgtgctggaccgtcacaagcaaggacaggcaccctgctgggagccaggtgcagagcagcagccaaggtgcgggcagtttgggccatgccatgccgccccctttctggcccttttcagctcaggggcttcggggcactgcgtctttcttcctcagctgccgccccaggacgcaccaccttctccaaggaacccctcggatcccgggaattccggaccggtccagc

SEQ ID NO: 145898 - DNA, 352 bp, Homo Sapiens
tttaactttgttgttggtaggctgtgtgtaactttcattttattttatgcaactttgctagattttaaattatttcaactataattgctaaactcttgtttgacttcaaagttagaggcagtttaaacctggggataatgtttttaaacagtatttaactacttttttgccttttcagtcctcattggaaaaccttaacctatgttgaaaaggtgtaaataagtgctagtataaaacaatagcacctgacatgggacagttttgtgaagtttacaagtaagtttttacaaggcatagcttttattttttagatccctgggggctgggtaggcccttgccctgggttgttttg

SEQ ID NO: 145899 - DNA, 397 bp, Homo Sapiens
taggcatatagcattttattttttgtttatttacataaatccctaatggaataattgataatgttaaaattattataaaactattatgaaattatgatgaaacaacatggagaaatgcttaagtataaaaaaagaattttaggcacacaataacttatgtgtgcacacatacatgaataaatgtagaaaaacattggtaggaaaagttttctgtattgctttaggttaatagggtaataagttaaaaacaaacgtttctgcaaggtctttttattgtctttacacttacaacaaaattaactaattaatccttaagcacttattcaagtgatatatttgctctgttttgaaactcacttccctgagatacccaaatggcttagtcctttgcttacct

SEQ ID NO: 145900 - DNA, 512 bp, Homo Sapiens
  misc_feature (484)..(484): n is a, c, g, or t
tgaccggatggggaagcatcagtgcaggtaagcatatttttgttgcataaacattaatgccagttgttatttttgaaaataggtcatgtaaatgatatcaagcagcatccgcttcagcccctcttcttttattctgcccatccaggagggatcacagagaagatgatctgtgctggctttgcagcatctggagagaaagatttctgccaggtgagaggattctggttttatacaggaaggtggaaaattgccatctgctgaagagtttctatagacaggagaaaccactgctgaaatcaccaacttgtcacgtgcttcaatatcatatcccttccaggcccctgaaggcctttgtccgttgtcgtcaggactaggtcggtctcgcccaatggcgacagagtggtcacccgggaaccggatctgcgcggctccgtggcctaaagaggcggccgagcctgccctcgtgccgcctcgtgccgaattnctggcctcgagggccaaattccctatag

SEQ ID NO: 145901 - DNA, 603 bp, Homo Sapiens
  misc_feature (298)..(306): n is a, c, g, or t
ttttttttctgaaaaaatgaaggcacatttattaaatgactgggagaaattccatagtatgtagaatgggaataataatacataacattgtattttatgttccattttttaaaatgagtccaaggaagttaaaatattcttttaattaagacactcaaagaaatgaaataagaaaaattgatgcaaggactccttcaagttaagatttgtgatacaaatattttcatcttttaacagggcaagctgatgtgttcacatctcagtttcaagctgcctctttcactaggaacatcagtannnnnnnnnaaaagcacatttacaatgctttcccatcacccttgctgtgtttttgtagcacctatagccataactggcacctgggggcctgcgttgctggcagtttcccttacatttctttggagtcttttcaactgctgtggttttacttagaagtcagtgctttgcatatttgatttcctgagactgtttgaatagtctttctcagaaaactgtgccagtctggctgtgaacagctcttctccgaggggagctgacagtaggctgctcgtgttggtatgcttggacttgggtttccagcatgcc

SEQ ID NO: 145902 - DNA, 401 bp, Homo Sapiens
tttgatatttccaaatcaacagatatttattgatcgctagtctgccacgtgagaaggacttgccaggcagtcattgcttggcccatgttcccctggacgttgctccattagagattctcaaatgatgtgtcacagtgccctgacatgtggctagccggcttgaagattcctcagaaggggggaaattgagagcagttcatgagagtatcttcacgagaggcttttccattcctgttattgtctaatcgggtctcatttgagttttaagaaaacgggggactgaagaatgtgaacttgaccaggtgaaggaggaaagggaaaaggagcaagtatttctgaggcttcatgtgtgttggggtctgtgcttggtgctttctgtgcattttttattgctgaatttt

SEQ ID NO: 145903 - DNA, 259 bp, Homo Sapiens
  misc_feature (196)..(204): n is a, c, g, or t
tttaggcatttaagtgtaaatttttattccacataaagcattttcattattgtttgcttggctcaacttcttaatggtaaagccaccaattagttttatggtgcaaaagagtgctgcaattaaaaaagtattccaaaggtcttccaaaagttcatgaaaaattcacattatgaaaaactatgcatgaatttcaaannnnnnnnncactgaaacaaactcatactaacttgtttgtgtctgaacaggatctagtttgagg

SEQ ID NO: 145904 - DNA, 499 bp, Homo Sapiens
tcaattattaccctttattataatgaaacttccttagtgtaaagttaggttctcaattaacaataaatatctcttcttaagtttaaggtagtgatgatgagcacaagtgctcttcaggtagtcattactgttaccttattctttaagctatcatctttcatccattcagtctttaaaactactagatgagttaaaatccaactgactctgaaaaaaaatcttctcttttttcaaaatccaccaacttgtgatgattctcctgcttttcatgtttaagttcttatctaatttcaatttgttggtaccctggtgctataggcaagtattcatgttgaagttagtattaagaccaaaattataatgcttttcttaatgggggaaccctaaggctactcactcagtccattgaggggataagagagatggctcattcccatccagttttgtttacaaacgatgttgctcaaatttaggtgactggctactagggaaataaatg

SEQ ID NO: 145905 - DNA, 411 bp, Homo Sapiens
tttggaggacccaaaaagatgtttatttctaagttttcagacagcttggcatcttgtacctggaacctcctgaccatgtaggctgcagcacagctgtcttcctccctctgtgctgttctggactttaatctgtgtgcacagcttagtgcgtcacaaatagtaactgagtgaggctgttgtgaaagaagcctgtttttttcaggagggccaccgtcctagcctgaggagacacctggtggacacagactgcagggagagggctgaaagttggcctagtgaatcagaggggtgactgagggcctagaagttgccgcatgagctctgatcatcattaggggtgctgtctgcccatgacctgcaggtacccaccttaaccagagcttggcttgtggcctgcaacttggcgacagg

SEQ ID NO: 145906 - DNA, 571 bp, Homo Sapiens
  misc_feature (499)..(499): n is a, c, g, or t
tgttgttgttattagattgatgtttttgtctttgtgtttaaccagccttgcgtttctggggtaatccctgcttggtttggtaggttgtctttggccatattgctagattgcatttgcctaattgattgcctaatgtttgactaatgctgctatttgtggatgtctttgaaaagtagcagagtctctaggtggtatttggtgaaactgcacttaaaaggtagcaaagttgttatttaatatttttgtgctagcatgtttttctttggtatttttgcttgcgggccagatcttgggtccggagaaaggcaagagctccccgtgtggacctgagtcccgtggagcagcgcccttctcggggcccctgcgtgggtctgccagaagcactggtgtccacaagcagtgtccggggcctttccaggaccctcgttttcttactgccacacaagggcgtcgcactacacgaggcctctgaggaccggtctctaactgtagccttggntggcttgtgtccctctgagcttgagcttgagcctggggagtggctggttttgtggaggctgatctgtagcac

SEQ ID NO: 145907 - DNA, 615 bp, Homo Sapiens
  misc_feature (280)..(294): n is a, c, g, or t
attatgattaggagcactaataaagcacaaatcagggattcccaaaaagaatgttgaaagggcagtcagcttttcctgtgccagaaatcaaagtcatagcagatttggggcaaatatgtcaaagtcagacttacgcacatcactactgagaagacaaagatgaatgtgtgacagtttcctgcccccaagaatctttaagcattgtgaaggaagattaatatagccaaataactagagtgatcagttctaccagagaggaccagttttggaagccagaggnnnnnnnnnnnnnnncagaaacaaaatgatgtttgaattaaatctttaaaagtttctcttataaatttaccaagccacatattgggaatggtaccccaggcagaaggagtagagtaagcaagccagaaaggaaatactatggtgcttttgagtaactgcagtgtggctgaagaatgtggaaaatgatgaggataaagaggtggacagggaactaggtaagggagggcttccttttaaataattagaccttgtcctgtgtacatttaatgggattttaatcaggccataatgccaaatttctttacttcggaaggatctttatggtgatggtttcag

SEQ ID NO: 145908 - DNA, 852 bp, Homo Sapiens
aagctatttagcatattgtgtttgacacagtatatatttttgggcttgttcattatagtagagttaccataaactgatgcacgctctaatttgtgtaaatcattgggatattttctgatacctagcataaacattccagttccctgaatgatctgggatataggacagataagtaaaagcaaaaaggcgagcaagataccctcatgcaactatgaatagagggttttagtttgagaaatggagcatttgacatatggaggaacttctggctgttcttaatatcaaaacttcattgatttgtcaataattgttgtgaaactgagaaaccaggcagtgagaaacagttaaaaatgctccatgtgattcctccccacctcatctccctttaatttcattttttctccttaggcctggaacaagatggctgttttttggagagtgaaactgagtgcaagtcatgtaatgtttctgtatgatgtttttggcagtgatgatgaaaattctagactgaaatgatattgcgtgaagtctggaccaattgctgtgttaaagtagaatgaatttcctccctttctgctgtctggatcaattttgggggcagttagagaatttagcctttcagttgaagcaacatattgtactgataacatgcaaaagtacagtcagtctgattggactcactgggcttttccaacttgctgctaatgtgatcattaggagagcttctgcaaaataaatataactcacagaggtttgttaagaagggttccagattccattgaccaacagaggaatgtttaatactctactataaataacaacaacaaaaagatgctatcccctcccctgaaa

SEQ ID NO: 145909 - DNA, 844 bp, Homo Sapiens
cttttcagatcactcccttctgatgcttccacaaccagtcatcatggctcaaagtacatctaacttctctccttccctcctagtcttgtaagactggattgataaaggtcttgacaagacagcttctggacatctctatgcaaaaccacccaccaaaaggctcaggaattgggaaaaacagatgagaataatgtccccttactaatgtatgctttacttctgaattccattcttcacatgcaattcttaacaaggaactgacagaaaaatggaaagacagatttttcaaaagcaaattagagaatgtgaagctggaacccagatctccctgacagatcctagtgaactggggatggttgacacagggatgccaactcacagattcagaacaatgggttgacaaccagccctctgcatccttcatctcccaacatatgctgagaataaatggcatgtcctgataagggataaagtactggcgtacatcaagaaaagctgctttagctgcaatacagagaacagaatggaggtagcaagcatgtgagcgggaagatccatcaaaggccattacaaccgtgcaggccagaactggagacttccagaagagaaaggattcatgctggatatagatgcctggagttcagaggtgagatctggggcgagtcatccatgaacaggtattatttgaagccaccaggatggattaggccaaccacagactgagtggagcttgaagataaattttaaaggaagcaaccaaatgtatctttagcatctctcttaaaatcataaaaccttaagctttatggacatgtcacaaatcaaataaatcattttcctgaaa

SEQ ID NO: 145910 - DNA, 620 bp, Homo Sapiens
  misc_feature (86)..(100): n is a, c, g, or t
  misc_feature (109)..(224): n is a, c, g, or t
cccggggtttttttggaaaaaaatttggcccttttttctttccttggggggcccgccccccaaaagattgtttaaaaaattttttnnnnnnnnnnnnnnncccaaaaannnnnnnnnnnnnnnnnnnnnnnnnnnnnnnnnnnnnnnnnnnnnnnnnnnnnnnnnnnnnnnnnnnnnnnnnnnnnnnnnnnnnnnnnnnnnnnnnnnnnnnnnnnnnnnnnnnncactatagaaaaacctttaataacaacttcagatttacatgacccttctggtgctcagaacactatggattaacacacacactggaaagatacagacacaggaatctgctgcattaccccaaatggcaaagtcttgactggggcttcagctcctttcccaatccaaaattggcacctttttccatggaaattcaaactgcatctctaaatgatggggtacatgaactgtctgtttcaaaagtatttaaaaacaaacaggaagtacagcttccatttcattaagaaaacaccaccacaagacatggtgcagtatctactagcttaaagtttatcactccattagggcttattgacagcagaaatgtgaatgtagtaatgtagaaataaggaagagag

SEQ ID NO: 145911 - DNA, 998 bp, Homo Sapiens
  misc_feature (295)..(332): n is a, c, g, or t
tctcaatcatgcattgttatattttccaggatagatcatattctaggttatacaacaagcctgaaaaacacatatgggaacataacattttaaagttttttctccacagctatttatcaatatgtgaatatttaaagaaattttactttgctgcactagtgggatagtatgcaaatatttgcccttgtctgttggtacataatgtggtgaggtagacctgaatgtgcttgagacacacaactaagctggatcactgtctaactaatgtctaacaacatgcttattggaatggtgnnnnnnnnnnnnnnnnnnnnnnnnnnnnnnnnnnnnnnggagtcctgcatactgtcacttaaatatttattttgattctgtcctcttatcagctactctactccttccaagttagatatttatagggtaggaggaggtgtgtattgaaaagggaaaataaagaccaaagtctcaaacctgtagagccaaaaagaatctacggttaaaactctacctatgtacaaaaggaatattaagctgtgcaaaatgctgctgcggtggcctcgtgatgtggttgttactggtagaggaaccgagcccggatgagggtttgtgtacaggccgcaggtgcctggggagcactgtggctccacagcacagaaataaacgcctgagtctgtggtctgggaagaggaaatgtacaataagctgtagcgttccgtagcgacagtcgtggcgcttaatcttccattctgttttgtccctgagggaatgtaaaacaggttgatgagctgtccccaagggttttgatgaaaccactgcaaattgttcacagagtcagaaaaattgcaccgcagcgtggaattggctccctcctggagaatcaggtctggaggactctgctccacttgtattcctctcacacagcaaacctgggcactcaagagccccagcagagctcccaatatcctcttcatgatgctttgccttcttgctccgggcat

SEQ ID NO: 145912 - DNA, 301 bp, Homo Sapiens
  misc_feature (147)..(155): n is a, c, g, or t
tttttaatagttcagctgagaaatgcttttatttttcaaacacaaaccaaaatttaaaagctgaaatttacacatgtccaaattgtaagagctagtcaggaactgaaatgcaaataattacatctttaataattattcctattaagnnnnnnnnnggcaacatgaccttaaatagcccaggattatctgaatgtggtcattcaagctattactataaattactcagtgtagaggtataattaataattaatagaactttttagagctaggacatctaattcaacagtttccaatgattttc

SEQ ID NO: 145913 - DNA, 441 bp, Homo Sapiens
tttaacgttttgaaccattttgtttgtccaaaaagatggcattttaaaaaggaagagtgtgaacaggagaaatatggaagagaagaggaagcagaagtggccaagggagagaacctgatggagaaaataaggaaagataggaggggccaaagcaaacagaaggctcatggctggtagttactctattaatggaaatagaatcacacaggcagaaagaaaagtgagtagataaaggaaagacaatttaccttgaacttttaattccaagctaatatctattaaactactcctaggttgatagaatttccccccattaactgcctcaatccacagaagctttggtaaattttagcacaaaggaacacttggaactgttacgtgttactgttcttcattccgaaccttctgttgatcagctgcttggaggcaagaagaaagagg

SEQ ID NO: 145914 - DNA, 111 bp, Homo Sapiens
gacagggcttagaaatctatatttttacagaaattcctcaaaggatcaccatctttaggagccactggtttcactggtttgggtgacatcttccatagaatgagcgctgga

SEQ ID NO: 145915 - DNA, 330 bp, Homo Sapiens
caaggagtaatgctgcttttcacacagaaagggcttctactgtgcctgaccttaagacaggaaaagtaggggagctaaggaagctacctacaccgccctcacccccagtagccaggctcaggaaggaagaggcacagcggtgtgaatggatggagaagaggaggccggtaggctgagcccctggctcctggaacgaacacacagccatggcagaggagaatgtggcttgaataggttccatgacttgtacaagaccacagctggtacatgatgaagcaaggacaagacacgggcatctgacctcaagagtctctccaatcatgaaatacc

SEQ ID NO: 145916 - DNA, 423 bp, Homo Sapiens
  misc_feature (218)..(226): n is a, c, g, or t
tcctttttctaagttgcagtaggttttatacctaataaggtatgctgtagacataggaaatatcacattattaaattgtaaaatgcaattttgattaacagataactggtatcgtgagtttaaaaatcagatgaaaatggttcttaaaaaaaggagaaaatgactaagtggttctgtacaaatcaatatatgggaccttagcaaggaaagtataaaannnnnnnnnagtaagcagtttttcattagttagaaggaaacggaattctgaatttcaccttatatgtttggtcctcttatctttcctggacaaaacagtcctaaccgttttaacaaatctcaattaaagtaatctaataatgtagaattcaggacaacctaccatctgtgcatctacaatatcctgaaagtcttgctcagttaatg

SEQ ID NO: 145917 - DNA, 673 bp, Homo Sapiens
  misc_feature (223)..(235): n is a, c, g, or t
ttttgcacatacaatataatgttcaactttaataattaaaaagtatgtggccagttttaggtcccacttttttcttttgtaaatgtttcaggagtatattcaacttcttttgaatagttttcataaaaagttctgattaacctgcatggagtcctttttcttgagcccaaaatggtggatcatgctcactatgcttgctggaatatgtccactgggtacaagnnnnnnnnnnnnnccccaagaatgtgatggaacacttgtatcctagtaacaatccagatgatagcactatcttgcaaagacgtgtttatatcaagctatgctatgaatagagtatatatgctctctctcattcaacaaagaatagaaccctataaaatgatctacctactgcatctggaagcacctggaagttcttatcatgagaaagttgaagaattcccattctcctgtgatggttactttcaggtgttaactgactggatagctggttaagcaccatttccgggtgtgtctgtgaaagtatgtttgtgtgcgaatccggggactgacgggggaagatcggctctcattgtgggtgggcatcatccaatcagcagggtgcctccactgcttccactttggtctgagtcaccatcatctcttgctcctctacagttgtttctctatcctg

SEQ ID NO: 145918 - DNA, 814 bp, Homo Sapiens
  misc_feature (69)..(133): n is a, c, g, or t
tttcttgtctctccccactggaatacagacttccagagcagtactttgttttcattcaatagtcgtgtnnnnnnnnnnnnnnnnnnnnnnnnnnnnnnnnnnnnnnnnnnnnnnnnnnnnnnnnnnnnnnnnnaccctggatatgctggtgtgaaatcctaaaaaatacctgctttccatccagatcagtagcactggtggattttctgtatcctgactaccccttcaacatttgcctaaagctaggacaacttcttcaaaggcaatagtgaataagagagcctggtatagtttgccgccacattaggaaagtcttcagaatttgaccctaacagcaggcaaatttcaacgtattcatctttttgttgaaataaattcatactgtgaggaaaagcaaaagataggaggtgaggcaaaggctactctttaactgtgagttttttttccctgcgatggggtttggctgcctagtctagattctcacgctagccccactttcgtctgctctgtggcatatttttaacctgagttgcaggacaggtggtttccagagtgttgcctgatgcatcccaaatgctgccttagcaatacacatctgaacaggggcccatcactaatagcaagcatttcattaatctgagcaaaactcatgggttttcacagggaccctaccagctcagaagcacgttgatataaataagtagaaaaccaaagacagctaaattttaaatcttgagtcaaaactttaaaatcaaagtcaaattgatttcattttggtgagctttcaaatcatgcttttaaaaataaattatgt

SEQ ID NO: 145919 - DNA, 620 bp, Homo Sapiens
ttttctttgcctattgttaattttattaattgattggtgttaaatatttacttaattggtcatggatgcttttttaccacagaatcacacataaaaaacagacacaaacagctaagggtgtatttctcgctgcaataatacccaccactttcacgaagacaccagggtctttctcactttttgtcccaccatccctatgatattggctttattttcatccctgctgatgtgtgacctcagggtggctgctgcagctccagctatcactcccatattcaaggagaaaagggcctcatgaatctagtgctctttcacaagagcaaagctttcctaagaagaatttcacccactgatctcacaccccactgatcaggcctgagtcacatggtcaatcccagctgagcaggacctgggaatcacaggcaccagtcttttcggtgaatatagaagacagtgctcaggtggaaggtgacagggactgtctgctgggtctgcaaacccagttttcccgcacagccaaaccagcacgatgaacaactcacttcaagaaggctgtgtcttgttcctgctgaattcaccgcatggaacgtgtcccagaccacagtgggtctggattaaca

SEQ ID NO: 145920 - DNA, 494 bp, Homo Sapiens
ttttttcccaaggagaatgaatttattagggagtgggtgcagttggtcagaccccataaataggaggggaccgggagcccgaggacggaagggggcccgtgtccttagtcacgctggacactgggacattgagagtggggaaaatgagggttccaggaggggcttagagatctaactccagtaccccaccctctgcatgaggtgctggggctggccccagagagtgtgacagactcaagggctggtttggggtctggtctggaggctcagatggcctcatccggggctggcaggcgctggcgggaaggctccacaccccagatctcccgggcatactgggcaatggtgcggtcactggagaacttgccagaggtggctatgttccggatcaccatccgcgtccactctcttgggttcttgtacaaggcgctgactttctcctggcatttaatgtagtcttcataatctgcgaagactttaaaccggtcatggtg

SEQ ID NO: 145921 - DNA, 507 bp, Homo Sapiens
aaaagaggaaactgaagcctggtgatatgaagtgaattgtttcaggccagagaaccgacaattgagacatgatatgataccaggtcttccaaagaacatgattatttccacccataaaatgctgccacagctgcaaaaatgatatctaattaggccgccttcctaaatgattgaaagtccaatacatattcctgcatgaaagttcaaattcaaactttaagttgttgttttgttaatggtctaattgctttaattcattttaaggataaaaataattttcacttcctctaacagaagaaaatgtctgtacttgcagaatgtgtccaaatttgtgtgtatctcatgtcaaccaggcttatttggagttgatgtagatttattcaggaaacagcagagtttccaattctagctgctactctttggttctggttgtaagcggctgaatgaagaacaccggggtcatggagatcagattggcttggataattcatgtgaaatttagtggtt

SEQ ID NO: 145922 - DNA, 511 bp, Homo Sapiens
agggaaatagtatccagtacaagattggatctacagataaattctgacgccgttgaaagtatcatgcaaaagcttaccatgcaagaggaagaaaaacaaatcctgaaacaagattttgaaactttaagtcaagaaacaaagattcagcatgaggaattgaataacagaattcatacaacagtaacagaactacaaaaagtgaaaatggaggaagaggcttttaatgacagagctttctacagtaaaggacaaactatcaaaagtttctgattctttgaaaaactctaaaagtgaatttgaaaaggagaatcagaaaggaaaagccgctatattagacttggaaaaaacttgcaaagaattaaagcatcaacttcaagtgcagatggaaaacacacttaaggaacagaaggaactgaaaaagtcacttgaaaaagagaaggaggcttctcatcagttgaaattggaactcaattcaatgcaggaacaacttatacaggcccagaatacttta

SEQ ID NO: 145923 - DNA, 451 bp, Homo Sapiens
gttgtatatatcaaacctcttcattactggagataaaagaaatacaataaatagaagagaaggcccctcctcgtatcttcattctagaagagagatgtttgtagtagcttcacctgttgtcaagctgccatttctttctccactgtaatttcctaaaagcgtggtaggaaagagaatagttgctgagaagggttcttgagcttaatttctacttaattattagatttaataaaggcaagttttaaagaagtatctgtggcctgacaaagacttcaagccaaattagaggcaaaggagctcaaactcattcagagaagcaattgtgttagctgaaaaagaagtcggtgctaatctttaagattttttaaagttctctctagacccaacaaagaagggaagacaattttagcatgattatagtttacacacatttattaatggcattatgttg

SEQ ID NO: 145924 - DNA, 600 bp, Homo Sapiens
ttttgtttccaaaacaagaatgctgtttatttgctgatcaaaacttgtgggaaaaattaaagtaaaaaaatattgggagaagaatggaaagcctttggataaatgattagctggttaaataaatgagcctgtgttactgaatgagtatggattgcccggttactttttttgtttcttgacactctttgctttgggtcgtttactttcaatgtttgctttagattcttcctgtccagtttttgctttagattcttcctgtccagtttttgcttcagattcttcctgtccagtttttgttttagattcttcctgtacagtttttgttttagattcttcctgttcagtttttgctttggatagtggcatcctttcctgtttgggttttaagtggtttcctatcacttgccggaaaaacacaaaaaccactgaaaggattaataaaataaggcgaaacattatgatggacacaacccacattggcgaagaaatcgcccctctgagcagtcctggaggcccactggcaatgcttccttcataccccacttcctcacagaatggaagtgcccacccatacatgcagtggcagctttttctggtgtt

SEQ ID NO: 145925 - DNA, 338 bp, Homo Sapiens
tttgcagttatattacaattttatttaaggatgcagccatcattgtattgtaagaagtaagatatgtgcagcctttactgtctgcagctttttattatgggcaagggcaaggtcttgagcttggtccaagccagcagcaacgagagatcccagtttggggcttatgacagtgtgacttttctctgcctgttcttatcaccttgttctccactgtgccatctgccatatgcttatgcagagatccggagtcacaatttgcctttcttccttaggcttgctgaataaccttatcctctagtctccaccgataacctcatttctgttatattatctgggag

SEQ ID NO: 145926 - DNA, 414 bp, Homo Sapiens
aaatggggctcattgcagcaggaatgatgaaattgcttttagatagagaggtgaagggatttaaaacattaacttgttttaaaggtatcactgtttaaagctaacagtgatttattaatatttgcactctgaaagttttaacagttttaattttatgtatacaccacagtgttttggctactatacttgcctcttttgttcagttgggaattgagtaaactaatagagtaaaaaaatgagtacaaagtgggctttgactagaactctaacaaagtgtgatcactgaattaccaagataattaacccataccccacatatactccatttcccatgacacatattatattgcattgtttttgcctatttgccttcctacttcctaaactgttgaattagtttgcttttgttgcatt

SEQ ID NO: 145927 - DNA, 813 bp, Homo Sapiens
ttcagggtgtggcccgctagggtactttccaggacccgcgcccaggggcccgggacacgcggtgagcggacatgtgccggccgcaagtgttcaggcccacgaaggcgtctgtccaccgcaggccgtggcgggagaaggggcccacggcggcccgggcgtcgcgctccacggcgcaggcgaaggcacgcgcgggggcctccagccaagtgcagccacccacaccgcgctccagcggcagtcgcgtaaagcgcaccccataggcctgcagcgcctcggcgaacacctggcacacgcctgggagcacgtgcacgtgctggtgcccgtccgcgtgcgtgggggccctgcccagcagctcccggaagcagcttagttgggcctcgagctcctcccgcaccctccgggcggagctctgggggtcctcgcgagcatcctcctgtagctgcggctccgcacctgaggcaaatccacgtctccggccgccaccgcctcccggaatcccatcttgccaaggaagaagccttccgggccgagcagcgatgaggcgccacggcgggccggacccacggggcggccctcggacaggttggcgtggaggcccgtggggatgctgtgcctgcgggccagctccgccgcgctctccgtggccgcaccgttgaccagcagggacacgctggtcacagccccggccagaaaggcctccacgataccctcatcgcgtcgcgggcagtaaccaaagtcgtccgcggtgaccaccaggcgcatgcgagggcgggacatggccgcctgggtccaccgctcgcgatcccgggaatt

SEQ ID NO: 145928 - DNA, 1315 bp, Homo Sapiens
tttttttgaaagacacacgttattttattaatatagccatctctccccactgccccagtggtgaaggtgtttgcattgcaacatggaggggcaccaaatgctctgcgggccctagcccgctgccacaggctaggcctgcctgcagccaagaaggctgctcaaactctagatgccatttggaggcatgaggacctgagcccagaggtggcagtgtccgtacccagggaagtcaacagatcgtgctccaggtcccagctctgggctgggccaggactaaatcctggctccccctttcttggtactaaggggattagtgcttggttgtctgtagggggtcagagtagggagggttccaggaagggttccagagtgggctcacaggggacctcctcgcctggcctcttggagtccaggtcgtcgagggcgcaaagctgcacgccatcctgggcaagctgggcccgcagcgtgggcgcggtgaggacgcgcagctcatgcagccgctcccaagagcaagagaaagtgtcggggccttcaccgcagccgccggtgggaggcacactggggtagccggggtgcgccatcagctctgctgttcagggtgtggcccgctaagggtaccttccaggacccgcgccagggccccggacacgcggtgagcggacatgttgccggccgcaagtgctcaggcccacgaaggcgtctgtccaccgcaggccgtggcgggagaaggggcccacggcggcccgggcgtcgcgctccacggcgcaggcgaaggcacgcgcgggggcctccagccaagtgcagccacccacaccgcgctccagcggcagtcgcgtaaagcgcaccccataggcctgcagcgcctcggcgaacacctggcacacgcctgggagcacgtgcacgtgctggtgcccgtccgcgtgcgtgggggccctgcccagcagctcccggaagcagcttagttgggcctcgagctcctcccgcacctgaggcaaatccacgtctccggccgccaccgcctcccggaatcccatcttgccaaggaagaagccttccgggccgagcagcgatgaggcgccacggcgggccggacccacggggcggccctcggacaggttggcgtggaggcccgtggggatgctgtgcctgcgggccagctccgccgcgctctccgtggccgcaccgttgaccagcagggacacgctggtcacagccccggccagaaaggcctccacgataccctcatcgcgtcgcgggcagtaaccaaagtcgtccgcggagaccaccaggcgccctcgtgccgatttaaaccagc

SEQ ID NO: 145929 - DNA, 398 bp, Homo Sapiens
tttaattatatacactctattttattccacatacgctccaggggtctttcaagagtacataaggagagctatggaactaggaagaatgcttcacttttctgtgggatgtcagcccctgagagactcgaagtgcaatgaatgcgacctccaggaacgacctgttcaccagatcctgtgacataagggtatgcagcatgacaagttgtcccccaaactaccttgggtgacagtgggaaccatcttggggagtcaggacaggtatcctcatgttcaagaccttaaattaagtgcaacatcccctttcaagtgactcacaagacctcctgtgggttgaaggttggtgaaagaaagggaatgtcttccacatagttcttcctcagtctctctcccaaggcaaa

SEQ ID NO: 145930 - DNA, 1313 bp, Homo Sapiens
ctgagtaggtgaggaggtgggtaggagcttgcttatagaaaagtggaatcgagtagtccttgctggtggagccgctgccgccaggaactcagggccggctcctgttccttcaagagtgctggaggccaaacttgaaatacaagtttaatgttcctcgtcgggcaaaagataaggatccgatctcccccggcccggtgtgcagcaggagcgaccaaccccgacccgggttaaaactcccagggactcttcgctgctgccacctcttgttctctcccccgttcccactcggggtctccctcagggccgggaggcacagcggtccctgcttgctgaggggctggatgtacgcatccgcaggttcccgcggacttgggggcgcccgctgagccccggcgcccgcagaagacttgtgtttgcctcctgcagcctcaacccggagggcagcgagggcctaccaccatgatcactggtgtgttcagcatgcgcttgtggaccccagtgggcgtcctgacctcgctggcgtactgcctgcaccagcggcgggtggccctggccgagctgcaggaggccgatggccagtgtccggtcgaccgcagcctgctgaagttgaaaatggtgcaggtcgtgtttcgacacggggctcggagtcctctcaagccgctcccgctggaggagcaggtagagtggaacccccagctattagaggtcccaccccaaactcagtttgattacacagtcaccaatctagctggtggtccgaaaccatattctccttacgactctcaataccatgagaccaccctgaaggggggcatgtttgctgggcagctgaccaaggtgggcatgcagcaaatgtttgccttgggagagagactgaggaagaactatgtggaagacattccctttctttcaccaaccttcaacccacaggaggtctttaattcgttccactaacatttttcggaatctggagtccaccccgttgtttgctggctgggcttttccagttgtcagaaagaaggacccatcatcatccacactgatgaagcagattcaggaagtcttgtatcccaactaccaaagctgctggagcctgaggcagagaaccagaggccggaggcagactgcctctttacagcaggaatctcagaaggattggaccaaggtgacggacaggatgggcatcgcacagtagtgataacgtggacttcttcatcctcctggacaacgtggtgccgagcaggcacaaaacctcccaagtggccagctggagagattgccggggtgacgaacagagagtggtgacactctgg

SEQ ID NO: 145931 - DNA, 750 bp, Homo Sapiens
ttttttgctttatgtggattaatttatttaatcttcacatcaaacagaaggatgtaattgcttatccccgctttgcagattgggaaaccgaagtacagagtaacgttaagtaatcagttcaaggtcgcatagcaagtgtcagtcccaggctttaaacccaagtctggctccagacttctcttagccttctactgcatcctgcgtctaatttgttgtgggcaggtttccctatgagttcacttcactgagcctcattctttttaacggtcacatagggttctatgctaggtgaactgtagttgcaccctttgctgtcagtgtcttcaactcccatatctacccacagttccccaactctgggtccccaaatacctcccctgtgtcccacgggctctgcagactctattttaagttggctaaaactgagcccatctcctcccacctgcacctcctccgtgttcttatatgaatgtcaatgtcggcacccactggtcacccaggatggaggaaggagccagactgcgagggaataaaggaagtaagcaggttccaaaggacgtggaaggcctttgggtccagagcctagggaaaagttgagctctctgcaccagccagactcttccgcatgggagggctgggggcttgcggacctccgggaacagctcaggcaggcgggagttgctgcggcattagccaatccataagctctatcccgcctgggtgggctctgcggcgacgcgcgccaagaag

SEQ ID NO: 145932 - DNA, 355 bp, Homo Sapiens
ctggtaaaatggtggttattctgaattctggttaaactttaaattgataattgctattatcatttcaaaattatttaaaatatgaccagatggattcctgcttccatgaattcaatggaattcaaatcttcccatttaaaataattttgtcggttgacctataccccggggatcgggggcaccccgtgggagcccggagattcgcctgggggtgggagggagaagccgtcagagagggggctgagctggggaagcagagaggggctcggggacagccgggaggagagagggtcgtgtcggagacccagtggggagagtagatgggccgggaaaggaggaagggtgagagtgggca

SEQ ID NO: 145933 - DNA, 248 bp, Homo Sapiens
ttttttttacggagattctgctatactttattccatatcatgttacaagaaaacaacagtgacagctgacaaaccattacatctttcataatacagacaaattacaactggtaacaaatatgcaacatgtattattccattctccttactatgtgtcatttgaaagtataatagttttctgaataatgctaccacatttcttaggtaccaatcccctgttagaaagtacacatctcagtgcatcatac

SEQ ID NO: 145934 - DNA, 686 bp, Homo Sapiens
tttttagacaaaagtacgatttattatgtaaatttaaaacagtggtaaaatttccaatgtacataggcagacatccttaaaaatggagattccttaataggtgtacatttcttttacaaaagggtttcaggttagccaatcaaattccagaaaggtgtattttagttaaataggtgttccgtttaacttagctactgtttcttggctaaaattactgggttcacagtggactccattaaggaatagggcagagaaagcatcctttatgcctggactcagcagggagagatctgaaaaagaagcctttccttttataaacgctttaggctagctttctttctgctattagggcaggatgatgacaaaactaaaaggtcagcagattcaatttttcttatcaattagtcacttaagctttttatttgccttttataaaaagccttttaaaatattaaagtctctttagaacttctgcatatcactaggcatccctagatgagactaatttgaaagccctcattttcaaatgcacttcttcaagtgcagagttgttcgtttggatcattctactgtaacttatctttagtaaaatttcataatttctgtaagtctttgttgcttccagggcctaatacttacccatcgataagccagaaggtactgagttcttcagaaattaaggatct

SEQ ID NO: 145935 - DNA, 1037 bp, Homo Sapiens
ttttaatttgaaaacattttatttaaagcaaatactatcaaagaaccctatttaaatgaaatatttgggaaaagaatcttattctgaatacatttcaagaaaataagccgctgttcaataactagtgactaacagcatcatttaataactctttgaggactaaatgaagattcattttgaaatcaaatcaggtggtgtagtctgtctcctctacacacatcacattaactcagtaattgccaagtttcactttcacaatcgtatacatattggtgagcataaaaggaggtgctaaaaagctataatagaagtaacattaaaggtgttaaattgtagaattttaagagaacaggaatatgatgtaagaatttacaaaggaagaaactttgaaaatctaaaaacataagtgataataaaaaatattatatcagctgtaataagtgaaatgtcatctagttacagggaactctgaagaatcccctccaagggttgtatgattccctgatcctccagtagaatgaattaaccttcttacgggaatcagttggctaggcctggcgtaggtatctctttcagtgatgagctgtgtatatgcaataagagggaacaacatttcacagaacctgtgacaagattgctgtcgaaagtcctcttttttgtctgttgaagaactggaagaattggcctttgatactcggataaatcacgacatccaggctctgtctccctagaaggggcagttcgtaggcactgcgattccatgcttgagaatttataaatagattttcattttcaatcggatctaatttattctactataattgtgcattctctcattttgtgtccaggcatttatctttgtccagataaccacagggatatatgtgttggttaatccatgaagaaaaaaagactttgaacagatgtcaagtgactgtgaaaaaatttgagaactgtagcatctagaaatggaagttccttcaaaccctcgtgccgcctcgtgccaattctggcctcgagggccaaattccctatag

SEQ ID NO: 145936 - DNA, 605 bp, Homo Sapiens
ttttaaattttcttgtgaacatgttttcttttttactttctgcagaaatcacccatgtctaaaattattttcagtgaaagctgaactggtcactcttccaaagtccttgttcattcatttattcagtcagtcattcgcttagtctgtatgtcttctgagtgcctactgtttgtaggcactgtgctagacaccaggatggggcaatgaaactcctggaagctcccagtccagtagaggatacacaaacaaagcattacatactgaccagtgggtaagtgccagaatagagggattcctgctcagcctcggggagtcaggggggatttcccatgggaggtgatcactgaagaatgacttactattgaagtccctagcaagttcacattgtgaaagcaataatgtctgctgcactcttaagctttcatagctggtgaactcagtttcaggcttgaaggatggagaacctgagcgtggccttgggtttgtttcactgattgagtatcagaggtgcttctgtaaggctttagtaaaatagaaaatccaacctattttacacattctttcaaaaagttatgttgcattaaaaacagagaatggaaagatct

SEQ ID NO: 145937 - DNA, 439 bp, Homo Sapiens
taaactttttttcacttttatgtaattaagaaataaatatttatcagatctcagaactataataataaaagagatatgccatattgatttgctgatggaggctaaatgtaactactttattttcgtataaattagagggtgttcaaatcacagttttgatagtcaggttaaacatcacctcttaagattttttaagtgacttctcattttctagtattttatatgaatatttatgtttctcttcaataaaaaagggataaagttaatacagtttcactgactgctttaaaattaaccagaacttcaaaattgtccaaccacttggtctgggaaaggctgctcattgtttttcaatggctaattaccaatgaactcacctaatgctatgctgttgcattcaatgggaattacttgagaagaagttgaattgttgaacttt

SEQ ID NO: 145938 - DNA, 509 bp, Homo Sapiens
  misc_feature (45)..(77): n is a, c, g, or t
tttttggtttggtttggtggtgggggaaaaaaaggacgttgtccnnnnnnnnnnnnnnnnnnnnnnnnnnnnnnnnngtgggtacacagtaggtgtatataaggcatgtgtgatactgtgatacaggcatgcagtgtgtgtaaatcacattggggaaatggggtccccgtcacttcaaacacttacactttctttgtgttacaaataattcagtgatacttttcgttatgtttaaatgtgtgataaattattgttgaccatagtcaccctgttgtgctatcaaatactaaatcttactcattctgtttttgtactcattaaccatccccatctcttcccccggccccattcctcttccgagcctctgggagccatccttctgctctatctccatgagttgaattatttttatttttagttcccacaaatgagaatgtgcggaatttgcccttctgtgcctgacttatttcacttaacatagcgacctccacttccctccatgttgatac

SEQ ID NO: 145939 - DNA, 2676 bp, Homo Sapiens
  misc_feature (283)..(300): n is a, c, g, or t
  misc_feature (1217)..(1217): n is a, c, g, or t
gaatctccccaccccccctttttagggagggctagaagctgtcaccaaggattcccctggaagccccagggaggttcccagaaccaaggcttggccaaacagaaatgaggacccctgttctccccataaaaaatatgtaggttggccgtggggggattgtctcagggggattgagaccaagagggtccccttgacccaggaggtccaggctgccagtgacccttgatcccatgaccaggccactgcattccagcttggggcaacacagcaagaccctgtctcnnnnnnnnnnnnnnnnnngtggtggagggaggcaggagaggggaggcctcaatgaggtgacgggaaaaagattcaactacccacagctggctctgaagatggaggagcctgaagtcaagaattacggtcagcctctaaaaatgaaaaggccagaaatgaattctcccctagagcctccagaaggagtgcaggactgccgacacccagatttgagccccgggtcagccttctgacccgcagaactggaagacctcgttttgatccacgaagtttgtggaaacctgtcacggcaataggaaacaaatacagaggccaaagggtcaacagtgagaggtcaagcttgccctgcccctgcccagacctcagccagacttctgggtggcagggcccacggtggcacccccagggcctgtccctgccttggggaagggggagcctgagaggacccaggaggtcttgggcccttcggtagtagacaccaagccctcgggggaccaccctctagttgaggccttgggggatgaagagggagggctcagggccccattgcagggccagcctgtaggggccgtggggccacctggatgtgacgtctaatgctggcggtgctcacagctcgccacaggaccctaaaagcccctgccagacgagagctcatcttttccttctttctcttccagttctgtcttccattccaccattgctgaatcccgctcacggcggccctgggctgcagagggcagatgggtgaggctcggcccctgtctccagagagctgaagagggccctcggccccacccacgaggaggacagtcatgaggccgactgtggaggggctctggacagaggtgtccggggatccctgagcctggctgcactctccctcctggttctttccttgcgtgcacacgatcagctatcgtttacaaagagtnccttggtgttgcctggttggctgccccggatgggagctcctgcccccatcggacaatgtaaacaaaccaaggtctgtccagttccagctgacagggcctgcacctccgccagggctaggcagaagtagcatcagagcacaggagacccgggaggaaccgagaaccagcgctgctcttaacagctcccagcggggtgtgcccaaggcttgctgggcactcacaggcaggtcaggccacaggaaaagctaaccaacctttataagggaaaataggggccgggagggctcctgcgcccccatgctgacgtccaagatgctccggatgcgcttgacctcactgttggataggttccccttgatggccaggatagcgctcaggtggcctttgctgaagtcagggtagcaggtggcataagtggccacctcaatcttgatggcactggggtcctgcaggcgaatgatctcggccagcgtagggagagcaggctgcagcctggtcgccggggaggcgtgctgggtgcagaagtgctggatggtgtcagcattggccaggatgtacccagccagctgctgctgctgctcggccgtcttgaggaccaggcgccccttgctgagttggatgatgtactccttcaccaggtgcaggtgcaaggcctccatgagctcctcccggaaacagccctgcagctctgagaactcaggcagcctcgtgtctacagtggcgatgatgttttccagggtctccacaggggccgcccagcgggtgtgcgtgaacctcttgaacagtggcttcaggtcctcatgcaggttctggagcagggtgtcaaagccgtggctcttgagctcacccagggggcccagcaggaggctcagggtgtcctggggtacctgccaattctgctccatggacatccggaaggacaggcagttgttgatgttggcaataacattggccctgtaattcgtcagctgcttgcctctctccagaaattcattaaaggcgcgctggtagctcctcaggaacgcaggcagctccaccagcagcacccgctttatctgtgagcccaagtccagcgtgatgctctcggccttggcctgggcctgggaggtgatctggatgatgtcgatggccagctcgctgtggcagtggccgtccagcctctggggaggcacatcctcagcccagcgccgtgcctctagctccagagctcggtccatcaactccctcacattggccgcctcactggacaggaatgtggcctccagcagtcggatctgcctggggggcaggaggctcccgagccccataccctgcagctcacccaccagcttggggctgttgatgatgtcattggggtagaggttctgcacccagagcagcagcatgtaggtgtcgcgctcgcacagctcgaactgcgccacggcggccaggtgggccgcgaagtgctggtggtagctct

SEQ ID NO: 145940 - DNA, 595 bp, Homo Sapiens
taaattttcagtgcatttgatactctgatcatgttcacttttctccagttgtcccaaaaatcccctttatagatggtgtgtccaaatcagtttgcaatgcagagacacactttacatgtggttgttatgtcctgccagtcagtcccacccagcccctttgtttacgttgaccagtagaagagcctgggccaggagtcccgtggaatgattcactgtctggctctgtctggttgcattctcatgtggtgtcacttagctcattcctctgtcctctgtattttctgtaaactgaagttatatccaaggcgtgatgggtttcttggtgcctagaatagctagcaggtgtcggtgtgtccttcctgcggcatcccaccaccattagtggggccaaggcctattctgggatgagggggaagacagtgtgacctctccctcatatggttgcttatctcctcttgtgagtggaaaagtattatgtgagggttcccttggcactgtctaaatgccagttctgggagatctttttaaactacacaagaaaacttgtccatttgctgagaggaacttgatcttggggatagggcacttgggtaaa

SEQ ID NO: 145941 - DNA, 596 bp, Homo Sapiens
gttcaaatcattttattatcctgttttctactttcacatctctcaaggaaatttacctagtaccccgttcatctaactgatctcttctgatccccaatccttcccttcccattctaccacccacctccttcactgccttctatacctcaagtctgcccccagctccagcaccagactgcacctaaatcacaccaggtcacaactattctgtaagacacaagaggatttgcgtaacctgtgttgagccaagtgtcacccattcttccataatatttatggaatatttacttccttttttacctttcctaacgcttaatactttgcaaactattggttttgttctgaagcttacttttaagatattcttattttacatacgaaagtgcttccttatgtttgcctggttccaaattagagggtaccagagcccgatctcctctaagcaggaggcttcccataggaaaggaatgttcctttgtgctcatccttcgtataaatcaccagggagcttttaaatgaacaaagacctggctgacccagagggtagaacttataaatagtactccagcctggacaacagattgggactccgtctc

SEQ ID NO: 145942 - DNA, 519 bp, Homo Sapiens
  misc_feature (196)..(196): n is a, c, g, or t
tttaccattttggtttttatttcttcaaaacatgaaaacaaaaaatgaagtagatgacaatgagaaaggagaaaacatttcatacagaatatgctgtatcactagtgattaaatcagaaacaattagaaactttatttgtctgtgtcagtaatatgtaccatttataaggaagagcacaattagtgcatttcccgnccccccccaagctgtgcacaatacacacaaaataaaataattttacacaactataataataacaatcctgaacaaccagaatcatagtttcctagaacatgaaaatttaaaaagcaaacaaaccaaaaagctttcaaattgaaatcgaccaatgcaagaatttcttaaagttctctgtgaaaatttgctacaggattattgacattcctaatacagctaaaaaatgagtgcaaaaatttttctaatgtttaaacaacttatattccttgaatatatttacttggtgcttctaggctagctttccatttagcaattctcaaaaa

SEQ ID NO: 145943 - DNA, 642 bp, Homo Sapiens
tctgtcttcatctgtaacagaataattcttttttctccaaacctctcaagacccttgtcagaaatctgttacgtgtgacttaatttagtttacaaaactaattttctttttccctaatttaatacttaaacattaatcaaaatactgtgttgatattattaaactatttggaacattcttttagaagcaattattgtcttaaaggcttgcatgcattccttaccttcttttctttctgttgtagtgctgcattggcagtaagctctaaggaggaggttcagcctttgacaatattttgaagtagttaagtttgattttaactctcattttgacagtcatgttatcaaaagcctcttttctctgacctaaacttttaacttgtctgcttctgtttccctttctctctcttatctgctcagtatctcattttaggagttctgtgccttctaaaatgtccagggatttagctaattcattttaatgtgttaatgagaagatgctttcactttatccatagtcagaattgaccatttctgagtcttctcttgatgacgatgatgatagataacactattctaagtgccaggcccattctagacacttcacagacattcacttaatccccacttcagattggtaaca

SEQ ID NO: 145944 - DNA, 1064 bp, Homo Sapiens
  misc_feature (656)..(828): n is a, c, g, or t
ggcaaccttttaagtagcaatgcaaacaaacgaaaaaaacctactctgcatttgtgaactgaacctatgctgcatttcttttctaaatgagacggttgggtaattacattgaggactacttctagcatgcatggtctagtcaatcggtattaattagccagcttccctgtccccaaaatagtcttttaatgtgccaaacagccccagaagaggcttgaagaaactgttatattggggaaaaggagtacccactcaaattgtatcttctatctactaattcagatataaaaaattcatttacccgcatattcttaatgtatttctgctatactataattataaacatgattattttataatatatttagctatgtataggaactgttcacagattttggcataaaatagatttgtaaatgaatgctagtgtctttccctattttagaaggtagtcagtacttggaattattcagtaggggtttcagttatcattcctagtacttcttacaagttcttattgtgatgattcaagcaatgctactaaaaaaattttaagtttaggtcaattattttagagaaatacacacaatgcatttttattttagattttgtgacaaatgaaaacaaacatttaaataacactctccgtcaagttnnnnnnnnnnnnnnnnnnnnnnnnnnnnnnnnnnnnnnnnnnnnnnnnnnnnnnnnnnnnnnnnnnnnnnnnnnnnnnnnnnnnnnnnnnnnnnnnnnnnnnnnnnnnnnnnnnnnnnnnnnnnnnnnnnnnnnnnnnnnnnnnnnnnnnnnnnnnnnnnnnnnnnnnnnnnnaacaacctctgcctccacggttagaatatttgaccttactggctgattaaaaaattttgacatggctgcacaatgatattaatatttttacattatatctaaagtttaaagtgtgttcagtaattttccatttcaaggatatttttatataatatcctttaagacttacagaagtataaaaattaaagtgttcaaattatattattaactcgttagggtatgaggctttggatcag

SEQ ID NO: 145945 - DNA, 481 bp, Homo Sapiens
ttttaaatcagaggaagccttagctatggctctcctcccagaacctcctctccaagaaaacccaagttatacaccaaatgaaagaccctggtttgcccaggaggctgaaaaatatattcaaggagggtggtggaaattcttcgatgggagattagccatttcaaagatttaagctcatatgtttgtaaagcaaattcatcaaggaactcatggaaaaaatggcactagaaacgttactaaaatgccatttctatgtgccacggctctctgccatcacttgagccatttgtaaacagtgcttaacctgtgctcaaaacaacccgcaacaggggcccacttggccccagcgaattggggaagtagaagccatgccttgtaaaggcgtggttacagacttaacagaactgtccatgctgtggactaccagtccgtgctagtgcttgtttgcaccttttcaggatgtgttaaggctttccccacc

SEQ ID NO: 145946 - DNA, 467 bp, Homo Sapiens
  misc_feature (173)..(274): n is a, c, g, or t
ttttagattcagctgtaggaatttattcctgtttaaggataaaaagattgccaggatggttggagagaataaataaatatcttaaagtggttctaaaaggtgggagattctagaagaaccaatcccagagaagagacacaccaccacagggaatgtggtgatacctaccctgnnnnnnnnnnnnnnnnnnnnnnnnnnnnnnnnnnnnnnnnnnnnnnnnnnnnnnnnnnnnnnnnnnnnnnnnnnnnnnnnnnnnnnnnnnnnnnnnnnnnnntattctgaacatcattgatcatctaaatcaaaaatcaacgatcaagctgctatcatttgcctatacttctcttgtgaataacagttgaattagtgacagacttagaaagaaatccttcctaataggcagttactaagaatggagtatagttggcaaagttgtgttggtcacttctccatgtcacatcacaggg

SEQ ID NO: 145947 - DNA, 420 bp, Homo Sapiens
gtttagcagacatttattaagcttccaccattgaccagccatcatgccaagcatgggtataccaaaatgaatgaatagggccctggttctctggtgggttactccaagccacttgccttagggcttcataatggaagggagcaaaaattcaagttgtaggattcccaaagcagatcttggatccatggatgatagttgcagggaaggagacttctactgtttagaagcaaggtctttccaatcaacagccctatcaaacaacagaagtgcttctgtataatcttcatcaaggaggtttgacgagaggttcaaggacttgttattacagatgttattctggctctaaatccacctgcatcctccagcatgtccagattaatgtttccaggaacccttaactcgactttccacaaacatctc

SEQ ID NO: 145948 - DNA, 865 bp, Homo Sapiens
ttttcctgggtcaaaggcatttagaaagtatgttctcaggccctccattctgttcccatcaggaaccaaggctgagaaggaagatgaggcaggaggggtccgagtgtagcagagcactgttcccctgcccagcctggatggcgttagtcagagaacaggctggcaagagacttccgtcaggttgcggatggtttcagccttggcctcgtcttcacttggggtcccacgctgggaggtgtcggatgtgctgaggctgttagtcagggactgagattctgttgagatagcggatgggcgtggtgctgggcattcttggactcttcaccctgctgggaggtactacggccctgcacagggggcgggggctgtgaggcgagggtggcacctggcttggaggccctggtttggggagcttgccactggatgcccgggatagctgcggagagcctggtgacctttgctgctgtggagactccggactgggggctcaggggctgctggaccttgtggggagagcctctgttgggaggggcttccagatctctggggctgaggagactgagcttggcgagggcctccttgcggaggtgggcgtggctggggctggcctagctgaggccccagctgggcttgacctaggggatttcgctgatttaatctgtggagcccaaggtctgaggggggagggcgctgtgcctcctggcatcgggagctggctcattttggagacaacaaggtcggccatcagctgtctgtcctcttccacatgctctccaatcagcggcattgagctgtccattacctgtggggaggaagggagagctgagggacccccatgccaggagagatggcggttgggcatcac

SEQ ID NO: 145949 - DNA, 511 bp, Homo Sapiens
tttaagcaacttggtgttctctttttgcttttgtacactcccagacactttaggatgagagaactggtcaaggtatttaagtcaatggacttgccattgagtcaaaacaagtcacacttagaagggcttaagggatggcaccaacaaagaagagtgcattctgatcactcattcattcacttatttactagacgtttgcttggagcttcctgtctgcggaggactgagctagtcactggggacacagcatgaggatggcacagtcctgctctcagggaggccactcactgtcacgtggaaatagatctttgcagatgtcatgcgttaaggatcaacgtgagatcatactttgttagagtgaattctaaattcactgagggtggcctaataaagagacaggacatacagggaccacacagctgagaagcccatgtgaagatggaagggagactgggaagatgtctgcaagtcaaggaatgctaaggaacaccaaggaatactccaataccgg

SEQ ID NO: 145950 - DNA, 808 bp, Homo Sapiens
aggaaccttgtgggtcttactccttttcctcggagcttaagctgactgcctggcaaacagcagatgcttttggtgtctggtgagtgaatggggggtggggagctggtcctgtgaccctggtgaggcgggacaaacttgtcttcctcacacccatcttacttcctcttatgaggaaacccagagagatgaggggtcttgcccaaggaaggggtgtccatagtcagctctgccttctgctcacccagaataaagacctggggaccccgcgagggtcatggccaagtggaatggactcctggcatttgagggcttcccgactgcagccctcaggcagccatggctgtcccaagtccagcgggcctttgctcgggtcatggctgggatgtctggcccttcctgacaggaggctgctgggctcctgtctacttggggacgcctcatgcaggagctggtgtgggggtgggcaggggggcggtggcttcttcctttctctttccctttcctctaccttttcccctctccccagaggaaatggtagcaggatttcttttaagaggatgctgctgtattttgccagcgggtggaaggtggcggtattagctcccgtgagctgcacgtggacccctgtgtgaagcgtagcagggcacagagcaggcgagacgtttgcatctcacagcgggagggccggcgacatcacatgaagtgacaggcaggcccttggaagccggtgcttagatccttaattagttcacacgtcgactgaattttcaagtgaatgaattttaattacatctcaggttaaagtaaa

SEQ ID NO: 145951 - DNA, 420 bp, Homo Sapiens
gaaaattgtgaaagcaggcaaaattttagatggcttcatttcttggatcagcagggtaaccagactcagtcctgaggtgcccacagcggttctcaacttcccggctgcagtgcacaccatgtgcattatcattccctcctggccagatggctgtgctgagctgtatctgagcacaccttgcagggactggtgctgttctgcttggtcatctgtgcctctatgtacggtggtggcagcttctcctaatctgtttgcttctcatcatccttccgtgccactgttgaatctcatggtagcttgtcatttcttgccaccctggtcaaatctgtgaccagcagctttgcttggttttatttacctgttgtctgagctgcaacccatgctgttgtctccttgctgcccttcccttggagctctggc

SEQ ID NO: 145952 - DNA, 846 bp, Homo Sapiens
  misc_feature (576)..(801): n is a, c, g, or t
tttttaagtatattcatttaataaataacacaaaataagcataatcataatgtcaacaacaacagtaataatagcaaccaactgggcaccacttgctgtgctaatcactcaacatctagaatcgtatgtaatcattccaattatattcgaagtgttggtttcagatacaatgatggggctgacctgggtgtcccttccctttgtcatatgctgactcatgaaatgcattaggacagaagcagcattgcagcagttttccattcatgccatggaaaggtatgaatgataaaggcatccctcaaagtggagtccctgaggtatcagtaagtgagtgcccttccagtgaaacatgtttctaatttggggttgcctttccccggggatcttacacacaaggtgttgtgagttattaaaggtcctcagatttcatgtgttgcctcctgacatcagataaagtggcaaatgacacttcttgaatcagcattgtcccatcataacagatggccgttagctcaatctacagggaatcagcttattgtcttccatatgaaaataagcaggtcagcattctaaatnnnnnnnnnnnnnnnnnnnnnnnnnnnnnnnnnnnnnnnnnnnnnnnnnnnnnnnnnnnnnnnnnnnnnnnnnnnnnnnnnnnnnnnnnnnnnnnnnnnnnnnnnnnnnnnnnnnnnnnnnnnnnnnnnnnnnnnnnnnnnnnnnnnnnnnnnnnnnnnnnnnnnnnnnnnnnnnnnnnnnnnnnnnnnnnnnnnnnnnnnnnnnnnnnnnnnnnnnnnnnnnnnncaaagagcctcatgagaatcttctgtcaatttaatttctcttcta

SEQ ID NO: 145953 - DNA, 405 bp, Homo Sapiens
tttttggagattattatggcccaagtgttcacattttcatacaggagataataaatgaccaagtctgagcttattcatggcagtatcacgtaaggagagcaaaacccctcccacctgttagcgacagggatgtgcaaagagtgagtctagtgctccatcatcaataggctccgctgtccgcactgcgtctccttatgcctgcttgtcttttcactatgagctggctttctcactctctaccaatgcatagaagaggagagcaaaattcaggttcagggaagagaaaaagagcgtagtgtttgaaaaagaacccaaaatccaggagagacgtagaactaaactccctcagggaggttgcagtagttactatgatcacaacagatgagctctaccctcttcgtgaac

SEQ ID NO: 145954 - DNA, 832 bp, Homo Sapiens
  misc_feature (644)..(655): n is a, c, g, or t
tttaaatgtctttttgttctgctttaatgcatttaaaggctttaatcatctcctatcagtctttgactaaaacccccaaatccttaagatgacctgccagtctctgtcttcttatcacagcctacatctctagtctcattgtgccacactccccacttgctccctgaaattcagccatagtgacccttctaacatggtatgttccccccttgacccaggcagggccctttatgggagcctctatgaaatgcttagtccctggcagatctcagcacagcatccctaggtcatggaaaactctccaaacctccaatctatgtcaagaacatatcttacaactttctggagaattggggcccttttctctaggtcatagcctaagttaataattgggcctagaggtggtacgtttgattaacatttgccccccctcttcaactgtgagtgccgcgagagcgtggagaatgcccgactgtgaacactgttgcagctcagtgcccggcacagggtccaataacctcgtagacatttgatgaatatttgggactgactgttccttgaaaattcaaaaggacttgcacataaaaatctttggtctggtgcctttttatggaatgtttctttcagtacttgtttttcaaagnnnnnnnnnnnnaacttctgattttatggttcttcttgaaccaattttggtaattcatattttctcaaaacatgtctgattcaagacttacacattcatcaggaaagaattgtacaaactatcttattataatgggggaaatcacatttgtggtttaatctcttcttgttttttatatggtatatttat

SEQ ID NO: 145955 - DNA, 423 bp, Homo Sapiens
aggactgccaaacttctcagacttggctatttccatttccatctgctgtttcctacgactctgttccatttgttttcggtaactctgcgtgtgatcgatgtcaatgccaattttttcttcagtatttactgaatgtgatttctcttggcctgatttacgttcaggtgtttcatcacgaagactgcaatagtttttcctaacgtcttctctctctggtccttgatcatctaatacctgcagctgtttgagctgtggttttgagggaatgggcttttttgattggacttcttgattttccacagattcaccctgctggttctcccagtcttgcttgtaggtctgagctgggccttgagccagacccaacagaaatactggcaagctcctgacagtctttggggctggcaacagtattaagtctgt

SEQ ID NO: 145956 - DNA, 543 bp, Homo Sapiens
  misc_feature (399)..(399): n is a, c, g, or t
ttttttaaagcagcagaaaaagacaaataaaactgaatgcatctccactgaagtggatctctattagaatgtctgcccaggaaaccttttctaagaaacactccatccaatgcatggttgtagccagagcagtcatgaagatagaaaggcatgaagaaaaactgagccctggccatagctgtgtgcaccagattgggcacctgacttgagctttaccaatcaaagccttttcccaggagtatgcaattgagagagagattggcctttgtctgagtgactgaactataagtgaggaataacattggcaactatggttagtaagatttcaccagtagaagggaagtgctcatcttcagagaaagagaaaagtgaaaagacacaaggagaggagcacagggnaaagaagaggggaagatccgggatagtacctgtatcctcaatcttgttcatgtctgatgtccaactgtaatcctgtcctcagttccttgtacaacctccccgccaataaacttataataaattctcctctttgcctaacctaaa

SEQ ID NO: 145957 - DNA, 504 bp, Homo Sapiens
ttttaaatttcaactggttttttattagcattagcaaagaggtaagaaatgaacttacacaaatgctgtaatcagaacattgtgcttcttgtaaatttgaggcaatgtatgtgtcattctgctctttgtggaattaattgttttccaagtggcttgttcctcaggtaacctgatgttgacggcaataatgcaattttcatatcgaaatgttgttctagagggagtgtgtctatttcacttaggcttgctgaaacccaatctgcaggaaaggacgttatagcagaattggaggttaaatttcatttgctgatttaataaaaactaacaggatggatttggggatatttcattaatctttctttcctttcagtgcaaaggaaattaagttcactctagttcaaactttgtttcactcttatacaataggctgccaatgtccactttctctctggcaagttcaaacctaattagttacagaaaattcctccttgaccctgtcaccgt

SEQ ID NO: 145958 - DNA, 672 bp, Homo Sapiens
tttaaatttgctacaggtatttttattattttgatttaaactataagagtagtgtcagatacatgatatggccatgtcagtaagaaaaaaatattaacttctgtgcaagttatcatataggatatcccaatctcctaaggaaattcatgacgtgggtcgttttctacttgactattttttcagcagttgaggaaaaatggagcaagaaagataaattaggtgtattgaatggagaattatgcatgaagttttagtagagaagaattcaaacaggaaaatatgctatgggagtacatttacatggctatatgcctgtcaggtcatttggtatgcaaaggcttgtgtttgcattaagctggtggagaagctgttattttctttgcagtatgtattcaaaatgcaccatatgtatcatgcagagagcatcagtgcagagagcaagctgaaagaggccgaaaaacaagaggaaaagcaaattgggagatctggtgatccagtcttccatattcgactagaggagagacatcaacggcgaagctcaccatatttctgggaccatttgttttctttctggatccagtgcgagtcatcctcccagctgtggcctcaccctcggctgagtgggctttcctcctgaacatcctctggctccagaaagccaggagcttccca

SEQ ID NO: 145959 - DNA, 675 bp, Homo Sapiens
tttaacagaaatatttcactgctttattctccagtgtacatcccatggagaaacactagcagtccagtcctcagggccccttgaatttacttcatattcagttcctagctgagcaggaccttcacgtcactccttcattgtcttggaatttcattttgggacagatactttgagcagccataacatcagataaaggtgaggatacaagctggtgaggggtggatgcggtcccacacattcaccagacaacattccagtccccctgggactcaattcttgcacacagcctctttcaggaataaagtcagaagagcagttctcagagaccccatcacagtctagacatctcctcctccagtgggaacagatcacgggtacagcatgaatgccacaattccctgaggcttggctgagaaggagacctctgtggaggtgcatcagccaaggaatcttgcctgtcttctttgtgggatacacaggatagtctcatgatcccctacaacatctaggcaggcctgaggaatcctgcagatcttttggatccttagggattttgcaatttattcctgggcctctgtttgatgtttcttttggctggctcacatctactctctcgtaggatcatgggactatctcttggatcccacagagaagacaggcaagagtccacagccg

SEQ ID NO: 145960 - DNA, 484 bp, Homo Sapiens
ttttgttttgtttcgttttttaatttggaggctgtgctgagggaggagaaacaagatacaggcaggaaacatcctcaatagaaccttcaaagtcagagtagattaaaagcagagaacagagcgctgttttggggtcagtgcagccataaatgcaggaaacacagcaagttctacagccagagccgtcctctcctggacgccagatcccgacggcgtggtcatcagcaatcagagtgggaggagaggagttctgtttttggaggccattgtggctgaccttagattttaggtaaagatatgcagctcttatagaactgcttgagaatggtcccaaatggagcagcgtcttcccagggcttcatatggtgggtccctttgaccctcaggaagttatcccactctcttaggctttaaaggacagagaaactgggctactaacgccctcctcatggagttgctatgaggacgaattgtgatcatcgtg

SEQ ID NO: 145961 - DNA, 572 bp, Homo Sapiens
  misc_feature (23)..(23): n is a, c, g, or t
  misc_feature (138)..(138): n is a, c, g, or t
  misc_feature (167)..(176): n is a, c, g, or t
  misc_feature (300)..(308): n is a, c, g, or t
aattactgttcgttcaagaagcnagacaactcctgttcctctcttgtcgaaatactaaatcgcaaatgcatcatcgttaaccacagctgtggctcgtctgacggatccggtcggacctcgggtttattctcagtaacncagctgcactacctgtctgtaatatgagnnnnnnnnnntgaatctatttaatcatttctacttgcagtactgctatgtgctaagcttaactggaagccttggaatgggcataagttgtatgtcctacatttcatcattgtcccgggcctgcattgcactggnnnnnnnnntcgccacctgttcttacaccagtatttggttcaagacaccaaatgtcttcacccatggctgaagaacaacagaagagagtcaggataaaaaatacatactgtggtcggcaaggtgagggagatagggatatccaggggaagagggtgttgctgtggcccactctctgtctaatctctttacagcaaattggtaagattttcagttttacttctttctactgtttctgctgtctaccttccttatatttttttcctcaacagttt

SEQ ID NO: 145962 - DNA, 509 bp, Homo Sapiens
ttagtggaaccggcgactcattttaatggaattacttatggagaccaggttgtgagtcacttgcctgaaaataaattcggggaagattctggcaccaaaagtcagtgcctgcgggggatatttcaaatcgtaatagttgtggctttgtcaatcgtggtggctctcctctcgttgccactaatgtctcatccatatataggcttgttcctatgcacacgcacacattcgcctgcccacaccaccggtctggcagcggggttcgttccgtcttgtgttaagcagatgctcctgtatttgaatgggttgattttcctcctctaagactttcttcctttatgaaacccgagttattgttgacttatgagtcttcttttgtagacagggttttgtattgttttgtttcaatgacatactattgggttctgcagagagtggtagtgacagaatccatgtctcctcactccacatccagtgctctttccttcctcttagttgtggtgatgcacgca

SEQ ID NO: 145963 - DNA, 516 bp, Homo Sapiens
ttttttcacatctaggagatttcattttattttatttcgacaaccagagttacagcctctttacaactgagaagtggtaataaatggtattgtgcttattcttcaacaactccatagcactggcacctgacatatatttgcatgaatttcatgtaacaaaatgtagaaatctttctttctaaagggcttcaaaatttcccgaaacagacttctgaacttcattttattcctcttgctacatggttgttctggattagtatatatatcaacacctccagtagaattatgttgctaaggttgggatcacggctttggtctcgcgaagggacctgctttgcagatccagggctcgtttaattttccagctgggttcctgctttgcttaactaatcctgtgcaccccgttgtgcggtccacacctgcaccggttggctccgagccgcgggggtccgcttgctaggcctgcggaaaacgtcctagcgacactcggcccgcgggccccgaggtgcgcccccc

SEQ ID NO: 145964 - DNA, 464 bp, Homo Sapiens
aaattaataaattgtttaattttgtctttcctgtaccttacttgtgtgatgcatatccttctaaatgtgccattacaaatgcatagttttttcatcaactgctgatttcattagtgtttagaaaacatccagttaccatgctaaaagaaagtgaaggggcagcctagatgcttgctaagccagagttcaaggtgccctgcccacgcatcttaacgttactgcccttaacttacacagcttggcctggctgcgcgactttaagctgccaagaaagtaatccggggctcttaagggttttcgtgcgggggtctccatttccaagtttgattttgaatgtggtcttgacaaaagtgggttcaccctgtgttcctatttgcctggctttggctcagttgcaagaggggctactagcagtttccctgaagtcccccgagggtaatcttgagcggaccatggtcagagag

SEQ ID NO: 145965 - DNA, 838 bp, Homo Sapiens
  misc_feature (602)..(602): n is a, c, g, or t
cagtcgacggtaccggacatatgcccgggaattcggccattacggccgggacagactgaagggaagcatgtccttacttaaaatagttctgctactttccctcctattataaggaaattttacagattctaaaaataccttaatttttctttgatttttattttaccaagtcacaaatgtctttttgatgttttgagaattgttctcatagaatcacaaatactgacatttcattagatgattattttcctagaatccccaaagagcagtggcagtccatggcttggttgaagctagaaattttcctgcccctggtgacctggtaagcctcctgctcggaaccgtgtgagtgggtgaggaagatgagagatggtcagatggaagagagaaatacatgaactgctctggcctctctggttctgttcttggcccagagtttttgaaaagcagcggagcatgactgacttcacatgctcagctttctcagccttttgtttattttgttgtccttagatttccctgttgtaaaaggggcaagaaaagtaactcatcatctctaacacaccatggcagcttagccaggtagtcttagtggtggtgtntaggcataagatatgctgatcatcagtctcaggccacagtttccttcactaatcgtccagcttgagtgttctgttctcttcctgcccatttccttgaacctcctgctctagccttggcggaggcagagtgcctatttggctttggttctccctctgtcttaggaaaagcatctttaatatagttcttcaccactgtgggggttggtcgcgatctttttccttccgaagaactcctg

SEQ ID NO: 145966 - DNA, 976 bp, Homo Sapiens
tttagattttgatgtctctaaggagtcagtttttattttttaagaggagacctgttacacccaagcatggattcaaaagagatacaactaaaagaagcttgcaatggaacggatcattaaggaccttctcagaaatagatgaaatggatgtggggcttagcagtttttgttgtggatgattcggcacttcaggagcttgagataattgtcgattttatgtgaatccctgcgtaggcagtggagcaggttataataagcagaaaggcgagactcttcatcagccatctgcagggatggaagtcccgaccagacagggtagatctcattttctttggtttcaggatgaacctggctgactatcagctccatgccctctagaagccgtttggtttgctcctcaatctctacagctttggataggatagcctccggggcttcttgcataccacgtacttccgtgaccagatgatacagaggctcattccaggatcgcaatatgctgactatcaggctcagagagtctttttgattcatctgttgggcttgctccttgtcttcgggggtggcaagggaagaagtgtggcagctgttgatggccttggtaatgaacccccggccatgggtataccgtttatcgaattcgctgaacatttctgaggagaggttatggatgtagtgggacaggacgacggcgcggtcaaacaggtctcgaagggtcacctggcatcgggcagccccgccgggacagatgggcaagggggccacgctctggcacaggagcaggtttgacaccagcagcagcaggagggaccctttccatggcgatcctttgatgttcatgttcgtgatcgttgcaggaaacacacttcaccagagaagatctggaagtctcacggttttctctttcccagatattggctttataaacctttgatatcaaagcctgtatgttccgattcttcttggtgtctctccc

SEQ ID NO: 145967 - DNA, 487 bp, Homo Sapiens
aagaaactaaaacaagcaatggagacctgtctgacagcactgtgtctgctgatcctgttgtgaaatgatacggatggtattcactgcacatatgatgaaatcatcagaattgttaaaacttttgccagtggaatggataaactattgatgaattgtttcctgggtcacatctctggaaaatagatgttacagttcttaaaggcagtgctttaaagtgaagttcattctgtttccaaaggctctactttcaaaggttaagaatgagattttaaaattggatttttgcctggacttgagggtacaagatgtttctatttgaagtgaagttataaaagggcaaatccagattcataaactatcacctcggatttcttgtaatctacatgtttgtaatttgtatttgcatagatctttgatctatagttatttcaagtcatgggaaattcaatgcatatagtatatacagccagtaaatacatgcttaaca

SEQ ID NO: 145968 - DNA, 286 bp, Homo Sapiens
tttaacaaaagagtatttattgcatctttatcagcaacatatgcatggcacttagcaaaggtacaggtccttggatgtttgagttttcaacactgtcatgagccatataatgattcaattttcccatcacttgtctatgtccaaattgcctcaaaagtcttgcacgatgagtggtaacagcatttgccctccgtttggtgtacacctctgtagttctttaggaaacaggtagaatttccattccttctatgaagttgatgcctggagcactgagtgaattaacttg

SEQ ID NO: 145969 - DNA, 528 bp, Homo Sapiens
gtgctcagcaatgattattttatttgacttgttaaattacaaccaaaaagacattcatcgttattcatttgttgttcaggatctgtgcaggttggaaattatggctcttaatgctgtgaaacacagggccacagcatctggatgaaaacgcaaagccctatcactcatttctccttcacttgccatcagatgatcatagccaaaacgtcctctgtgtggttggaagatgacacctcactcatcaagaattgtactgtttcatttgacttttcaccttgtgactgttaagatgcctaagatcagaactcctcatcttaaaacttccaccccagaactttttctgtcatagcacctgtgcttaacgatacttggagaccagaaccacctacttggcttcaggaggacaccttatcagctgaaagaaaatgccttgaaatagagtgtggcctagctttgaggttgggagggatggttttgtttactttccagtgggaagctatctactttagattaaagaagaattagaaa

SEQ ID NO: 145970 - DNA, 808 bp, Homo Sapiens
  misc_feature (45)..(45): n is a, c, g, or t
  misc_feature (49)..(49): n is a, c, g, or t
tttttggggtttaaaaactctgttggggcccctgctctgcgccgntgancagatcatttcagcagatctggggacccgtcccagtgcacccaggtgggcagactgccgggggctgaagtctgtatctggtgtcctcctggggtcaattcctgaagtcctcttctccagcctcaaatgtggtgtccacaatctcatcgatgacggctgcctgggagcggaacttctgctgctcctgctccacgcttgccaccagctgcaggtaatggaacaggagctcctgctgcttctcagtcatggtcccaaactttttctcgatgagccgcttcagcatggtgccttcactcgccacctctttgggctctgcagctctgagctccgtcagtgagtcttccagcagcttctcttggatccgggcggccctctcctgcttcgctttctcaaggcctttgaacagcgccgtctggaagctatccaccaggacagtaatcaccaggttgaggaagatgaagtactggatgatgatgtaaattatgaggatgggaatgatgtaccaggcgccctgggcacggctgtccatgtagatgagggtccagtcatccagcgtgagcaaggtgaagagggtgaagatggtggtgatgatgttctggtagcgggttggggtcagatttgcggaacagtgcccggaggaccgcggagaagaggaagaggcaggtaaacatgaggatgaggatggctgcgatggacggcaaggactggcccagggtcccggacgcgtggtcgacgatatcccgggaatccggaccggtcc

SEQ ID NO: 145971 - DNA, 681 bp, Homo Sapiens
  misc_feature (271)..(284): n is a, c, g, or t
tttcagtgcacaggttaatatttcagcggaggagatccatgcaacacttcattgtccttttaggagatttcaggttaaggaccagcacttaagagtatgaactttgcctggtactaatcagaactgtgttgaggaggttgccttccaggccccaatgagatgatgtttgcccagataattaccagggccccttttctgaaatacaggctttccctgggggctggaggttctgctagcacttcatgaccctggaggtgtggaggctcttctnnnnnnnnnnnnnntactgcgagtggtgcgtgcattgagccttgcctgcctcagacctcggcacctctgtcatctccctcaagagtagagtttaggaacagagaggtatttttaaaaaggaaacaaggagagtcatgtgccagcagccaggctctgcgagggctggaggacagggcccacggtgctcccttgcccgggtgagggttttatgcaccagcagctgcccaggggattggtggcatctccttgtcctgggcttccttctcctattgaaagtaaggaggttggaccgtgtggccaccgaggccacttctggttagaatatgctagaatttccatgcagcagtgcacctgcaggaagctgtcttaagtcagagaatactggggcgtcattgttttcccagcgttgct

SEQ ID NO: 145972 - DNA, 658 bp, Homo Sapiens
cagaagtcagtttctcttgtgtcactgggggctagcaatttgagtttcatttattcatttatttatgtgagaagagttgataccagttaagccaaaatgattccaaatgctaagaatatatcctgtaatgcaaaaataaattagcatttatattctttaaaaacattcacaaatgagtgtattccactctaactaatggcactcatattaatatttacgggctgtgggatatcactgtccattaagtagctctttattttagagtatgcataagaaatgacatggaagaaactttcttcaaactacagaataagttaacacagtctaggtttgaaaataaacggtgtagagggttaaagtcttaattatataagattttcacatgatacataaacagctgttagatattaatctagaggaactcaggaagcaagaaatcattggggatcaaataaagagcaaaattttcaacaaacaaagtgtcagaagagcctggtatgaaattgaagcaaaaagctggcatctgccaaggtaagaatcttgattaaagttgctcaaattataaagttgttacagtctggaaaatcagctcccagaagcatctgctggaagctgtttaacaggtgggctgtaaagctcttaactatactgatgatgc

SEQ ID NO: 145973 - DNA, 505 bp, Homo Sapiens
tctttacattgtctaatagacttgtttattattttaagctggtaaaaagagacttatgattcatgttgaagaaagagttatttgtgcttgatacattgaagacactgttcaaaagcagtttgtccttataaaaggatgacccctgtagtatttcttaggcaaggagggacaaattcaaccaacgaaaagcacatctcgccccgagttccccatgatttctccacatatagcaaaaaaatacacatcagtaatttatttgaacatgcacatcagtgagtagcatagttctaggctactcaagaaacaaaagggagaatatcagcattacctaaataaaaaagagaggtgaatcacaccattttaattgtcttaaaaacactgataagaagagcaattaaaatatagtcctaaacagtactagctaatgtagattacataagtatacaatatgattcaactaatagtgctctgacaagcataaaccaccagttctagtaaacaagga

SEQ ID NO: 145974 - DNA, 521 bp, Homo Sapiens
ttttaaaagtttctatttcggcatactttacttttacttaactaaaatttcaaataaaatgtatccacttttatgatctcaacaagatcggtcattcctatagcggagttgaaaactttcaacttattcacaattatcaaaagaatggagcagcccccacagagacttccagcaatgagttgtaaaatgcagtctgcattaagtagcttccttacaatcatcccgatggtaaaagtgtcaaatttcgcaaacgcctggacaaggaagtgaaatgatcatctaataacgcagttgactcatctgtcaaataagcgagtgggccagggtccctgagctcactaccctcagattctaactccagcttcacatcattaggcgtacgagccaattgggccgtctgggagccgtgcatcctgggagttatagtttccggctccctccttcagactacaagctccacagagccgcgggaggacggttgcctggtattattagcaagcagcaaatatggcggtggcgcg

SEQ ID NO: 145975 - DNA, 512 bp, Homo Sapiens
ttgctttgtcatttgctatttaatgttcaaacattgaaagtaattgatttcttccgagacacctctttccttggagactttcaccctcccggtctgggctagactgaatgcccacaagacctactgtgtggctgatgcgtgggatctccctttgcttccttcccgtgttggagcccattttctagatccttcacttctttgttcttggtttgcttcgtcatttggtggaatacattcccagcagctgcctgagtggggaagcaggggaaatatccctacacaggcagtttttcgaggtatgactgaaaaatgcctttatttagccttacacttgattgactgtttggctaaatataggattttgtgtttaaaataattttccatcagcttttggaagacactacttcactgtattgtggtattcagttgttgctactgaaaatctcaataccatctgattcctatttctttgcatggaacctaatttttctcctccctgcaacattttaaaa

SEQ ID NO: 145976 - DNA, 789 bp, Homo Sapiens
aaccatcttacgacgctttattactgtgatttcagagaagaaacaggcttacagaggttaagggcttgagaccactcaactggttttaagtggaatccagaccagaggtgccggctccacgtctactgccctttccacggtgcctggcttccttcttttgacacacagcccttccgctccagtggagaatcgccaaagatcatgaagggtaaatagtctcctctgaacccctggtctgggaaacccgtttcaaccccgggggtagcccagtggccactggtgctgcccaggggctgttgtggggcagagataccacccagaggaagggtggggtggcaggagccctcccaggagcagggcttgcctgtaaacaatgagctgccgcctcgccaaggcaggaggtgattcatctcccccgctgctcagctcctgctggctgcgctcaccgggcaccaaaggactggggcagccctggccaggcgctgacgcctccccactctctgcacaggtcaggatctcaccccagcccttctggaaactggcttgacttcaaaagccttcctgggtgtgtccaaaaagtgatctggtctggggagtgctcaagtgcactcaagggagcacagctccaccatcacccgagaactggctgggttttgggatcaaggcggcagatggggcatacgtggggctcggggactcccgcctgtccatgcccagaggcatacacggataacaacggtgacttcttgggtcacccctctgaacagcgtcccaggcctccctcgtgcc

SEQ ID NO: 145977 - DNA, 532 bp, Homo Sapiens
gcaggatctttacagtttataaagcttttgcataagtcacctttggttcttcccaaccatcttacgacgctttattactgtgatttcagagaagaaacaggcttacagaggttaagggcttgagaccactcaactggttttaagtggaatccagaccagaggtgccggctccacgtctactgccctttccacggtgccatgctgcctcccacaaaacatccacagtgcccttggccaatgaggggccgccatcggaggtcacaggaagccttttcacagtccctctggggcatgagtggggagcagctcttctccccagagctttaaagccccatcgaggaaggggtgagaactgacctcctgaagtgcccgagtgtgtgtgtacggggagagtggactcaatttttatttttgaaacctcatgcacagagttccttatattccccaggtcccacaagagtaccaggtgccatttcagaaccacctttctaaacctctgcccacccactgaaagcaacacggcccttcacag

SEQ ID NO: 145978 - DNA, 270 bp, Homo Sapiens
  misc_feature (234)..(234): n is a, c, g, or t
agctctgcttcttattccaggaatgacggacgctggggctttgatgggcaccgggtgaaatgggcagagtggcgcttacccgggatggcagtgaagcgggaccgggagctatcgtgacaaagggtggcatgaggtacctggccttgacgccctccccggctagacggtccagattgggggtgtcacatcctgatcctagtcccagcggaacgcctggaaggagatcagcagcangctgtgagtgctcttcctccctgggatggggtggct

SEQ ID NO: 145979 - DNA, 699 bp, Homo Sapiens
gggttgcgcagcatgatcagggacaccgtgatgaccatgattcttttggtggcattggcgaccgagtagctcagggggctagcgaggttgaggatgctgaaggcgataacattctgggcaaagttacagaagccgctgacagccaggagcaggagcgtccagggccactggtagacgtaggtcaagtcgctgctgaccaggaaagccgagaggtccaccagaacccaggtggggatcataaagaagacggcgtggcagcccaggatgttgagcagccggagatggtggatccgtgaatctcgcaagacctttttggagaaaatgttctgaagcgagaagcacagcgtggcggcgagggcgctgacgagtccccacatgtcaaaagacaactcggtgacggtggccagcaggacaccgctgatgatggggatgagtgacaagtataccttggtgctctgcttctccttcataatgatccgggacaggaggaccacccagatgggcatggtggccttgacggtgtgtgcataggacacgggcaccttccagatgctgacgtgcgctgacacggacgcgaagtacttccgaaggcgagcggtagcacgtagcgcgggtagaagcgcggcggcagcagcgggccggacgacggaatgcgactgggtccggagcccgatgtacgcgcgggccccaccgcggccc

SEQ ID NO: 145980 - DNA, 443 bp, Homo Sapiens
tttttttatgtgcttgactgtgatttaacacctgaattactaaaattgattgcaataattatccaaagaaaaacagccaagtgcagcagtaacgacagcctctgaactctctccacatcttcttgtggacagcctttgagctctctccatgtcttctccgggacagcctctgaactctctgcacgtcttcttgcagacagcctctgagctgtttccatgtcttctccgggacagtctctgagtttctgagctctttccacgtcttctccgggacagcctctgaactctctccacgtcttctctgggacatcctctgagctctccacgtcttctctgggacagcctctgagctctttccacgtcttctctgggacagcctctgagctgtctccacgtctcctccaggacagcctctgagctccctccacatcttctctgggtct

SEQ ID NO: 145981 - DNA, 438 bp, Homo Sapiens
tttgtaggtgctcaaacagtgtttattgaatgactgatgacagaggaaacagttctatgtcattttatagatagcaaaaatagagaggaacttggagttttaagggaaagatccacattactgctcttctgcttcctctagctccagtgatggtgttggcagtatgtttggtggaggtggtgctggtggtggcgaggcagtggcagaatctctgctttctttggtgttactcttggtagaagtagcagtgtatgtgatctgtcctggggtcatagtgctgatggtggcagagttcataggggtggcatttggaatgatgacaaagttggtattagcaaaaaagctagtgcttttgatttgggggagaacagataaaatatgttttctttgtatcacagcactagaattcttggcaggttttagcatttcttggacgtc

SEQ ID NO: 145982 - DNA, 999 bp, Homo Sapiens
  misc_feature (174)..(187): n is a, c, g, or t
ggggttttatgacgagaacatccatatttccatggtcacaacagactttttttctactaggagactttgatttgctttcaagttaaatctctcacccagagaaaataaaaatgtaaaagtttgtaagtgtataataagatttgttattaaatcagggattctgagtgacacccnnnnnnnnnnnnnngcaacatccattaatttgatttttaactaatactggtacatcagtctggggggaaaaaaggcagtactgtgacatttcaaaaacagattaccaaaatacagtttttgacttaattactggggcttctaggtcttaatggatgagatttctttgagaatggaaaacaataaaccgttgtgttgacatgcctgtgagctttttaaatgcttggggaaatagtttcaaattcactgaacattgctaaaaaatttcacttacaaaagaaatctcatttccttaacgtttctttttaaaagtcaatttaaataagcaacttagtagcctttggaacttgggtcatcagtcatccagtttctgttctcagctcctggagaaagaattttacaaaggatgggaaacttcaaataagtgcaattcattttgggctgacccagtgccctggataatgtgttttgttcggttcgtgcttcagacatttcttgcaggatatcgtagtttggagatttcttcctcccgtaactgattttacatacctaggatcaccactctacggcagttgtgaacatattaagaggaagaaaacaagtgggctattgaattgcagtttcctcatctacatgtgcgtgaccttttttccttgtaagaaggaaaaaaacaaaacggttcttttggagagggccagggttctctaagtatgtcagggatcaaaagtgggaaactgggaaaatgcaacttcaacgtgttttgtcttttaacggaacttatgcttgtaaaacacatcagaagtacagtgtttggttctgcaagtcaaa

SEQ ID NO: 145983 - DNA, 532 bp, Homo Sapiens
ttttaaaagttcaaagcctcaaagttttactttgcgtttactgtgggttttggcttgaggatctcagcataaaagcagctctctatctctttgacaggcaaaaactcaactaagaggaacaatgacatacagagagaactataaaactaaacacaaaggaaagctctatcaatttcaagtggctacacgttttgctgaggctcaactctggttttgccgggccaggtctcaggacctcagcatcacctcctgcctcagcctggttgttaccctttcttctgggaggcttctgcttcctagaccttgagaaggtctggcagacacagcttaggaaactgccaaagcagagtggtggtgatgccaaggatgtcactgcaggagaagagggcctgggcttctgagccaccgagagctcacaggactggatctgacattcctgatgcatcacaccggaaccctcttcctgcagatactgtaatctgtcctcatggagaaggtcaggagtatcttcctgggcactgagtagagttgg

SEQ ID NO: 145984 - DNA, 539 bp, Homo Sapiens
ttctccatcaaaacaactttttttattgactagatctagtcagatatccaaaaagaaagattcaggaaacaaggctaggaaaataaaataattcatgatcttaaatccatcttactcaccaaaacatagcaactttccagtattcttcatgttcaactgttcatcagtaggagggctagttgtccttcttgttttatctaagcatccctgttcgctgattaatagcattctcccttgttccatccatgtgatcaaatctggcttggaaaaagcataccctgcaaatagagtccacacagactttgagtttactgcatacttaaataatttttttggccgggcgtggtggctcacgcctctctctcttttttaccattacccacaataaaaatcattttcatagttgacttcgattcctagagacgttgagatcaaagttaagtcaaaaaaatgaaagccgttgaaatgacatgaatgacaatagaataaagccttaccaagactgtttagttcaggccaggtgcagtggctcatgcctg

SEQ ID NO: 145985 - DNA, 796 bp, Homo Sapiens
  misc_feature (125)..(126): n is a, c, g, or t
tggtcgaaggacctcccgggggcgccaatgccacagaaagttccgcgagttttcgcacacgcaccccgagtgctcgtaccgaggctgtccaggcatcggtttcgccctcttgtgatttctccagnncctacgttccgtcctttgagtggcctcctggtgcatactaaatggtgttctcccaacagctttccccgcagacaggccaagggtgctgggtgctctcccaggcggggacgtcccacaaaccaggaagatccagatttctgggacctgggattccttcttttagggtagattcactggggccgcaggctagtggtggaggagccctggcgtcgtgtctctgtgggctcccgagggtgatgccttggtcaggcctgaaggaaacaaaggatccaaaggaacactggctttcaggatctaattggaaatggcttttagtttttcctgaattcatagcctgctggcttccccaaaacagctgttcctcaaaacctggatcaaaatgcatatcaacagaggagcaaattatgtttcctgatttctgtgattctctccatttcctgaagggctctcccccgtgttcaatccaggatattagttctggttttggaagtccatcatcaaaacatagcaactttccagtattcttcatgttcaactgttcatcagtaggagggctagttgtccttcttgttttatctaagcatccctgttcgctgattaatagcattctcccttgttcccctcgtgccgaattcggcgcgccgtcgacttcatactctctcacacaaag

SEQ ID NO: 145986 - DNA, 496 bp, Homo Sapiens
ggcccatgctcctcaaccacttgggtgacacaaacttctgatttattttttacaggaaaccaataaatgcctctaagacactactgtgtctgctctctgctgtcctggactattttaaacttaccgatgggtattacattctccatttcaatgtcaggcagttgccctttgaggaaatcccccacatctcttagtgtttcagtttgtcttagtgtgcttgtgtgggagagaagggagaaatctcttagtgtttcagtttgttcttcccaggtttttgtgacatttactttcttccgcagagaagcaaaggctttggccttgtggttaacacagtcatagtgaagaaaaggcctttcatccaccaggccttgaacttcacaccatcgtggttcaggtctgaacttaggagtgatgatgaagtcatagcaaagacagtgtgtgtcggcccgccctgtcccggaccagccggacagcagtagcagaagcgggaagcaca

SEQ ID NO: 145987 - DNA, 624 bp, Homo Sapiens
gagattcaagcatttgtttcttctttcctacgccattgaagaggctgacgattataataattacaatgaattacagaaggaggtgggatctcagtcctccagggtcagggactcttaaactacctcctttctctctttgctcagctcttccccatacccctgtctcagtgtttcttcctttcctcaaaatcctcaacagagaagccagagctgggcaggtgtggggtatgggttagccagaggtgtgctggggtcaggccacctcgccggtggcattccgccttttctcacacacccagcggtacacctgcaggcagaagtcatcgttccagcggccatccggctggacttcaacacagtcttcacttccacccagctcgtgcgcggtgccaattatctggctgagtgacagcccagttcttgtagttgtgcctatagtctgtgccatccacccatttcgaagagccatcactgttcgtgagacctatccaggtattgagggggttcgtgtgttgtacaatgaatttctgctcctcccaggagttgatgaccaccaggtgtgcgttctccagctggcagtacttctccgcctcagcccaggccttcccggagtgagagaacccc

SEQ ID NO: 145988 - DNA, 533 bp, Homo Sapiens
tttgctgagaaaattctttttatgagatgatgatttaaaaatgactaccagtagctctcagatcattgatgctggaattaattatcaagggcaaaggacagtgatggattccatttctgagctgtaacaatgtcctgaatgtcattagtgtatttatcttaaggctgatgaaaaccttgtggaagcccatgtttgcaggccctgcctcgccgggtgcccctttagcatccgtccaggcactcacagacctggcggcctttgcagggtctctcaccactgcacttgccatcccaggccctggccccagcctgccctctgcaatgggggctcccaggagggggtcctaagcctctggcccagtggtgctgaggccccaggggacaggctggcaggaagcagacgggcatactgcttgtctcagggcaacagtgccagaaagggattccagatgtcacatccccctgctccagcgccctgccctccctgtggatcccctagcaccatcatgggtttcctcactcagaagcgggatt

SEQ ID NO: 145989 - DNA, 389 bp, Homo Sapiens
gttattacaagggctactgtttattgtatactatccacggaaagagcgctccagatcaggctttctgtattctacattttaataaaaatcaagatccttgctctttgtcaaaatcgcttgactgatatgtgtgcaaataaaggagctcattttccacctgaggtgtatttttctaatcaagttataaatacatgcaaaattgagattctataattttaactcaaatttaaactatgattatattaccacacgctggaatcccaaagaggctgtcttaataaccataattatctctgactttggagtaataaaatggaactacatacgttctttaaagagttatttcacgttattgcttatgtgtttattcaagatgattaacatccttc

SEQ ID NO: 145990 - DNA, 534 bp, Homo Sapiens
tttagttataattactttattaaccttttggtctttcaacatttagatagtctttcttaatatttccaggagagtacctcatttttattttgaaaaccattcagcacatttatcttatgtaacatgcagagcatatatctatctgtatttttaaaattttcctgttactcattgatacatagtacttaattacatgttattccatgtacactgaaaacaatataggaaatatatacatctaagacttctactttgtacagtctttcattaaataagaatacttacacatacattttcagatatttctaccttcctgtatgtgtttggaattgtatgtaggtagccactgaaagaatttgggccccttgggaggatggcagtggaagtccatgaagtaaagagcattctttaaaaagcagatttgattgcataccttttagttatttgagattctgagaattctgataaaccccaaagcagaaagattccttagtacccttggaagatgggaaaggtgagggaaatatttgaagc

SEQ ID NO: 145991 - DNA, 490 bp, Homo Sapiens
tgaagaggatgcggtattactcactttgaactgaaaaaaagtttgttaaaatataatgttctataaaaaggtggcagaaacagattctttctcttttcttgttgaaaataggtaaggctcccttgccattgggtttcctgtttaatggttgggtttttccagtaaaggtttctccctgcaggaagtcggagcttcagaggagtgcaaggtcacggtgtttgttatcccacctgcctgtctgtcaagtcgctgaggattggctttgttcctctaccaaaggccacagcccctgccagggaacctcttgtccagcctgccatctgggtctattctttcctccctgtatgtttccagacctagggctggcagcagctcccttctattggtaccctcgaggtactgtgcctgccatgtcttcttgcttcatctaaaccctgcacattcctttgtaaaaagtggttttaattaaactcacctcaaattttccaaa

SEQ ID NO: 145992 - DNA, 302 bp, Homo Sapiens
attaatatgataggcagtaaaatatcaaaacaaatcaggtctaaggaacatgagctgtaacagcacttgatccatcctgaaaccagggtttcgatgagaagcacgtgtgatgaaggaagaactagacaactttcagaattggagtctggcaagtgaattaatatgaacagaaatagagttttcttaaaacaattgagttgcccacaggagcttgaacacagaacacatatgagaagtcaagctgaattaacaggttttgttctggtggaagtcaacaaggtgagacttcatgggactagtgg

SEQ ID NO: 145993 - DNA, 479 bp, Homo Sapiens
tttgtgtcttctcatgcttgtttcctaactatactgttttttaatgcaactgacaatgtgtgtgagttatggcgtgcagagtcagagggatgatgagggaatggccaccatggggacgttatcctagaagaatgagtgggattttcttgccttcttttcccttgaacctcatattccccttccagctctaagcactcaagatggagtggcagtaggatcccaacacttatatctgtccagaattggtcatcagctggcttgagttctcccattctgcctgtgccttcccttagcaagggaaagaacaagatggaagagaaggaaaaggcctgattgaaccagccaatagataattagaagctgactattttgcaataatgcagcacaacagcaataaataaatcaatcacttggggggtggggaatgacttccctataatcagctattaaagacttgtaccactaattagtctaaaaaa

SEQ ID NO: 145994 - DNA, 531 bp, Homo Sapiens
gcctggactgcttttatttgcaaacttttttgttcaccatggaaatgctttatctttctggtatctccaacataactccacactgcaccacgaagctataaattccaaagctaatggaatttccaagcaaaggtgcaagcctgacactgcatgaggggccctcacgtcagttcctctacttacgtcaccctcagatctccacacaggcgcacctcggccactagtctgacccccagcctcgctgagcccctgctcaaaagcgctgtttacaggcctgtgggttccagagaccacggtgactaagggcccgaccctgactacagcagatgggaagttacttaatctcccagggcctcagtttccacatggatggcatgacactcccacacctcgttaggggctcgcggatggcctgacgcctgacacaggcagtgcgagagtccacaggtcggcagccttcagcagcgacaatggtccctgacagtcctctgttcacagctcctgcagatggtggtggaccagcaacaactg

SEQ ID NO: 145995 - DNA, 600 bp, Homo Sapiens
taggtttgtttgaagtttatatgcagaaaatggatttgaaagcatattcatagtataaatcacatttaagtagccaggtgcggtggctcacacctgtaatcccagcaagaactttattttttaaactttaaactatccacaattaaaggggaatcttctttaacttgatcttttcttctatatttgaaaagtatctcatctttgtcaaaatttccttggcttcttcaaagtcatcttgttcaaaagcactgctcacattgtcagtaaattctttctgtttagaaggtacagtcctctgctcaggggggccaggagggtcttataggcatcattcaccagggtcgaatgcttctctgagaagtccttttcagtctgagacctctggctgaagaaatctgggtggacaagacgctgcagttgctggtacctgtgctggagcttcgctgtatcaactctgaaggaacggttgcagtccataaggctgaagtagtctcgagtggggtcaggtgcctgcagcgctcggcactgtgggcagaagaacctgtcctcccgcccggggccccatgggccgccgcagttccaacagcggggataattgct

SEQ ID NO: 145996 - DNA, 795 bp, Homo Sapiens
  misc_feature (773)..(773): n is a, c, g, or t
gtgtgagccactgtgcccagcaagaactttattttttaaactttaaactatccacaattaaaggggaatcttctttaacttgatcttttcttctatatttgaaaagtatctcatctttgtcaaaatttccttggcttcttcaaagtcatcttgttcaaaagcactgctcacattgtcagtaaattctttctgtttagctttgacaatggattcaatctctttcatggcagcttcactttcagcttctgcgagtttttcattgatttccattatttctatgaggaattgcctgtccatttcataatctgtcctttcaggaatctctattccatggagctttagaaggtacagtcctctgctcaggggggccaggagggtcttataggcatcattcaccagggtcgaatgcttctctgagaagtccttttcagtctgagacctctggctgaagaaatctgggtggacaagacgctgcagttgctggtacctgtgctggagcttcgctgtatcaactctgaaggaacggttgcagtccataaggctgaagtagtctcgagtggggtcaggtgcctgcagcgctcggcactgtgggcagaagaacctgtcctcccgcccggggccccatgggccgccgcagttccaacagcggggataattgcttcccgcctgcgacgcagcatcgcagcttagcggtctccttctgggaacccctgtcggccaaaacccccacacccggagcaaagccccggctctcccccgccacatccggaggngtgggtggcgatatcccgggaa

SEQ ID NO: 145997 - DNA, 529 bp, Homo Sapiens
tttgtgttccaataaaactttatttacagaaacagttggccagctagatttggcccacaggccatagcttgtgaaccctgctctaaataatgcctttttgaatagtcaacagtgatgtctctactgggctctcaaggctctgattccctcagatacctctaaatagctcactaagtcctataaggatcatggctgctgagaggttcatacccttaagtcctttccctccagaccacacaagctggtaccatttctaccaaaaagaaggaggagccagaaaagatggcttcatcttgggtggtggtggggtgagacaggaggcgaatgagtgcaggccacccagacccagccagccatcaaagtgcagggccacagcccacgcccacggcttgcctgggttccctggtaaacagctcctccaggccaaggctttcactccagcccctcaccctgtcttttgtcccagcacgtaatgattttgacctctggcatttcaagagtctgctgtgaagaaatgtggtactttgat

SEQ ID NO: 145998 - DNA, 544 bp, Homo Sapiens
  misc_feature (464)..(464): n is a, c, g, or t
ttttaattaagagaaccacactttattcctaacttattactattaatgacagcacaggcatcaaattttaaggtgacttgtttgggcacctctttttcttctgttttggctaacactttactcatatcatttatgagcccccaccagtcctcagtccttaatcttattttaaaaaccgtggtcatgggaggctcagatgggtcataacacacatcaggttggtcacttcctgggctacataccttgtacagaataacattatacaaacaagttatttttagagttccagtacacttataataaccataaaataataggactgtagcaaccttttgtcctacctcagtgacttgatgtatacactggaacagtcctcagtctgaggaaggtcagttgaagtccttactgtaaaagtccaaattttaaggaaaatgagttctgcgatgagttttctcatgcttcgngccatgcgtggaccagtcagctttctggtgtgactggagcagggcttgtcatcttcttcagagtcactttgcaggggctg

SEQ ID NO: 145999 - DNA, 684 bp, Homo Sapiens
tttatcacttgaggcatttatttatttattctacagatatcattttcagaaatgatttgtggtggttcttctggactgagaagagcctgggtttcacagctgggtacagcaggggtggggttgccacttggtctgagtagaaggaattctggagtaccttcgggtctctgtctgggccatctgctgcataaatccctttacaacacaagaggcagcatacttgctcttgacctggttctgtcactgtggaattggaccacctgccatcacaagtagatccagcaaatgtaccgtggctcgcacatgcacaggttgacttcttgttcatgtaacaaccaaaacacacttcggtgggtggctttcctcacgtggcaattcagggggccatacagctttccttctgtggctctgctatctcccataaccccattgaaatctacatccagcccatcagacggacggagagcacatggagtgggcacacctatggcctgtaggccttggctcagctatggtgcacctcacgtctgctcacattcttgggagacctcacctgcatggccacactaactgtgagagaacctaggaaatggaatttttagagatgagagatagagctctacctccctgtggtgacatggtaactcctagaaggcacaagatattttgtgagctattgagcaa

SEQ ID NO: 146000 - DNA, 1229 bp, Homo Sapiens
  misc_feature (1120)..(1154): n is a, c, g, or t
agaaagagaaaggcgggccttagttacaacaagggggttacctcttccaaaatttttttaaatgaaaagaggggattcaggaggaaaggtatgttttttgcgccattaaaaaaggggaaggaaattgttggccagttttgttccataaggaccccaggttatatatccacattccgggggcatgccggaataaggttttggggggcaaatatataaataacttgggaaaggatatccaagaaccagctaacccccggggctattctggggttaacaagaatagttagagcatagtaaaagggaagatttcccttaagtcccccacttggggtttttgggatttggagcaatgtgaatataaacttcccaagaggaaaaaattaaaagtactttccctggcaccattgttcttaatgacttcccacagttttcttcgacaaaatatcgatccttgaccatatgcaaagatatcatcacaaattttcatgtaagcgcgaacgatgggtaaggctgttcaagtataccactggaataattagtggttctggaaaactctgaagattctgtcttgcttttttttctgactcaagtgcttcctgatacgtcagtccaggtctacccgtcacagcacaactccacacaaggctgttgcacagaatggttcgttcaaaaaagtcatcgtagtggcggaagatctcgttggtgactttacagtagaaaacttcctcgtcgggccgcaggtccgcgggcggcttctgtctcacaaacggctttcggtgtagcagcggcatctcccgtccgcccgcgggctcgcctggaccctcggccgcccgcgccggccccgcttccctgcgatcacgccgactgccacttgtccaccttctccactacaaaggcaacgaggggagaccccgtcctcccaggggaccgcctctctccggccccgccgcgcccctggctgccgcttctcccgctgccactgcccgactccgcgcggggaattgcgtcccaccgccacttccccgcctctcggagctcctgggaagtttctgatctactttcggctctccccggccgtaatggccgaattcccgggcatatgcccggtaccgtcgactgnnnnnnnnnnnnnnnnnnnnnnnnnnnnnnnnnnncgccgcttcctcgctacactactcgctgcgctcgtcattcgcttcacgagtgccctatatatctatacaatcttt

SEQ ID NO: 146001 - DNA, 431 bp, Homo Sapiens
  misc_feature (31)..(31): n is a, c, g, or t
ctgggtggcctgtggcccgacgcatacgctnagcagcactaaggggcagaggcgctcacaaggcatagggcagtcgacagaggcctgctgcatgcgccagagagaacctctccgcccacaggcaccaaggagggggccgagtccttgccggtctcccatgcccccgaggccactggtaccttctcaggcttgtcccttccaaatcgctcccaacaatatcctgccttattgatagctgcctgagcaaaaggcttctggtcacacatctacactgactcccgtagccgctcccccatccaagccctgcacagatgccggtaacaaggccttggtgcctacataacccgcccacgcaggggtcaagtggaaggcactgctctccagtgcggaggaggacgcaactcgggcagcagtgacagcagcgcggccgc

SEQ ID NO: 146002 - DNA, 476 bp, Homo Sapiens
gctttgcaggccttcttcccacaagtccttgggaaaaggctgaccatgccagccagccagggtggaatcttctagcagtggcaggtgtctccctgccacatctgcccgtttacctggcccggagcttcaagccaccagcactagtttacctaccgcctcccacactggcctctctgaggactttgccccaaagcacgggagggcacagtgggcagaggtgtgtgtggagccctaaaggccccaacgtgggaagggaagatgggaggatttctccaggatcacagttgtggcagggcagggcagggctccccacagtgcaacaggcttcctgactggctccaaccacgctcctggggggacactcagggcccagagaactcagcaaagttcccctgacttcactgtgcagccaactccactgcaggctgcgtggcgagttgggggaacagcccaagcgggtctgcatccatccaacc

SEQ ID NO: 146003 - DNA, 689 bp, Homo Sapiens
tatataaaccttacatttatatagtgcacctatgagcagttgcctaccatgtgtccaccagaggctatttaattcatgccaacttgaaaactctccagtttgtaggagtttggtttaatttattcagtttcattaggactatttttatatatttatcctcttcattttctcctaatgatgcaacatctattcttgtcaccctttgggagaagttacatttctggaggtgatgaagcaaggagggagcactaggaagagaaaagctacaatttttaaagctctttgtcaagttagtgattgcatttgatcccaaaacaagatgaatgtatgcaatgggatgtacataagttatttttgcccatgcctaaactagtgctatgtaatggggttgtggttttgtttttttcgatttcgtttaatgacaaaataatctcttaatatgctgaaatcaagcacgtgagagtttttgtttaaaagataagagacacagcatgtattatgcacttcatttctctactgtgtggagaaagcaataaacattatgagaatgttaaacgttatgcaaaattatacttttaaatatttgttttgaaattactgtacctagtcttttttgcattactttgtaacctttttctatgcaagagtctttacataccactaattaaatgaagtcctttttgactatt

SEQ ID NO: 146004 - DNA, 468 bp, Homo Sapiens
ttttttttgctgacatattaatcctttattagaaattgtaaatgagaaattatatcaacacctgaggaccaaactacaacagaatattccataggctcaagattttgagacattctggaaagagttttctgtaaggtatatcctttccgtggcatggcaacatcatcattctttaaaaaggtgactggacagacatcatttccaccatcaccaatataaacaatttgtgtataattcactccctgttgtaactgtttatctacaaattctatcaaaactacctttttgcaaagattctttgggcatctattgcaagaatgagtatgataattttcaacagtgagatgaccattgctattaaaagctgctggatttgtaaacactttatcaaatatgtcatgaaaactggcagcttctaaaacccaatctatgaagaccgaatttgaatctgaaataataatgcagtca

SEQ ID NO: 146005 - DNA, 872 bp, Homo Sapiens
cactttttacatttttatttgtttttcaaaggtgtgaatttcttctgcagttagacacagattatgactaaaaaacaagtggcttttatgtagattcatagtcaatatcatagtcatttattttaaaaagctgcccagggcttgttaagttgctgtcaagatgaagcactaggggatcagcatgttcaggtgaaaaggtgctgctcagggaagaggtgagaggaggctgcaggtgctgtgtgctgacttacctgagctagcacagatgcagcacacggctcacacactacctcttatggcattatcactacccaatctgccattagcgcatccaattaatggcaatagattaaattgtatagctccctccaccaccacaatctgcaaccaaaaccatccgggggacatcctaagctctcaaaaggatctttatggggaagagatttgttgagggccaagagctgagctccatgcctttgaggatgagaattctggggtcctgggtgccttttaaagtgatctgggagaggtaggctctgggagcgtatgtcctgttggcatcaccaactcccagcgctgtaaggagtcgcagaaccagaagaaggccagaggagagaccttgaaagtgtgggatcccaagcagatatctcaggtatccaagtccatcggtgctctggtaagccagctctagttgtgggaagaggtggtggtccttggcagaatgtgttcttggcacaggggatttgagctgaaatgtgtcctggtcatgctgaggtccatccagtatggccgtgccagttttgctccaactcaacttttccacattcaggtgaccctcattctccatggctgttgttccatctgcagcagag

SEQ ID NO: 146006 - DNA, 454 bp, Homo Sapiens
taacttagcattattttaaaactaatttcccataattctttaatggatacagaatattacagtgtatggctacactgtttttataaccatggccctattgaacatttagtttttctccctaattttccactattatacataataaaataatgtcttcagccttttataatattccttttcctcagaggaaaaggcaagtacagtagaatctattctctcttttctctctaagggaagtcatggacttaccacaagctttgtgaacccaaaccactaaaaggtttaatcaatggaaaaagtccggccagcagcatgagcccatgggctccacagcatggcccgtgcacgcctttccctgcacaccaccgccactgtgatgccatcactccccattcacctgcagctccttttccgttcccacagccacaagacacggatcgatttctttctcgtg

SEQ ID NO: 146007 - DNA, 436 bp, Homo Sapiens
ttttggaaattcagaacctgctggctggggattgggtagcagggtgatctaacattatacatcctggaagttgtttgatgcaagaaaggcctctcttgctgtccagatgttcaaagtgataaaatgcacttcaaatgtgaaaatgactttcattctggcaaacacagatctgttcgagacaccagcctaataaataaggtcgtcaaacttcatttagcttagagaactatatggccaccccaactccagccaagaatcacttccaagtgactgacattctcatcagcacatgccttagaaatctacttgacaaacagatactgaacactcatccatggcttaatccacaaatgttagagtgtatttctgaaactagcagactagggtagatggaaggaatttgtgaagttttcttctacatgatcaatgaagaggg

SEQ ID NO: 146008 - DNA, 908 bp, Homo Sapiens
  misc_feature (258)..(292): n is a, c, g, or t
ttttttttatcttcaaacctagtttaattttgaacaaaattcttgcaagtttggcaagatggcttttcagctcacagaaacttacatgtagtaaataagagagacagattgggaagaacttgggaactgctggtggcagatatagagatcaagaacatgtccttgagtagatgagtggagacgtatgatgacaatgagacagttctgctctttagaatctcacctagacaggcatagcctgcctgtactgtgaatgannnnnnnnnnnnnnnnnnnnnnnnnnnnnnnnnnngatcatttggtgggaaggcaaaaaggttaatatttttaaacatatttcaaagagtttacttgcccttgaaatctttgttctattgctgttcattattaacaattttttttaagtatatccgacttcattaagagaagactaacttatattcatccactattttaagtatatgtaaaggacatagtatgcttgggaaatctctaaatgtcatttgaaaatataaagataagctcttaaaaactgagcataactcagctggaatgttatctcacatgcaagcttattctgtatgtcagttaggatcttcatgaaaacttaaagttagtttggtaaattcaaagctatagaaaataggaaatagatgttcttatgaatgtaatactgtatgtctagtgatttcagaaatagcatcatgcaagacaaataagcaagctatgttgtgtcttgtaattatgagtaacagttcttaagatttagcaagtagatgtaaatacctcacgtaaagtaactctgccgcatctctgaagacaagaacaatagttaactttacctagtcgatcattgcacatcattagcttctcttgaccctttaaactgttatggtagcaaagaaaag

SEQ ID NO: 146009 - DNA, 383 bp, Homo Sapiens
ctctctccaggcccctgggtttcaaaagactgtgacttccaccttggtttgctcggtctgatgaaggaactttgagctgtgagctgcactgtgaactttgctgtgagctgccctgtgatgggagagtgagcctccgcctcacagccctggaggacctcaatgctgccaacgtgtgaccagatgcagatccttctccagtcaagcctggacatgacatgacagcagccctggggaccttgatgctgtggcctgtgcaagaccctgagccagccgcacccagatccctcacccacagaaactgccagattttaagtcttctgcttgtaagccactctttttgccatagtttgtgtgcagcaatagataactgctctagagttgtt

SEQ ID NO: 146010 - DNA, 343 bp, Homo Sapiens
tggactcacaggcctcccttccactcacagccttttgaagtagctctgtggacttacaccagagagatgaaaagctgaaatccagctgccgttcattcctgctttgagattaggaaaggtagagctgaatttgggctatgttactcagaagcttttccccagctgatggaggcctgccctggaggtgctcagctccatctctgctgtccaggctgtgagcaagaacacctaaggaaagccagcagcctccttcactctccctccccatccattcaggtacaggccacaagtctgcagcatctcactacaaaatcagcacagaggcagtgatcacaccacgatg

SEQ ID NO: 146011 - DNA, 1017 bp, Homo Sapiens
tttatagtcaaccactgacaatgctttattagaaaggaaaatggtgtcgagaaatttatagggcagcaaactgcattatgcctaaccttttggacgtattaaagcatgtcatttccagtcttacagcctcttgttattcataaataatagatagcactggacacaatcatctgacatttgttaaggtaataaatataccctaagtgctgatgggtctcgcactccatgatttaaaagcacacagcagaaatttaatgtaacttaaaatgtctcatgtaattctatggatttgcagattcagttcaactcagcagatcaataagcacagagctctgttgagtgaactgttgtgctaggcatcttttattattataaagcaggaccttactttggtgaatgacacatgaactcaagtccctcttttcaccccgggaatataaaggagaagaaccttcgtgagtttcttttctctcgtctagtcatgcagagatgaaggtaaagattttggcatcccctaaaccattctcaaacgttgcttaatagctgtaagttgagttgagggagtgggttttgagatgatattagatgcaggcctttaaaggaagccactctgtccaatggtgggctccatcaagcattctgcttcttctgcacttgagaaccagttatgcctgggctgacccaatctaggacatacgtgagctctgtggtaccaaccactatctgatggccacagttacagagatgaggagtattagaaattctcctccaagtcttcctaccagagcaaatagagaccacaagcattgtttcagcagttttggtgcaagcaaattgggttgattcttttgcaggagtagcagcccagtattttgagctatatgccatgcttttgacagatactaagggaaagtgtttgttaggaatttgattgtctttccaataaaacaaggtcgatttctattctttgtcagagcatgatacccacagtaaagaaattatccaatgagaccttag

SEQ ID NO: 146012 - DNA, 440 bp, Homo Sapiens
ccaaatgttaacttttttctttttgaaaatataaataattactattttgtactgtgtggtatctctggtcttttgtttcattcacttggcttgtctcttgggtctgagatgcttgcctgtgagatcttgaagccctggtttgatctccatcgtgcagggattatgttcagaatgtctaagaagcggtaggatttatttactctccatagtctcacgcagctgccagcctgttgtcctccttgaggagctgccagccatgtcctggcgagtatctgggaccaggtcctacttttccaaggcaagcaattgtagtgggcttcttctgcaccctgtgtgtgttaatacccaatcccaaatctcctttctcctaacaaaatcaaaatatatatatatttaggggacatgaatatggagattaaataaagggaaattgttgtgtc

SEQ ID NO: 146013 - DNA, 752 bp, Homo Sapiens
ttttgactcataagaaggcttttattattgacagaagttggaagctcctctcccagctctgattcatgttccatttagagtgaaacatatggggaacaagaactctctgtttcacaatctgactcttaacggttctaagggccaattctgctcttcccaggactaggaagatcagtcacacactttgaagctgctttctgaaacacatctgaattcggattttcagtgattcttccccattaacgagcatccttgctgtgggaggccatgtgcccattcacgtgaagattccattgcttgaaacaatttttgagctgtgccttggagagtgcctcccctcaagactgtggcctctctcctgagtgagctaaatgaaggtgcattgtcctttgagggtgtattagctttctggaatcagcctgaagtcatttgaagtcaagtggtgaagcgaaagggagccagaaataaggtgcatctttgccctcagtcagttgggattcttttgggcatttagaaggggcggtcctagaattctagagaatttacggaggagagtttcagatccatgctgggcagggcaatagaggcttggttagactatatctgcaaaggagggttactttgaaggaaacagcattcattttattgtatgcatttaagtgtgtttattaataatgcgtttacttttcttacttcctgctaagatctcatatgcatctggttgtaaagaagatttagccatggcctgtagg

SEQ ID NO: 146014 - DNA, 530 bp, Homo Sapiens
ttttcgggtgcaagtcgtttattcgggagctgattcctggaatcacggagaggtggtgaggaagacagccagggaaggaggagagctgctgagggccacgcgaatgagctctggccagggagccaccaagagtcagtgtaggatgcacctcggaatcatgccactaagggcatggaggctggagtggtaaggaagctggggtatttccactcaatctgggctcttattgttagagaggtgcctctggaaggcatcgaacccctgaaactttcagtctaagctgtccatgtgcagatgatgtcagagaaagccctcagggagagagtcacaggtccttggtgaaggaagtcatctgcctgtacaggaactgtcctccagtagaccaacggaaagtgtgctggacataaacaacaccacactgaccaaggccccagaggagctctggagctggcagccaggcgctcagtgctcgcacaggtgaaggcctgcaggattcagagtcgaagatctgagtgggaatcctggctctg

SEQ ID NO: 146015 - DNA, 529 bp, Homo Sapiens
tttgagaagttagtgcatatttttaaggtatcccaaattccatgacatcaaactaatatcaaccaatacttgggcaaatctccctttcccagttcaagaaccacatccccacaaaaaacgggaatcacaagagtcccagtccacagcctattttttcccttaaagttgtcgcgctcatctctccatgcccaaagatacagagcaaacctcatggagcaaacccattttcacagctgcataacattccactggttcaacccatcccctggtcatagaactttccactacaacaaacggggctacagatatccctagacatggaaccggtatgcacgtgttccagagacagaaccgctaggccacaggagacacatgtgtaacccatggcagacggccttccagaaaggctgcccagtttttattctggattactgttcctgatttgctgagagctgatctgggggaaggatgtttctggacagtttcagtgagattcgtgtgccctacaattcaccaggtgtgcgacgca

SEQ ID NO: 146016 - DNA, 462 bp, Homo Sapiens
cgagaaaatttccttttttattagaatatttaaaaaacaactgaattgtattaattattcacaaaaggaatgacaatccccaaatttgagtggatttctgggtggttcaaggaagcttctacatgtttttcacaggtaatgacactactagttaacagctctggatgtagatgggcaagactggacggccatgcagagaaaagaaaggtgggagtgaaactttacagagaaagcacctgagatgagggaaaggcaccttaggtgtgtttaaatagcattacaaaagctaaacattaaccaggaaatacaagcttttttccctatcacccaagtgacacctgcttcgctttgtcttaggtttaaaaatatatttgatcccaggaaggatctgagtgatctaagttggactaaacaggaggcagtctatagggaatgtgtatttttcaagtaggagcatttctt

SEQ ID NO: 146017 - DNA, 439 bp, Homo Sapiens
  misc_feature (80)..(94): n is a, c, g, or t
gtgttgacagactttattctttcttcctgagatatgagttcagttaatgaaaactcaaggatgggaccagaggtaactgnnnnnnnnnnnnnnnccccctttggtatgtccacactttaggtagataaaggaacttcagagaacaacttcatcctgtgttttgagagagacaaacgatagagagtggggtggggagtcgagtggggaggccagagagaacttgccttgaggatccttcttcagttcagcatgtccatgcaccatattttggggtattggtttctgggtcccaatagaggtaatgatagtagaggcatcagatggcttgttcttaggaccccaagcatggaacaagaagtgcagggcaaatcatgaggaggatattgagggggtctggaaatcagaggagagtggcactgagaaggaatccttggcaaaa

SEQ ID NO: 146018 - DNA, 366 bp, Homo Sapiens
ttttttcgcctttgaaagaggagtttattactcacagttcccaggaggaggggcacgtggggaagcacccagggccagtcaggacagggagggggtgaagggaaagggtgggcaagagcctttattgccattttccaggcaaggcagaggaggcaagctgagcagaattagaactgggtcatttcagtgggctctgggcttgggggtggtatctagctagctggtacctggccttggggtgatttagggcagggggctagtgttcaggaatgcaggagcctgatgaaaggaggcaggtgggactcatgatggttgctctgcatatcaaaggtatgctcagcctgcacggtggctcaagcctgggat

SEQ ID NO: 146019 - DNA, 480 bp, Homo Sapiens
  misc_feature (244)..(301): n is a, c, g, or t
tttttttaaaacaacaattattattatttcgtatgttctgtgaattggttgggaagttctgctggtttcactcatacaactgcagtgaactgtggtagaaggtccaagatggcctcatgtctagcagttgatactagttgttgtctggggtgcctcagttcccctttatgtggcatcttgccctccatagactagaccaacgtttgtacatggcagtctcatgcttagccttgaagggcagagnnnnnnnnnnnnnnnnnnnnnnnnnnnnnnnnnnnnnnnnnnnnnnnnnnnnnnnnnnctaggaaaacaaatccacccaaagtcagccaattagtgttgcggtctatttccttcgggtcatggcctcctcagtatcatcccttcatggttcaccaggaagatgttaccggaaaggggtctggatccacatccaaagagtgggttcttggatctcacacaagaaagaatttgtggcaa

SEQ ID NO: 146020 - DNA, 319 bp, Homo Sapiens
tttttttgaggctccttggcggtgcatctttattattcccagccacaagttatagccacaacctctcttccatttaaagtgtgcgtcacccgcagaagacaacaggtgccggagttcactcctatgattcaattctaccctcccctggcctttgcacggatcccagtggtcctggctcggatcaggcctacagcttacttcccaggcatgcttccaggaaggcagttggggtggggggtaccatttatggctcttcccaggttacatgagaactggtgatctcggtggggtctcagtagaagcctgaattagtgttcat

SEQ ID NO: 146021 - DNA, 395 bp, Homo Sapiens
agcgggaggctcctgtcgcccgaggttcgacgtcctgtggcctaggaacgcgaagtgccaaaccgatcgtgagccaaggccgtctatgaaattccgagttcacacatacacgaagactggaggatcctccccattacagaagaacccttcacttcgcaaggcgattcataatagacttcactcagtagccagcccaactacccaatggaaaatgtactgtccccaaatgattatttcattcattttttcaaggacacagtaattgcgtagaactgtgaggttccctccagtgtgccaagaactgtgctggacttttaggaaactcaaagaaatgagagatcaactctttcccctgaataatttataatctaattaaagagcacaattcctggaaa

SEQ ID NO: 146022 - DNA, 651 bp, Homo Sapiens
  misc_feature (210)..(210): n is a, c, g, or t
attttattactcttattctaccccaaactttccttttcaccatgaccacccttgcacatgcaatttagcagataccattcttgggtctttgcaaatttcttttccttgcaaatcacagccagtcatcctacagtcacatatttaccatgttattcgattcccagaataaacctacatccacccccacaccgcaccaagtatccccaaggnggccttctccagaactcttactgattcccttgttttggaactcttgggcacttacattaaatctgctttgttagtttgctcatacaggtgacccactttcttttatactgctgctgaaatcattttttttcagaaggttcttcctcacccactaaagtacaggctcctaaagggaaaagactttgccttatccaagttaccaaatttcctatgtatactccagctatggatcatggttatgtttaataaagccttctttgcttccagagtcttccctaatcctgtttcttctaaatgtattgctggacaggttggaggttttgtgaatctctctgggtgacaacaacagtcctgaacactgagtcactgccttagtaatgcaccccactctcttccttgttttggggtataataaaatccagtaacttgtttctgaaaaaa

SEQ ID NO: 146023 - DNA, 774 bp, Homo Sapiens
atatccttaacagggcattttattgaacaggagagaaacactgaagtgtgcaaggattaaccagacgtggtgaggtgttgcacagaaattcctacaccaccatggacagcaagacttctgtcccctttcatttcagactggactttggcatggtctgggtttggtcgttaaggtctggttcaagatgaggcctcacagagagcagatcaaatcaaaccaaccatctggtcaatctgtcgcatgtagatgctctttaagggcagggagtacctcctctcatcaggtacacgattgcagttggagctggagttgatgacttttaactcatgaggtttcggcctgtgcacagactttcccccttggtcctgccctccctcttcagagaagaattccttccatggcaattcccgaagatgctcatccacagatacaatgtgtccctctgttgtgaacatgtatctggttccagacttgtgtactggattgtcttcatcacacagcagatacaaatatttacaggtctcactgagagagaagctctccctccggtcttctggtggacttgtcaatgacgtgatgcagcgtggcttacccacacttgacttttgtgtacttttccagactctgcagaatatccattcctacatggaggtagaagggattcttggttgcctggtagaggagatatgtggattccactaactttggtctcagtgggtagacgagaacgtcaggggcctgcagctgccagttatatctctcagggagggcacc

SEQ ID NO: 146024 - DNA, 371 bp, Homo Sapiens
ttttgatataaaatgttcacttttattatctttataaaataagaagggaccatgtcaaaatgagaaaattctgagttataacacagtatatgcaattcaggctaagggcatttttaggtaagccacttggaaaaatgccatttttctgaaaaatgtttttatcactcttttatgtgtgtattttaattcaaaaagtaacagtttaggaataactaactgacttgtgaattgtcacagggctgtgaagtgggatagcagcactgtggattgtgcccagctcaagaggcccctcaggtccattcctgacgctgtcatcccaggagagcaccctcctcatgggttttatttctcccttttaaatcttttctcag

SEQ ID NO: 146025 - DNA, 511 bp, Homo Sapiens
tgattattgaactctatttcagttgtgtagtgagttaagggaacagaaattactctctatctcctagcaacttcccagtagagaatggcattagtacccctgtctattctttcagaaagtacacttggcccagttttctgctttgtggatagtttgaacaaacttcaaaaaatgataagatttacaaacttacttctggttcttaaagtccctctgactgctgattttacttactaacaatggaaagaagcacgaccacacagtcaaataaattccagccattggtgaagtagtattgcctcaaagcaaagattttgatgagacattctaacgtaaagatgaccacaaagacccagttgagatggtcaaggatggatttcatggctttgggttggttgtatgattcagccatcatgctaatcatgtttaggataatgagacttatgatgatgatgtcaaagatctggcttgtgactatgtcgaacacgagaccttgacatttgttctgaaa

SEQ ID NO: 146026 - DNA, 617 bp, Homo Sapiens
tttcatgtttgatattttgtttttattgattatggtatgtaatattttcttttgaaatttggcattagttctatacaaatggaaaccaagttgggcaagtcctgggtcaaacacctgctaaggtcagaactagtggaaagagtgtgtagattcccaagagcagaagttcagagatggctctgttacatctttcctttgaaactttgggtaagtcactggatctcatatccctgatctgcatgagaggcattattttcatactgcaaggttatgctgcagagttgtgtggggcacagtctagactgcttgaatttgaatcacacttcactgccttctgtgtaaatttgttcaagtcactttctgcattatatcaccctttccctgtgtctccaactggttgatacttgcacctctcccagaagttgtagggattatctttgaaatccaaaaccacatactgtttcaggacccaggagggatttagctgaatgcccatattagcttgaagctcagattgaagaaaaaagaaacaccttcttttcacattttaacagcatttgtgaaaatccatgggcattctctgtgtgccgtgacagggcacagctccgccttgctac

SEQ ID NO: 146027 - DNA, 346 bp, Homo Sapiens
gaaatatattctcagcatttccagccagacgaggatttcagtaattgtgctaaagaaattgccagcaaacattttcgttttgcggagatgctttactataaagtattagaatctgttattgagcaggaacaaaaaagactaggagacatggatttatctggtattctggaacaagatgcgttccacagatctctcttggcctgctgccttgaggtcgtcactttttcttataagcctcctgggaattttccatttattactgaaatatttgatgtgcctctttatcatttttataaggtgatagaagtattcattagagcagaagatggcctttgtagagaggtgg

SEQ ID NO: 146028 - DNA, 559 bp, Homo Sapiens
cactttctcaagtgctttattcacacttcatatgacattgagaaatcatcaatttgcccacattacaaataagaacagcaagggatgactttagaggtgggtgggaaggtagagaggctgatgaaattatgggggagctaaagtcactctagaaaatattggtgggacatagactcccttcccttgcttcttagacaaatgagcttggtgagtttgattgtgaaatctgccagagtttctctctatacccttcctatgaaaggcagttttggggaagcttttgcacagtaagtcttgaataagtgtttgtaggctgaacaaatgaagaagtggggcctccagcccccaggggctttgggagccaggtctccaaagactaaattgctggagggtgtacaagtctgtttactccttggcagaaacacaagtctccctggcttcaaagaaaagaggcttaaaaaggcttgggcaccgaaacgcagacatcaaaagcctcctgcccactgccagccagatgtgttaagtgcaaatgaagctgaaatgtgcagattcaatttcc

SEQ ID NO: 146029 - DNA, 410 bp, Homo Sapiens
cagacttatgcccgtgttttcacagcccacactcgtgcccgaagccccttaccacgccccgggctgtggtctgtgggctgtgggacgagctgcggcgcgggccatttctgagcagtggaggtttcaagtaatccactaacaaccagttccaaattctgtcatcaaatcctgtgctgctgttcctcgtggtaatagatgcatattatttcttttatttaaaagaaatgaatgtgactagtattgcattaagagctgaaacttggcttttagctgcatggcatgttaaagtacctccgatgtggctggaagcttgtattaactggattcaagaagaaaataataatgttaacttgagtcaggcccaaatgaataaacaagtgtttgagcagtggctccttactgatctgaaa

SEQ ID NO: 146030 - DNA, 393 bp, Homo Sapiens
ttttttatcttgaaccttgagtttttattttttaccactgcttcacacatattatcacatttgttttatagcatgactacaggtgcttcagtttccagtgtgcaatgacagggaaacaagttaaggagtgtggatgggtggatctcagccaagtagaaatgctaaccaagactcaggctgctcaggataaacacctcaaaagttagtagcctaaaataggataaaccacttcattccacccaaaagtaggcaaaagaaaaggacaaagtgagaagcaggtgtaaacttcaaggaagtttaggaatacagacaagaccccaccacttccttgtcaccatgagattcttcttttcttatgtagacagagccaatctctcaccatcccagccctgt

SEQ ID NO: 146031 - DNA, 613 bp, Homo Sapiens
cttagagcccatgtttgcttattttatattattttttagttaactaatgctttagggaacaactctcttgagatttatcatctagagaattgtaggggatatctttctcctgtttctagccacggggtgctgcagcttccctcttccaacctggactgagaggcaattttgatgagtactgcatctggcccagatactggggcctgacctgatgtcccccagaggagctctgctggactcagatgggctttccccgctttctgcctcacaagttctctgatgaaggaggagtatcagctattcattttgtgtatgtggcgcctgaaccttcatggaacatatcccagatcgcagtgtgccacagccagatctctcatctgggttcttttttttaaagttgggcctgaatggaaatagagatgctgctgtgtggtaggtggggggtagtgacagggccccgactgctcagaagaaagtcccctttgtgtgacaagtgacgcactcttgaggtgtgtctgctggagcaggtggtggggatgaggtaaggcagggtgtctgcagttcagtatgtttctcaatctaatgacgaggcagtcattagaaattctccaga

SEQ ID NO: 146032 - DNA, 402 bp, Homo Sapiens
ttttgccgaacccaccctgggcgcgggtgttggtgtttattagtggaggtacaacccaggctgcttgggggaggggagaaggagagcagaggccctgcatctccatcccacaccctacaccgtgggtgaagaggcgaggcagaagccgcccaccaggaatcagaggagctcccagcagcacccactgaggaggacagttgccacagaccctaagcaggagcagctctgccttcaggtgcccagaccaggtgcaggcaggcagcctggcgctcccagataaacaaggcctggcagccctggccacttgcctgcatgtggagcacagctcgcttcactcctgacagcctcattctgaaagccctggaattcctgctgatggcagccttccttgttttcctgttt

SEQ ID NO: 146033 - DNA, 981 bp, Homo Sapiens
gggtaggtgttttgaggcaccaccgtctgtgggcaggcctggaactctggcacctgcagctcctcacgtttccttctttctgtctacctggaatggctggagacttggagagtccaagtaggagacctggggcacttctttgccctggagatcctgcaactctggaacgcgtggctcattctcctctccctgggagagactctggctgggcagctaggtcgtttggaggcattgagaccccgtaatcctccccaatgatgaactctccatagaagccagtctgggcaggatctagaagggaccaatcctcttcagagaagcataaaatcatgtccttgaatggagaaacccgactcgggggtagctggagggtggtcacctgctgtgtgtcccgcacattctcttcctgaagaaggaaagcatcttgcagaactgggtccccgctgagctggcttggtggtctgcttgggagccccaggcactgtgccagggcttatgggctgggcatcctggttctttgcaaggtcgctgtggggctctaccggcagctgctcctgctccctggtccagagggctgtccccatcatcaatcaccacagggtcttcacagctgcttgagccactgccagcgctctcccgggctcccgttccagtgcctccaccgcgggccacagcctgctctccgctctcaggctcctgcgcacgacccagctctggatctcccggggcaggatggccaggaactgctccagcacgcagcagctccagaatctgctccttggtgtgcctctcaggccgcagcagccccgcaaaaggtcccagcaggcgctgcaggggcttcccggggggccgcgccggctcctgatacacgaaaacgcggcaacagaagaccaacagcacccagcgcacgcgacactcaccagcacggcacaggacatcccagcggcccacatacctgacacccccacatccacgagcaaa

SEQ ID NO: 146034 - DNA, 491 bp, Homo Sapiens
ccactttcaaccagatctcaattctccagctattggctttggtttattgatgaatgacattctccactccgctgacagggaataaacataagcaatttagtcccttgaacaaaaattaagtcacaagagcaccctcatgtttaccattttctgcctgactaaaattggtacaagagaagagattatcagcacaactttcatgtaactgctgagaatcccaagtgagggccaacacagcctacccgggctcaagtgagaaaacaagtagcttagcacttctcacgcgctgcccaaattctcccaatctcgattactgcacagagctcaacccccacgtgctaatgtttgggacatgacatgttagtgtctatcttggaaagatgtggataggtcatgcttcctgtagcgttttccaacgtggcactgtaatacgggtcctttgagggttggctcatgatacactgtagacccattccaatgagtacacaaag

SEQ ID NO: 146035 - DNA, 388 bp, Homo Sapiens
tttataaggaattctgataccagtttgtattgcatattttcccaacaatgcatcaagcataaatccagtccagatgtcagtcacgggtacaaacatagctgaaaggttttttcattttaagggcagtagtcctttgaaatagttaatgtaactgttgctgatacattaataacagtacctctagctgtcacatactaatgtggacttctgatcaagactggctcagtaaaggaagttaccaaatgagcctcaatctatttcaagtcatatctagtcccgtacccctcattctccttccttagtatttgaagacaacaggttcagttggcagatattgttcatggacccttgaggttgtttttaaccattcaacctgttttactgaatt

SEQ ID NO: 146036 - DNA, 832 bp, Homo Sapiens
gcccgcatctccgaggcccgcgacgagcggggcctcacgggagctggatgctcggagcagcaaggcggccctgggggccccttccggtcccggggctgacgcctggcggcgtctccgggaacccgcgccctttcaagcgccgctggctcctgtttcacagatggagaccctgaagccccaacgaagcagcctccccagcacctcccagtgactgaaaaagctggcactgggcgcccgtctcactctccacccagctcccaggctgccccacgggaccagcacctttggggagagacgagacctgaacaaacgctggtgctggatccccagggtgggtcagaacagccgttgccctgaaagctggcccggacagatgcgtgcggggcgtgccaccggagctccttccagcttgcgtctggggccaccatgtcccttcctcagggcactggatccatctcttcaagctcagtggtccaggccatggtggcagaatcaccccccagggtgtgacgcctcgtccctgtcaattccacacagctgcacccggaagagctgtggccgggcgccgctctgacctgtgtgcggtcccctgaatgggtctcaggtgtcttcagaatggtgaggccgcctcatttcctcaccacacaaccctcctgaggacgttgcctgcaaatgggcggaattcctaattttctaccattcagttaaacgagggatccttaagccccaaagctgggaaagctgtccgttactttagtgcgcgtgggccgtctcagaacagcagggttccaggagtcagcggacgggggaggggatgcatggccggtccccg

SEQ ID NO: 146037 - DNA, 918 bp, Homo Sapiens
attcaaatctatttgtaaccactggtattcatcagtggcaaaagcagcccaaggcggtccaggttttttcagcctggcttttttgggtttccaactgttctcttgccctgtgtggtcagtccactccagcacagatgatgctgttatttgaggatccgcgatcacaccagactccatccccagtgttccataacatccacttgtcttaaatgtaaaaagacttgtagataagtgtcccaccacagatgtgacgttgttagccaaagaactttcataatagggaatacctttactaattacaacactgatttggccgcccaacgtgtttgacactactcctgcatgcacaccagccatgcacaatggcgaggaatctctatatccatgaggaattgttccagatatctcagcaaaaggaagcagacaaccagctgggcagtacttactgaactcaggttccaaaaaattggatgcagtgtccaaacaagtaattagatcttgtttatctataacagagtatgaggccaaaaatccgcgtccagaaacatggattccactcatgaacagcaatgtgatttcattgccttttgattcaattgaatggttcatttgcaaccccagaccacagtatttgcctatttcagttctgctgactccaattccattataaattctcaagtaattaaagtgacaagaatcagaatcttcaatgtcaaagtcaccaaatttgatgcgaactctctctcccatctttacacggatctcccattcacaaacagtgctgttgggataggtctgtgggtagtttatggatgtaagggttccactctcagggcctagtacagtgtgtccacatccatcaccttgctgggctccagcgtcctcgagcagcaggagcaggacaagtaagagcaggag

SEQ ID NO: 146038 - DNA, 476 bp, Homo Sapiens
  misc_feature (292)..(359): n is a, c, g, or t
tttacatccatatctctgtgaccaaaaccagtttttggcgcatagtacccagcaaatatttgctgaatgaataatttctatctctgtcagtctttagcgatcatttgtttccactttctgtgtggctgcctctagcatgctgactccattcctttctaatatgttacttctgatactatgaaatgggtcaaaagataatggtgttaaaaccttgctacagaagacacatatagtcactatgttaatgactggagaactctacagtaactagaatgtatgaacctgaataaannnnnnnnnnnnnnnnnnnnnnnnnnnnnnnnnnnnnnnnnnnnnnnnnnnnnnnnnnnnnnnnnnnnattgtggtagaaacatttaacatgagctctaatctcttagcaaatttttaagtgtaaaacacagcgctgttaaatataggtatagtgttgtgcagtagatctctagaacttactcat

SEQ ID NO: 146039 - DNA, 536 bp, Homo Sapiens
tttttctttgttcctgtcatttattgatttatataacatgttatttgttgagaaccatggtgcactgggatgtgtggtactaatcagggatacatggtgacctaaactagacctggaacactcttgaggagcttacaatctagtataaatcctaaacactgaataaaatagccaggtaaataaatgccaaattaatcattcagtaagtgttataaaggaaaggtacattaaggcctaacatgattcaatggaggtggcgcagggaactctgtctcactcttcataccataaaaggcttcttgagaaaggaatgcttgagttgagacccaaatgaatcacctgcaggtgaatcttagtctctggatctgctttcagggtagcactgtagtcagatgaatgggaatccattctctcagaaatgcaagaagggaatgtggtttggcaaagttcattagatcaattttggagttgagtttgaggtgcccccagcaattgatgagttcaaggctatcctgtcacatttcgtgatgtggcct

SEQ ID NO: 146040 - DNA, 787 bp, Homo Sapiens
  misc_feature (290)..(365): n is a, c, g, or t
ctccgttgagactttattcactctgggcagtttgttgaagattaggtggtcagctcacaatgaatcataagctgcttttgtcccttgctgtctatgcttagaagctaaaaggttaagcagcgatgtcagcgctatcagggagctgtggagactggaattgaagttcagaacctttcatgggagacagctcaggtaaacatccaagcaaagtgataaaggaagaaaacaatacgaaactcactacccactgtgggctgctttcaagctttaacttcagatcctcctgctannnnnnnnnnnnnnnnnnnnnnnnnnnnnnnnnnnnnnnnnnnnnnnnnnnnnnnnnnnnnnnnnnnnnnnnnnnnagtggtgaacagtgcattagatagattctagttggcttatttcatcttagcaatcatccgaaaacttagatattttatctttaaaattacaaaccaatatggactactacaaacatctattagagcgtcgctacctttaaatatgattccctagattgggtgtgatacttctgtattttagaaagttcccctgccccaataaatctaaaatgtaaggttaaaaaccctcatttcttctttatttgcctagttcagccaatttgactctcagttggattttgagaatctcagtgatgtttcagtttggaggtcagttcagaatagctttttattctaattttaatacctctattatcctgataaaagtgttgttgatgaaataattttgaatatctcaataaaaatctcaagtgcctaccaaa

SEQ ID NO: 146041 - DNA, 283 bp, Homo Sapiens
  misc_feature (203)..(203): n is a, c, g, or t
ccggggtccgggacaccggaggggagtcgggtcccctccccggagagctccgggagtctgcggagcggccccaggagcagagaagggggaagtcaggacttacctgtcattactttctacgccatcttggatccacttgtcaacgtccccacaaagcattatcggagccccgcgtctgcattgaatcaacccgaggtttgccnttgccgcgccggccggcgcggagctgctcgcggatttatttgtgcgcgtggatgtgagcgtttctgctccctgcggcccc

SEQ ID NO: 146042 - DNA, 502 bp, Homo Sapiens
ttttgtctaattgctctgtctagaacttccaacgttacgatgaacagaagtcgagagagtgagcattattgtcttgttcctgatctcagaagaaaagcttttaacttttcactgttgagaatgttagctgtgggtttgtcatatctggtctttattgtgttggggtacagtccttctatattttgttgagtttttttaaatcatgaaagggtgctgaattctgttaaatgcttttcctgcatctattgagattataaagattttgtccttcatcttgttgatgtggtgtatcatgtttatggatttgtgtatgttgaaacttcctgcatcccagggataaatcccactcgatcatggtgaatgcttttttaaatttgtggttgaatttcatttgctagtattttgatgaggatttttacatccatgtttatcagggatattggtccataattgccttttcttatagtgtctttgtctggcgttggtatcagggtaatgctgg

SEQ ID NO: 146043 - DNA, 578 bp, Homo Sapiens
  misc_feature (448)..(525): n is a, c, g, or t
cttgccgttttttgaaggcttatacaaaatagtttcctgcaaactcaagtggctgggaagcccagctgaaggttacttctaccccaaggccatgtcagcagaaagtggccaacaggacttgggcctgaaaaagctcagactgaattttaggagtgacatctgaaactgctggtttctcacaaggaataaaagctgtctgggaagctggagaggcagtgtgctgtctggagcagggacttgcaaatgggaacagtgaagagagacagcatctccttcctctgaagattctgttcagaatggataaaggttcagcatcctccctggatggggcagcttagcagacccagaggaaagcactgggaggaatgagaaagtagcgactagacaaaaatgaaaactctttaagaagcattgctgaagttacaggggaaaaagattaagacaactnnnnnnnnnnnnnnnnnnnnnnnnnnnnnnnnnnnnnnnnnnnnnnnnnnnnnnnnnnnnnnnnnnnnnnnnnnnnnncatgcctatgttaatcactacacccttcccacaataaataatcaaataagcta

SEQ ID NO: 146044 - DNA, 457 bp, Homo Sapiens
tttttaagtaagttatggtacatccaagccatgtaattttatggattctttgcttaaaaaaattacactttaaaagaataattcaaaacaagcaacatgattatgagataacagttttgaaatgatgtacaatgtttaatgaagtatcatcctaattttgtaataaaaaattaaaaagtagttctcaacattggttgtaattttcactcatatcctacttttctaaagttctttcttgttttaaacataccagacaacaaaaggggtggagtttctccttgttctatgtgcaataaaaagaactggcttttgtttcttttcctcttaagtgcgatcctgggtttgaaataaaattccctttataatattcaagctggccaagaaaggaaggaaggtcaggtgaagaatggaagagaaaggagatgtccagaaactgaacatttccatgagagaggag

SEQ ID NO: 146045 - DNA, 694 bp, Homo Sapiens
agcattttcactatcacagccagtaatctgcagactcaacctcaagcctactttgtactttggtataaactgcatggataccaatcccttttcacaggttttcatctcctggtctcccataggatccaggatgagtatcctcccatttgaccagttccatcccagtatggagcagatatcccttgtaaagaacacagtctccaccagcccacctgcttttatggtcaacagccctacctgaatttccaacattgccttttgacccaagaaacacctatcacctgaaatctagggttccagacaggcatcaacaggaaaccactctcttcaatgccctgtcttttctggcccacctaccactgcttctgcagtcacctccactatagtaagcagaccctcttcagacttggcatccaagcctgccttttactctgatgaaatcaacatggataccatgcccatttccccatctgttatcttcctgtctctccctgcaatgttaacagctgtttccctttgaagaacctggcagcccccagaaatccttcctacttaacctctactgcagccctggaacccaatgacagcaccactcaggcagcttttgggaatttgactcccccatgtccacctttggcatctgctatggtttgaatgtgtcaaccaaatttcgtgtattaaaaactcaatcccc

SEQ ID NO: 146046 - DNA, 544 bp, Homo Sapiens
ctctttttctcctttgggttcatctcctgtttcttgtctaacaccaggatgaccccagttttgacttctttccatttggccttccaccattgtccctggtaaggtgaagtgaggtctttccagttggaaggcattagctacaggtcgcggcggggggagaggaggtctgctgctcatgagtggctcttgtgaattattttctggatcagcaccaggaatgaacacatacaagtcatcatactggtcttcagaactctcactgccaacctctagtgggctgtgtttggtctccatgcctgatccattctgttttccttccccttccatttcatttgcctcagctccatctgcactctgcccgtatgtcttcctgctttcatgatgaaatgctgggttctgtgtggaaggaatatatgtggaaaatgaggcaatatcctcttcataatcattttcttgctcattatttatgtcaatttcttggattgaaaagtcttcgaagattttcttgagttctttgtgaccatgcctttcagcaatatgtgtg

SEQ ID NO: 146047 - DNA, 342 bp, Homo Sapiens
ttttgggtttaaaaatagctttatttagcataccaaaaacacagaaacataagaaagaccctacctagtataaacataaaaatagttaaataccataatttaatgtaaaccaagcatcttaaaatgagaaatattataataaaatacatactatttacacagaaccaagttaaagctacctccacagttattggatcacatcatcaatcttgaagtcatcattaaaaatgaagcaaacacaacatatctatctgtactggtcaataggaaaagaagaaatcattacatttactttaaggaagtataattttttgtgacatttagagcaaggaggcagaaagt

SEQ ID NO: 146048 - DNA, 480 bp, Homo Sapiens
tttttcaaaactacaatgctttattattaattataatcagtatgttgtacaatagatctcttgaacttattcctcctacctaaaattccgtatccttgtttactggttttcaatttttgtaaccaacctatagtcagagtacataacacattcagtcacagaatgaaatgtagatgatataaggtatgttgatgtaaaaaaactgatggctgagggagggtgagaaatgagaaggaagagaaattgagtgggagaaggctgagaagtaccaaattccttgactgacagagtggggagtcactttaggcctaaagttgatgaatcaagaaaacaaatgcaattacatcattgaaagctgttaatgtatatcaaacagaaattgaatacaaaacttttttaaaaactgggaagagtagggggtattgagttaaattcttcatctcttataaagggaaacaatagctcaaaattgaaacaaaa

SEQ ID NO: 146049 - DNA, 392 bp, Homo Sapiens
gtaaacctggagggttgatatattctttccatgcagttattagaacttagttttgttccaacagttaaacttgcaatgaaaagaaaatgtgccatttttttcactcagaattattcatagctgtatatttgaaactgctaattacacacgtgtgatgtatgttggttttttagtgcaatttcttctgtagctattctttgaccaaactgtgggtattgttaatattaatttatatttgtctcaatttgtatgtatgtgtagtgtgtttgtgagtatgtgtggtttataatctgacaaagtcatgaagctcagtttggctgtaatttaattccccttcccttatttttatttatttttgtactgtgctgattcaataaaatgcactgaccatc

SEQ ID NO: 146050 - DNA, 528 bp, Homo Sapiens
tttttcaagctttaccactggacaattttaatgcagattaaagcataaagtagctctctgctttttccaagatccagactggtcccctagaaagccttccccgatgcccccagataaagcgagtcatcccctctactcagtcccaccccacagaatccagcccagtataataaggtcacagcctacatcgcctttattcatgtgtctctggaactcagcatgcagtaggtattcattaagtattgattttatgagattcaaggtttctatttgtatataagagatttagttggctaactaacagtttcaatggttgattacaatcctaaatgatccatgtcactgggaaatcatagacacatctttaaagaagcttcctcttttatttccagctttgttgagatataattgacaaataaaaattgtatatacttaagttgtacacatgatgttttgatatatgaatacattgtgaaatgattatcataatcaagctaattagcatatccatcacctcacattattacc

SEQ ID NO: 146051 - DNA, 398 bp, Homo Sapiens
ttttaaccaccaagtcttaccatttatttctttatggggttaaacaagagcagagaggcctctgccccacaatgcaacaaaacagaaagcagtacatatacagagactctcaccgaaacacagaggcagggtaagagggagggcagagacaactgaatcatagctgggtaagggaggaagggatgggggactactaggaaaccagtttggagactcagtcataggaactagtgcaagaaagtcctactcatgaagcacagtgtagaaaatggcataagaaagctgcccggctctgctgtctgtgatggagggcaggggcagccggagaggtggtggaagattagggtggtggggtggatgggggcagtcaaatgactttgaggtggagtgaggtgccc

SEQ ID NO: 146052 - DNA, 523 bp, Homo Sapiens
ttttccaaacaaaaaacctaatttatttttcaagggccatgggaggggctttgggatacgatttctgggcccgaggactcaaaaagggggccgaggggtcactgtcagggggtctgcgtgacccacggggtacagcagagccagatgctcggcaccctgcaccggcagtgggcgtgaactgtagtggaggacgagctcgggcacgctggggaagggcccgctgtgttggcccagcaccacctggttctcacgggtccgcgcgaacttcagatgcaggaagccctggctgctcctgagagacaaggagcagtcctgggggttggtctcactgagccgcactaggtagctgccttccttgcagagggacaggaggctctctgcatccgccctgttcagggggccatgaaaccacggctgtttctccaggggcagggctgggtccacacgctccgcaggctgggggctcctgggcggaggtctccggagctccttggctgagcctggagtcctctcccactctccc

SEQ ID NO: 146053 - DNA, 837 bp, Homo Sapiens
gggtcgcgcgcaggggggctgcgatcggccgaggttatctagagtcaccaaagccgcagggccccgcaaaatgatgatgctgtgtgacatctcggagtgaggatgatgagacaaaagaaaaacaagttcgagacaagaggagaaaaacccttgttataattgagaaaacctacagcttactccttgatgtggaggactatgaaagacgttatctcctaagtctggaagaagagcgacctgccctaatggatgacagaaagcacaaaatttgtagcatgtatgacaacttaagggggaaattgcctggacaagagaggcctagtgatgaccactttgtacagatcatgtgtatccgaaaagggaagagaatggttgcccgtattcttcctttcctctccacagagcaagcagctgacattttcatgacaacagccagggacctccctttccttatgaagaaggatgcacaagatgaggtgctgccatgcttactgagtcccttctctctcctcctctatcatcttccaacagtgactatcaccagccttttgcaacagctaatgaacctacctcaaagtgcagctacaccagctccctccaatcctcacttcactgctgtgctccagaacaaattctgactggattccactgaatccctagatcaatttgagaaatgacttctaaacattgggtcttctcatctgtaattatggaagatgtttcaatttattaaggccttccctagcttctctcaacaaaattgtgtaatttttaggtagtagtcttgcatgtgttttgttaaatatattcctaagtattttatgttctttatcaatg

SEQ ID NO: 146054 - DNA, 561 bp, Homo Sapiens
gcgcccgcctcatcagctggagcggctcccaaaagaccctgcgcagcccccgcctggacctgactggcagcagcgggcacagcctccaaccccagccccgagatgagctctaggtccaggtgatgactgcaaagcagtgtccaggagcaggccactactgcccagagagcagaggaggaggttgttggcagggactgcagatcctgtcagacctggccaccaccttgggcatggccactctgccctctggacctgtctttcatcgggagaaaccactcagagatggatcccattccctaaaggtctcacagcaaaggagcaggactcccaggcccctgtaccctgcctggcctgattcagggccttgtggcccccagcttctgtttcaagctgggcagaccccaggatcccttccctccctaaggactcagctgaggggcccctctgcccccttctacctccacctcagcaccctcccccagcttgatgtttggtctccccagcaccctcctccctggccggtgcaaagtacagggaggtaaagcaggacccttgcagacc

SEQ ID NO: 146055 - DNA, 743 bp, Homo Sapiens
tttaaaataatgcttttatttaaaataccctttttacaaatattaaaattttattgaattaatatgctaaaatcacatgaacacttggcaccatttgaaatgtaatcctatccatggaatagaatgcaaacattaactaaatgtaaaagggggacagatttaggactttaagaacatgttttaaaataaaagtttttaataaatttcagtactccttttgttttttgaggtttccactttataatttttaaaatactaagaactgccaaagagaagtataaaaacagggatgtattttatgtgctggatattctccactggcctctccagatgtccttcccacccttcttcagcctgctccacgctccaggaggctgacctttatggactacattaatgggctcccttgctctctggctttcagtggctttagtttgtgggaggaactggcagaagactgggcagcaggaggataaggaggtcagagtatttatttccttggttccttttctggtaggcagcaggttggcagtaactgggtttctctaatgatgccatagctcctatcatctctcatggttataacagtttctggttttggtaactcttcctcttcttggctcttaggtttttgggtggtacagtttgctgctttataaatccctggggtgttttaacatccctgcatgcctcccttaacctagccgtctttgtccttgcttccttggttaaattcttctgaa

SEQ ID NO: 146056 - DNA, 1338 bp, Homo Sapiens
  misc_feature (1225)..(1259): n is a, c, g, or t
tttaaatttttttaatgactttaatgattcttatttaagaaaaagcccttaaataaatgctaccaaggcagtaatatttgaccatatgaaccagaccaaataccctttaattttagtatattaacctctgctgtaaatgctcttttaacattgccacatgtacaaatttgtctagaacttcacgacacaaaagtgtgcaaatatgagtctaagattgtgctgaaatagggaaaggctaacactgatgtgcaaagtaaaaaagaaagataaccgcttctgcaacaggtaataaaacaaggaaaaaacgagttaggtcctgcatgtgtctccacttcattgcttccatgtttgaaaaagggagtctgttcttttgctaggccatgaggctggaatccacttggcatactgtgttgagaggtctaagttcagtggtgctctcagcagcagccgggaggtgtgattctgaggctgggtgacctgtgctttcagagaagcaggaaagggccctctaggtgtgctgcagtctctcagaaagagttcatcaaagtagcgagcaacgaaagaaactggtcttctttgatcggttttctgttattttcactggtccacctgctcctgctgaattgctgtcattcatttttctgttgagttttgtcattatatctcgtgcaagtgtaaaaaatgcctcttctacatttgcactggattttgcgcttgtctccaagaatttaatcccatagtcaattgctagcttctcccctctttcttttgacacttgtcttttgtcattcatatcacatttgttacccaggatcattctttcgacatcggaagaggcatgctcttcaatgtttctgatccaatttttaatattgtcaaaggatttttcatttgtgatgtcatagaccagcataatgcccatggctcctctgtagtacgctgtcgtgattgttcggaatctttcctgacccgctgtgtcccatatctgaagcttaattttctttccatctagttctatcgttctaattttaaaatcaattccgatggtggagatgaaggtggtgttgaaggcgtcctctgagaagcggaacaggaggcaggtcttgcctacccccgagtcgccgatcagcaggagcttgaagagataatcgtacgtcttcgccatcttctcgctcccggccgtaatggccgaattcccgggcatatgtccggtaccgtcgactgnnnnnnnnnnnnnnnnnnnnnnnnnnnnnnnnnnncggccgcttcctcgctcaaatactccgctgcgctcgtcgttcggcataacggctggcccataggttgtcagtttgtccg

SEQ ID NO: 146057 - DNA, 696 bp, Homo Sapiens
gtttgctttagtttggctctagtattgttcccagtttctttttctctccccgtcttcctcagtatttgttccactttggagaaatataagctgataaattttttgatcatctgaacacacttcatccttgcaattatacacatacatattatatgatcttttgtcgtttaatattctactaagaaaggtaatattagaaaatgtgcaaaagaggaaacattttttccattcagaaaagatttacaagaaatactaaggtacaaaacacaatttcaagtgaaaaaataaacagaagttttcctattttaagaccttctcaaatacatctactttagatgttttgcactagtgtaaacacattttaacacttaaatttctgatgtactcaggtgaaagagaatcagtgtcataattaaagtttgttttcattaaagcgattttaatgtaaacagttcttgcctttttaaaaaattacttacattgcagttctgtgatacaaaaaaatcagaaacatgtatttgacaatgaagaaatgattaagtcacttatgatacatccaataagatcatcatgaaagtcattaaaagtcatgattttgaagaatactttaaaacttaggaaaggtctatgatatataaagtgaaaagtgtacaaacctacaaaacataattcgaatgttgtaaaactatgtatata

SEQ ID NO: 146058 - DNA, 999 bp, Homo Sapiens
  misc_feature (123)..(123): n is a, c, g, or t
  misc_feature (193)..(193): n is a, c, g, or t
  misc_feature (676)..(797): n is a, c, g, or t
cgtggaatatggtcaatgagagtcagaaaagtacaggcaccagtacaagcagcagataacagagttgacgggccaaaggataaaataggcttatttaaataggatgctacagaacacatccanctcctaattgtagctgctttacactgggtgccattgtaccatatgcatcagccacccttcaggcaccccnatggtgaaagaaaaggattcagaatagaagccaagcaggggactgttgttaaccccgaatatccattatgcatagaaacagctcacatatcccagggactcaaacagggcttcaaaatggttgtgaagggtcccaaatgacatctaggcctcagtttcctctctgtagcatgaagaaattgtgattcttaactcttctgggtcacagcccccttggaaaacttgctagcgatggatcatcattcccctaaaacgcacattcccacaaattcccatcattcccccaaaccgcacattcccacaatttcaggaagtttggggatccccaactccaatccaaggttcccaggttcaaaacccaaggattggggaactgctaagttttcttacaactcaaaaaaaattataaacaataaccatcctttacgtacacccacgctttatagtttacaaagcgatttcaaccccacacacattgataggnnnnnnnnnnnnnnnnnnnnnnnnnnnnnnnnnnnnnnnnnnnnnnnnnnnnnnnnnnnnnnnnnnnnnnnnnnnnnnnnnnnnnnnnnnnnnnnnnnnnnnnnnnnnnnnnnnnnnnnnnnccggggctgccgccagagctcccgcccctcactaaggcggcataaggaggaaaaggcaaagtagaaatcccacaaccaaccatcctccggccccctcctgcccccccaactgggtccttgcaggccccgaagggtggcgccaggcctccaagccggccccggccacccccgcctccccggccgctccaaatcccgcggccgc

SEQ ID NO: 146059 - DNA, 323 bp, Homo Sapiens
aatggaaaagtcttcggtccagtgttacaccttatagtgtaattcagtccctaagcacagaatgaatgtctggcctgcatatggtagttacagtgtaacctctggctgcagaccacacaggacaaccctaacagcctagtcttgtatggtgtaaatatcaagagtacagcttcaatttcatttgctttatcttagcaacaatgccaactcaggagagcagacggccgatttcagtgaagtctggtagtcaacagatgttatttcagtctcagtgcatctcctctggctttctttgactgaaggtgtttataggaaggaagtta

SEQ ID NO: 146060 - DNA, 556 bp, Homo Sapiens
tttttttccacctgtttcagttatttattgctatataaccacctcaaaagtttatggcttaaaacaaaaaacaattagcttattatttggggggcttggcaatttgggcttggcttgcctgagtggttcttctgctgatcatattcatgtgacagctgtcagctgttggcctggtggaggctggatggttcaagatggtctccctgaaatttctggccgttgttgctcactggacctctctctccaagtgatctttaatgcgcaagcaagttgctcttagccttcagtcatggtggtaactcgaaaagcctcgttccgaaaacaggtctgtcctttttctgtttgcagattttattccaccactcgattatcccttccctttttgatggccatttcactgcagctggggtctatacagctgtcgcagcctcctcgccgcgcacaccgccgccttgtcctggcatcaaacacacacgcacaggtgcatacacaggcccgagctacggccctgcacaccctgtctgcgtcccgggagctcggggcttcctcaccgaga

SEQ ID NO: 146061 - DNA, 440 bp, Homo Sapiens
tttaaatgctcaatatttatgaagtgaacgaccacactgtgggatgaaagagggccgcctctgaacatcagatcatagccccggtctgcgtgactttggagctgacacttaccctgagttccaggagtttcagttataaatggagcttcactgccctttctcagggtccccgagggtgcccccttcccttggctcctttactgtgacgggggaaagaggggcccctggggtttgggggtgggcagagagggaatggggagaggggcggggcagcccacctcctccgtctctgtgacaatagccacagccccacggaacgatctggccatgtatttgatggacagttccttggggaagtctgccaggtagatgaagttttccttgttagagctctgcaggaggaagttgccccagatgaagatcagattgttgtacgggtt

SEQ ID NO: 146062 - DNA, 1529 bp, Homo Sapiens
taccattctttttcacttttagtacagtatgcaataaattacatgagatattcaacattttattataaaacaggctttctgttagatgattttgctcaactttaggtgttctgagcatgtttaaggtaggctaggctaagccatgatgtttagtaggttaggggtattaagtgcattttcaaattaccatattttcaacttacaatagtttcaacgggaggtaaccccatcgtaagtggaggaacatctagtgcctggcacagagccggttctcaataaatataactcttctccatcttcttcaaacctcaggccaggtttcagtgacctcctctcactttctaagattatttttgcttgctggtgggtttactgtcatttttaaccacatctaacctaccttaaaaaagtgtatggatgggggtgccaggtacaaagacttagcataaagaaaacgaccatttactttgaaacataaacaaaggccaattaataatttatgagtctgttccttgtccctcgagtttttagcaggcatggaatcattccacaggtcattatttcagtttggtctctgttcctaaggggtgaaggttttctgagggctgtggatcccaaactcacctggctcagaggctcaaaacagcctttctttgtccatcaaccccgatttagacagcatcctgggccctgaaaactttctgtgctggcttcaagtgaaaatagttcactgggtcaaaagtaggctggtccaagacgcaggacggtcagtaaacgttggctgtgttcagaaaactgcggcttggctgtttcttacattgatttatggtttgtttccatgaaaccgaaaatgattggtccacctggcagctggctggctggctggcaactggaggcctttctgtcctggctgagggccctggccccttggtggcctttgggaagcagcatctcatcgggccgttttttcgttctggcgggcggccggcttggcccgcggggtcgggctctccgcgcagtgcagagacgtctccaccctcagggacgaggctctgacgtggcgggaggtcgtttccgtgcgctgcgaggaggattccacgtgccgggaggacgcctcgaggatgcgagggagccgcttccccgagggggagagggagggcccctcgctgcggcgctgggaggtctccacccgccgggacgacgtctccacgcggtgggacgaggtctccacgcggaccgtggacgtctctgtgtagcgggtggtccccacccggggcgaagactgcttggcccctcgggctgaggccattctgccggcgtgagggggccagggaggcctcggggcaccctacagcccaatggtcaccgcaggcagaagagaggaaaactacggtactgccatagccgggagcgccacaacacgatgacgtggaagcaccatggtccttcgaaggctaaaacactggactcctgcccctcaggcgctcccacggcccgggccccgcatcccgggaattccggaccggtcc

SEQ ID NO: 146063 - DNA, 394 bp, Homo Sapiens
ttttgagtataaaatatacacacatgaattactgatttattttttcacaagacaacgtatattcatgccccagagcttctttctcctttcagatagaaatcccttctgggtgattcctgagtattatgtggatcactgtggattttggctgatttgaaattggtgagatgttccttgggctggttggtctgaggacccgaggtcataggtggatctcctcatggagtgagggcgaggacaagggaactggtctcctgaaggagtcctcctgtcccagctcttcggcaccaaatgtcatgtgtgtccgtgtgaagagacgaccaaacaggctttgtgtgagcaataaagctttttaatcacctgggtgcaggcagccggagtccaaaaagagtgt

SEQ ID NO: 146064 - DNA, 1137 bp, Homo Sapiens
  misc_feature (61)..(82): n is a, c, g, or t
  misc_feature (224)..(235): n is a, c, g, or t
gtgccaagctaaaattaaccctcaactaaagggaataagcttgcggccgcatacgcggtcnnnnnnnnnnnnnnnnnnnnnnatgtgtgccaatgccatttttatcatttacggtgaattgtaaatacattttcagccacaaaagaaaaaaggaagaaacataatgaacacttttgaacaaacgttgccaggggcggatactttagacactgcttcttccttcnnnnnnnnnnnnccttccccaggtagggatgaagtctccttatgttgcccacgctggtcttgaactcctgcatcagccccccaaagtggtgggattacaggcgtgaggcaccaaccccagtctagacattaattattcgtatttcagtataacaaagctgaattttgccaagtgaacataaggcacaaagtatccaaaaagtgcaagtggtattccaactgcccacactgcataagctgtcaccttgaagatggcaaaattgaaaattttttttggaggactgaactttttcctggaaaagagggaggatccgctacctccactctcgtttatctttggtactggtagcaagaggtcggtaagtaaagccagccagaaagagaacaaacatgaagatgcagagcaccctcaatgtgtgaaagaggcccacgctgtcaatcagaacccttaagagcaaaggcagcaggattgtgaagacactgctgccagcagtgacaatgccattcaccagtccaaggcgcttctttgaatagtgtcccaaaatgaccaatgaaggctggtatgcaaaggagcagccgcaggcaaatatgattccataggtaaggtacagaggctcgatggaacttacaaaagaactggacatgagcccaacaaatccaacagcagcacccacgacagctgttttccgacaaccaaataggtctgtgaagacgctgactattgggcagcaaaagaaaatcatccccatggagagagaacctacccatgctgtcttaaagaccatcttgtcatcgtctttggagccgaaggtttccagcatggacacgaagagcaccccgcaagcgcggcacgaggcctcgtgccgaattcgccacccaggcctcgctaccttagaaccgttatgagttactgcc

SEQ ID NO: 146065 - DNA, 587 bp, Homo Sapiens
tttacactttaaataggtactttattatacatcaattatacctcaaaaaatataaataaaagtctaaggaacagacaatagaagtttacaaaagagaaaggttgatgtaggtgtaattattacaaaagacttcacagaggacccagcaacagaatcaggctgtgataaaatggcagaagaaatatagggaaggaattaaagtggagtacagtagactaccaaggccaagaagtaggaattcgtgtgatgtgtagaaggaaagaacattgagcaaagaatgccttttgaagaaaaccagcttgcaagggtaattttttcctgaaaactcccaagagacaaattcctttaaaataaagccatgcagcagaggtgactctgcctccgatgaagcatgtgtatatttggggtgtcactgcataatcccagcactaaagacccacaaagccagatggagacttcagagatccaaactctgcctcagtacatccagcctggtacactcaagggagcaaccaacttcattctcatttagatgtccttgacctccaattcgttctcctcccaggagccagaaccatttctatgca

SEQ ID NO: 146066 - DNA, 393 bp, Homo Sapiens
gaacttttatttgcattttcttttggctgaatttgtttgtctcttaagtttatgtttcttctggggtatctttttcttccgtgcatcctccttttctgcttttggaacaaggtgtttcttttcactaagcatcatctggatgtggcaggggagtttgtggatgggttcatctgcccatgagttctgtaagtcaggtggtacattatgggtgccttttccctggatgtgctcaataaccagggaatctacatctatacccttaagttcagcataactctgcacttgtaagcaaatttcagtaccttttcggggccactgatggtgagtccagccccaatgtctgtcttgcgtacagcgaccaactccactttctaagactgaaatggtacacat

SEQ ID NO: 146067 - DNA, 413 bp, Homo Sapiens
ctattatataccagatcctttacatatgcccaagttcacagagctagtcagggtcaaagcaaagactcagcttggttctcctggtgattttaaggtggtgcaatttccatgacaaaccagcctaccaggtgttgtttgtccacctgagaaaacttctatttgagtattggcaccaaaattagagttcttattcttcaaaaagttgaaaaacagctgaggtcaatctcccaaaaggcaacaacgtttccattccaattcataaagtcgcgaagcagtaagatctgaaggacactgttttatttttatcggagatgaagcttgtttttatttacaatttccctggacgggtttaagccctgagaaggatgaattaactctgcctttgtatattaaacattatcaaacatcaaaaa

SEQ ID NO: 146068 - DNA, 581 bp, Homo Sapiens
  misc_feature (387)..(396): n is a, c, g, or t
ttttcgaattttggtcatgccatttatttgctgttaattatcaggaagtcacataaatcttctagggctgtttcttcaacagttaaatgagtgagatcagtactgctaattccacaaccctgagtgtatgtctatcacctgaacagcttttataaaaaatacagattcctcactcctacagaatcagaatcctcaaggacgagagaggggcacttcgaatcaacatttttaaaggtctccaggtcactgtgaaagatagccagatttggaaaccactgggctatatcagacactggcaaactatggccatgggtcaaatgtagcctgccacctgtttttgtatgacccatgagctaagaatggtttttacatttttttaatggctgnnnnnnnnnntaagagaatatttgatgacatgaaaattatatgaaatataaatttcagtttccataaataaaattctgttgaaacacagccaccctcatttgtttacatattgtcagtggctgctttccccctacaaaggcagagctgagtagctgcagcagagggcacatggcccacaaagcctaaaatatttt

SEQ ID NO: 146069 - DNA, 502 bp, Homo Sapiens
ccctgagttcatggccatgtttattttgagtaaaacatgagggaataaaccaaggagcaagggggcaaagccggaataaattatgaaataattttctaaaagatggtcagcagaatccccgcagctgtgaaacaaaaagctctgtcatctacaacagtgcttcctcgaacgctggacccttgagacatgtgacgggacctgagggcagccaccgggctggcggggacctctccgaacgctgatctcaaagagggtggaaagaccttgaggcggggcaatccgtgaggttgctttcttgctgaagatgtgatttggacattttacgtgaaagcagtgcctggtgctggcagtgacacccgggtggccacagagacgtgagggatgacaggcggcggtggggatgtagtggctgtaactatgggaggtgccagggaggtgtgaccgttctttctccttcacagtgaccaagtctcctcgtaaggaaactctgtccgcagatgtg

SEQ ID NO: 146070 - DNA, 333 bp, Homo Sapiens
ttttttcatcagtatgctgatttatttccttctaagattttgctctgcaaatacactgagaatgaaattgtgatcattcataaagttttgtcctctgctttgttcactcaatggtagttcatgaactttctctgtattattaaatgccggtttcttctaaaaacctgtaagagctgcatgatattccatatggatatggtatggtaagataagcttgcaccaaagtataattaaatgcactgctgcctttactgaggaactcttcctacaatcagtgagtcaatggaactaaagatgattagtgatatagttgatttgccttctggacaagct

SEQ ID NO: 146071 - DNA, 586 bp, Homo Sapiens
tttattatttagaattccagtgtaattttccagctgagatgcagcctcaggtgtggacagagtggaaaatgaggtgatttgtgtccagcccgtcttcagggaggggagacctgctactggctcctcattgcccggcagaggtgtcctcccccaaaagatgctggaatgtggctccacgggacgatgaatccgtgtgaccctaggctcgtcactgtcacagtgcacatttcatggcctcaaacgggtcttccttgtgtgtaaacttcagagagaaagtgccttcatggggtgaacacagaagtgccaccccaggaagcctctgctgcccagcagcaggaaggggggtcgagtctgaggccccaaggaaggaggaactgagctctgctgtagggagccccgtccagggatgagcaaggcgggaggggaaggccgggaagcggccagggaactctctgaaggccgccttcactctggagcctggccgaggctcagctggcttgaccacgctgcgatatgcatctccctccgcccagccctgattcctctcctttcctcacacagccgttgaccctaaacagatctcacc

SEQ ID NO: 146072 - DNA, 540 bp, Homo Sapiens
  misc_feature (523)..(523): n is a, c, g, or t
ttttttttcatttgtaaaatgtttattttcttaggtgtgtttacaggctttataaaccaccctgatatctggttcattttaattaaccaccctgatatctggttcattttaattattcaaaccgaagaatatctgcaaaagtgacaggggaaagatgtatattaatatatataatttcccaaactataaacctttaaggccgtttgagaaagctgtagagctgaggcacgaagtaatccttgtaatgcccgtcaatgaatccttttccactgttgtgcacaaaccagcaggtaacgtccgttccaaacactagatccgttctgtagtctttctgtaagcccctggtgatgatcagcttctgccccttcacttccatgctggcctctggcttctcagggtcctttcctggtctctcattgaagatgtgtatctttggttcctgcatgaactggcctattagtccgtgggctttaggtgagaacttgtttgtcggggggtatgtagattcccaaaagtcaacatngacgggatgcttcttcc

SEQ ID NO: 146073 - DNA, 596 bp, Homo Sapiens
  misc_feature (201)..(201): n is a, c, g, or t
ttttttcaggacaagtgaccacaggggcctttttattctaccctgcaggaccctattccagggcgacaactttcagagagctcagggcatgctcgagctgcctagggggcaggctgcaggagggaacttgactggactctgagatgctgggatcccgcttaatgactctgacagtctgcgcaggggccctggccagggganagaggaacagggacatgtgagactaggcaggaaggcaagggacaaaaccacagcacccttgcatggccacacgaggagcctggagccagcactgggagggatgggggcaaactgcccagaggacagtgcttgctggagaaagggccaggtggggctggggacaaggtcagcaagatcttccccagctgtgccctggcattgctgcttagcctggcaaaccctggtcctagaggccctcgggagttccatttgtgctggggctggttagacagaggggtgactcaggaagctgtgcatgtgggagagaagaggggtggcctggggtcaggcagaaagggaggctggtggccaggctgggaccctgggtgcagagacgtgattagttgatggctctg

SEQ ID NO: 146074 - DNA, 403 bp, Homo Sapiens
gaaatgaaaatcttttataaagcaataccagaagcatgaaaaaatccggttactacgaagactgaaggaatactatagtcacctggttatagtacacatgctaaatagcacagacacgcatcacttgaagtataatcttaatcttatacatgcgggaatctcccacgagtttgcaaagagatttgaaaaagcactttttacattcagtttatgtctgagtaagtaagccttgttttaagacacgagttttatgaatacagttattatttgagttctccattcacttagatttctttgggaaatacaggtttgaatatactttttataagtaacaaaaatgtaagtctcgataacaaaactgtatataatattatttagtatgacttatggcttccttgaatct

SEQ ID NO: 146075 - DNA, 690 bp, Homo Sapiens
cttaacctgcatagcctataaactgttttaagaggtacatctccgttcatggatgcattaacagccaatgggacaaccaacatacagacatctgttacaggagtgactgccagcaaaaggaaatttattgacgacagaagagaccagccttttgacaagcgattgcgtttcagcgtgaggcaaacagaaagtgcctacagatacagagatattgtggtcaggaagcaggatggcttcacccacatcttgttatccacaaagtcctcagagaataactcactaaatccagaggtaatgagagaagtccagagtgctctgagcacggccgctgccgatgacagcaagctggtactgctcagcgccgttggcagcgtcttctgttgtggacttgactttatttattttatccgacgtctgacagatgacaggaaaagagaaagcactaaaatggcagaagctatcagacccttcgtgaatcctttcattcattttaagaagcccattatgtgtagcggtcaatgggccagccattggtctaggagcatctatattgcctctttgcgatgtggtttgggctaatgaaaaggcttggtttcaaacaccctataccaccttcggacagagtccagatggctgttctaccgttatgtttcccaagataatgggaggagcatctgtgagtaccttttt

SEQ ID NO: 146076 - DNA, 507 bp, Homo Sapiens
aattccagtgcagctcatggctgcatgttaccctgtggccttcacgtagggcctgtagtgacagccactacatgcgtgggctccaggctgtcaccaaacctttacaacacgtagtaaataagtctagggtccacaactgctggggaaggccttaaacaaatctcaagtcttcaggatttccgtagcatttacatcttggtaaattgaattccataatagacttttcctttgctcaaatatgcaatgttttgagtaattccccatttatttttcattttagaaacttcgtgaatactttcattcaatttaagaagcccattattgtagcagtcaatggcccagccattggtctaggagcatctatattgcctctttgcgatgtggtttgggctaatgaaaaggcttggtttcaaacaccctataccaccttcggacagagtccagatggctgttctaccgttatgtttcccaagataatgggaggagcatctgtgagtacctttttaa

SEQ ID NO: 146077 - DNA, 424 bp, Homo Sapiens
tataccatactaatgtaagataagtgtttatattagtacattactaatacaatgtaataatatgggaaactgtgtgcaggggtatatatgagaattctctgtgctttttgtcaatttttccattaatctaaaactgctctgaaaaataaagcctgtttaaaagtatatataaatgttatatgtgtcaaaccaaactaaattatgtcaaaatgtcatagtccaaattctacagataatgtctatctattcagctcatttatgtctgtatgtagttgataccaaagtaaagtaagagaatattaagtaaagcaaaagattattaagttaaccatctcagtcagatgcaggatgtgcactaaacatctgtgtgactggctccttttaaaagttttcaaaagatttagccaggcacagtggcttgttc

SEQ ID NO: 146078 - DNA, 460 bp, Homo Sapiens
ttttttagctttggaatacattcactttattggtatcagactttactcttgtccgtgggactttgcatacattgagcaactaacccgcatttcagttacattcatgtcacactttggtcatgatttagctctttggtaccaggggcaagctttgcttggtcagtagcatagggtgttgctgtgttatattggatggattccatggcccagactgagtaatgtcggggcaaggaacaacaggacaagtgctctagaaattcttgtctgtggggctgacatgacatgtctctgctttccctattaaatgtttcctgggctgaggcatgagatctcccaggcccctgaagcctggaaggggtcagaaagccaaggcagcaaggctagagggcactgccagggaaagtgacccacatctgtcccctcaaacatcagttcctctttccagggagatgggagctgt

SEQ ID NO: 146079 - DNA, 605 bp, Homo Sapiens
agagactcaaatcagcattttatttttcctgttataatttgacatggtaaaaggagaagtgggctttcaaatctctaaactgtgtcaatctgagatgaaggtttttagcattctgcctctgtgggggtatttggatttgtggttcattttccaaatcctgtagaaaagacagtctctctggggcatctatatttcttctctttcaggtggtcttccttgcctctcaggtgcacaggatgtcagagcagccctctgccaacaaaataacttctcataaaggctggtggatattgtgtaattcaccaaaagcactccagaggatgattcccttgaccggacaagttgggatatgcttctgttctgctaggtattggaaaatagaggcaaataaaatttgatccaacccttgaaaaacctcactaaatatagagagctacatatagaaatatatgtataataaataatttctggagctgggatagaggttcagggtacagagagtaacaaagggggtatgagccaatttcatcagaatggaggggacagaaggcggaacttacacaggggaaattattatttcatttgtaataatcatttttcacttt

SEQ ID NO: 146080 - DNA, 396 bp, Homo Sapiens
ttttttgctgatggatgattaatttatttttattttgcatgttttaaggctgtggggattactgctctgaagcagatccaaatatagttcttgaattctatgtagagctgaaagaatcagtccccagcaacggttgagtgggcagtaagagatggcggcccactctctgtgctgttgctgtcccaaggagaagagaggaaagaagctgttctttcaaataccacccctcagcggcaggagggtcaggagggggtgggcaggacaattgaactaaactaagctacattgaagagcaggccattttgctctgagtgtgtgtgtgatgctgatggggctacatcaggttgagatttcgctatgatttcctccggctcccggttctcagcttgggggcca

SEQ ID NO: 146081 - DNA, 416 bp, Homo Sapiens
ttttgttggggtgaaggacttttatttccacctgttgacaggacagcaggaggactgcctgcccttcctggtctgacggttgctgtgttgttctcaagagccttcctccagcagcagggaggggaggactggctgtctcagaatcttttaaaagccctgctgtctgaggacctgcgtcacccaggattccgtttcatttctccagccacaatccctgccagtgttctctgcactctggatgagagaccttgatttcctgttcactattggctggtctggaccttggtgcctgacccaaagcacacagatcagaactccttgggaaagggagtcagtccctctctggtggtaggagctggcagcagctatgtgcaagaaattagtctgcccatgttttgtacacagataaccgttcc

SEQ ID NO: 146082 - DNA, 601 bp, Homo Sapiens
ttttgaagggtgagaaatttattcagatttcttcataattccccccaaaagctccaaccacgttgccagtccttgggtgctgcagttggtcggggagaggggctgtgtggaggtcaccttctggtagacggagacccgcttttcagactctgtggcgcagcaggcgggccaggaacatttgggccactattgctcttagccctgccgcgcctgactttctctcctctactttccttccgaccgtagggacaagtgtggggatccgctttgggctccaaggccctgcccgcactggcagcaccaagcgggtgtagaatgactggaaggagcagggaaggaagatgggtgtcaactgtcccggccagtggctgcgtgcatgtgtgtgtgaacagggaaaaggccaccctctcccatgtttctcccgtctcctcggttctcctcggagacccgcagggctgcccgaggtagctccgagttgccctgggtcgctggggcttggtccgcatcctcctccgctagtccgctcccgcgttccacagcgccccgccgctcggtgtgcacgcctgggtgggacacagtaacagcccctaagccgccaacg

SEQ ID NO: 146083 - DNA, 548 bp, Homo Sapiens
  misc_feature (333)..(333): n is a, c, g, or t
tttggcactgaaaatagatttaatgtagtcgagagcaggcaccaactatgcggcaggagttacgaaactctgtccccagaaatattctctaagtggggaggtggcaagttcaaaaagaaacaaatgataacagccttctcaaagctctgaaagcagcgctctcacactgggcaaaggcggacctcacctcaatgccctgtagcaggggacccctaagcacgcagaggctgggtctcactcagcaggtgggtgtctcagtccgcaggtgcagcggagccagtggcctttggtcctacagctcagcagaactctgactcccagctcccatgccancccaggtggccaaggaaaagctggaaagatgcacgggtcactctctccagctcccacctccttctcctgagaaataaaatccacagccagctccagtctgcctccaacggggcaggtgttcttgggggttgaggtgaagctaaggtcggtggtccagaccccacttgctcccctcccagtggtctctgggcttggggaccgtgagactgtcctct

SEQ ID NO: 146084 - DNA, 519 bp, Homo Sapiens
tttcctgtcatataatttattttgtttgtgcaattgaaagctttaagccataatgaaaggagaaaaaaggcgatttttgttttcattgttgaatcaagccagttaatggtaagtttcttggtaatatcctttctctatcttatggcttttgatgttatcatgtagttactctatgactggttgctgtcactactgctgttactgttgctgctactactgctgtcttcttccacttacactttttgctcagtgtcaaaatcccttcattttgttccatttaagaccaatgatggcagttaaaatgaggaaaggtagaaaaatgtagcaactgattaaaggccatttttctgaggaacagcatgtcatgttcacaaacaagggtgtactttttcctaaaatccaaaacccatcatcaatacttcctcctggtgatgaactatcttgcctacgagtttgaggagaatatgcaacatcacgttgacaattattcagagtattgcagaccgcatgtccaccgca

SEQ ID NO: 146085 - DNA, 796 bp, Homo Sapiens
  misc_feature (507)..(507): n is a, c, g, or t
  misc_feature (514)..(514): n is a, c, g, or t
ttaggtgaaactgaagttttatttagaatgaaaaaatagacaacaaattacagattttaaagagctaaaaaattccacagatgtcacggagtccaggggaataacagcctggttggaggggcgctctccgcctcttctgtatttttggctctctctgagggtagtggttttaccagcatgctttatcaaaaactaaactatcagggagagtctacaaaaactcctgctagagtaaggtcagattccagaccctgtcgcacctctgaagaccttggtccagttccttccagggtggcttcacgccttgccatccctgcctccctgcggctgcccctgtgcccaggccccgccaacgccgtcaaggccccctcggccacgccgcgtccccgcccagcatctcggatgccattccttcccggtggcacctgcccaggctttgccgaaatcgaaggcaacaagaaggggaggtgggcttaaaagtgcctgcccggccgccacctgtcttgnagtgganggaatggccgagggtggctcccccaactcccaccttggagcatctccaagctgggaaaggcaaaaggcccatgaagcagccggcagctcagtgcagcgtccagatgaaagacctacacagaggacccaggcgaccgaaaagccatcggcagggcactgctcagacgcgtaaagctcgcagctggaggagatggggatttccgatgggccagggcagctttcagcgggaagaagtgcgtagcatgcggatagtcctagaaaggagaaagcgtggccgagccgg

SEQ ID NO: 146086 - DNA, 511 bp, Homo Sapiens
ttttttttccctttagaaaactttattcttaagaagaaggcacaacatactttttcttttataaaaacacacaggtcaatgttttttaaaaacacagcataattgtacaaggggaaacattttgttagtataatcttaccaataatgtaagagaggaaagactgccatactgaaatacattttgctgctgccaaagacggtcctattgtgaagaaatgagaaaaaaatagcaagcgccagggccaattaagcatccctctccccgtttttctgaatacaacacagtgatcctcaccgtaacccctacacatgttaatggattgttagagtatcaaattattttcaatgtgctttcttgttgtataacctttacctgcactttctatttaaggggcaaaaagggaatgtgagtgtaaaacacctgctcagtgtgtgtctgttggactttggagcaattcaacaaacaagcctgctctgtttaatctatttagtgagtgcaagcttctaaatc

SEQ ID NO: 146087 - DNA, 405 bp, Homo Sapiens
gcgcagtgagcctgagtggatccagcactcggcccccagcgcccctttcctccgagaagatcaggagtttattccccgactttctttgctggatgaccagtgtttggcaagaatctctgccaatactgtcgagtgccattctgccttttgaagacaagtgcaccttctttcccttcccagtacctaaagcttttcggaggctgggggagaaatcaacttatgatacatgaaaccagctccagataccgcgttgtggttgctagaggcgggagcatcgggaggaacggaattacatacactaaattaaatgttttctagctttgcttttagaggcaatcacacccccaaccctcgcccccaccagacagaaaataaagaggggcgggtagggatcggtgtggaagc

SEQ ID NO: 146088 - DNA, 1283 bp, Homo Sapiens
  misc_feature (121)..(134): n is a, c, g, or t
  misc_feature (144)..(147): n is a, c, g, or t
  misc_feature (149)..(259): n is a, c, g, or t
  misc_feature (753)..(838): n is a, c, g, or t
gggggggaaatccaaccctctttttctgtccccgggttttctttgggaacaaggttttgcccctttttcctttcccttttgggggccgcgcgcccaaacaaaggttttaaaaatttttttnnnnnnnnnnnnnncccccaaatnnnntnnnnnnnnnnnnnnnnnnnnnnnnnnnnnnnnnnnnnnnnnnnnnnnnnnnnnnnnnnnnnnnnnnnnnnnnnnnnnnnnnnnnnnnnnnnnnnnnnnnnnnnnnnnnnnnttctagttagaaacagaattttatttttgaaaatagaaaaatcaaacaatatttttaaaatgcaatctattgatgtcatcatatttggtttggaatacctaagaatgcagtgactgaaatgtctgttctaaaaacataaacattttttgatatcagtaccaacccactttaatttatatgtgaataagagaacttcgcttgaaaaatacaaatatacatattcgagagcactaccaaattttgaagcttaatgtattcattgccaacgtactgtacataactaaaagtcattttaaatgttttctaaacagggactgatgtggatatcaacaatggtttcatcctaaaactgagttttagcatttgtttagtatatttacctatttagttaaagcacattacaataatctttcacccattccttgtggcttatgtttattttcattttttttagagatggaatcttgctatgttgtccacgatggattcaaaannnnnnnnnnnnnnnnnnnnnnnnnnnnnnnnnnnnnnnnnnnnnnnnnnnnnnnnnnnnnnnnnnnnnnnnnnnnnnnnnnnnnntaataaagtgccactgagtatcagactgatcaaactgaaaacatcccagaacttcagaccaggttaagggggccaatgagaagatcatgaaaagtgacatcagatgaaagctgagatctgtgaaagtttcaaatcagtttttccaagtaagtccacagaccatttgataggctaagcccagttctttacacaatgtagcagccatcatgtctgagtactaattgttctcttcccactggtttttgtgaaattttctgttctgttaccttttaaagattctagcaagtttttgactgtttcaattgcaaacttattgcttttcttcttggtaaaggactttctgtttggagcagatggtagcaatagggataccagcccccagggccgattacttgatatggaaggtcgatctgtatcttcctgttgtaaaatccaggcactttct

SEQ ID NO: 146089 - DNA, 671 bp, Homo Sapiens
ccaaataaactgtggagtttatttaatagtaatgtaccattgttgattccttagttgtaacaaatgtatcatcttacactaaaacaaatgtcaacatctcacacaatagagaaactgggtatatgggaactgtctactatttttgtgacttttctgtaaatcgaaaactattctttaaaaaagtttatttagaacatctgactatatgctagagagtaaaagataaggatctatgaactgagatctagcatcatttgtgaaactgacccttttaaagggtttctctgtgcttcactttctctagtagggttgaaaatcacttacatagtaatctgcttacagtgtaccagaaaacaaaaagacgctgtgaaatattgagcccaattgtcaattgtcggcatgtgcgttcttaaaaatttgacactcagaaaccatgggctgcttcattaggacctttagggagattacatttctaccggcagttccaggagaacacaaatagactaatgacaatacacttaactgtaacaatgacaatcctgataattactgacttccaaaatacaacaattcaagaaagactgcttagtagagaataaaaggtaacaataaatttcttagtttagaagcataagtttcattttaatacctatgaaaaatataaatatgtg

SEQ ID NO: 146090 - DNA, 265 bp, Homo Sapiens
  misc_feature (103)..(152): n is a, c, g, or t
tttaatggattttaaacagtgtatttgtctctgaacagcatcctcttagaaacactcacctctattactcagattacacatttgccagataagcgaaatgaannnnnnnnnnnnnnnnnnnnnnnnnnnnnnnnnnnnnnnnnnnnnnnnnngctgcctctgtctgttttctttttccccaaagtgtatttatcctcatgttctcatgcttgtggttctcatccttctaggtgaaggttacatgggcatacacatcatcgtgctg

SEQ ID NO: 146091 - DNA, 531 bp, Homo Sapiens
catatttgttttctatatggaacagtgttactacgtagaaatgtttgggttacagtacataaaacagtttcactacgacatttatattaaaagccctattagatactatttttaaaagattgcaagggaattctgggctaaataacaacacagaattttatgaaatggtagaaagtgttttacaatattacatgtaattacatattataagcataaatagataatatgtcaattttgatcttctggctgtattctatatttatttttatatccgtttagtttattgaaagaccacgattgcatatttacttgtctttaacaacagtccatagtagaaggtacgcatacatcccaggtagagtgtttataaatatattacacattagacagatgaattcaggagcttggggtactggctgtgaaacactgtggggcaggaggcttgtcctcttgttagctgcaaggctttggtcaagggccaactctccagcttccattacctcatgaaaaatgaagattatatataaatga

SEQ ID NO: 146092 - DNA, 437 bp, Homo Sapiens
ttttttggaatgaaaacaaacgtttatggtatggaacttgggctgtactgacagaaggctttgatgagtctcggttagactcaaaatggctacaatgaagcaacatttattcctcatggtaagtggcaatgcttggctgtgatgacctccaagagtgttgtgtctcacatgtgtaattactgtcaggccaatgactcatgcaggtctgtggaccatcgagatccccatggatcgctattaacacatggagccactgagccactataacatgagccctaaccacaaccacaagcaggacactatcactgacatacagcgtgggtgcccatttgtctgatttataggtgacgtcgtggcaaatgtggcatcagtttcatttcggggcagtggcaagttacagatatttccttcacaacaagaagtgcagaccttgtggc

SEQ ID NO: 146093 - DNA, 613 bp, Homo Sapiens
  misc_feature (538)..(538): n is a, c, g, or t
  misc_feature (603)..(603): n is a, c, g, or t
tggtgctagtgtaaatggtattgtatttttaattcaaattccaattgttcattgctggtatataggcaagcacttgacttttgtgtatttatcttgcactctgaaaccttactataattgcttagttccaggaatgttgttttttgtcattgttgattctttgggattttatacatagacaatcatgttatttggtgaacagaaacttccttcccaatctgtatacctttcatctccttttcttatatttttgctttacgtaggacttccagtacgatgttaaatatgagtggtaagtgaagacatctttgccttggtcccagtcttagggggaaaacatctagtttctcaccataatgttagctgtacgttttctgtataagtatttatcaagctgaagaagttcctctctatttctagtgtgatgagaatttttatcataaatgggtattggactttatcaaatgtttcttctgtatctagttttatgatttttcttcttcagcctgttgatgtaattaactacgttagttgactntcaaatattgaatcagccttgtatatccagaataaatccctcttagctgtgatctataattcttntcgtgtatcg

SEQ ID NO: 146094 - DNA, 1554 bp, Homo Sapiens
tttaaaactgtatgttctttattgtcctaaaattgcatagtacttttgattgtgcacgcttttaaatagagagcagagttgcccacttgaaactactctcttgcatgggatatttcaagctgttttactatgggcaaggagcagggaccaaaatgctgccagggcttaaaaagagccgtgatcagattaaacagaagttggagaagtggagggatgtgggccacacacgagaagaaaatgttgaaggaggctgagatttcaactggacttataggaggcataggtggatgcaggaggggctccacggatgtcagagaacaggattcaggagcagcctagagaggaaagaaaaggagaaaggagtccagagggccaatgccttgtgctcacatctgagatgaatgccacctgccaggagcaagcctggacacagagcatgggtagctaggatgaacagtttggccgttaccacggctacagaaagccacatactagaaaaataacttaaaagctatacagtcgtcattataaatatcttgtcttttaaaactaactctagtgttggttataaaaggttcacagttactctgaagagagctgtatctctattgcacagtagtggagaagtctgctctgatccccatgtgtaaacaatgattcccttctcctctggcgacttcaggacacagagaaacagtatctgctgtaagcaaaagcacttgggtagaaggcacgtggaagctgtcaagctctacaggagcacgcagaacatgtgggatgtccacttctcttcccatgtagcatccctgctgttgggacaggtctggaatcagatgaaaggtggtgatggtcttgtcacggtctcagcctcattccacagttacagacttggccagatttctggggaagtcaacgtcatatcctcggagaacagccaggtggaaggacagcagctgcagcggaatcacgctcaggatgccctggaggcagtccacagtgtggggcagctcaattgtcttatacgcaaacttggaactttcagtatcgtccttggagcacagtataatggggcgaccctggcgggccgtgacttgctgcagggcgttctggcatttggcgaagcaaggatccttcataatgaccatgatgacgggcatctgcttgtcaatcagtgccaggggcccgtgcttcagctccccagccaggatgccttctgagtgcatgtaggttatctctttaattttcagggctccttccaggcaggtggcatagttgtagccccgccccatcaccagcagcgatctctgcgtgtagagctccagggccaagtcgtggatcttctcctccagagacagcacttccttgatcagctcaggtaaagatctcaagccacggatgatctcttgcctcctgttttgtagtgaaattcggtcttcagacatcatcaaaccaaacatcaccagagagatgaactgactggtataagccttggtgctggccacgccgatctccggcctcgtgccgaattcggcgcgccgtcgacttcatactctc

SEQ ID NO: 146095 - DNA, 465 bp, Homo Sapiens
ttttgacttcaaacatcctgcaacctttaatatatatcatgttgtgtgagttttaacacatttgggcttgcatttgttctacaatgtgtaatatgaaaagtttatcagcacaactagactgaattattcctcacataaatccttggatgtgttacagttttgatccttggttaatagcttcaacatgcacaaaatatacaaagatgtttacacattttgatgtctagtgagttgtgagacctaaatgaagcctctgccacacagttaggtgtatatgatttctctttagcatggactctgatgtcaatgaatgcttgaacttgtgatgaagggtttgctgtacttgtaaggattctctcaagaatgaaattctctgatgctgtgtaggagtgaattgtgactgaaaaccttgccacatttattatacttgtatggtttctctctgatataaattctttgatgact

SEQ ID NO: 146096 - DNA, 967 bp, Homo Sapiens
gccagtgtgaggcttggccgtttgaacatgggatcccgtttagaactgtgtggccatgcagggaactgtgtggtcgggagcagtggcgcgagcaggggccaaagggatcgtcgcagccctgtccccggttcgcccagtgaatatggtacatatagccatccaggccgaaaagaagttgtccgccattatggtttgagtctgttctgtcaatgctcctagatgaccctctcgtgatttgcaggtcagcgttgttaggatcagcccgagaaaccttcatctcactaattcggatcttgtctaccttcgttcttgtccaggcacgaatgataaatatagaactggcgattgtggcggaatttggggtgaaaagccgaccccaagaagcctctctcatccccgatccatggggtggtcgacacgatgttcttgaggtccaggaagggttgctccaggcgactcccatcagggaggtagacccacaccactcctacctgctcggcaacaaagaagcgatgggtgccgtccccagcatggaccatggagacggggttcctcagcccgttggccacctcgctcaggcagagctgcaggcagccctgaggatcttgggccaccatgcccaggtggcggttgagatagtcgttcctcaggacattagggaagcaatagtccttgtcaggaaggtccaggaggtggcagaagcgggtaccgtcccttccatgagactcctggaggccgcggtcattggtcagcagggaaatggctgagtgacagttagaatggaaggcagagcagtaatcagagcagaggcccgggagattccggagaggcgtctgggtgttttcggcgtccggacgcgtgggtcgacgatatcccgggaaatccggacgcggtaccagcctgctttttttaagcacgtgttctatatgtcactagagcttcctggtggtgggttttgtgtatgtca

SEQ ID NO: 146097 - DNA, 461 bp, Homo Sapiens
aaggcagttttgctttaatatctcgtccagaaatcaacatgttctggaaatgccaacatctgggcattccaactgtgcctcccagactgtctagttcttggaaatggtacaactgtctttgtgagacactgtgccctgatttggggttcagaaaacggtccctgtatccacgtgactcaaaaaagagctgcccagtaagcctgggaaggtagcaactgagatgtggggtactgggacctcggggctcctccattttggggggttcttccactttagtgtggtgcttctccatcttggggccaagcagatgactgcatatgggagagccctggagcccattcaacctaccccaccctcactttcagagcaggaagctgaggcccagagaagcccggacccctccccttcaggcgaggaaggatacattcccaggatcacggcttcaggcatttgattggcag

SEQ ID NO: 146098 - DNA, 738 bp, Homo Sapiens
tggtgtcctctgcctggcagttcaccgccagcttgatgtgctgcactggttttccacaacgccttgagtgcaagctttcaggcatgaggggacataacaccgtccagagctcagctgagtgatgatcgtcccatccactgtctggattgttgtctctgaaaccccgagctccacaaagcatcggtaatcagggccccggtctctttgccgcactgagtagacctgaagatcagagcctgtaatgattttgacagcttcaacactaggctgcttgcgtgcaccgtagcggaatatggttccacatgtcttgttcttacagctcagtccccgggttccattgtatgtgccacatcggggacactttctgattccgctcaatgtggctttccccaaatcagataagaaagctgggactttagtcctcagagaatttggttccatttttcagaggccctgtaccagctgccaaggcatctggaaaacagtgtaacctgaattcataagacttaaaaggtgtttcattagtttctaatgatcaggtgaaaacacgatcatttgcagactaatgataactgcttaaccccaaatcttctgaagtttgagctgtatggtgtaacaatgcagacattctgcctcctccttctccaccagccaatggcaaagcttctgcccaatgttccgcaaataagattcccacttccctaagtggagatcttgatagtctcttctctcttcgcc

SEQ ID NO: 146099 - DNA, 777 bp, Homo Sapiens
tttccttgagacagggtctgacagtttgatttttaaaggccaaatctctccagactccaaagaactctgtagccaaacagcagcacatactaatcaggcctgcctgtccttagagcagcagcatagaagcctggagacatggacttccatcccatattcacattcaacagcaaaataaatccaaatataaggcagtgctacaattcaaagactgtctgagatcagatgagattgggcatgttcagcgtgatacgggtagagatgttccctcactccactggcccacagccacatgcagaccaaccctgaagaatacacccaagcggtctgcactcagatcaaaccctgatctcccacaactacatcaacacacaaacaaccaccagaatacaatctaactgctacaacaataagcaagtcccaagagagtccaaactgaaacagttgagttgctttctccctgtttgttgggctagttcaatctgcaaatggagattccttcggaatttctcaaattgagaagagcagatcctgctgtctggacccacaaatgacactcacttatgcagacacatactcaattactaacaagccccaagagtgtctgaactggaacagtcagggtgcttcctctctgcgtcagttggccttgctgaacttgcgcatggaaattccttgcgaatttctcaagttgagaggagccattcccactgtcggtatccacaaaagacactcacctatccacatgcagaagtcaaatttgaaaggctgttcttc

SEQ ID NO: 146100 - DNA, 416 bp, Homo Sapiens
tttttaagtggtaaagaatggtgcttttattgatcttattatctttttcattaaaaaaggatgaacagcttaaaagtttttgcattagcagtctctgcaaagcaatttttatgatggtatgtttcattcaatttaagaattgtaatgttagctttcttatatgaggaaggaaataatatcatgaacattttaatgcaagttttaaagtgttaataaatgctagcttgagtgaattactaagtgtatttctcttttcaactttacacttatcttgtgtgtacagctgatatccctagtgtccaatcagagacaagttttcatcctgttgtccaatgaatgatgtgcataattccttttggcactgatgagagatgaatacacacatccagcccacttcagtgaaaattgacccataa

SEQ ID NO: 146101 - DNA, 677 bp, Homo Sapiens
  misc_feature (507)..(592): n is a, c, g, or t
aacattttaaagaggtttattgggacccctaatacggtgaccacagcttggagaaaaaacaaacccaagaagcctagagtgagtgttcctgaggtgcctggattacagtctggcttcatgcactttaggggacaggcgttacaggtggacgagatatatattggctcagctcgaacacgcgggatatctggaagcaagccttatcggttataggtggattcagagagtcttcagtttgcggctggttaaaggagcaaagctttatctaaaacctagagtcagcgatgaggacatctgcacccgaaacatggggcaggggtgactaacagggtgcatgacttgacttaaccctcgtctgacatggtcttgggtcctgtttgtaactggggctcttattgccacggtcagttctgtcagccttctgatctctgttttgacattaatgcctaaattccaaagggagtgggaacagccaggcgtccaatctcccttcctgttgcggccggnnnnnnnnnnnnnnnnnnnnnnnnnnnnnnnnnnnnnnnnnnnnnnnnnnnnnnnnnnnnnnnnnnnnnnnnnnnnnnnnnnnnnngcctgtgttggggcttagaagatcatactccaaaatgagggccccagcagcagcctctgaagcaagtttctgtctgagcttctcc

SEQ ID NO: 146102 - DNA, 370 bp, Homo Sapiens
ttttgcatgtatcaactcatttatgtacatcaactcatttgcatacctcatttcatttgtacataactcatttgcatataccaactcattaaagttgtctcttttactagtgaggaaactgaggcctagagagtcatgtgcatgctgcatctctgcatgcttcctctgatggtttgatgtgggtcaatcctacgtctgtgcacatcttaacaactatcgtaggtgtagggtgcctttggtttactagaggtttcatcagtccacctgattctcactactgacgtaaatgtcagaggtggtcctgcctcttttcagtctccatcccaaggctctttacagctttctgtggcctgattttcttgctgtggat

SEQ ID NO: 146103 - DNA, 497 bp, Homo Sapiens
  misc_feature (337)..(445): n is a, c, g, or t
gagaacacacatttatctctttattactgtgtgacctcagcatcttacagaacttctctaagcttcaatttcttcctttaatggttttcctagactccagtagtttgaggtgaaattctggaggaccaggctgaggttccaaaagggctggtgggaccctcctttgcacgcaggaagcccctctgccacctcctcgaaagaaggccctgcagctcctcccgggggaacgtcagatgggcgctgcatgaacttgggtgagcaacccgctccgtctccatcttgtggcctcatttccagatgaaagtcattcactatttgaaactgcgtgtgctgctcnnnnnnnnnnnnnnnnnnnnnnnnnnnnnnnnnnnnnnnnnnnnnnnnnnnnnnnnnnnnnnnnnnnnnnnnnnnnnnnnnnnnnnnnnnnnnnnnnnnnnnnnnnnnntggctagattctccaagttccctggctgaggagcaggaaggagtggggagtt

SEQ ID NO: 146104 - DNA, 414 bp, Homo Sapiens
ggcctgtgaagtctcaagtcttaggtttttaaaaaagaagcatctaccttaagagagggaaggataaaccatagaaagtccaatccttatcaacaagagaaaaagggaagaagaaaagtttggattttataaaaattgaccaactacagacgagataatgaagacatccatctttctggaattcttttgtaaagactgaaatatctagtcaataactttccagtgacaaaagaggttacaccagtagtccttccattcagttcatacttttcatatggatgaacataatttataacttctccataaattagaacttctccaattttgccggatatccggaatccactcagtaacaccactctgaattccttcctgtacctcaaagacagaaatgaaagaacctggctcattaaa

SEQ ID NO: 146105 - DNA, 450 bp, Homo Sapiens
ttttcgttattttaaacatttattatatgcaaaagttggacttaggcagattcagccaagtggaattaggctttctgtttattttctcccagtgaattaaatgttctgtttattatctgttctcagtgaattaaatggtgtcagtaccccagagagttaacaaaagatggtttcattgaaaatgttactgaatgatagtagtgttaaagagctccgtcaaaagtatatttgcttttctggggaaataatttctaggggataagttctcagcctacataggaggatttcatgtccattgcttccctgggacacagcaccaagagtagaaggtccattcttcagagacaacagagaaggtgttgagagagtggcggtcttatcaaggctgcaatcaaggtgtcaggcaaagctgggttctcatgcagaggctgaactaaggaaagatatgct

SEQ ID NO: 146106 - DNA, 565 bp, Homo Sapiens
  misc_feature (505)..(505): n is a, c, g, or t
  misc_feature (522)..(522): n is a, c, g, or t
atctattgcttatttattcagggttgtaaatattacttatatagagacatagagatgtgtaaaaatgaaacattgtgaaaaaaatacaatttttcaatttcatatgaaactcaaagtataagttttgtccaatatggaatgtacctacatttgtttatattagggctctaaaatccatttaaaaattgtttttctgtttttaaaaaagaaatagctgacccaccatgcaagttcgctatatatcttgcttgctcaaaatgagcattttcaggtgaggtctgttttttctggcccaagtctactatgattccttagaagtcgtactggcccaattgaagaaagggtttccatgaagagtctgacggcggcatctggatgaggggtggtccgggtaatgggaagtgagtagagaagaaggagctaagagcccaaatccttatgaaggatgacattcagttgttaaattttaaggggtatcaatggctttttccaggcactcaactanagagctgcggaaagaanatcctctctacttctacaaatttgatgtagatggatttggggg

SEQ ID NO: 146107 - DNA, 424 bp, Homo Sapiens
ataaatttataaaggaaagaggtttaattgactcactgttccacatggctggggaggcctcaggaaacttacaatcatggcagacagtgaagaggaaccaaggcatcttcacaaggttggcagggaaggagaatgaacacaggaggaactatcaaacttataaaatcatcagatctcgtgagaactatcacaagaacagcatgggggaacgcccccaagatccaattacctccacctgatctctcccttgatgtggggattatagggattacaattcaagatgatattttaggtgggggcacagctaaaccatatcctacaaggaatgactgaaactaaagatactaatttcctttcccttggttggccaggctgtcgtcttcattactgactaatagagaccaagcaggttggtttaatccat

SEQ ID NO: 146108 - DNA, 403 bp, Homo Sapiens
tccataatgttgccaggctggtctcgaactgctgactcaggcaatcctacttttctgtttttaactttgtcttctgtagaatgtatgctagagctggtggaggtgggctgaggttgaggtggacagctgacgtgttgaatacctgccgtgtgcccaggactaagctggggacttctgtttgtgttgtttattgtttcttcaaagtcatacaacacccctgtaaggtacatatggccacctcacctcctttagatgatttagactctatggggaagaagccaggatagggatgtggcttgggagcgccgggaggtctggtttctcctgcttgcccagttcctttgggttagtcacactgaaagcaacagagtaaatgtggtgtgtctatgtgctgtgtcagttt

SEQ ID NO: 146109 - DNA, 456 bp, Homo Sapiens
tttttttaataatgccataattttattctgtttgtacagcaatactaaaataatctttaagaaatgagtttttgttaaacaaagtaacatgctcaaattgcaatgaccacagaaattaggaaaaaagagggtaagttttgttatgaagtttcagtgtggctgaagcttcaggcggtgtggctgcagcagtagttccatgcacttaagatactaaaaagtttcccacaaggggtgttgggcactttaaactctcttgcaatccggttctgaacatcaagtagaattactaatattattcaaagggagttgagtttccatcctcctcagcagaaactataatcacaatatatggtctgagggaaagtaaaaaagaatggaagggttattaacagcaggactaaatgtatttttaaatttacactttcacttacataaataggtgaacagattctttgt

SEQ ID NO: 146110 - DNA, 674 bp, Homo Sapiens
  misc_feature (498)..(551): n is a, c, g, or t
agatctagttcttccatttattctcttgcattaaatgtattaatttgttgaaattagctgctaggcattctggtaaatatcaagaacatagagccaactccactgcagaccctgtccttgaggagcctaataactggagatttcatttatggatttatggatttattaggcctcctaaaaatctgctattcacttaccgatagcaaagaaaattatttttaaattttaaataatattttcttattacaaaagcacttcatgagcatcatagaatatggaaccagccaaaacaaaaaataaaatatctctgtcaccacccagagatcaccactgtaacccttggttcatattctcctcccacatcttcatatgcatacatacatattaatctgtattttgaggacatgtttttcattttgtctacagacacatcccgtcttgtaaccagcttttaaaaaagacaataatttccacgtttccatgtgaataactactctnnnnnnnnnnnnnnnnnnnnnnnnnnnnnnnnnnnnnnnnnnnnnnnnnnnnnncgcttatttctccaagttggcccccaactcaagcccttgcaatgtgtctcttggttatattcttcgggttccttttaatctggcataggcgtcgagatcccgggcgggggcaccgagggctac

SEQ ID NO: 146111 - DNA, 570 bp, Homo Sapiens
ctatgttcctttatcaattttgatgatgacagtacagctttatatggaacagtaggggttgttagaataacagaagcattatattcttgctccagtcgctggttgaaaacttccatgtgcaaaagtccaagaaatcctagcctccagccagcacccagagcaaggctactatcccgatgaacggtcacactggaatcatttaaagtcagtttttctatagcactcttcagattgttatattcagattggtctagaggatacattcaatttatgagttggctgctcattaggattcaagactcctacttcattaacttcgtatgtcttttgagtatgtgcagatacaattttatctcctttggaaaccactccgtcaaataatgctacattggctatcacacctctatactggtcaaaggtggagtcaaataccaaagctctcagaggatttttgcgatgcactttaggaggggggattctttcaataattgcgtgaagaacactctcaacatttgttccaagtttagcagaaatcttaatacattcatcacttggaatatcaaacacttt

SEQ ID NO: 146112 - DNA, 543 bp, Homo Sapiens
  misc_feature (320)..(383): n is a, c, g, or t
tctttttagtaacttttaaatagacatttatttatttgtcaaatcacctctaaaaagttccaagaatgaaaaagacaaggaccctccctccccaagaacagaggctgtcttattccagatgatactgctaacacgtagaaccgtgtctaacactgaattagatgctcctaattcaacagaaaacatgtacacagatattttaatccatggtaagaaaaaaaagacaaagcaataggagaggttcaaagcaaacgcagagaaagaaatgacttcctcctatagcatcatttgtcatggaagaagtagcatcttaactgagnnnnnnnnnnnnnnnnnnnnnnnnnnnnnnnnnnnnnnnnnnnnnnnnnnnnnnnnnnnnnnnngaaacgtgaggtcacatgggcgtggcgtacaacaggagaagtcagattatggggaaccttcaacgtcaggcttcggagtctgcattttatcctgaaaggataagaagcctttggaaaattttaagaggaaataacatgaccatacacgtgttttcaaaag

SEQ ID NO: 146113 - DNA, 462 bp, Homo Sapiens
ttttttattaggaatattttaattataaaatactcaagtaaaaacaccaccttcaccatacagttctttacattaccgaattggctgtagttgattagagtttctgctaccaagctttctttctatcatgtcataatgggtcaaaagtaccagcaatttctcacatgcatagtgattgggccactccattttttcaagagtaaatctctgaaacaataacaaatcaggtctttggtacctgataaccttcaccaatttatccttgtttaaaaggaattcttgaataacctcatggaatgggaatccctcacaacagcaagctttcttcttaatattgttctctacttcattgagttgcctatcatgttctgtacggtgccactcacaaggacagcagtattcatagtcatgtggctcacaatatttatcacttttacataatctgcatccattacgttcatg

SEQ ID NO: 146114 - DNA, 117 bp, Homo Sapiens
tttaagagatggagtctcactgtgttgcccaggctgataagagtgtttttaaaaagtgtccctgttgattcttctttgcagccaggcttaggaaacctttgggcttttgcacacatt

SEQ ID NO: 146115 - DNA, 723 bp, Homo Sapiens
tttctgtatccaaaaagatatttattgtgcttattaagtatgtttggtctgtcttttccagcaactctacttccagtagtggatgctgtgcagcctactgtgtttcggtgggcattggactcttaagataggcagctgctccagtgcacgtgtgtgcattccctgggcttagcagctcctggtcaccctgtctgcactagcaaggctcccagtgagtcaacgaggagggtggccccagagcagagggccccaggcacgaagcacctcactcactctctcctgcatcctgccaccccacaagccactcctgcaggcgggcctgccgtgtgaaagccctggaggagatcacagtggaagaggcccatttccctggatagcaactgtcccacccaggggggtttcaggaggaggatggagggcacacaacaccggtggcttgtggggccctcacactggctgacacagccaccttgcaatcctgacacctgagcgggaccaggcagcatttgtcacgaggtgtgggaggcaagcaacaagagcagagtgtgaacagccttcttaagtctggctcctggctgccccatcctccattcccagctacagccgcccagggtaacttcagtttctccaagattttctcactgattttggttagtttctgaaatgcacactgccttctcgcctccacagctcacccagggtcgattttggagagggagccag

SEQ ID NO: 146116 - DNA, 320 bp, Homo Sapiens
  misc_feature (289)..(289): n is a, c, g, or t
tttactttttaaaaaatgataaatactttatctaaaactatcgacagtacaaactggaccagtcccagcctcctgcggcgcgtgccgccgattcacagtggagctcccgtccgtccttgcctctgccgtccaggggtgggagcccggcaggccggcgggcaccatgccgcgggcgcgagttggtccacaccgtccttgcataggtctcgcggttgaggtagaaatcctagttaccttacacaatacgcactgctagctaagcaaggtctttatcgcggcttaacccccngaaaggtgcgcggcatagggaggcggcatgc

SEQ ID NO: 146117 - DNA, 623 bp, Homo Sapiens
tgttctgttcctgttcggttccagacactggtttcttgctttgttttccctggctaacagtctagtgcaaaagattaagattttatctgggggaaagaaaagaattttttaaaaaattaaactaaagatgttttaagctaaagcctgaatttgggatggaagcaggacagacaccgtggacagcgctgtatttacagacacacccagtgcgtgaagaccaacaaagtcacagtcgtatctctagaaagctctaaagaccatgttggaaagagtctccagttactgaacagatgaaaaggagcctgtgagagggctgttaacattagcaaatattttttccttgttttttctttgttaaaaccaaactggttcacctgaatcatgaattgagaagaaataattttcatttctaaattaagtcccttttagtttgatcagacagcttgaatcagcatctcttcttccctgtcagcctgactcttcccttcccctctctcattccccatactccctattttcattccttttttaaaaaataatataagctacagaaaccaggtaagccctttatttccttaaatgttttgccagccacttaccaattgctaagtattgaatttcag

SEQ ID NO: 146118 - DNA, 720 bp, Homo Sapiens
  misc_feature (60)..(68): n is a, c, g, or t
ctgaatcccgggctccatcagctctttctggttgtcgaagtcacacgagttcttcatagnnnnnnnnnttttttaattgcattcatatatctcaatttagaattaaccattttcaacagttttctatagttcatatgttttgaatgatgctgttgatacaaatttatattgtgctttttaaaactacttatctcaatgcatataaattcttcagatatgtattttagatacttgcataaggttccaaagtataatcatgccatgatttgactgcacaccacaaatctctgctcgtttgagtgccctaaggctctgtttcttctctcccctgtagataggtaagcagcagaaaactgctttatgagccctaattattacctttccccctctttatggaataatcaggtcttatagatccaattattactatatttatacacatcttgcagtctgaaagatcctgtgtggacctcaaaataccagtatttcccctctgaagtattactgtttcttacttcagaaaatgctagaaattcacagtatccctatgctcagaatctatgataaacagcaagatgatctgagattcttttgatttgaaaatagctcagtctcctttggaatgaaacctataccaaatctcactctctagtaatttgtgctgtggaaagtataaaattgagcctaattccatgaaataaaccatgcttgcaaagtaaa

SEQ ID NO: 146119 - DNA, 1618 bp, Homo Sapiens
  misc_feature (71)..(79): n is a, c, g, or t
  misc_feature (740)..(740): n is a, c, g, or t
gtatgtttggaacaccggagggtttgtttagaagcccaggggggtgcgggtctcacagggaacccatgatnnnnnnnnntgccctgggagcctggggaacagaggcaagaaccctgtcttaaagggggaacccccaatgtggagacaccatccttccctcactaaccgggcctgcctactagaggagaggcctgaggcccccggcctgggtgtagggcaggccttgtgctggaaggtcccagcagtgggctctggcggggccaggtcctggaaacagggccaaggcccttggcaacaggttaagggatgggaaggctgtgggctcccaggggccaggaaaggggatgcaggcagcaggcaagcaatttattggctggcagcagagggcaggctagaaaggctggaaatggagatgtggacatgggctggaactcgtctttgaagggcttcccccagtatgactccccacccgtgcctgtgcctgtggggtcgcccccttggatcacaaagttccggatggatctgtggaagatggtgccatcgtaataatgcttcttgcaaagcctgatgaagttttcgcaggtttttggtgtcaggtcgcagtgcagctccaggttgaggtcgcccttgttggtgtgcagccgcacgtagcccttcttcttcacaaactggtagcgcagcacatcctcgtcgatggcagctgcttcatgtgtggtctccggggaccattcgcggtgganggtgaaggaagcgctgacctttcccctgtggaaatagtgggcagcgttcagcttgtccactttcttcttcttccggggccttcatggtggctgccagaatctcgtcccctttgaactccttgtagagctcctgcagggtctctcgggtctcggcatttgtatttttcagataataagacgggtcctgtttggccttctcttcatctgggtctattattttcatgttattcttcacatgatagaagttagagacattgaacttgtccaaattggtggggtcctggagggtgatgatgtcctgccgggagaagggctcgtcggtcagcaggtcccggaagttcttggccttgatatttagctgttccactgcctcataggcgtagacgttgccggtcgtcctcacagccacgatgtgggtgttgttggtgaacacggtaaacagcactgggcagtggtacttcccctcactgttcttggaaaagttcagcttgatcagggacctcccgtccagcttctctccattgctggggttggtcccgtacttcttaagccatggaacaatgttcagtaagtcaaagacgatgccatcgggagtgcagactgggtagacaaagggctgcagagagagactgcagtggtcaaaaggtaaacgacgaaaatttgtttgtgggagatctggcttcttgccaccataaaagtgagtgtattcagcacaggtaatgtacattttgtccttttggtgctgtcgcttccccatggcggagcggcggcggcgactagcgagcacgaaaaaacaacggctgacaactcagaccatggagccgcagccgagttccgcctcgtgccgaattcaacacccaggctcgtacctagcctta

SEQ ID NO: 146120 - DNA, 750 bp, Homo Sapiens
  misc_feature (394)..(522): n is a, c, g, or t
tttgcagtttcactgatttactaataggtcatatttagcgagcattggcccgcactggtcataggccgtgcactgagctaggtattggggaagtggtttgtccactcgttcattcatttattcattcattccatgggtttcttgcgcatccactgtgggccaggcgctgtgctaggtgcttggaatgaggcggtgaactgagtagatacagtgtctgccgcagactccagtctcatagaggagacagacaggaagtgcgtaaacctgtaataggatagaaaaatggggtacaaggtgacagggtggtcacggagtcatagcggttagtgtttcctaagcacaaactcagtaccttgaatgtgtcaaagccattttcatcctcaccgcaggagannnnnnnnnnnnnnnnnnnnnnnnnnnnnnnnnnnnnnnnnnnnnnnnnnnnnnnnnnnnnnnnnnnnnnnnnnnnnnnnnnnnnnnnnnnnnnnnnnnnnnnnnnnnnnnnnnnnnnnnnnnnnnnnnaaacccacaggaacctcagtgcaaggtggttttattggggctgaggcctcaagcaggggaatgtggcctcctgagacactctgggcggccagggcctgcctgaggtgggaccaagcatggtggagtggctggagcccggtggggaagggaaggagggagaaggccttggcaggagcagacatgaaaagcaggttgattttattctacttgaaacgggatgccattgat

SEQ ID NO: 146121 - DNA, 454 bp, Homo Sapiens
tttttattatatgataatatttattatattaacaacaaatgttgcagaagaaactattcgttcagcaggccaggattttttaaaaaaccatcttccagatctttttacaaaccccaaccataattccaaatagagacaacatggttggagacacagcacacacccacaaagctttttccataaagatgagcatatactgcaagaaatagattgccaaatcacagagcccaggttacgtgacgtgtttggacttttttgtttagggaattcacagtgtgtgcacggacaatgctacgaggcattgcagtgcgttctggtaatgaaatatcttcgatagaattctcagattccttacattcgttgtcagatttatggatgttcaggcaggtacagctactggtagacaacttgcactctaggagagagaggactccacagacagacaagaagaaac

SEQ ID NO: 146122 - DNA, 466 bp, Homo Sapiens
acgcccctcccttccaagctcctttgcctgatggcagcaccccctcccgtctggagtctgccggggcccttcctgctctccttcttaatttattttctgtcttggagggaagctgggtgcacctgctcatggtcgccctagggccagaagacctgtcagtcactctcacatacatgttctttccagctctcccttgccaaaggttctcaaaacactgttgtccgtctcacccaaaaagctaagcttctgtccaatccttaacggtagctataaatgagaagcataagcttggtttccttctaacatccggcaagttagaagatagaacgtatttcttcacttattcatcacatatttgcagggcacccctacacgggacagcagaggtcccagtccggtgctgcacccggagccaggctcggagctgccgcgcgccctcagctgaaactcaccggaggcgcggccc

SEQ ID NO: 146123 - DNA, 594 bp, Homo Sapiens
tttaaaaaccttatattctttaatgtaattcgagaaatatggggaaaataattcctgacttattaaggccaagtattttgtgactatcaactgggcaacaacgcctagatccttgttattcatcacatcactttggattcaagtaatccagcccccagaataaagggtcatgaatcatttgttcagcataaaaacataagccaagttgtgagaatgttgaacagcattcaagtaaaaaagggctttaaaaatcattttcagaagtgcctgctggagcctttttgaggtgttgaagcatagttacatagtgcctcaagttatcagttccctttcagaattgcaaaatttcaggttatttaatttgagtgcaacattacacatttttaaaactgtccaactgaaaagaatgtgaaaacggcccacaggcacaggagtaaaatagacctgagtctaaatacctgctcaaccacttcccagccttgggtgtgtcatttatgacttcttgacttggtttcctcatcagtaaaaggaggatattcagcagagaaattggctgaagtaagcacggtctgtagcaacacgctggcatattca

SEQ ID NO: 146124 - DNA, 551 bp, Homo Sapiens
tgcttaactttcactgaaatatatgctttatttagaatccgccctgattatttaaaacttttagattcctcttcctgatatttttggattacttttgttgttgtttttgttgttgtgcaggtcactgcttggactaaatcacttagcaaaagtttcttagctctgcaaagagaatagaggtttatctcatctttggagaatattgtaagatgatttttgtctccacatgatatatgcttgcattttggcatttgagaaatcagtatttggcaagaaagtgctctttttatatgggatgaagcaattttggggtgcgctgacttaacaaatggcagttttagatgtatgtgaaaagcataggcaggacctagttatttagaactagagttgaaaatttttgtacatttgatgacaggcctgagtctcctttgtctctgtatcatttatgcctcacatggtgtctgtcacatcaactgtgcttgttgaattgctgtgatttggttccctgggctacatatagtgggtttgggggaaagttgggctaacatgcc

SEQ ID NO: 146125 - DNA, 1202 bp, Homo Sapiens
  misc_feature (1180)..(1180): n is a, c, g, or t
ggcgtctcccttttcttgttcttttctaatgggtcccctgtgcctggtgccgttcttagcgtccttggccttcgctgcggcgccctggccctggtgccgaccgcgttttggcccctgtcagccgcatcagatctgcatggtccgggcttttcggccttgattttctgaatccgcttcctgtgaccctggcctattttgacacagccccatccaccgcccgaggcgccctcctcctgcagtggatgatcctccggagggtagagaggggggtacttgggagaagagtccagtggggagtcgctggagaagctgtaggccggggaccagcgcgtcagtaggctctgctcccccagaagaggctgtgtcaggacttcctggtcgcccccgtccagctccgtgggcaagttgttggggtttcctccaaacagttcgtaccacaaaccgtgcagcaagatcttgtacttgggtttattgcagtgcgcgaccactcgcaagattcttctcttcagatcttccaagttggtcacactgagcctgggaatcacatccttccccaggacgagtgacacgatgaagctctgagaatattcctgcagagctttgctccacagcccccggggtggggagaaggcgtagcacctgacctgcgggtaggcggctctgagcatggtggccagcagggcggccgccccgcccccgaggctgtggcccactatgaccagccggtactcaggagcaatgctgaaggcttggctcaaaatcccgtcgttgatgagtcgttggtaaacgtatctggcagcttgagaaatacccttgtgtgccaggcggtcctgcacctcacactccacgtccagcacctcactctccgctgacaggtccgtaaggacatcctgcagagacatggtccccctcacagcgaccacaacagactctttcctgtgatccagagccactaaaaacggcagctcgtaaaccttgtcatggaagctgacgtggatgaagtccctgtactgcagccctgtggtgtgcaggatggagccgaagtgacagttgagctgatcgcctccgaccaagtcatagtctgtggttctgcttctgcagcagtcaccaccaatcctgcacagccccgtgagggggtttctgtagatgtagaggggccacccataggccgctgctgcanacttgatgtaatgaatggagtt

SEQ ID NO: 146126 - DNA, 408 bp, Homo Sapiens
taacttttagcagtgtttatttttgttaaaagaaaccaattgaattgaaggtcaagacaccttctgattgcacagattaaacaagaaagtattacttatttcaactttacaaagcatcttattgatttaaaaagatccatactattgataaagttcaccatgaacatatatgtaataaggagactaaaatattcattttacatatctacaacatgtatttcatatttctaatcaaccacaaatcatataggaaaatatttaggtccatgaaaaagtttcaaaacattaaaaaattaaagttttgaaacaaatcacatgtgaaagctcattaaataataacattgacaaataaatagttaatcagctttacttattagctgctgccatgcatttctggcattccattcc

SEQ ID NO: 146127 - DNA, 478 bp, Homo Sapiens
tttttttgatctgaaaatgactttaattgtttaggctctgggaagagatgaaggataaaataacatctactttttacaaaacaatttataaaaatacaagcagaaatgaagccagagcaggtgacaaacaacctgcgcacctggaggattccaggcatcttcccaggaacaggtgacccctcacacatttgctatatcttccagcagatggttagcttgtgtcattatgccacactcctctctgatggacacttctttgccgtactccaatctgggactagaaagtcaaggtgggaggaagggataaggggaagcaacttcagcccctcttcatctaaggttctccccacaccatccaaagcccctccagtgctgtctctctccatctgtgttctcctttgtgcaggaagcaatagggcagagcagatcagtgctgcccaaacagatagatatccagggagttgtcagtcccatcttc

SEQ ID NO: 146128 - DNA, 425 bp, Homo Sapiens
tttaactagtttttcaacaaaccaaagctcatcttttcacttctttaataagtgggcttttggctttacttttctatgacagtaagttagacagcaaatttaaccaccccccacacgatgatttatttaaaaataattgtagaaattggaaagcaaactcaatttcaatgttaaccagaatcctcttctaatatccctgttcctctcatgcccttgttcccatgtttccttgtcattatagcttcccccttctccgactattagtaacaggtttgggattttacattggatttaaaaatgtgagagctaactgtggagaggaaagggccagcccctaacctggcctggccttctactgagaatggcggtctcttccacttggccttgttctcattttggccatatgtctcatagctcttatcctg

SEQ ID NO: 146129 - DNA, 781 bp, Homo Sapiens
  misc_feature (554)..(554): n is a, c, g, or t
  misc_feature (567)..(567): n is a, c, g, or t
ttttatggatcacaaaatattttaatgcatcatatagaagaggtaaagaatgtaagtggggcagagcgctcagcatgttacaaatagcacagcatgttgggacattagatccagtggaccacttcagaggatggagatggtcagaggttgtgaagaagctgtgttctgtgtaatgtgaaactggtgtggccactggactcttcagcaggacagaccttagcattttacctttctagagcatgcgtatgccgcattgcttcaaagctgatgtatcaagtagtttccatgttgaaagaactcctaacaaagcattagcagtctgtatacccagttcacagtgcagcaactcaggggctggtgaagatactcagcttggttcacacagttgatctttctgcctggaagtcacgcccgacagtgttcagagttcatattttttatactaatgaaatcaagaattgtaaagagccctaaggtcaaaagtgacccatgcaatgatgggaatgtagcagtgaaatatatatatatgaatgaagtaatcgtcaacttggtanctataatttcccncttggtttaaatgagattttccttgctcacaatcagcatgtgaaccaggtgcccctgcaggggcactgccagggctcagagctgtgctgtctgactggtttttgcattcttaaatattccttttcattcctgctgtccccgtactcctcatggcagacactttcatctttaaatccagttgtttttgtcagtattattagaagacaaatcatat

SEQ ID NO: 146130 - DNA, 878 bp, Homo Sapiens
cgttcatagcaacagcctggacacactgggcaagacgtccaggagccactgcctggtgacatagacctgtcctggagacccctacctggggtagacgaggcctggcatgcagagccctgtcctagggtttaggtgggcctggcctggcctggccccaagaggccaccaggccttgggaaagaaactgcacctgtgccagtgggattcatccctcttggaaaagaagccatgcttgggtcacgagcacagccgggaaaggtgctggatttgaagccaatgagcctgatgaagctggaaaaggagatgggttccttggaaatggggtcagatttccaccaagagaaccggccgccataaggaagggatccgagttcacacccagtgggtggcctgtgttcagaacaggacccccctgtggtcccagggaaccgtcgagccgtcctcgaggtggcagcggagcacgagtccaaggagttggccgctctctagggaaaatccgaggttctttcatactttcttggggacgctggtgataatgggcttggggcgggttttgaaaaggatcttgtctttgatgagtgctgtcaccaggtaccgggtgccagtctcgcggccaagctcatcacagtcctgatccccaggagtgtgtttgacaaggactgcaaaaggtttctccaggtggatgattttcccatacaggatatgatgccccacgatcagcacagggattccctggaaataacaatttgcaccatgagctttctgtctttaaaacgcaagtgaaaacaagctcgagattccggccctcgccgcccccttctccgtcctccgcccgcgctcgccaccctgttccgccctcgtccgatttcatcccgagg

SEQ ID NO: 146131 - DNA, 897 bp, Homo Sapiens
agaagcaacggcgcgccgattcggcacgaggcggcggcggcgacggcggcgggaggttcggttgtcgcccgttggccgcgcggcgccgcgctcggcggccgccattgcagtgcgagggctggaggcctggcagaatgggtgctgatggagctacagggggagatcgaggctcgctacagcactggattagctggaaacctcctgggagacctacattacaccactgagggaatccctgtgctgatcgtggggcatcatatcctgtatgggaaaatcatccacctggagaaaccttttgcagtccttgtcaaacacactcctggggatcaggactgtgatgagcttggccgcgagactggcacccggtacctggtgacagcactcatcatagacaagaatctttttcaaaacccgccccaagcccatttatcaccagcgtccccaagaaagtatgaaagaaccttcggattttccctagagagcggccaactccttggactcgtgctccgctgccacctcgaggacggctcgacggttccctgggaccacaggggggtcctgttctgaacacaggccacccactgggtgtgaactcggatcccttccttatggcggccggttctcttggtggaaatctgaccccatttccaaggaacccatctccttttccagcttctcaggctcattggcttcaatccacacctttccggctgggctcgtgaccaagttggctcttttcagaggatgatccatggccagtgcattcttccaggctgtggctctgggcagcccagcagccacctaactagaaggtctcagccagctcgcaccagtaggttcagacgcttgcacagcaggcctgacgcgacaagtggctgctgtgcacgacgtttacga

SEQ ID NO: 146132 - DNA, 964 bp, Homo Sapiens
ctgtgtgtcgggacctgctctccagaggccaccttggcttgggtttggaaataggacctggttcctgggtgaccccgtttatcttggggttatggcagtaggtccttgtgcgtggcaagagcccctgtccttagggtttagggtgggggccttgggccttgggcctggccccaagaggccaccaggcctttgggaaagaaactgcacctgtgccagtgggatcatgccctctgtggaaaagaagccatacttgggtcacgagcaccagccgggaaggtgctggatttgaagccaatgagcctgatgaagctggaaaaggagatgggttccttggaaatggggtcagatttccaccaagagaaccggccgccataaggaagggatccgagttcacacccagtgggtggcctgtgttcagaacaggacccccctgtggtcccagggaaccgtcgagccgtcctcgaggtggcagcggagcacgagtccaaggagttggccgctctctagggaaaatccgaggttctttcatactttcttggggacgctggtgataatgggcttggggcgggttttgaaaaggatcttgtctttgatgagtgctgtcaccaggtaccgggtgccagtctcgcggccaagctcatcacagtcctgatccccaggagtgtgtttgacaaggactgcaaaaggtttctccaggtggatgattttcccatacaggatatgatgccccacgatcagcacagggattccctcagtggtgtaatgtaggtctcccaggaggtttccagctaatccagtgctgtagcgagcctcgatctccccctgtagctccatcagcacccattctgccaggcctccagccctcgcactggaaataacaatcttgcaccatgagctttctgtctttaaaaagcaagtgaaaacaagctcgagattccggccctcgccgcccccttctccgtcc

SEQ ID NO: 146133 - DNA, 339 bp, Homo Sapiens
gatacttcattttttgaggattcatactcttgtttatattataataaaaacaacccatgttctttctaaaaatttgggcaatgccttcgtgcacataaaagtaaaacaaaatcacctgtaatcctaccacacgcagatcagcacttgctaatcttttcacagggatcctaagaatatcctattctctatagaatatagttgatttatgttacctaataactaactgttaaccattttaaaattcttcagttttacattatgctagaaaaaaggagccgtcactctacgtgacatttctgtatattggtttattcattcaataaacattttttaagtaaa

SEQ ID NO: 146134 - DNA, 441 bp, Homo Sapiens
tttaaaatgttacaacagtaagatttattgagaggtatggaattgttctgatattttcataaatttcctaaatacacatatacatacagttctatgtattcaaaggtaatgtgttatcttaagcaaaattatagttgatgaattgccttctctcagcacacctcttcctctattttgatagtcctttttttcagctctatccagccaagaccttgctcagcatctttcctgtcctgagcaaagccctcatcacatcacttcctcagacaatcttaaatatccagtgatagccacagctccttttttcaaggcagaggcctgaatataagcagttgttgctgatgatggctgattaatgaaccatttgtcacagtttttattatttaaatcgcccttattgaggtataatttacagaagacagaatgtaccacttaattgta

SEQ ID NO: 146135 - DNA, 112 bp, Homo Sapiens
tttttttaccttctgtcataaactttttactagaatataatcctgtgtgcctgtgaccacagactaaatctaaagttttacgttgcaggctctatcggggggagcacggctc

SEQ ID NO: 146136 - DNA, 160 bp, Homo Sapiens
ttttaaggaagaaaaaagcctctttattgaactgaaacagtgtcccagacttatcccattttccttctcactgggggaagggaaggactctgctttagaataacctgggggtcactggcagggcacagaaggaagtttaggttacgcgggctggcctggg

SEQ ID NO: 146137 - DNA, 584 bp, Homo Sapiens
taaagataatccatttttgataaattagaatggaaacagtgtctctataatatacatacaaaagtgtccagttttcaactgtgagcaacacaggtgcacagaccaggtgtcagcgcaggaacccgacggcaggcatgctgatgccccccatttcccgccactcccgacagctccccgggcatggccccaattcccgccactcccgacagctccccgggcatggccccgattcccgccactcccgacagctcccccggcatagcccgtgattgcctggcctcagccctcggccccctgcgtgggcggctcctccccggcctctggtttcttgtgcctgcgcatgtgcctgtacttgtccacgtacgccttcaccaagttggccaccttcacggggttgatctctccactcttgctgtggcagattttctgcacggccttgcgcaggatgtccttgtactcctccttggtcacctccctcttctggtagaagggcttgatgggatgcttgagggctgggccggggcaggcggcaggccggggctgtaaacctgagaggggtctgtgtctgggaacccgggttccgg

SEQ ID NO: 146138 - DNA, 401 bp, Homo Sapiens
tttctcaggtttaatttcttgctctgcattttgtgagagggcatactgagctactatcaggaaagatttattcttttccaggcaataactacaggctccacacacagtagcaattcaatctcattggcatgtgaggctgggagatgagttgagacatctttaagggttgcttcctcttcagaggatttaaaatcaagatgaatttccattagggaaaggaggaagtctaaggccagggaaataaaaatgcttctctctttacattgtataacacatctccacctaacaggtttgttggtgaggactcagaaactagaaaaccttgactgaaaacactcccacagggttgacaagcattgcatattggtttctagagaaatacaattataattcagcattaa

SEQ ID NO: 146139 - DNA, 420 bp, Homo Sapiens
tttttccccaatttgtggtttctttttcctttttgcagaaaatgcaaacaaaagaaaaacgaggttttcaattgaaggtacatctcttcttcaatatgaagacattaattgaattggttggatccccatgcagtggtcagcaaagtcctttggcaactgacagaacaacatctggagactcaggagctgggttttgtttgaagaaacttccctacaggagtcatgagcaaagggaaacgagtgtgggagaagggaggggactctcagggaggagtacgaaaggagaaaagaaaagaatgtcattggtgaggaagaaaatggaacactgcttctgtttcttccctctacctccttccctttcttcctgtggttgggcaactgcagcccactgagagtgggagctgggtttactcttgttct

SEQ ID NO: 146140 - DNA, 687 bp, Homo Sapiens
atctgaagtggggtagaactggtgtttgaggtagtaggcgtgagccaccacagccccggtcagcgccaggctggccgccatcatcactgccgtgcggaacattgccctggcccggagacctgcatggggcaagaaaataacttatgtgatgctcgtgctgtgcaaaatagcccagtgcctggcacagcctcaattcataggagaaagtgggggggaaatcacatttcgccctcgaaatcatcagacaaagaatagcttacgctaccccattttacaaattggactcgaaggggttaagtgatcacactgacgcaaggcctggaacctgggtcagtcttgcttcaaatctagggctctttccacgctgcctgccaagccgcctcctctagggaggtgatgaggaaaagctgcaatgttggaggagggggagctgcaccgctgaccctccggtggagaagatggggtgggaggcaacagcagaaatctgctccaggggcgggaatgcgcagccagggctgagagcagccaaggcacagaggatagcaggctgggcaggcgacagcgccggtgacagctgtgttagggtgggcagttcggtacgcccgccctgcgggagcgggcggggaacgtcagcctggaatcctggggtcccccgacccccggagtagtgtcaactcagagcaccac

SEQ ID NO: 146141 - DNA, 728 bp, Homo Sapiens
ggaggtccacggagtgcagcacatacttgatgaagatgttagcaccatcgtcatcaggatggcatactcaaagccaaacaccagctgcacagaggccccacgggtcaggatgctgtgataggcgtggctgacgaagaggaagtccaggatgcccaggaggaacataagagagacaatgcggcagtgaaagagccaggagatgttggggctgcgttccataaagtccacacggtcctcagccagccagtggaaacatttgaggaagagaagaagagtgaagagtgcaacaaagcgggggctgaagtcatcccgaaaaacggtgaaggccagacaagtctctgtgacggcgtaccaggaacgttccagaaggtgctccatctctgctgccctcagttgcccaaagaacaccttgcccatcaccttgcccagaaggaagacaaggacaaaggcctggatgtacaggactgccatgctggggctggacttggtcaggtacaccacagtggggtagaactggtgtttgaggtagtaggcgtgagccaccacagccccggtcagcgccaggctggccgccatcatcactgccgtgcggaacattgccctggcccggagaccaggaacccagcgccgcgagcccgctcaatccgcgcgactgcggctgcccctccggttaacaacactccccacccccctcgtgccgaattcggcgcgccgtcgacttcatctct

SEQ ID NO: 146142 - DNA, 468 bp, Homo Sapiens
tttttagtgttttaattatctttatttaaaaaataaacacctgaaattgacatctgtaggttcagaatatgacttaacaaaggatttgttaaataatttcacctcttttggtaattcccaatcagtaatgttgatatgactggctataaatagattgagtctgctgtgatctaccttcatttttagaagaatgtacaagttttatgttccaccagtggttttctaacgtcagtacagattcatctgtagaattaggtcatgtcctttgagccaaagatctccaggtttttcctccatcttgatgaaaatccttcctggccagtttgctaagactgaactgtcttctggaaggccccagcgaacattcactctcctgttctagctcacagtcctgtgttcctttgtgatgtacctcacttagcttctggcagtcttctgaatccagaccactcacttctgaactctagc

SEQ ID NO: 146143 - DNA, 565 bp, Homo Sapiens
caaattggcaaacagctttattttctttttagaattccaatacctagtttggtgagacaggaggtttcatgagctgcctgtgggagggtaagttgtttcatcacttctggaaggcaatttggctaagtgtcaagcactgctaaaatattcacatcccttaatccagcaatttttctttagagcaagtttcccattgtgtagttcgtaatattgaagtccagatgaaaacacttgcccttgaacttttgtgaataagtagttgagctggaaacctaagtttctctggctccagagccttatttcatttaaaccacataaaactgtgtaaagcagttgttattttctttcatacatcaggatttttgctaatagtgttggttaggagaaagacgagccaaaatgcctaggttccattcccagttttgccacttaatgactgtgtgatcttgagcaagttgcttaacttctctgtgcctgagtttcttggttcattcgcgttctccattctatcagccccagaacctaaggcctaggaagccagggcaagggtggagcctccgattca

SEQ ID NO: 146144 - DNA, 691 bp, Homo Sapiens
tttttttgaaagttccagaatggagtacgcagccccatttctttgtttgcttattttcgagagggatgtttatcatgatgctagggaaaacttgaatagagaagaggtggtaaggagagagtggggtggcattttcttccatacatctattttcaaaaaggatccgattccagcaacaaagtgtcgacttcactcctccacagccaccaagaagaacggcttctgtggacacttcccagcttgcaaatgtttcctctccgaggtcacacaaatagctgatacatccatttccctgaaataaatgccatcatggaggtcttcttgtagctgtcagaggttatgagcagtgttgatggagtggggtaatgacattgcaaagtgattgaaagggtttagcacgtgatttcctatttggttcagacaaaataaaaccattatctgtgcttcatcttttttaaagagattgtttcctgagctctttcgtgcttgaagcctgttgcagcacccagggacaatattagcctgtcacaattatagatcagttcatcaccacagtcagcctccaatctccttgaactctttccagaggaaatgacttttctgggtctgtattatccccgggtatgtcgacttttgaaaaagatgttgctgcagtcattcatttaactgggagagctgtctgacagcacag

SEQ ID NO: 146145 - DNA, 671 bp, Homo Sapiens
  misc_feature (205)..(217): n is a, c, g, or t
  misc_feature (347)..(366): n is a, c, g, or t
  misc_feature (617)..(625): n is a, c, g, or t
cattccacagcttttattctataagaacataaacatcgtctttttccacgcacagcagcaatacaatattaatttattctgatttaagattagaagtaaatagagctagaactaacatttataataacgatagaatgcatttgcttaaaacaagattggcaattcttcataataatagacatttatacagatttgtatttatagnnnnnnnnnnnnnctgcatctacaggtttgacccttttatgcatgtaacttcacagtataaaggaaatccaaacaatgtctcccttctctagtttattccgcttaccccagtcctcctaggcttctgtgaatttcagaaagcnnnnnnnnnnnnnnnnnnnnctttttgttcaaggcgatttaaaaaaacaacttcacaagatagggagaattgtggtgtgcttgtcacatgttaccagtggtaacaattttaatgtcaaaaaaatccactaattccaaatgcataaacaaaactacattatttatctacagccagaaggatatggaaatttagaggtaaatgaaacattttagtcaggcaatgtaagaccttacagaaactggaagagaagtccccttctcttggtaattcnnnnnnnnnccggacgcgtggtcgacgatatcccgggaattccggaccggtccag

SEQ ID NO: 146146 - DNA, 365 bp, Homo Sapiens
cttttcacttttaataaagtttattttttagagcagttttgggttccctgtaaaactgagcagaaaatacagaagagttcctatataactcctgaccaccctcctccctcatatctgcatcccccaccagcagagtggtacatgtgttataattcatgaaactatattgacacatcattatcacccaaagtccacaggttacattacaattcactcttggtgttgtacttttggtgttgtatgggttttgagaaatgtataatgatatgtgtccaccattatagtatcatacagagtattttcacagtcataatgatctgtgaatctctgcttattcatccccctctcccttaaactcctgggaa

SEQ ID NO: 146147 - DNA, 353 bp, Homo Sapiens
ttttttttaagaggcaggcaagagtatttaatgggcattgagggtcttggcagtcccaccaggggagtgggcaaagggcaaggcacagaaaggcttccactcagggctcaggaagtgggaggtaaggaggcaggttcaggaggcgggttcaggaggcgggttcggaggtgagctcaggtgctggtgctgtgggcatctccgggtgcacaggggcgagaggaaggccgaacctcgcctgggggctcctgcagcagcaggggcagcactgggcccgtgtggaactcctggagagctgcagcctcaccacgccccgggggtcccttccctgctttgtagggacccagaggttgggg

SEQ ID NO: 146148 - DNA, 525 bp, Homo Sapiens
ggtgtacacgtttcattttttgaagctgcttaaaagattcctagccatgctgccaggcactcagatttgtgcaatgtttacaatgactttgttgttcattaaacaaatttacctagactaacccaacatgagagaaatcatcttgtttacagtgagatcctgacaaaaatacgtgtagcaaagacagacaaacacacataaacctggattgccgggtgggacatgatttgctgccacattcaatttttctcattagaacttgttttatttgagcatgactcagtaccccgtgtaaatgcgaggttgttaatcttattactatatggaaaacaaattaattagtatgcatgcttttgagatgagtttttaggttggtgttggaaagattaggaaaatacactcattactccaaatggtatctgataatacacatctgacttccactttaagatctgttccaatatatgggcaacaaatatagctaataaaaatcaagcttttgggctcagcagctaaatgttcatg

SEQ ID NO: 146149 - DNA, 193 bp, Homo Sapiens
ttgatttaaaaatttttttattcaaatattaattttatcaaatgaaacaagaatctttgatgatactttgatgtaaaaaaatgtttcattcatgtgtttgcactttccatggtttaatttgtttagggtaaattgtccaacctgaaatataaattatccctttgcttaatatactctttatttcttcagaaac

SEQ ID NO: 146150 - DNA, 540 bp, Homo Sapiens
acaatgatccctaccctggattcatttattttgaaatggtgggcaagtgcagcagcagacctcaatccatggtatatctcaagcaattcagctttttcttgtaatgtcatgactcttctctgcttcgttgaagcacttcctagcaccatcaccggtggcactttgtatgggtcccatggtattattcaaggtttatgatattgcagtaaacatgatgaaaaataaggcagaaccatgagagagaactttttactgagatacgcatcgctgaagagacaaactgctctttcaaaggtaattagccccccacagctttttaagtggatactcacaacagctgagctcaccaatacagcaacaggagacggctataaaattattatagtagtacagtaacatactacactcaattgcatgcagttatgatttaatatggtatctttgtggtttgttcacatttctctggactgtgaatgacaccatctatggtttgtgggtgtttgttcccataagagtttgtgtgcatatgttttgataaat

SEQ ID NO: 146151 - DNA, 496 bp, Homo Sapiens
tttgctggttaatttgggttttaatggatgaataggagtttgccaggcagacagagaggaatgagaacattccaggcacagggaacagcatatgcaaaggtatggaggcctgaagtaggaaactactagagcataaagtgcaagaggttgatggcgatactcccaggtcctacctttaccccaagcttggaaggtgcctaaatcgaggggggctgtgaacgcacgcccctgcctccattttctcctgagcctgagtggagataaagaaactgctgattcaaagatgaatagaaagaactcagactccagagtagatggccatggcgtgaaaccttttaccctgtgcaaactgggtccatattttcctcatctgtgacatggggatgaggtacttgatttgctgagagttaaacaagacaagtgaataaagggctgggcacaggcctggctcacggtaggcactcaatgccaggcttcctcgttcttgtccccaccc

SEQ ID NO: 146152 - DNA, 592 bp, Homo Sapiens
  misc_feature (390)..(424): n is a, c, g, or t
aaaattaaaacgtttgatttattaataaacaaagtatctctcttaaatgggccaagaaacaattctatgacaaaagtgaaccctggaatatagatattcccagaagacaattttccaggatacccagccaaacgattttcacctagtcacaaaagtcattttcatcgaagcctacagtcattcctttttctaattctattctctcatttctttctaaacatgattttaataaagcatatacctgtcaaagacttctctttgcaaaagacataggaacagcagtcaggaagaggactctgaagcccagtcactccacagatccaaagtttatggctgtgtgcccttgtaacttagcctctctgcatctgtttccttgtctgtagtggtacnnnnnnnnnnnnnnnnnnnnnnnnnnnnnnnnnnntcataagagtgttgatggttaaatacaagagtgaataacttaagacatatagaacagtgccaagcatgtactaaatgctcaaaagagtttgagctattatcactccagctttttcatcaaaccaaatggtatcctcctaagcgccaccgtgactagtgtccggctcga

SEQ ID NO: 146153 - DNA, 991 bp, Homo Sapiens
tctttttttaaaagtttattattgttgccaatatataatagcttactatgtgtaggtatcctacctacattatctctaatcctcaatataaccccatgaggtaggttgtgttaattacattttgcacgtgaagaaactgaggcccagggaggctaaatgattttccctgtcatgcattcagctgcagacatggaaactgaacctatgtatgtctcacccagagcccaaattaccaatcctcctgttggtagttgtataaagacaaggtggtttaaacagatttccagactgagtcacaaaacactgacaactcaagtactgaagaaaaaggaagacaaaggtgtaaatgtaattatggtgggaaatattaaacatgtattttttaatgtccacaaacccactaaaattaaatcaactcaataaatagaatacacatgtagtaaatcatgcctgacatataggcatattctggtttcagtggttaactggatctaaaaactgattctttatgaaaatactaatgaaatacacatactgaaggtaaaggttttcaaagcacaatacaaagttggaaatgaaggtagaaatataacagttttttttctccatatcagacaggtaatgtactaacgctgtaacaagctctttgggaggcacatctcatacatgcaatgggaacacctaattactatgtttatgaactataaaaggatctaagttttaaaagagtatttttaaattggatgttatttgtaaaacaaacttcaaaatcataaacgagtgcaattctactaaagtacccaaagtgataatactaaaaatgctttgatttcattatcctgacattttggattttgtatatatttatattttctctttaattttattacaaacatttggcatatgtctttagtctcttactctcaactctttattttaaccccggccgtaatggccgaattcccgggcatatgtccggtaccgtcgactg

SEQ ID NO: 146154 - DNA, 528 bp, Homo Sapiens
tttaaatattcagtattaaattttattgaatttgtctttagaaaaatttcatagttagaacaggccttacccattttgcacatatatacatatgcaccacctttgcagtggcaacatatatatccacactataaacataccacatttataaatcttgtaaggacaagaaatggagttgaataagtaccccccaacatatacaagaaagttagcatacttaccccgtttttcactacatcagaggcaaaataagaaatcttttaagaaaatctcaagactggctcatggcaaaatgaatatgctaaatttgggggttggtttaagcgtggtatgtgtcaggtaattttgtgattaccaaaaagttttcacttgaaaactaagacctttgctgtttatttcacaatgtgaaatcaataaacctgaggatacaagtctctgtagtgatattctgtatttactcatttttacacatttttgaatgcaattttgctaaggaaggaaagcttacagatgcataaaatgtaactg

SEQ ID NO: 146155 - DNA, 579 bp, Homo Sapiens
ttttccctcacacaggggttttcttggagctcaagtttggatgaccccagacagtaagataatctcatcatggtaaagttaatatgaaatatgtggtctccaaacagcctctcccagaggccaggatcagcaggtttgagtggataattggcttgtggtcattttctcataggatttttcttttagtagtggaaactgtttttcaaatcaaatttggatgccaactatgtggaacagaagtgtggctgctctggtggaagtggcaatggtagtcctagagtctccctgtcagccacaccctttgtctccccctacccaagggaccctgtggcctggaaccgcagtgtgaaatgctatatagtgcaatgaagtcaattcgaagacaagagttctttgcctttctcatctaatttttagttatggatatgagacgcttgttcagaagtatggaaaagtatatataatatgttatcttttagatgtgggtgtaaatatgcttatgtatgcaatatgcttatattttaacgcataaacaacatgaataaagcaaacactctagacttctccaaatgtatcttg

SEQ ID NO: 146156 - DNA, 709 bp, Homo Sapiens
  misc_feature (175)..(191): n is a, c, g, or t
  misc_feature (355)..(355): n is a, c, g, or t
tttaactgaggagataatttttattaactaacatgatctcatttatagctttaaaatgtgcctaaaaatagcaattgtcatggtgattttatttgtttgatagaatgggtgacaattcatatatgaatgaacaagttaccccaagaagacaaacaggttagagtaaccttgtgcnnnnnnnnnnnnnnnnncctccatctgcttccgaagagagcgtgaggttgcctgtgtggtgcctgccttcttgaacgtggtgcagaaaagctggggctctgccggccagtggccacttcctctgtaacaggcaggatgatgtctgctgaggaaaaaactgtggcctgcaaaagctcccaantggacacagttttgatgaaaccggaaattctccccctctcccttgaaccctttctcaagatttcttcaaggatttttaagggcctccaaaataattttggaaaaacaccaaatttgaaggcaattcacgggaagagttcagacaattaaacatgcccaaagggcccacacatgaaactccaaaggacacttcaacttccccttatcatgggacagggttctcccaaaatccctttaaacccctcgtgcgaaatttttggcccaggggcaaatttctataggggtcgggtaaaatcggaaccggtcaaacggttccggtggaaattgtatccggccaattcccaaaaataagggg

SEQ ID NO: 146157 - DNA, 876 bp, Homo Sapiens
  misc_feature (702)..(742): n is a, c, g, or t
tttgtaacattgtgacaactttattaattgctctatttagcagtcacaggaaggacagtaacgtgtgaacaggttttgttgctttgatctttcttatttgcccagaattcctgagtaggcagttcaagtgtgagaaaccaggacctactagaaattggatggatgattcgtacttgactgatttcacaggcaaaatggtgacaagcctttcagcaattttactagcaaaataaggcaattatctttgatgggtgcaatgggagtgcacacctgtgtgtttgttatctggagaaggggtgggggctgcttctgtccacaggagaaggaaggtcagtgggcagtctggtcagctgagcaccccccagcctggctggcccctcatgcaaccccagccctgtcactcgctttctctggtctcagtaggctgcatgacctcttaggctgtttctagccagggcactgagccaggtatggaaaaagataccagcttggaggttaaggctgggccagtgggatcaggaagctgccccagctggggattagcagtcacgcagcaggtaggatgtcctagtcttggcacagctaatctttaatgcctcactgggaattttcaataagaaattcatctcgcgaccctcatggctggggcctttgtccctaagaggcaaacatcttctatgtgagaagactttgtgtaacctnnnnnnnnnnnnnnnnnnnnnnnnnnnnnnnnnnnnnnnnnttgtcactgtttctttttccggaatgactcagaccagccagcctgaacctcgggtgacctctgaggatcccaacctccccacccaccaaggaccctatattatatattatataatattaatcttatgacagatg

SEQ ID NO: 146158 - DNA, 368 bp, Homo Sapiens
ttttttgggctgccagaagattttcttgtaactcatgaaaaacttgctgttgttgggatccccatttcaaaagttccgggtccccgccccatttgtgacctcatacaaaggcttggctaatactgcagtttgggatccacagcctacaaaaccccacagctcctaagaattctctcacctgccttctgcccttaagctccggtagattgcaaataacctgctttctttctgttcccgagctgtgttcggacccgtcggatcgtaaatcccacgtaaggtcggaagatttgaactttctacttggacacctaacacccacagtcctccaggtgggtcctaaggatcttaggagcaacgatgggggggtc

SEQ ID NO: 146159 - DNA, 605 bp, Homo Sapiens
tacctatttactattaggaaagaggtttgttacaagagtccatggcaggaaaacgtggatgcccgaagctagagagaaactggatcctgggagcacagctatgcagctggtacaagaattcatccgagttggcgataagataggtaaaaactgctgcctttccagtgaaacaggtcctcggggtcagcactccgcctgcccttcccccacatcttccccctgctcctggttctctcacccccacgtggctcagcctcaggcctggcccagaaagtgtggatctgagaagggggtgagccaccaaaggccgcagcctcagcctcagctgcgtcgggcctggggtcatctgtggtttgcctgcgtgggaccttaccacaccctctcttctttggagaaagaccctgggtttttcttgtggacccctcacttctactcttggatcatgtggtatgggtgaacctcacctccttaggctccaggtgagcacgtggccccagccctccccacccaccaatgccaggcagcaccgacttgtccattaggtgcagtagggacagtgcctggggcccagaatgcttctaggggctcatggaaatgttttaagt

SEQ ID NO: 146160 - DNA, 353 bp, Homo Sapiens
tttataaaagaaaagttattattgacatacatgagagtatcctggagatcatctggccagatggaagaaatggactcttgactcaaatttcagctctggaaaggaagcaaggtatatagctccttgaatcttgactgtcttgagcttgcttttatatcattccttgatacccactgctgttctggctggctggtccttccttcttccatgtttcagtttcttagaggagcccacagccatttagtgggagagctcttttagttgatccttctactttcttctttccagggcacgcatgtctgcctctatcctatgtgtggcttggctttgtcaaaatagattcctcctagttt

SEQ ID NO: 146161 - DNA, 564 bp, Homo Sapiens
tttactttatctttttccccagatcaagaaataacattgccagagtcctaaaagcctactcatgtgcccttctccaatcacaactccatccctcccttttaaagtatctattatcttgactttgtgaaaatcattttcttgcattttaagaatagtgagctatattcttattcaatatcattttgcctgtttttgaactttacataaatggaattatactgtttatattctttagtgctttttttgaatcattccagattatgccagatccatctctgatactgaatgtaactgtggttcaatcattttctttgctgtatgatattatagtatatgaacataacacaatttatccattctacagttgacagacatctggatgtttccaatttttgactactacaaacaatgctgctatgcacattcttgtacatacatcctggtataacacatacaggtttctctagggtagaattgctggatcacaaggtctgcatgtgttctgaagatacagccaaaatgttttccaaagtagttgttctaacttataccaccggccagata

SEQ ID NO: 146162 - DNA, 332 bp, Homo Sapiens
tacgctcccagtggctggggtccttaactaacgtccatctctcccccagagtcctctcccagtcaccaggtcctggcactctcccctgccccagatgtctagcccagttggcccagagggcacacagaaggtgggctggaaaagtgggaaaggcagtctggattgacttagttttccccacctttgaccaacacacccaattgggctgcagccgatctatggtcgggggaggtaggtgggaacctagatttttggaaatgtgggattggggtttcacacgaaaccatttgttgaaatccaagaaagtgataattatccctagcgattttaga

SEQ ID NO: 146163 - DNA, 1172 bp, Homo Sapiens
  misc_feature (150)..(150): n is a, c, g, or t
  misc_feature (569)..(589): n is a, c, g, or t
tagcgcgagagggagagtacggtgggagcgtcatggctctggcccgtgcctggctgaacgggagacggcgcgcggggtcacacgctacacgcgagccggagcggcgtgggcggcggtcgtatgtggcgcatgcgccgggacggctgaggnccatcgaacgtcaggtcgatgaagaggcgctgcagcggcgtggtgagggggatgcggacgtgcagtgtggcagggcggaggctgcgtgggtgaccggtgggggtcggcagagggcgaagagcggcaggtcggacgcggcgacaagggcgaaagcgagacggttcttatagtgtcgctagttgggcggtcagactcggccgacgatggtgactggaggtaggggcggcgggtcctcggggcaacctctctaggacgtggcgctggtgtggacgaggggtctccatgctgagcaccgcgctgccgaaaggaaagacgagggagacgccctcggtgggcgcagggcgactcagggagggcgcgacgtggcgggagtaacactagagaggggtagcggcagcaggatggtcttttcggaaccnnnnnnnnnnnnnnnnnnnnncatgagcaagtccgcgctccggcctctgcatggaagtgctagggcaagtagcggatttgaaaggtcatacctccactcggcttccacgtgcagacactcatacttgtcctggcacctcacccactgtcatctgtgggtccagccagtggatctcatcggacttcatgtgcttcagcctcagcccatagcctccagccaaccggatgttgggcccgatccgcccgctcagcaggatggaggtgatgatctccgccggatctccgtctggacagtgcatttgaccagtttgaagtttttcccaggattgaagctgttgctatagaagcagaccttgaggatacgcacgtcctccttttccacatctactggtaccaccaccatgggctctgcagggccttcaggggggcgtaacgtgcccaactttactcgactcaggggctcggacaccccagacatcctctcaggcagcagctaagatcggcacattgcagtcccagggaggcgcggactccagcgactactcctcgggcaccgccaggtgagccgggacggcggcaagtacaggtaagtcggccgggcaggt

SEQ ID NO: 146164 - DNA, 423 bp, Homo Sapiens
ttttgcagtcactcaaaagcctttattgtttttattgtggtaaaatatacatgacataaaatttattttaaccatttttagtgtacaatactatggcattaagtacattacattgttaagcaatgatcaccaccagccagctccagaatgttttcatcttccccagctgaaacctattaaacactaattctccatttcctcttttcccccagcctctgtcaaccaaagttccactttctgtctctataaatttgactacgctagatacttcatagaaatggaatcatacagtatttgcttttttgtgactggcttatgtctctgaatgtcttcaaggttcatctgtgttgcagcatgtgtcagaatttcctttttatccattcatccattgccggacacttgggttgtttccaccttttggct

SEQ ID NO: 146165 - DNA, 775 bp, Homo Sapiens
  misc_feature (525)..(554): n is a, c, g, or t
ttttaacagaagggtagcactacttcaccgagcacaaccagatgggagtaggagagaaactggaacagtgttgaccttccctatacaagagaggccaagatcactgatgtctagggtggaatctgtctctaattcacagcaggttcctggggctggagctttagagatgctatggttacacacatagagctggctcctcggcgcttccaagggggaaatatccaggagggatgcctattcctgagaactctttatcgagtcttctcagagcctgccttgagaccgcaaccgatttcgaaaatctcgtctcaagatcaagtctgtgttttcttgctgggatccttcacgcctccatgaatctggcttctctctgttacctgctgcacatcccaagtgtctgtgaggcgatagggctgaggaatctgcagagcctagagcctggagtcacagtgacaattcacacaggtacacaacactgttcatttgtctaacgcacacacacgtacacaaccctgttcattcatnnnnnnnnnnnnnnnnnnnnnnnnnnnnnngtctctcacaggcacacagaaactcctcctctgctgctcaagcagacaggcctgaaattctactgaaactccagggatgacacgccccgttcacgcactgggtcttctggtcttcagcgcctctcatcctcaccgccggttccattccaaccagggactgtggaagcctccgctgatttctgtggacacgatctactcaccacgtaggggctacagcagct

SEQ ID NO: 146166 - DNA, 267 bp, Homo Sapiens
gacagtatgatacatcttacctaatggtaagtaatttaaaatattaaatttatattaaataggtaatatggtgttaaaatgcaacacctacgtgaatttgtaaggcaaaacagtacttcaaagaaatgtatatgcagtgagacatttctagctttatttccagatccctttcaacccaggtaccatttaatctctgtaattaggtgtactctggtggaacactcaccattttttagatgaggaaacagggtcagaaaggtcaagtga

SEQ ID NO: 146167 - DNA, 1001 bp, Homo Sapiens
  misc_feature (105)..(129): n is a, c, g, or t
ccgtgtttcctcatctatggttctaaatattgcttcaatttcaaacttttgaaagatgtatggatttccagtttttctttactttctcccaagtatgttttaacnnnnnnnnnnnnnnnnnnnnnnnnnggaatatttagcagtattgttcgttctgatatgtgaatttgtttgtgacaactaaacaaggcattcagcagtttctgacaattaacatacatcattccacactccttgtcaacaaagtgctttttcactgcctaaaattttagatgtagatatttgaaatagattttttcatttataccagttttctttatgatgatacagtgttaaaagaaaataaattacaattgatctgtctttctttatttgctaattttgtctatttccaagatcctatatcttacaaaatacacatttttgcttgtgttgtctgtgtgtgtgggtgtatgtatgttcacgtactagaaaaattacctgtgtgagattttattttgacagaagctatttcatttgctgttcatcttgtacaaactttgtttttggttttttagtataaatgtacatcagtttgttccttttgtactgtatctattcttctgaccatctagtgactcaggatattaggccagttgaagtggagttataggattttcacacattcacgcatacttggatatcaaccctctctacaggtccgtttccttacacattttatcccctcagaacacgataaaccatggccaattcagtttcactttggggccaattacttgaagtatccacagaaaatgtaaactgctcgccttattcccccaaactttttgttcatgtggcagggagcagtacacaactatggaatagattattaaaactgaacttgaagctaacgttagaatagtggttaacagagctaagaaataaggctaaccatcgaaaagaacatgggccgcgggtaaactagctttgctctttagatgcaagtggctgaggccaat

SEQ ID NO: 146168 - DNA, 535 bp, Homo Sapiens
  misc_feature (196)..(226): n is a, c, g, or t
atcctatatctccacttcaactggcctaatatcctgagtcactagatggtcagaagaatagatacagtacaaaaggaacaaactgatgtacatttatactaaaaaaccaaaaacaaagtttgtacaagatgaacagcaaatgaaatagcttctgtcaaaataaaatctcacacaggtaatttttctagtacgtggnnnnnnnnnnnnnnnnnnnnnnnnnnnnnnnagcaagaatgtgtattttgtaagatataggttcttggaaatagacattcttagcaaatatggatgacagatcaattgtaatttattttcttttaacactgtatcatcataaagaaaactggtataaatgaaaaaatctatttcaaatatctacatctaaaattttaggcagtgaaaaagcactttgttgacaaggagtgtggaatgatgtatgttaattgtcagaaactgctgaatgccttgtttagttgtcacaaacaaattcacatatcagaacgaacaatactgctaaatattccttttttcctgc

SEQ ID NO: 146169 - DNA, 723 bp, Homo Sapiens
ttttaggtgatgagataggtgaggtctctgttttctgatgaggaagctaagccttggaagccaggcttcaaacctagcgggggcataatgatctttccagtgtacatttttgcttttgcaaattagaagagttattaagtttatgagtcagtatcatgaagatcaagatgatatctaaaaggttactggcatgcagtttccataatattgctagaagacaagactgaatcatagcctcccaggaacagaagaaacctcaaaagttatcgaggctgttgtttggcagcaactggagctacgtccaagctggtgggtatgcagcgatgggctgggaactcatctcctcttggaagtggtaagtggtgatatggaggcagtccaactgactccggggtttgaaaaacagaaacatggctgagtaaagccaccaattaaaacagacccttgtgagcactgcaaaagatggtagttttcagcacatggtgcttgtaagtatctgacaatttcatagcttgaaacaattgggcagtcaaataatcaacttgaaatctctgtgcagttcgcaaggttattgcccacaaaatattagctctaagatggtaaaaggctatcatggtaacctgactccaaagtgaattctgtcttcaggaaaatcccaagtcttcaaaggagccaaactttttgaagtgatgaaaatgtcctggaattggatattagtagtgg

SEQ ID NO: 146170 - DNA, 602 bp, Homo Sapiens
  misc_feature (452)..(452): n is a, c, g, or t
gagagtcataaagattcttcaggtcctaaaaacattctggttcccattccttaactgctttggaaatgaacgaggctctttagagagaatgttaacggggatgagtaacgtggtcagcccagcagacgccctgggctatcaagaactgtccaactcattctcccttaggtcagggctgcttgccccagcctaaaatgtaagtggtacaaaatgattttcagtgagggtagttgactcactgtagaaaggggattaaaggggggcagagagttggacttttggccttggcaaaccccaaacacggggaaaagggaccttcctcacaccggtccattctgctgtgggagatgccatggtatatgccctttagagaggcaacgattctgattgagcccagacggtttcccactgtgctcaagacgctctctatgcggtaatttcccgtggtgagnccaaactggcaagtcccagttaaggacaaagaaattcgtccttggcaatgagtaaggtcccttctttgaagggacaatggcaaggagagccattggtacgcaagggctctcggaagggcttcccgtaggaattaacatgttaaggccatc

SEQ ID NO: 146171 - DNA, 574 bp, Homo Sapiens
cagtctcctgacctgatgtgcatcagaatcactgggagaacaaacaaacaaaaatgaatccaaaacaagcaacgaacagacagattctcaagtcttgccaagtccaaagattgatttggtggagaaattgtactttgaaagctgcccagtgatgggatcctaggaaagccatttcatctctccaggccttgcattctcatttctacaatgaagatgtgggctgtgtggcttctaaagccccctgaagtttgagcattttgtgattcaacacaaacacgaagcagtaactgcggtgttgggcttgtggtgcagtttactgccttcagagagttttcaggatgtgacataggaaggaagaacccaggaggggactggtgggtttcctgagttgagaagacagactgctgaaatgtttccaggcagaccatggcagctagagttcagagggcagagcacaagagacgagattgctgcatagaaagagaactccagagatctgcagagggtcctgcttgaggattcaggcaattcatttctaatggcagcttatctactgaatagattttcaatactg

SEQ ID NO: 146172 - DNA, 388 bp, Homo Sapiens
tttccggttccagaaaaatttatttctaggtcagttgaatacaagtttgaactcatttgtagttgaaaacaacgctagaaatagtctttaagttattagatgtgtacacaaatcttacaacataaaagtgcttaagatgaatttcactcacagccagtgaccacttctaacagcagaactttttgcagttcggagaaggagacctgagacacatttacccttcctcaaccacccagaggggattgtttgttaggaggctgccaaggtatagcccagggggttggagatgacctgatgtcatgctgcctccagcacagttggattttggtccttggcttttccctagtgtcattaaacacatcccctaagaaaaatgctcactctttgg

SEQ ID NO: 146173 - DNA, 249 bp, Homo Sapiens
tcgctcccagcctctgaggtctcagcggtctgttcctgaggcattttccgcccccctggaactctcgcagccactttccggcctggtggatgactatggcatcctccccaagcacccaatgccgcgagggcctcgacccctcctgtctagggcccagcagcgcaagcgggacgggcccgaccttgccgagtattactatgatgcacacctatgacccaaggccctcataaagataccatgtgtgacaaa

SEQ ID NO: 146174 - DNA, 550 bp, Homo Sapiens
tttgctttttgttgttgttagctcatcagctatcattagtatcagtgtattttatgtgtggcccaaagcaattcttccaaagtggcccagggaagccaaaagactggacattcctgatctacactatctcgttttgttcattagtttcacagacattaggttaactctccaattagactttaggcagcctgtccctcaactatttataataattcaaagtatacgtactcattgaaaccaccgcctgccagaaagggaactataacgttttcaggcaggcctaagatgagaaagaagctgttaagccaaaatagctgatatctattcaggcaagggggtggggagcagaaaaaacaggagtgacatttacaccgactctgtgcaggtattgtctaaaggggctttcacagccacgacctcgctgaatcaccacaaccatcctctgagaggggtgtatctccattttatagatgagaaaacacacacacatgctatggatcatttttaaaaactaatgcaatgaacaagcctcctttcagtatatattctg

SEQ ID NO: 146175 - DNA, 463 bp, Homo Sapiens
tttgcttatatctccttctttttcttttattaataacttcagatctttccttggtgcacataaccaggtaggcatctgagtgaagcccgcctttcagtctttgaagggactcagctctttgtactatatctcctttttaggaggactacattccatcttgggattgtttgtttgtagtgcacaagatgcatccctgtgtaattttccgagtgatgttttgaaagtgtggtctactgaggtgtggttgtactaggttggcgaggacatcactcccatagtgcgttcctttatgtagatgttttgagattggataaaccaaggccttggggtttcatcatcctgtaggcgttatcttataggtgtcagttttctaggggaattggaatctcttttctcaaacccctggcttgggcacgtttgggatcttgttcagtgtaatgaggtttaaaatctagtaattcca

SEQ ID NO: 146176 - DNA, 303 bp, Homo Sapiens
ctattaagttttggtaattttcatatttcagttctttgtctcttagagttttattaagaatacttaattttattaactggcttttgacattgatgtagacaatatgttgatgtaatgaatgttacagattatttttcttatgttattggaaaacattttaatcatgatgtcttgcttggaacttctattcttgaaacacaaagggcagtagagttctatttatacaatttactaattatgtttcttccatctccaaaaggaaattgagtttccttacaataaaagaatacattaaaatagaaa

SEQ ID NO: 146177 - DNA, 310 bp, Homo Sapiens
cttttaatgtttaatccttagcttttcctttgagttgagagtgacccttatatccttccaacaaatttcttaagttaatctgttaaattaactgcttgtaaccagttgtagtatttatagcactgcctaaaaatccaggactcaaataacaggtaaactaaattgtggcatgattttgagagtttgttagagtttaagagaatgtattttactgactgtgatgcttagaacattctattttgaatagcatgagttggtgacagaggattaattttcttcctgtatctgtaataaataacatttccataaa

SEQ ID NO: 146178 - DNA, 601 bp, Homo Sapiens
aacatgtaaatctgatttatttaatttgaagagtttaaatccaaaaaaatggggagccagcaatacccaaggaaccaaagttgaccaaagtgaatgccactaatgacacattcgacaaaagcttgagaaagtgggaaagtcttaggaagctggaggttcagtgttgcccccatccctccaccatcattgacaaactgtggcagtttaggcaaatcaggaaatctctctcccagtcccagaatgagcatgtgtaaaatgagactaatgatccttgccctcccgccattcaggatatgatacgtcattacaggagacaacaagtaggaaagcactgagagaattgtgaagtactgggtagagttgggacttactgtgattattatcaccaaggacatctgtctagtaatcatcaaagcccaaaatattttttttccttgaaaaataatggtgtatccgttacacacagtgatcagttcctggcatacactacatttataaataattgtaacaaccacattattctgtctatatgcaagaaaacatggtataatgaaagaacccagagagaaaccagattgttttcaattctccagtttcaagg

SEQ ID NO: 146179 - DNA, 584 bp, Homo Sapiens
  misc_feature (419)..(427): n is a, c, g, or t
tgtttattgacttcttgaaaaatgctatgtgtcttgccagacttagcttacaagtttggttaaagagagactgacatgagcataaaggaagggacattgaaagaggcagagatgaaggaagaaattgtaacttactccttttatcccacccatcaaaggaaagacaagttgacattcccagggtggatggatccaggcaggacaggatcagaagttgcagtcttaattggaccaactcacgcatgtcaccagccgagtagtattgattctgcaacaaactgagaagaaacctggcgattcacaacagagagctgagaaatcctaagtctggattccagctaaatgggagcagactaaatagagcggcagtcggcgaactacatgtagcccatgaacaaaatccggtccagcacgtgtgnnnnnnnnnacggcccacaaatgagtctgtctttacagatgaatgttaaaactgggttgacaagagagaacactcactttgaaccgcaactaaacaaaatattatcacctttcccctcaaaaaaggtttttgttcttctcattagtaaatttgtattatgacaaaa

SEQ ID NO: 146180 - DNA, 789 bp, Homo Sapiens
tttttgggaagttacaatactttaatgtttgctctgtcactcttttaaattgttcttcttccggtgggggaggggaaaacactttggagcttaaaagtgggaattcatttgaaagagggtgaaaatctaaagaagcagtatgcccttgcttccaaacctaggtaagagatatgaaaacttacccttccagccaagacaagttttaaccattataagggcaggtaggtaatattagactgtttgagacccctatatctgttataaacctcattgagcatagagtgatagtcaggaatgggctggctctgcagccagattatccgagttcaaatctagtctctttcactttccaggtgtaaagtcttaggcaagtaacttagcttagcctctctgtgcctctgtttcaaatacactggggataatagtagtacttatcttcatttgggtttctccaaaatagaacatgacaagatcttggatgcaggtatttggcttgggagaattctctggaaggagttacaaatgacaagagtgagacagagctacaataggagtaaattacagaagttgcttctataagcaatggaagtttgactcagctgagacttccaagagtgtacagaatgcctcttagaattgtccattcaaagggtgggaagctagagaatttacccaccagctcctgtgcatctgtggttgagggttgccctgagaatgttaaatccacttcacttctgtgccaggacattagaaagatctagtgacttcctgcactttagagaaggcctg

SEQ ID NO: 146181 - DNA, 539 bp, Homo Sapiens
  misc_feature (126)..(139): n is a, c, g, or t
  misc_feature (323)..(323): n is a, c, g, or t
cttgcgttttagaccttggcaaagtccccaggactttggagcaagcctctcatcccacttattttggttttctgcagccctttctccaaaagtttccaagctggtctccgtggggtgacgcccccnnnnnnnnnnnnnntcaggaggtccaaggacatctttctcacacttgatctgctttctccctagaaacgcgtcgaacctctgtccctggtcctcctaaattgctctgtggcgcgtctacggtgtgttttgtgtgtatatcctgtttggctttccttggccctttccatttgaggccttgcagctgtttttgaggttgnatgaaattcacataccataaaatgcaccatttcaaaggggcgtttaacacgcttccagaattgtacagcccccattactgctccccaaaaaaagaagccctgtgccttttagcagctgtgccctctttctctgccctagcttgtgcccacctccagcccaccgtctctgtaggtttgtctgttctggatgtttctgtgaggccgaaaaataaaaaa

SEQ ID NO: 146182 - DNA, 281 bp, Homo Sapiens
ttttggttttcatcagttccctttattttttacccaaactcttcattcatcagatgtttccacacatcagcaatcactgacactgacttctggtcatgactttttctttcttattggggtgctgaaaacagagggcagttatcctcccaaaaagaaggtaaagcagcacagggaggcaagggctagggatggggcccccagcaagaggctctcagaagttgaagcagcaacattccataggaaacccatgggaggaaagtatggggtcctggtgggggatg

SEQ ID NO: 146183 - DNA, 1382 bp, Homo Sapiens
catagcttagataccctcagagacagggaatagcccttagtcctgggcactcatcccacccccaccactttttaaataaaaagaaattaaagtttaatacaaaatgtggggagggaaaagggaggaggtcagggaagagacaagagagctgccctcacctccagggcatagggggcttaaaggcagcaaaagaagcatggggggttcggggcacacaggtcccctgcccacagccctcaggagtctcggtgctccagggagatgctgggccgtggcatgctggaggtcagagctcacccgccttggggtgaggggccccccagcctccccaggcccctccccacgcaccttcttgtcctcaccctcatcctcaaagcccccagcggggcccccacccccttcgaggcgacagtcttcactccagcgccagcttaaagcgtagcttgaggggcatgcactgggatgccccgggtgcctcgccgggctcaggcttagggggtgcaggtggggcacggggcgtcttgaacacctccccgtcttcctcatcctcatcactgatgtcagtcacctctacctcctccgactcgccttccgagatgggctccaccttgatctgtggtggcgggggcggtggggctagcgcccctgccccctcagccagcccgcctgcacatgccaccgctcttgtcagcaccggctacggccttctccccagctgcccgctgccggcgtccgagtgggggcggctggagcttaaacttgaatggggaggaagaagaagaagaggatgacgaggccgaggaggggaccggtggggtctcgggtgccatgggcggcagcgggcacttgtcagggcgctggggctggggcaccaccagcccagggtagtgcaggaaggcgcgggggctgaggtggtagttgtagacgctttgggtgtgggcctgcaggtaccgtttcatgtcctcagggctgaaggagaagtgggagcctccccctgagccgctgggccccccgccaccactggggtacatcgggctcagcgtgggcgagggagtgtaggccaggtgggtgggcgtcatgggcagagccggggagagctgagggggcagcagggatccaggaccggccagaggcgacacagggaaggggctgaggggttcagggccaccccgaggccggggatagactctgaagacaccagggtcatggggcaggcgggccagcgggggcgctcggaaggcacccagatccggggggccgggtggtcgggcgccgggatcctctcccagcggttcctccagctcttaactgccatcactacagtcactgactgagcctcggcccaagcggcggggccccacagcccggaaaagggaagatga

SEQ ID NO: 146184 - DNA, 619 bp, Homo Sapiens
tttgggagataagaggttactttagtttatttgtacaggtctactgaagcaacaatttccaatcctggggatagggttattttcttgtcccggcacagggaaggcatctttctccatggaagttttatggcttgctatatgcaggaaaagacaggtcagatagtcacttctggaactacagtttccaaagtactttgagcttgaagtaatcaatacactaatttgacatattttagagctgcaggcatacttttaactcctttattttccctgtctgaaacttccctaacagtttcaaattaaaagctgaattagtatttgtggagagaagagttgtataagtagctgagtggcaggggatcttgtcatgcatccggctccggatttgacccaccaggcacttgcatcagcaggaacgaaaataagttcagataattttgcacaaactagatgctgatatacccagcaatcagatggcttagttcacgtggccagggtttggaagactggagcaaagggatgtcagttctgtgcccaaacatcagaagaaacagtagtttccatggccctttccgtctagatggtttgtaccaccctttatcaatgaacaaaggtgtgt

SEQ ID NO: 146185 - DNA, 339 bp, Homo Sapiens
tttgagggattcaagaatagtttatttcaaaatagagtttacaagacagggtatcttttattaaattttcacataaaaagaaaaagtacacagggcactaattacgagtaacaccacaattaattgggcctcattcctctgtaaagaataggcaagcaacgagtcattttagtaacattttttcctggtcttttactttctgtatcctcttttcttgatttctgatcattgaagacattgcttggttcttcagctgtaaatcttctaccagagtttgcaagctttctagtctgttctgaagcttcctgcatgtttttcctgttgtttctattggcggag

SEQ ID NO: 146186 - DNA, 532 bp, Homo Sapiens
  misc_feature (16)..(16): n is a, c, g, or t
  misc_feature (35)..(35): n is a, c, g, or t
cgacatgtttttggtntgcttctctgcccgtggcnaagaggggtttaaaaaggggcttgtttaattaattaaatacaaggatgaggccaggcagggcgggggaggggcgccacccacggaaagcacacgcctctcggagccgcctcccctgcaaacggctggaaccaggtcccagtgatcagcgactcctgggagagtggaggggtgggcgcaggtctctccaagcccctggacactggagaggggcccagttatagagttctggaacccacagccctacctacccctgctccagacaggcccctgccagggctggggccaaccaagactcacaaaggaaaacggggccccagtcccccacccacccccacagactaaggcatctcactagcgctgccagaagagggtttgaggctagggacagagaacacagagagccgagggctggatggggcaggaccctccgagcccagctccagaagggcgtcccctgcctccctccccccaggatcccaggcacccatccctggac

SEQ ID NO: 146187 - DNA, 376 bp, Homo Sapiens
cgactgtccctgggcttggggccagccccttgtctactagctaaatttaggcctgtccatggcccagagggggctggaaatcttctcccgtgcaccggccctgctgacagcccgacacgcaggccgagagggctgagctcacagcctgacattccaggccgatcacagcagccccaggggcctcctcaccactgcacagggctggatcctgtctccttgccactcggacctcggtgcctgccccagaaccttgcaagtttggggtttattgtgtgttttgtttcccctgtcagcctgggggctcctgaggactgtgcctcccctccagactctggttctcctccacggctgtacctcctccatcagtgtgcaggct

SEQ ID NO: 146188 - DNA, 560 bp, Homo Sapiens
ttttttaggtttgaaatgattgtttattgggcccattcactgtctgttgctttcccagagcttctgggcccaggtctggctcaggcccacaaagacaccaaacccaaggaccagggcaacagctggcagcaaaaggaccgcccaaaggagaggtctcaggctggagttcccattggagtctgtgggcccaagtgtgggctcctgcccataagaatcctcaaagcccactggccccggagagctcacgatgtcctggggcctggcagtgtcattacggtgacctgaggatcgtcgctgtcctgtagtgccagtgctacatgcagtggagcaagtctccaagcctgaagtgttggaaggcagagatgctgcagaccaagtaaccagttccctgaaggctccctgggaggctgagtcccagaaggccgaagtaagcacagtgaaatcgctggaattcgacctggaaagtgttggccccgtcaaagctacaatttgggttctgtaactgttcgcccttgaaaggcattcgtctgaaagaatggccactggggctgctgaaaggg

SEQ ID NO: 146189 - DNA, 803 bp, Homo Sapiens
tttttcttttgtaaaatctattttgaacaagtgcctcaagtgaataataatggctcttattgtagttattaatattactattatggtaatgttgataactacttaaggtcatgtaaagctgtgtcatgtgtagttaattactatatattaatattacaatagcaatatgaataactatcatggcacacctttacatgacacacataccccttcgtgatttttgcccagatggtcttttgtccttattctcctccctcccaactcatcccaggtaactggctgtccagaatgtactatgcaccctcaagaccccatctctttgtgtgctgatttattttcctggaccatgtccttccccttctctgcttgatgaactctaagaccaaaagacttctctaagaactgagtcccctactttgtgctcccacagaatgttgtaattatgtcttacatttgtctttcactttcctttcttgatagattgggccatattttatccttaaatttcaaaaatatagcaatattcctggcacatagtaggcattcaataaattcttcatgaatgaataaatgaaaatgagtaaatgaatctattcttatttaggttttcttaaatatacgctttgcattttcctacaaagtctagatcgatatagaaaaacaaagcaaaatggaaagaaacattttaattctgtatttccctttgcttcttgatgcaaagcatctttagaaaagttcagtataactctgtgcttgcctgagaaatatgtataaggagataatttatatagtgtactcgacac

SEQ ID NO: 146190 - DNA, 491 bp, Homo Sapiens
  misc_feature (19)..(19): n is a, c, g, or t
  misc_feature (44)..(44): n is a, c, g, or t
gccacccaatagaagtagngttctatagtctcagggggcctagncaaataaatgaaataagctggcaaatcaaattcctcagtcctaagcaacttttaatatagcagttaaattagaactagtatccagaagagatcataaagaaaataaactctagagcaaaaattaaataataattaaacacaaaactttctaacagatgactaacataatggtatttaagctaactctgctatttttctagaacatttagaataaattctgaagctccaagaagctaagatcctatcaccaaactgtgactcagctgtcctgcccacagaatgtttgaagttaccaataaagcactctctcttccccacctgtttttataacaagttcctaagaatcttcagaaataactctttgctgacttttctctcctcagagactttaagaaaagctccttttctatccctgatctagttatctcttctgtgtacaatcttaaa

SEQ ID NO: 146191 - DNA, 291 bp, Homo Sapiens
  misc_feature (65)..(112): n is a, c, g, or t
aggctggaaagtgactttaaatttctcacaccattttatacactgtgttttaatgtttggaggtnnnnnnnnnnnnnnnnnnnnnnnnnnnnnnnnnnnnnnnnnnnnnnnngcacttgttaatacaggatttattttgggggatggtttctcagaggtaaactaagtcttttcactgtctctatctctctatatatttctagtcattgtgtgtgttcatcagatagttctgtctttatgtcctgtcagcttctattagaggaatgattgctatgacctcatggtatagca

SEQ ID NO: 146192 - DNA, 463 bp, Homo Sapiens
gttatttggggggttggggggttttttagcggggaggagtgaagagagtgaggtttggggatccttctcggagagagaaaggcgggcgtcgtcccttgtgccccgcgcaggccgacgcgcttagccgattccgcacgttgggcaagtgggggcacagcgtccccgggcactccggtcccggcaggtcagcctctcccgggcagcgctcacacccagtcctccgagcctggggttccacggccgaaatgcctaatgcaaagattgcaaattgcttttcaggcacatttaacagcgactgtagctgttccttatccagggcagggaactgtgctgataatcactctgcaaagcacgcagtggtttgcagagcggtctcactccggctacgcagaatttcagctccttgcctccacctccacctccactccaggacacgccatcccgggaattccggaccggtcca

SEQ ID NO: 146193 - DNA, 578 bp, Homo Sapiens
tttaaacctggaaataaactttaatttgggatttcaagttttaagttgtgatcagtttcagttccaaaatttcacaaaggacaaccttcatcttattaaaaacaattataatatgaaagaaaataatcctcaaaagttttgaagtgtatttctgacataaactaattttaacggtcaaagttggagacaacaaataacacaacattacaacccgttcgatgcaaaaatgtattatatgccatgccagactgtcatgtgttttttgagaagataagttgagggatgataagatagatcaagggaaatgagatgttcatattgggcttcaggaagcctttacaaagttctctctccatatatccaccttcgtgtctagtacacctaacaaacttctagtcatatccattatatgtaatttggacatgggtccaagcagaactcccactccaatacttcgtttctatgaattcaaagaaatcagttttactcttgacttcaaagtatgatgtttgccattaaaattctatttatctgtcacccaaataaacacttataaatacaaataagtatacttattt

SEQ ID NO: 146194 - DNA, 415 bp, Homo Sapiens
gggtgaagccatcagggccgcggacattgacgtccatgcagtcggcgtcaacctcaccctgggggcggtgtgggggccatggcagacatgcgcaggtcagcggcatccaggtgctgctgagtccactgccggtggtctgtctggtcgtccaggtcaggcagaaccacgggctcctcgaaccggaacttcttggtctccaggtcctcgtccccccactcattctggttgtcgtccatgagggcaccgtctgaagcgttcttccggggcttgaggcccacgggagtcctcgccgaggggctcccgccgcttcttcttgctggcctcagacactttgaagccctcagggaaccagagctggccatgctgccgccggcgcttgcgggacagcagcaccccgcagcccacgaaggaccgg

SEQ ID NO: 146195 - DNA, 217 bp, Homo Sapiens
gtggggtgttcctcgcgtccctgtccttgaaggacctccttcccccagcctcatcaccgtgctcttctcagcgccaccctcagcagccagattgcaacaccagggagaggcggatgcagagcccccccggtgggaaagttgcctgtggaagggagccttttgctacaatttgtaacttattttctaaagtctattttgtaacaatttatttaagttt

SEQ ID NO: 146196 - DNA, 622 bp, Homo Sapiens
tttggcaagcaaggggagctcaccaactcccaagtattctgtttattctctcatatttttcctagaaaacatcttgaatgacactccaggtaactatacaaattcaagcaaagtttgttgtcatttagtctatttgctcagctttctcgaatctccaaaacaaaagcacctctcatgtcaggttccacccgagcctccgtcccccaatgctgttgaagcttcattctgaaatggtgaggtctgtaaaagcaggtctcagctaaagctctccaccgatcgtaagcattaccaaagacctgctccctcaaagccactacttgaagtagttgagtcctgccaccaagaaaaacttctccaggaagagttctgaatccagcacagcgatgtgagcggctcggccgatcagggtgttggcagtgttgggcagggcgtggaacacgttgtgtcggattaaagtgcagtccttggcttcaaccagagggcccaggaggttgttgatcatttctgcataaactggccctgtgtgtctgtctttgagggcagttttacacatttcaatcctggctgaatgaaatggcacataacggtcttggggagaagcaaccagcacgacgtttttaaa

SEQ ID NO: 146197 - DNA, 544 bp, Homo Sapiens
ttttccttgatttaaaggtatttaatgaacaacaaaaacacttatttatatgattgcaatttgcatttttcagtaatctacatcatcctcagacctttcaagtttcctatgtgacttatatagtgagtttctgtgcttagtaccactggtgctcatttgtcaaaacagtttgctaaatattgacaatgcattccgcaaacataggcctgagaagacaaatatttccatgtattccaattacaagcgttcggccccttccttagagagtccatatctcagcactcatgctggggtgaccccttcacaagagtttgcaaactcaaatgcttactagctacgtagttccagttctggtgtggaaatgtgggctctgtatgttcagatcctccaactttttaaatgaaactagaatgctagagttttatgaaggaatctcctgatttttaagtttttgaaactttgtaagaagagaaaaactatatgtctgggccaacagacaggttttcttccggacgtgccctctgtctgcaatttcagtctctgc

SEQ ID NO: 146198 - DNA, 562 bp, Homo Sapiens
ggaaacaatttaaaccagggtaaaatgggatccatcggactggactctggaactcaggtaactgcttggtggggaggggcgcgtggaaactcccttccttcaatctgttggcttatttgagttcagtggtgaaacaaacagattcttttcaacggctggaccggatccccagagaggccgcctctgctgtttttctggagcattttcaaggaagcaccttgaaatggcttcacgtctctcattgtctaactgtcccagatggctccgcactgccctggggggccgtagcacaccaagtggcaccagcattgctgggagaggcactttcccccatcagcccaggagcagcacataccccgcttcccaaagtcacagaggagcagatagcgtcagaatctgtcatgtcaggaggtgaatatcctctcctgctgcctcaagggtaaaagagcaggaagaaaggctcatgcttggcccttagtcttcactggagagaaagggaaggaacagctgagggaagaggaagggtaggccagggagacagggaggaaaggaagccaggaaa

SEQ ID NO: 146199 - DNA, 785 bp, Homo Sapiens
  misc_feature (85)..(274): n is a, c, g, or t
atcaaattatatgtatcttgttattttccattcctcctagcccagcgcctagataataataggctcttaattaaattcaaacgannnnnnnnnnnnnnnnnnnnnnnnnnnnnnnnnnnnnnnnnnnnnnnnnnnnnnnnnnnnnnnnnnnnnnnnnnnnnnnnnnnnnnnnnnnnnnnnnnnnnnnnnnnnnnnnnnnnnnnnnnnnnnnnnnnnnnnnnnnnnnnnnnnnnnnnnnnnnnnnnnnnnnnnnnnnnnnnnnnnnnnnnnnnnntattggtgaatttcctatgtagtaatgaatgaaagccagaatgtactgagtaggtgctatgctaggcacttcatatttgttaccttttttccccctgataccaggctggctgcacatgcagagttctgccccatccaaacatgtctgaaacatcagttggcacacctcccaagagctctattgcatgagggaatgaggtgccttctgggagagaactcattctgagagactgcgaagcagcagccaccagcttgaaagggaacaactaagagaaactgtgctgcagagaaaacctatatatagatatacaacaagaaaataaactataagattaatacatgcatgtttaatactggaaaaaaatcacagccctccaaagtttctccatatttcaagtcgacagttatttttctctcaaaactttgaggatttaattctactgtttctggtattcattgttactgataactcgtttatatttggtaaaataaaaataagctgcttttccctt

SEQ ID NO: 146200 - DNA, 526 bp, Homo Sapiens
tttttttcttagttaaatttcttcatttattatatttcttattgtcttcattatatcttgctttataccagaactgtgacaaagggcaattagttttagagaaagtgaagaaaggtaggaaggttgctttaatttttcccaaacctggcttgagggaaaattcacacatccttcaagtttatgaaacaggcgacggatctttattaaactggccagcagaagaaggtcatctccacttacgtatcggaggattggaatctcctcagggtttggtagcttcactttggttccaacactgattcttgcctgttggcccattgctagaaaagttatagaaatcttgtcttgttctaagatgcggactccaatataacggttcaaagccagaaagacaggtttaaatgaaacaaaggggtgaggaagtgatggaatttgaccaattgcaagcccttattctgtttcgcggctggatttgagtattgacccccaagatattgatgtataccagacatttccattgggatga

SEQ ID NO: 146201 - DNA, 396 bp, Homo Sapiens
tggaaacccagttttaatttgtgaactacaaatggttggcaactgattccttaattgttattgcaggagtaggcccaacatgagtccatatgtagcccttctctggtctggtgggaactgtggggaatggtgatgaccgtgacttgaaatactcagaaggtgcatgacaaacaaattccaagtattccatcttcctttggagatcttcctctggcccctatgatataggaggggggatcaaattggtctcttgggctagagagggtagtaatgagccacgtcagtgctgcactcttctcgcaatactggtcctggataaaacctctgatttgagcatagtagggctttccatctggttcatcaatcacagaaacaacatcaccaatttggtaatat

SEQ ID NO: 146202 - DNA, 446 bp, Homo Sapiens
gtattttgaaaaattcattggtaaaatctaataaaacaagtctataaactgaaatggtattcaattgttaatagaaaatgaaaatctaataaatgtaggaaatgaaaaactacattttaacaagaaaaataagtaatattctataatgtaactaactacaataacatgtgaagtcaccattactttcttaacacgattgacattacattggtatgggttccaacccgtaatgtaataatctaaggctttaatagatgtacagtacaatcagtaaaatcaacacatcagtcttatattagaaagcatctctctcaagcataaaaacttgcagtaaacttggaagtatggaaagttctataactgaactttcacttctcccattccatactataactaccagtgacctggcccctacttcagcaatttttagaactgctgaacagagc

SEQ ID NO: 146203 - DNA, 522 bp, Homo Sapiens
aacagactaatgatacatgtgacaacatggatgaatttcagtcattttgagtaaaagatgccagacatgaaagagtattatgtaccatatggttgtattcatataaaattctagaaatgcaaactaatagtgaagtaacaaaattcagattagcagttgcctgaagctaggccagagacagggatggccagcaaaggggcacaaggaatcttttagagttgataaaaatgttctgtatttttattgtgttggtggtttcatgggtgcacacactgtcaaaatgaacactgaatagatacaattattgtatgtaaataatatcttgctaaagttgattttttaaaatacagaagatagatccatatctgaatatagttcatgtttaaagatcagatcattttattaattgaaatcatttcaagttatagggaagtatataccaatattttatttcttgtaattgcttcattgcaactttaaaatacatcatcactcttagaccatcatagtaagtacaggaaa

SEQ ID NO: 146204 - DNA, 708 bp, Homo Sapiens
  misc_feature (540)..(600): n is a, c, g, or t
tttgatataacaattttgttgactttatttaatcctttcaaatctgcaatgttaaagaatcatccagttacttatgaatgtccttatcaagctagatcactggtaaaatgagactgcaatgtggacttttgaaatgagtaaggcaaatgtagactctaactagtagagatctgccagcatccacccttctaagaacacctcagtttcctgtggtgaacggcctcctccaggactcctttaggttcatgtggtatatgggaggagcatcacctacatttaagtaaccaggaacagtattttccatcccctagctatagtggctggttcaggaatgtgcacataatccaaggcagaccagtaacagtgagctcctggactttagctgtaactattaggcaagagtatctcatgccagtgggatcagaaagctagcagattataagccttgagcttctagcggccatcattctgtgtgagaatgaaaccgactcagagtaatactgacaacagcaaaggaaagcactactattatattctatnnnnnnnnnnnnnnnnnnnnnnnnnnnnnnnnnnnnnnnnnnnnnnnnnnnnnnnnnnnnntgaacagatgtgcagagatgtggcacactgccctaggttatacacaagtgggatttgaattctagcggaatctgtgtccctcatgccatgtacactcatcaaaaaaat

SEQ ID NO: 146205 - DNA, 274 bp, Homo Sapiens
tttgtaactgaagttttattgggacacaatcacactcacttacatatcctctacaactgcttttgcacaatggcagagttgaggagctgcaacagatatcttatggcccagaaagctgagtatgtttcttacttggccctttgtagaaaatgttcaccatccctgatctaccagattgccggagatgaaaaaatctgatgatattcagtgtggctgagggtgcagaaggtatcctcatatattgtttgctgaaggtacaatctctctggagaac

SEQ ID NO: 146206 - DNA, 1167 bp, Homo Sapiens
  misc_feature (451)..(571): n is a, c, g, or t
gttctcattctctgccccacccggttgggccccgggacttgttggaggggggggtttagggcctccatttcccgcgggggtttttggcagaggagagctgggcttttaagaccgccaacccctttgggttttgtccgtgtccctggagggggttcctcagttagggaatgagcctgctgggggttggcccccatttcttttattccgccaggaaggtcagcaggaataaaggatatggccggggcagggagcatcatagggcctgagggctctagccagttagcctcgggcaggctgcagtgagacctggccaacatatgatggctaaaatccaagtgtaaaagcttaggataggtcaggcagtacttcccgggggctcacactgtactgtcccactggaaaaggtaagcagtggagaaccttggtaagtagggaggctggccagtgtggnnnnnnnnnnnnnnnnnnnnnnnnnnnnnnnnnnnnnnnnnnnnnnnnnnnnnnnnnnnnnnnnnnnnnnnnnnnnnnnnnnnnnnnnnnnnnnnnnnnnnnnnnnnnnnnnnnnnnnnnnaggcttgcacccctagaacctagagaagccacagctaggagaactcccttggtacccagcataggggcaagagctggtgctgaaagagagaaactatatgtgtctctaatttagaacttatgcacaatcattggttcttatgtcccaaggtccttttatgtatggcttgagcttgtaggcccagttggaaccctatctaatcctctctcacaggaaggctatataggctctcaaaggcaagcctcccctctctttcaccccattagagtcccggtagccattcccataccgcctagagcttgactacgcaaaaactgtcaggaggcagactgacctaatggtcagactagctctggccctgcagcccagatgcagtggggagtccaagagcatctcatctctctctcaggctgaggcactgaggttgcaggagatagggctgagagccggaagtgacagcctgacccagaaggaacagggaacagatacatacatgcgtgtgcatgcacacacacgcacacattccgaagttgacagactaacatacacacagacatgatgacaaccaaaagctgggactccacacactgaatgca

SEQ ID NO: 146207 - DNA, 377 bp, Homo Sapiens
atagtcattcattcgtttattagatcattcatttgacaagacttgaacaaactagcttatgtgtcagccaatgcgtgagacatggtgggtgatgccaagagaagtccagtccctgcccttggggagttctcagcattgtgaggaagacagggtcattataataagatgggataagagcaatgatagggacatgaaaagcctaggatagaagtacagaggaggctccatagcccaacaagggctgaggcagttggagaagttctcagggagagcagtgtagtgtagtgatggagtgcacatagtggggccagactgcctgggttcaaatctagttctacagcataccaactatatgacccaagtgagtcactccacct

SEQ ID NO: 146208 - DNA, 479 bp, Homo Sapiens
ggcgttcacgcagatcgtcttttattagcggtctgtaaagcacctcccagggtcccccgaccccagattggaggaagccttgagaggtcagtagcaccagggacatggcagggcccgagggcgcgatgtgcagccgatggtgagggactgggcgccctcgcctgcccccggggttgtcagcactgggaaggcttgggggtagcagccacctccttcccccaacccaacagactagttcaaatttgggtaaataaataaaataaataagattcctcaagctggcctaccctggagaggagccgtggttgcagccggccactcgggaggcccgagggccagcgggggttagttggggcgtcctctcctctcgggtgatggggagccctgggggatggcagcataggggctgggatggccttggcagaggcgtctccccacattctgactcctggtccccttgaaaccctgttggcggccgc

SEQ ID NO: 146209 - DNA, 309 bp, Homo Sapiens
ctcccaaggcttccttgtgcccaggtcatttcttggagacagtgattcccggaacggaaaccgtcaacagctgcataactccttggcttggggcttttcagttactctttctagatacaggagggccctgagttggtctctctatatctccccctgctagttggggaattctgcagccactggagtaggttcagcttgttgtgaggggcagggagcaggaggtggactcagtccaggccttcagaactgaaggccaaagttcattcctcgtcctgcagcgctagaaattgcatcagggagacagggtga

SEQ ID NO: 146210 - DNA, 417 bp, Homo Sapiens
  misc_feature (68)..(76): n is a, c, g, or t
cacagttagttagatttctctctaatatttcttcttcagcttgaaccttttccagtttttcagccacnnnnnnnnnatattgttggaaagctttactcagctcttcggcattatatagtgcttcattcctttgtcgttcagctctttttccttgtttggtttgttcaagtaagtccacctttaattttatacattcctctttggactcctgcaaactctgttccttttcaattaccattttctggctctgttccagcttattttctgcctctctcaaaactttatcttgagctgaaacctctgcttccaaatttataatctgttcttctaagattgggacactggctgcctgctgttgagcagactcaagcatagaaacttttgctcttgactgtgttaattcaaagtgaatagatt

SEQ ID NO: 146211 - DNA, 467 bp, Homo Sapiens
  misc_feature (344)..(366): n is a, c, g, or t
tttgttttctagatgttactttattattcctccatattattggctggcacccaggaaactgaaagctcagtgtcacataagcagcaatttatgtatttagagcagtgtccttttattccatggaatattatcccaacagaattttaacaggaggcaaaaatgtccaatgctcaaatgcttttggtagaacctgggttaaacaacattagttttcttcaggtgggacttctcgagactttaatatgccagtaagggctgagaatcaatgaggatgatagagcgagtgcagcacttcccatatttttggcaacagaattcaggcttcttccatggaaccatctctnnnnnnnnnnnnnnnnnnnnnnnaggttcctgagctctgggaagccataccaatgtagcgcctgcagtattccacatgactgggcagcaccgcttttcagctcactttggttgggtctgttcat

SEQ ID NO: 146212 - DNA, 424 bp, Homo Sapiens
ctttctatatatattctcgtatgtcttattctaccaacacaacaataagcgtgttgcagtcaatgtattaagcaaagcaaacctgccagccagcaaattcaaataaaaaataaagcattaaaattcattggggatgttaaaacaacacaaatggaaaactagtaactaccatccatcctatttgaattatcaagcagaacatgaccataaaatttggtaacttgttacattactctttgtgattttctaataaccatgctaagtgtatttccacagtgagcttttggcttactatatacattcttggtggataaattgttcatctgtttttgaagtgttaccttactattttgtttacaagatagtctattgggttgattcaggatgtaacaaatatattcagtaccatttcttgtgttgtaaa

SEQ ID NO: 146213 - DNA, 630 bp, Homo Sapiens
  misc_feature (48)..(48): n is a, c, g, or t
agggcagcctgagcttgtgcttgccctggcaaccctgatagctgcatntgggtcatcttcccagtatgggtacaacgtggctgctgtcaactccccagcactgctcatgcaacaattttacaatgagactcactatggtaggaccggtgaattcatggaagacttccccttgacgttgctgtggtctgtaacagtgtccatgtttccatttggagggtttatcggatccctcctggtcggccccttggtgaataaatttggcagaaaaggggccttgctgttcaacaacatattttgtatcgtgcgtgcgatcttaatgggatgcagcagagtcgccacatcatttgagcttatcattatttccagaccttaggtgcaaatatgtgcaggtgtatcttccaacgtggtccccatgtacttaggggagctggtccctaaaaacctgcggggggctctcggggtgttgccccagctcttcatcactgttggcatccttgtggcccagatctttggtcttcggaatctccttgcaaacgtagatggctggccgatcctgctggggctgaccggggtcctcgcttcgctgcagctccttcgtgctgcccttcttccccgagtgccccaggtacc

SEQ ID NO: 146214 - DNA, 136 bp, Homo Sapiens
accatgattaaataagttttttattgtcacatttaactgctttgtcagatatacattgtagatttcagtatggcatcaaaataaaaatattttcctgaatgtcaaaatctgaacagaggagacggtaatggcactt

SEQ ID NO: 146215 - DNA, 367 bp, Homo Sapiens
tgagtttgttgatgttttattacagctttcattttattctaattttttatcatcttaaaaatgtttggacaagactttccaaggagtgtattttcattttatgtcagaaattatttaaaatgttttatttcacagtttaacttttcccctgcatcatcttaagcttgacagtgtcttaaacacttcaggacaaccaacctgaaacaatagcaagatgtttttctagaataaaatctcttctaccaatggccaatatccatccctcatgaggcctacttgttcttgtcaaaacttgagggtggactaggctgatctttcacatatgccggtgacaagtttttcatggtggtcataaaactcgtttcaa

SEQ ID NO: 146216 - DNA, 418 bp, Homo Sapiens
ttttgaaaagcaattacttcattttattgtacactgacttctcaggaatcaagatcacagtcacactcagatcacatttgtcttccttagattttttggaatataaacagtaagtattctagttctgaatccagtttaatttaggaccaaatattttgatttaccaatgcattaatctagagtacccattagaaagaccttcagataagaaaagaaatgaaggaaaacaatatagttagtgaagttttgttaaccacttgtgctaatagaggagccctgtcttaaaataacttacttgcttagatgtgagaatatttgaaataccttgtttcttaattttgtgtcttttttttaatggtagagagacggaatgaagattccaacatataaatttttgcctcttatgtacccattgggc

SEQ ID NO: 146217 - DNA, 692 bp, Homo Sapiens
ggtctagcatctaaaagatttttaggggttgtcaactctttaataatatatttataaaaagtagttgattccaaccacctccataaacaccatatattaggggataaattctagggagggatataaagtttaaaaagatactttccatctggacgcagtggctcatgactgtaatcccagcattttctttctatttttttcaaagagacaaggtcttgctatgctgcccaggctggcctcaagcaatcctcctgcttcagactcccaagtagctaggactgtgggtatatacctctcaccagcttatattgcctcttataatgagggactaactaatgttgccttggatggcagttaagactaaagagaaaagagcgtagaagatatatttgagacagaccactgaagaatcaccaggaattcaccagacagactagatgtttggggtggaaggctgagtgcttattagcagggagtgcttgaggggacaaccctctcagcaaaaagaatgcaggtacagcaacagcaggtcagggacaaaggtatgagatttagagtacaaggtgcagtcacagaacagtcagtagtctgcatatactgtaggacccatgggtcccagaacaagaggggaggctctaaagatgactgtggtgtagtgggccttggaggctttatatttcaggtaagagaga

SEQ ID NO: 146218 - DNA, 476 bp, Homo Sapiens
ttttggctctttaaagagattgtttattggtcaagagtgctagtctgtttggtcatgttttgctagctttttaaaatgcatgtatgtaaatgaattagaatataagttaattaagcagggcagtgtttctagaatgtgaaaatagtaacctggctagttaatttaattaagtccttggtaattttcttttagaaacaagtttcatcttgggaggtcacaacgttctggctgctgtgcttctgagctttaccttgactccatcctctcctctctgtcatccttttctctggctctgtcacttgcatttgccccctgacttgtcaccctgacttcatttcctctctcccagctgtttacagtgctatcacagtggtctttcagaaatcccaaactctgctgttgaactgggttctaaaaaccttcagagacttcatgttgtccataggatacactgttttctgaactccttagtgtgc

SEQ ID NO: 146219 - DNA, 688 bp, Homo Sapiens
tgagggccatcacaaagtccatgggctcgtaggcgcaggctggccttgtatcacgcagcacggtgagcaccagccactccacagcgatgatgacttgcaccagcatcaggcacagcgccaggcccaccagctgccagcccgcggggcccgtgccatgccgcaccagcctccgcacgcgccatgcctggctcagcaggcaggagaagcagagcgcaaagaggacgccccagaggaagcggcggacagagcagatggtctcgtcctcctggatgatgaaggcaaacgtcagcccaaagaggcccagggtccccaggaggaacagaaagtggaggcccacagggctcttcttctccttctccttgatgaagggcagccgcaccaggaggatgagcatcaggagcagtgtgatcagggcgcccgccccggccaccgcctccaccacaatgccccagatggcgtccaggtcgcacagggacacgtactgagggaggaggtccagcccacagcctcgggatgtgctggcgttttcagaggccaccgaggtgatcacgaagagcaggaggaaggtgagcacctggtgagctctcatctttctctctgatgccacgaacattcgacccccgcggccccgcagcgccgacgctccagctggccttcggcccgagtcacatctctgcggcgcggccgc

SEQ ID NO: 146220 - DNA, 418 bp, Homo Sapiens
ggcccagcagctgccgctgcttctgttgcctctgccgcttcttggccttctgctcctatgctctcgccctcgtcgtcctcctccccggaagcagcatcgtccacagcatcgtgcagcaggaactcgcacagacactgcacgggcagcacgtccagggagccctcgctggactgtaccaggtccgccagccagggcatggactgcgaggaggcctgccgctggatgatgtggaggagaaagtcagggtttcggctgcggcacaagaggtgcccgaggcggagggactggttgaggcttttcacttgatccaggatgtgagggggaggcctccgggggggcccctgggggtccaggctggtgagctgcgacaggaggaggctgctgctctcagtgatggtctgcttggtggacgcggccc

SEQ ID NO: 146221 - DNA, 753 bp, Homo Sapiens
  misc_feature (429)..(663): n is a, c, g, or t
tttgtgaaagcaagttttttttattagtaagaagatgtaaagataatataaacacgaagtaaagaaaccaagtgacaaaaaatctttacacgatatgattccaattttaagtggttatataaaatgggcagtgaatacaacaaaatgttaagagtggttaatggctgaattccttttttaatctcaaggcaattaatacttacctgagtgttccttcagtgccaatatgataaactgggaaaatgtgttggaggacacttgtcaatgactgcctctcccatggaaaggacgggtcttgtctcatggaggatggttctcttttaacagagccttcctgaagccaatgcctgaagtacaaagcatagtgaaaggccagtagcacagacattttgaaggtttcacagatcataccaagaaagaactgaggcnnnnnnnnnnnnnnnnnnnnnnnnnnnnnnnnnnnnnnnnnnnnnnnnnnnnnnnnnnnnnnnnnnnnnnnnnnnnnnnnnnnnnnnnnnnnnnnnnnnnnnnnnnnnnnnnnnnnnnnnnnnnnnnnnnnnnnnnnnnnnnnnnnnnnnnnnnnnnnnnnnnnnnnnnnnnnnnnnnnnnnnnnnnnnnnnnnnnnnnnnnnnnnnnnnnnnnnnnnnnnnnnnnnnnnnnnnngggtacagagctaagtgataaagccagcatccaaatgcagacaatgactccagatgactccagaatccacactggctactacactctgca

SEQ ID NO: 146222 - DNA, 418 bp, Homo Sapiens
ccatgtgtgatgtcatctttatttcagcctcatacttgaggtaataacttagctggttgtagaagtctaggttcagagtgtctttctgcagacctttgaaatgatttcctcccatcacactgtattgcccatagaagcctggtgtcagtctaattgctgtccttctgtggttattgattattgcagcactgattgccggccagtaatctagttccacccagcctacctctcattcaaccagaacttttcctgtgagtgaccaattcagttcccctttcatactccattattttgcagaaggctggatattactcccagtcccatccatcatcacatcttcagggtcttaggttggcttaagccaatcagcacgatgcatatctgcagatccattggttcaagggtgggcatgtgtttt

SEQ ID NO: 146223 - DNA, 448 bp, Homo Sapiens
aagctttataaagtattttaattaaactttggaaaacagtattatttactatttcaactttcaattatttgtgtatcgctttaaaaatacatcaaaaacttctaaaattcaaaaccttcagggcatcagttatttaagatagttatgatatcttgaacaaaaatttctccagaatcaattacacatttacctactttccttggcaggaagctcagaacgttatttaatctttgtctaattattccaattcattattaaaagtaatttatggtatcaaataggccctagaacactgaactaaaaacattcataattatagttttttatttcttctacttgtttttcctgccttcttcccaactctggtgatatcaactctccatcctccacctcccaggttaccgtacccatcatcccttctactgtacattttctaagccagttttaa

SEQ ID NO: 146224 - DNA, 534 bp, Homo Sapiens
tttattgaatagtcactgtttactgagtctagaggagggaggtagaatcagttcagtacaagagtttagtctgaggtttgattggaagcccatcctacaatagtgactgctcctgaaacccacctaccaagccgccagaccctgcttgctgcacagcagaacattgagaaaccatgtttgttgcactatagagaaaccacatctccttccaccctccccctggactgtgtcctttgatacatggagacaggtaacagctactgggattatctgggctccttcactggggccatgggaaattcacaaagttcatagaccctctcacacctcagagaaagccaacagctaaagaacagatgtccacgagagagacgtctagaaggctgaacgagcagtgatggggggtcagaacaggaagacctagggctgctggcagggtgggtatttggaaggaggcggtgaagacccaagactaggatgacaggaaatgggttcggcatgttgtggcctctccgcctgtctactgaggaagtt

SEQ ID NO: 146225 - DNA, 502 bp, Homo Sapiens
tttatatatgatttgagttttattgggaacaaaggttgaaacaaagtagcactgatgagaaattagctagcaaaagaccatcacagaaaacggaaatcagatggctcaaagtataattaataatacccaaaagctagactagaggtctagaagagatcattcgttaataattactaacgaattttatttataccagagttgtaatgacaagcagtgtgaaaattaaacatatacatttgttatcttgtgcatgtttttaaaaagcaaaagaaatcaagtgtgcatcacaccaaagcaggtttgtatcttacttccactcctctggtgggtgagcaagctcatacttctccctcacactggagacgcccatatccacgtgaagccagtgaacctcctctgaccgcagtggacttagggcggaatcactagcaggccacatgctttaatttgtgactgtcactatcttctggatgatggccctggcatcagtaggatctccatg

SEQ ID NO: 146226 - DNA, 870 bp, Homo Sapiens
ccccctaccactcactctgataccgctgtccatgatcactaaagcacacactaactggaagtgtcttgttgcacagtttatggccggaatgtcttaatttttcatgactgggatttcagtgtgtgtagatctgtgtatgcttgtatttcttttagacatttaatggatattcttggtaagaagtgaaaaaacattaagaagattaggagctaggcattattgttaacaggtttccaagtcaagaaatcagccatgctccaggtggttttagtagctaaggatataaaatggtaattagattaaaagacgggtattcaaaatgaggcttgagaagtgaactcttgttcgtatataggaagaagaggggtaagtgggtaagttcagttgaccatcacctgacagtaagatacagaattgagatgtcttggtggtggtggctttaccagaataacacagatatgccttttatgtctttctttctttttcccttgtggaacagtataataattgtttttatggacaatctcatttgaactttttttgtctgccccaatatgagaaatattccaaattcttgatgtgtttccagccctagtaggctagtcatttccgggatgctgttgagcctgacaggtctggcctcaattaggcaatggcttacatggcatgaaagaggacattagtcaaactgatttacagcttcaaggttcagaagtgtttcttaagtttgagggtgtgaatactagtgatgtacctggcattgagaaattccaaaattaaacttgtattcagctctagcctgcttaatctcctatcaaactaagatggtacgtttgtaaatacaaatgaagttaattgcattttaaactg

SEQ ID NO: 146227 - DNA, 864 bp, Homo Sapiens
  misc_feature (201)..(231): n is a, c, g, or t
  misc_feature (646)..(693): n is a, c, g, or t
  misc_feature (736)..(749): n is a, c, g, or t
  misc_feature (758)..(813): n is a, c, g, or t
caggggcagggcatgatttttattgttaagaagcttagggtagagtatgggagacagaaacataatgttcacaaaaatatgccttgagcagttacaaagccgtatatcaagtgcaaagcaataaaattggatacatgtgcactgtgggaacttggagtcctttgagaggacacactattggcagagtggagttaatcagcnnnnnnnnnnnnnnnnnnnnnnnnnnnnnnngataagctagagcaggaaggaatcttccttaaagtccagagtctcccggaacatggagactgtccttcccaagccttctcgcggggagggaattccttctttctgccgcctgttacatccctgtgtgagaaggtctgtgagctgagcccacatcactcgttctgctgcccaggtgtgcttccatcttcactgtggaaaagtcattttgaactccccggtgactgcaaattaagtaatcaaggacagatgggactgggttgaccattccaaggagtacagttacttgaagaatcagcgttttttaagacgttgtcctctgtcacgcgctgtttcccgttagtccacttcagaggcatcactaccagcagttgcttaagactcatttccggccgggcgtggtggctcaggcccatcnnnnnnnnnnnnnnnnnnnnnnnnnnnnnnnnnnnnnnnnnnnnnnnnatccagaccctcctggctaacatggtgaaagccgtctctactnnnnnnnnnnnnnnttaggctgnnnnnnnnnnnnnnnnnnnnnnnnnnnnnnnnnnnnnnnnnnnnnnnnnnnnnnnnggcgtgaacccgggcctcgtgccgaaatcgccacccaggcctcgctaccta

SEQ ID NO: 146228 - DNA, 286 bp, Homo Sapiens
cattatgagcacaaaaaggttttattgtcctaaatgctatacaaagtataacaaatagacactctcagcagcctgtgttttcaaccggagacacttctgtcaagcgaaacacaaaggaaaatatacaaaagggcacaggcataactaaattcagatgcatttctattacgtgcaaataaaggtgggtggaagagagagcagagagatgaataggggactcctaggagtaactgttttgattgggaaaggtgagaatggccaccttcctgactctagagaactcatt

SEQ ID NO: 146229 - DNA, 346 bp, Homo Sapiens
taaataagaaatgtttatttttgtccttatatttaaacatgatggaatttgtaaatcttggcattgattgtaattctgcctttttggaagaattttttctcccagcatgttagctgagaatattctctattttataaataatatgaagtaggttggtctctctgcttctctataccaggacttcttagctcagtatcatctcccttcatgtaagcagcacgttttaactcttaggaagctgaatgttgtgttatcactaatactttgtacaggtcacctgcctactctaattgtccttagtacttggacaggctttatcattaaagagtgttctcctaatcccaaa

SEQ ID NO: 146230 - DNA, 689 bp, Homo Sapiens
ttttttttgcaacatgccctcaattttattttgttttgggggaaatgtgctgaagaacctagagctttttttgtttagcaccttatatcaaagtaatgaaaatgggtatgatgattacatgtgcaaatgtacaaaatcattaactctacaaagatacatcattccaaaattacagaaaaaatttaaagcatgcatttaattctttttctttaaagggttgctgaatgcttcccctgaaaaaaggtggctgttttcaaaatcagcaactgctggtgaggatttcttggcacagttatgaccagcatgttattgctgcatcttcctgataatctcagccgacaccgggggatggaaattgattgtgtggtgccgcagcctgagctgtcttgtaactcttcccacagcgacacttgaatggtttgcggacacgaatctgtgttctgtgaccattcttagcgtgatactttatgccattcacattcttgtatctctttttacatccaggaactgggcaggcaaaaggcttctcttcccctccattcatgcacatggagctgaggatggcttcggagctgatggcactctctgtggtccaggactcatcgctgtccgactcctcatagtccacctcctcctcgtcatactcgctgcagattcttggtgcattcatccaccgatggacaagttgg

SEQ ID NO: 146231 - DNA, 450 bp, Homo Sapiens
catggttcagctgtttattgtctccatggggtgggtgaagaggagtggcccagctgagctgaggaaggtgaccactgagaacccattcaacctgctgagcaggctgggcagaaaggagcaggacttgggacagacgactgaagatgcagagaccccatgggggccaccccttggccttcctcccatgtgggtggaggccgtcctctctgatcactgctgggttgcttcctggttaaagggccagaaggtgaaggagatgggcttttcaggcatcagaatgaggttgaatgtggtgcccacatcgctgaggtgttggatttcaactctgaagttctccagcatattgatgaggaagatggtcatctctagctcagcgatccgccgtcccagacactgccgcacaccccagccaaagcccaagttccggaagtaggtggatgttcttgtctt

SEQ ID NO: 146232 - DNA, 432 bp, Homo Sapiens
gtgtttgacacgttttatttcttcaatattaaaggaaaggatcagaagcgaaagcggccagatggttagcgtgctaaatccaggtagtgggttcacgggagttagttatgttgcttctgaacttttctatttgtttggaaagttttcgtgcccggatcccaaatgtcatgtttggagggagagggggcggctctttcttcatgcgccggtcatcctggtcactgatgcggatgtcattgagctgacggtagagcaagttctcccgggcagtcaccaggccggctttcaccgccccgcgtttcattgcgatataattccgggtcagctcgtgggggcaggtgggctgctgcttgaacacgttccagcgtccgatggcttcagggactcctccgtcaagccctcgaatgtagagtccataattaaaattaatgc

SEQ ID NO: 146233 - DNA, 546 bp, Homo Sapiens
  misc_feature (122)..(130): n is a, c, g, or t
ttttgatttaagagattcagaatttaattggttaagagattatacataagtagctgctagaaatcattactttcaacaatgcaacccaaaacaattttcctaaattgaaagcaaaaaccgannnnnnnnnaaggagactggaattgaacaaaattctctcaggctgctgaagtctgttgcttcatttattttagactcagtcttcttttcatcgctgatttggaaatagtgaaaggccacccgtaaacaatacctcacataggaatagccttcaggaggcctcagagccttccatgtctttaaaaattgtatctttaaaattagaatatgaggtaattgctcttatgcaaatttcagagacaacatgagcgagctccctggcaggcagaagctggacgtcctggtttcctaactgctcccacaaatgccctctgtaccctgctgggttccatctggccacactccagtgcctctcccagaggaaggcatgccaaattcctgacacgtggcgtttgaaaataccatggaacgtttccactcgtggat

SEQ ID NO: 146234 - DNA, 1019 bp, Homo Sapiens
  misc_feature (445)..(586): n is a, c, g, or t
ctgtcctcttctttgttgtgggtaacgttctctgcgggagacctgaggttttccaagggggacatgccagctacactggccttggcgccctgagctaagcaccaggactcacagcctagcacgaaggcaggtagcaccttcacccgccgcggacgataggcgctctcctgtacctcctttagctcgcgaggcccgcccttcgcgaggtcccagagaaaagcaggctgtggaaaactgggcgcccccttctttcacccaccttcttacccctgtcagcgccgagatctgtagcagaggttcctggtctgaaccaccgattggcaaagaaagctgcagattaaacttctcgttttacagagaaggaaactgaggcccagacagccgaaggagaggcagtctatggagcgcagcggtaaagagcaaggggttggtggccccagaatgnnnnnnnnnnnnnnnnnnnnnnnnnnnnnnnnnnnnnnnnnnnnnnnnnnnnnnnnnnnnnnnnnnnnnnnnnnnnnnnnnnnnnnnnnnnnnnnnnnnnnnnnnnnnnnnnnnnnnnnnnnnnnnnnnnnnnnnnnnnnnnaggagagcagtgtgggcctttgactcaatcaactttacagtttttgttactactactgtttaaggacaggaaacaagttagtggcaacgccgagctgaaacccgggtctctcaacgtccagtttggaggttttacccaccacccctctacctcttcagagctaatgggatgcagaggcgaggacagcccctggaaaaccatgtgacgttgatacactggcaaagcgcaggcatcccggcctcgaaggtgcataattattgcaatatgaaaaaatcgaggctgggtaggagcagggcagtgaggatttctcaacccttactttcaccccggcgctgtccactgcatctgacagagcgcggactgcgctagtacagccgcaaccccagggaccagtgcgcacgcctgggccgccccgggagtcacccagcggccc

SEQ ID NO: 146235 - DNA, 760 bp, Homo Sapiens
atttttataaagcactgtttatttttatgtattgaaaatgtccattttaaaagtcttcaaaataaaaacaagttagaaaatttgagcttgtgttaagaaggggaaggacagaaaaggaactgaaaggcctctacgggcagcagtttaattacagggcaacaggaacccatttatagagtattgtaaacaacacaactatggcgacactgctctcagattaacatggcttcatttcctttatattatagtttagtgtgtaagcatggttaccactctgcacaagcttcgttatccagagtaccgagggcccctcatcagaagggccaagtccccgaaacatgcatatgtactcatcactgtaaaatgaagacctttcaatattttcagcaatcaactaaagtattccgtaatcacaaaaatgtttcctatagatgcagtttgcacatttattgcaagccattgactaaccacagaatgggcagatgtgaagatctgtgttgatgttgttggtggtggtggtagtactgatgtttttaatttttaagtgaaggatgttatatctaaatggctgtgctaaaaaacagaacaacagccattcctagaaatttctttactcttcagcttccaaacacggctgtgtgtggttggctgatgttggactgcaaaaatagtccatttcctgtggatggtgtaatttctgctgtgcagcaagcagacaacagccctgtaccatgtagctatgggaccttgagactctcag

SEQ ID NO: 146236 - DNA, 401 bp, Homo Sapiens
aaagtgcagcttatatgtgagaagtggtctgctttttttcttactcatgttattcttcaacaactctttctacagtgtttcatttagcagccttcaaattaaagctttgcaaaatgcagttgaaaaggaagtccaagcagaagacaatatctacattgagaatagtctttatgccacggactaagacccagtggtgctctttgagagtttacgcccatgagtgcagaagactgaacagacatcagcacatcagacgtcttttagaccccaagacaatttttctgtttcagtttcatctggcattccaacatgtcagtgatactgggtagagtaactctctcactccaaactgtgtatagtcaacctcatcattaatgtagtcctaattttttatgctaaaa

SEQ ID NO: 146237 - DNA, 1073 bp, Homo Sapiens
  misc_feature (57)..(65): n is a, c, g, or t
  misc_feature (125)..(189): n is a, c, g, or t
  misc_feature (1014)..(1014): n is a, c, g, or t
aggccaatggcctatgtttgttaattgcgactccctttgtggggggcccgcgttgtnnnnnnnnngggggggaaagggtaagactttgggccccccggggggaattttttggagcggcccccccnnnnnnnnnnnnnnnnnnnnnnnnnnnnnnnnnnnnnnnnnnnnnnnnnnnnnnnnnnnnnnnnncaaaagtgcaaaacccttttatttttaataaaaggcctcacttccaaggaggagcccagcccaggagatcccccggtgaatcgtcaagcctgggtcctcggggagccggcgttcctgctgagctgatgttgtacttctgaaggcctgtgatcgctaactgcaccatgaggcagaatgcagggtgctctcaaccagctgggggttggggttcaggctttttttcatctttcggccaaggcagacaacaacggactcatcatcccacgcgactgagtgacgcgaggcttcaaacgcaagcacgagtgtttagaatcctgcattttcaaaggctcttgcccactgggaactacatggagaggagattaagaacaacaaccaaaagaggcagggggtggggcaggcgtgaggtaggggtggggtggggatgacagtcaacacagcttggaccagaagcccatggcgcctggctccctggaaaggcacagggcacagacggatgccgcctttcttgctgggacactcctgccaccatccacagctcccccgtcactccacgttcttgtacttggtgaacaggttgtaaagaaccctcagggtggatttgaggtccaagttaaccacgtcttcaggacgagccttgggtttcttgaggcctccgtccagcatcagctcaaaggcgaaggacacattgtggaccttctgatcgaagctttccggagtcaggtagaagtggtggagaggaacaaagtagtcttccagaaggcccatgagcagaaccaggtacacgccatctgcaaactgggtctccagttccgtcacctccanattcagcttgttcaggtgcttgttcacaaaagtgatgagagacctcgtgccgaattctt

SEQ ID NO: 146238 - DNA, 119 bp, Homo Sapiens
ttttgttctgtaagttgttgccagatctctcttgcatctgtgtcaatgaaaggtctgtgtttagaaaaggcagcatatcattgtatatttgaaactataggtatatattctttgtataa

SEQ ID NO: 146239 - DNA, 892 bp, Homo Sapiens
ggggattcccaccttccctttaccttaattcccttaagattttaacgggggggagaaaaaattttggaaaatggggggttggggtccaccccaaaatggttgccccagaaggaccttcaaaattaatgcccccccgcatatttttaagcgtggggaaaggggctttaccggtgggccctgaatttttccttcaggggttcccaagtccccccattttaatggatttcccaaggccagaaaaccaccttgttttgtgacaacataagtggggccgctggaaaaattgtttagtcaaaatgagaccgagggtctgggtgtgggagaaaaagagaaatcttgggaggagtcatttaaaggggggtgcccagttgtcctcataaaaaaacactatcatcatcagggtgaccaaagccgacatcataggcagggggtggagtcagaggctctaatgtggggactgccgccaagctttgcagatcaggagcagtggacacagcccgtggtccccgaagccgaaggttgattggagctcttccagggcttccttcctgggccatggacccctctgaggccattcgcctctgttccagtttggctctcctggacccctctggatggctaggttgttcctcctcaggtgctgggggtatcacaacagtgctgtaggggggtggttggtccaactcttgggggcggcactgggattctagtcccaccacggcctcttcatagactggcacttcaaaggcttcattgtcccctgtctgactctgtcttttcctttcctccggtgttagcccatgctccaggtggagggagaaagtgcacacaggcgcaccaaagccacagggacacaactgtctcagaagttcgtcgctcacctgtctccccc

SEQ ID NO: 146240 - DNA, 621 bp, Homo Sapiens
acgggggtgatgtccgtctttatgcccagcaaagccagccccagtaggaaggaggcgcagcatcaggaggagaagcaggcttgctccagtctccccagtaaggtgcatttggcaccatggcccctccccaggcatcccatgtcatgactctgtcttttcctttcctccggtgttagcccatgctccaggtggagggagataagtgcacacaggcgcacctaagccacagggacacaactgcttgagaaacaattgtacaggcaaaggcccagcacaatggccggaggccctgataactcactgtcctcttcgtagaccccacatctgtccagggccctcctctaccctctgctgatcctaacttgttaaactcagtttgcaaatttcctgccaggaggtagcccagtggctgggaggcggtgggcaggggaactcattttctttccttgtaacagcaacaaccacgaggcagcccataccccagatacagcctgtcagaagttgccagcgctctgtgtagcaaggaattgcagattccctcctcacacctcggtcccaatcccatgaccctcccgacccatcgcacccacacctgtctcagaagttcgtcgctcacctgtc

SEQ ID NO: 146241 - DNA, 354 bp, Homo Sapiens
tttttctcaatcaatcttttttatttaaaaatccacctaaaaattcacttctgggttttagtttttgtttaaaaagaagcaaatatttaaaagcatcaaatgttactagtctacaattcatcttgttatgaacatttttagtttgaggattgggaaaataaacctattacattgattaggcacagtactatggccaatgggcgagaaatcagggcacatctgtgtactcaggcaacagttagaggtctgaatggagggggtcatgcctcaactgtgggcactcctttctctatgccccctccaaaaattgttataagtctcaaatcagtacatgagattgtatgtaacttggtt

SEQ ID NO: 146242 - DNA, 339 bp, Homo Sapiens
cctgctcaggcttgcacccagacacgacaccatgcatctcctgggcccctggctcctgctcctgggtaaggactgtggcctgggctagtactggggttctgggatgtcagtgggcactggaggaggaggaaagacccaggcagagaggcgtcaacatagggtagggtgggggcagcggtgtgtatagataaatgtacatacaaatatatatgtttcccatatatacatacacttctctcattgcatcctgctgtctttgtgtatctctgtatttctcccactatcttcagagggaattctttagtctttagaaagctctctgctgggtgcagtgctcat

SEQ ID NO: 146243 - DNA, 1296 bp, Homo Sapiens
  misc_feature (1080)..(1080): n is a, c, g, or t
tactataacggtcctaaggtagcgaggcctgggtggcgaattcggcacgaggcgattcttctcataccatcttccccatcattttggggtctgtttcgactgactaattttgtttccgggtttggcctcattttcctgcctctacatttttcacaagtttttcttggttgttggatattgtcaggtgtacacttttgaatgtctggatttgttgtctttctctgaggagttgggttgggcttggcaggcagttaaggtgcagatcatccttccgaggctttttatgctttgaagtggtgggtctagcatagcctttccgcctcccgccacggcgtccttcccaaggcctctgctgcacacccgtgtgtcccgcaaggcccgcgagacccctgcactcctgctgctgcaagatgacaccttctcggccctgtgagctccgctcgttgctccctggtgactccccggacagctcaacaccaaagcttttcgcgggcacagcggccgcagtcgtgcacgtcagttggcagggtcactgtccacagcaccccggttagacgctcatctgggccagcaccacaaagcctgctgagcgcacggcgtgtgtcagccttgcccacacccgccagccggcgctgctctggccttccaccgatgacccccaaaacgatgcccagggccgtgggctctcccctgtgtgtgccagctcggagacgttcctctgagccccgcaagaactctgcaatgagaactgaaccaacaagggagagcaacagaaagacagattccaggctggtggatgtgtcccctgacaggggttctcctccttcccgtgtgcctcaggcacttaacttttctccagaggaaagcgattctactttctccaaaagtactgccacagaagtagctcgggaggaagccaaggctggtggagatgcagcccctagtgaggctcttcttgtagatatcaaactggaaccacttcgcggtcacttcagatgctgcatgcagcccctcattgaccttctctcatcgacttctgcgataccccagaagcacacggggtgtgagactggaagccgngcctgagcgactttggacacacttccaacatgaataaaagtgtcaaacttttcccgctgtgggcagtcataacctagcttcctctgtccactaaccctagctgcaggggaaggggtgggactcgtttccactctacatatcttcccaaaaacttcttttgaaaaaactcatgattttacaaacaaatttgtgttggtgactctatccatacagatt

SEQ ID NO: 146244 - DNA, 361 bp, Homo Sapiens
ttcatggattcaaggaattccagttttatctattaagattttatcttaatgatgagtagccaaggtctaacatagggcctctcctcaaggagagatggagggatacaattcttggttcagtgggaaacagaaccctaaaacatccatttgattcaaggtgctggtccaacagagtttttaaactactcacttctttatttcatcctttcgactgtacttgattaccagtgaagtaagatgggtcaggttacgacttacaacttttgttctattccccagactcctcattattcagtacatttcccaataatctctttttttcatctcttgctttataaattgttacgttggtggagaagcc

SEQ ID NO: 146245 - DNA, 502 bp, Homo Sapiens
tttggcaatgtgacttgtcgtttatttcaatgaaaatttaaatgattcttacaaatcctctgaaaagtaaaactgatacttttataaacagaagtatatgcaaacagtcacaatatgcattaggacgactgacgatatttcttacatgccaggtagttcttccatcccagcaaacacctcttatctgaaagtgttttttctcctataaatttgcatctaaggtatttttaaaaagtcaaaaacagtgcagagtaactttgaattgatcaacaagaatattatacaattgtattatagttccactccgaatacgatagctaaaaaccaaatcaaccttctctttacagaacacaggctccaaacataatttcttaaatcatggtctgccactgaatctggctataaaaccttatcttgcactaaaaggatctgtagctttcccagctgagaatggagttcagaatactgaatcaacacaagacaagagaggaattggggatga

SEQ ID NO: 146246 - DNA, 399 bp, Homo Sapiens
ttttccagattccttttacgacaaactcaaagcttttattttactaaagtatttgggttaatcttttgcttttctgtcatgttctgaaatatgtacaataacagaatcgctcaaaatattatctccgttaaatgttttgtggctttagggagaggtctaacaacatgcgggaaacaagaaatcaagcgcatccaggattcatttataatctctctcgttgagtagaagtccgcatctctcgatattgtctggttacctgcatgaagtattctaaaggaggaaaatagctcaaagaggacattcatgtgcactctggcttccagttggccatttgagtaagtgatcgcaattaactgacgagcggcagggaaacacttcctggaattctcatctacagac

SEQ ID NO: 146247 - DNA, 738 bp, Homo Sapiens
  misc_feature (141)..(141): n is a, c, g, or t
tatggtatatatttaactttttaagaaattgacagatggtcataccatattacattcccaccaaagacacagtttctctgcaacctcaccagcatctgatattgccagcaaattttatcgtattcattctaataggtgtgnaatggtagctaattatggtcttaatttatatttccctgatgttgttgagcatcttttcatgcgcttatttcccatctgtgtattttccttggtgacatgtctaagtcttttgcccattttctaattggattgtttggtttttaatgttgagtctggagagatttttatatattcaggatacgagtcctctgtcaaatgtgtcatttacacacatttctcccagtcagtggcgtctcttttcaccctcttaacagattctcctacaaagccacattttaaactgtgattaattccagttcatccattttgttttacgaattgtgcttttggtgttccaactccttttaaaatccaagatcagaagaggtacctggacaaattacctgataccccccgcttccccagtgactagtttcctcatatgtaacacagggaagataattatggcatctacttcataagttgcatcaaaagagtaaagagtaaagctatatacgcacttaaaacactgtctgacacccctagtgtttgctgttactatttttactaatgaaaataatatcttcatttgttcagactaccttatgaaagtcctct

SEQ ID NO: 146248 - DNA, 830 bp, Homo Sapiens
tcgtcacatcagcaaatcttgattattcaaattcttctgattgatctagaacaccaagatctagaatctggccaagattaaccacaacctgaatcaagcctcaagaatacctttataccacagtcttgaatctggtttttcgtataaacagctctcttctttacaacagctttctgtttttgaggtcagaacaggagcccctctttctcaaatgacgattaaaataaaacttcagggcaaagtttttgaatcttagcaacacatggaaacatatgtcctgttgccaaaaaaattttaattgcctaatccaaaccagaatatttagatcaacctgtatactatatattatctctgatatactatatctctagtcctcagcattattcttcataaaaccaaatacccacttatttgctgagtggccagatctaagaggaagcttttctgcctttacagggatggccttttgaataattgagcagacgaagcattggaatatgaaatatttgtaaatcactggtcagctctagtcaacctcttggtgcttttgtttcctctggtcccagatgtgtctcctggctctggaaagggagaggccagtagtaggatcagaaaagggagcaaccaaccagaaaacacctaagttatgaggtttgtgcttttcctgacttagagaaagtccatatctcaggagataaacagttctggctgcagctctctggagtaatcccctgaaatggtgccagagggagcatgtagggtagccaagattctgactcctcgacgcgtgggtcgacgatatcccgggaataccggaccggtaccagcct

SEQ ID NO: 146249 - DNA, 257 bp, Homo Sapiens
  misc_feature (123)..(123): n is a, c, g, or t
ttctaaaaagcttattgtggagacttttaaaacaaaatattctgttttaaatctgcagtttgatttttaattttgctgctcttcataggctcagtttgtcatatcagtaagcctgaaacgtanttttgtttgcaggaacttgtcagcgttactttttacttctttttaacttttctaatttattcagcctcttgggccaggcaattatttgaactgccagaggtgttgatcttgttgacaatccaaaaacagaatac

SEQ ID NO: 146250 - DNA, 496 bp, Homo Sapiens
tttgtgttctaataaaactttatttacaaacgggcggcaggctcatttcagctccgtcagtttgctgacgcctgattttaagcatagggtgaccagtcgtcccagtttgcccggaactttcttgattttagcactgaaagtcccatattccgtgaaactcagccccagtaaaccaggttggccctgctatttaagcaacacttgcattatcccattcaaaactcacactaccttgtgggggtcaggtcaccgcccagtggatccaccttgcctgctgcctagacagagccgatttatcaagacaggggaattgcaagggagacagagtaattcatgcagagcaggctgtacaggagacggggatcagagtttttaacgacaatttggcgggtaaggacttgggaagttgggagtgctgattggtcaggttggagatacagtcatagggggttgcagtgaggttttcttcatgtcttctgttcccggctgcgatggc

SEQ ID NO: 146251 - DNA, 683 bp, Homo Sapiens
  misc_feature (66)..(119): n is a, c, g, or t
cgtttcttgcgcttcttagatttctcccctgactctgccttagagcttttctcttctgtgtcagcnnnnnnnnnnnnnnnnnnnnnnnnnnnnnnnnnnnnnnnnnnnnnnnnnnnnnnccggtgggacttcccagatcgttctttcttgctgggaaggcttctccctgtgtcttctgtctcagacccatggctacccccaggctcctgcttgttcaggccgctacaggcagaccctgaagcaggtgcgtccattctgcctcctgaggaacgtactattttctctccgcccacttccttgcttttatttggctcaccaggatctaggccttggagatggtcctttgaggagcttcctatatcctttggtttttctgttcctttagttctggcatctttgttccttgaaagtttaaagtcaaaatataaagggttacaactgtatgaaatggagggttctgccttggtgaaaattaatagttctgatggccactggagggcagtgctttcatctttgctcaaaactgggaagaagggaccagtaggatttttgggtccttcttggctttctttccctgctggggtgggcagagaggtttctttagaagagttggactcacacatttgggtctctgaaaccttctgactatgactttctaaactctgatcacttacatcccctcc

SEQ ID NO: 146252 - DNA, 436 bp, Homo Sapiens
tttctgctatgtcaaatattttgattttccataatcatcctgagtccctatccaacaacctttacaactgatacagcctcactttctgttagataacttagtgttaattaaagcagtctcactaaaacgtgcttttgctgttcttccccattttcaccaaagtgaatgagccagtccactaaaaatcagggcctatgggatacacagtgtcctgggtcacaaggcattactgtctttaatgatttgctgggaacaaacgaatcagccatattttctccatcagccatataagaaatctcagaaatacctggatcccttctgcctcacttcgctatggaaccatttttgtttaaatggtcttttaaattggagttgtaagcatcatttgtcttttattcactaccttattaagggttgagccctacccacagaactt

SEQ ID NO: 146253 - DNA, 1123 bp, Homo Sapiens
aagagggacagacagcagaacggaacagtgctgtgatatagaaagtggtgcaaaaagcaggctgtacggtccggatttccgggatatcgtcgaacccacgcgtccggtcatttcattggcgtttgagtcagcaaagaagtcaagatggccaaagttccagacatgtttgaagacctgaagaactgttacagtgaaaatgaagaagacagttcctccattgatcatctgtctctgaatcagaaatccttctatcatgtaagctatggcccactccatgaaggctgcatggatcaatctgtgtctctgagtatctctgaaacctctaaaacatccaagcttaccttcaaggagagcatggtggtagtagcaaccaacgggaaggttctgaagaagagacggttgagtttaagccaatccatcactgatgatgacctggaggccatcgccaatgactcagaggaagaaatcatcaagcctaggtcagcaccttttagcttcctgagcaatgtgaaatacaactttatgaggatcatcaaatacgaattcatcctgaatgacgccctcaatcaaagtataattcgagccaatgatcagtacctcacggctgctgcattacataatctggatgaagcagtgaaatttgacatgggtgcttataagtcatcaaaggatgatgctaaaattaccgtgattctaagaatctcaaaaactcaattgtatgtgactgcccaagatgaagaccaaccagtgctgctgaaggagatgcctgagataccccaaaccatcacaggttagtgagaccaacctcctcttcttctgggaaactcacggcactaaagaactatttcacatcagttgccccatccaaacttgtttattgcccccaaagcaagactactgggtgtgcttggcagggggccaccctctatcactgacttccagatactggaaaaccaggcgtaggtctggagtctcacttgtctcacttgtgcagtggtgacagttcatatgtaccatgtacatggagaagccaaatcctttactggtaggcatttgccgggcaagtaccgggccctgttattcttaatggaagttttcaactctttgttaggagtgaacccaa

SEQ ID NO: 146254 - DNA, 877 bp, Homo Sapiens
tgcgttgggaggaagatgggatttggggtagactctgtggagcgtggctggcgggaggcctgggggctctgcagggcctggcaagctggcaaccggggactccaaccccccaggaggccgaatgctgagcttggcaatggtggcctggatggagctgatgggcacatccccaccgaggaccaggtcctgggagtcctgaggaaggtggttcttctggctgatgcttgcactggccaagggtttgcatggaggaggcacaccatggcgctgcaggacctgctccacgtgtctcaccactgcctcatagcagaacctgaggtgcagcttctcctgcagcatgtgctttctctgctgccgcatgcgccgcaccagctgaggcagctcagggattccgttcccagcctccacctcctgcacagctgcatagagcagtgcaaaggctcccgtgcggcccacaccagagctgcagtgcacaatgatgggcgtgtgcagcggccgctgatgcaggtaatgtgcgtgcacctcctggatgaagcgcagcaagttgctggggctgtcgggcaggcctaactcaggccaagtggggaagtgcaggtgcacaagagagcgcttgaggctctggtctcggaactgcaggctcagcacgcgctccacatgggtttcggtgctgcggacgctgctcaatgccaggctcagggcaccgtgcaccatgggctggcccctctcggtggggaagtagcgtgccactttttgcttctccatctcagcctcagaaaccagcatgacaatgactgacactttctgctcatggaccatgagccagaagtcagcctcgtgccgaattcgacacccagcctcgtacctagcctaaatgttt

SEQ ID NO: 146255 - DNA, 628 bp, Homo Sapiens
  misc_feature (28)..(28): n is a, c, g, or t
  misc_feature (39)..(39): n is a, c, g, or t
  misc_feature (55)..(55): n is a, c, g, or t
  misc_feature (154)..(154): n is a, c, g, or t
gtgcagcagaagctggaggctttcgggngtcagctgggngatgtgggagctctgnacacgtctggcgagagctgcaagatgcgcaggaacatatgcccgaggccgttccatcgccattgccgcctgctactcactgaagaaccggcaccagatngtcatgccctatgacagtaaccgtgtggtgctgcgctcaggcaaggatgactacatcaatgccagctgcgtggaggggctctccccatactgccccccgctagtggcaacccaggccccactgcctggcacagctgctgacttctggctcatggtccatgagcagaaagtgtcagtcattgtcatgctggtttctgaggctgagatggagaagcaaaaagtggcacgctacttccccaccgagagggccagcccatggtgcacggtgccctgagcctggcattgagcagcgtccgcagcaccgaaacccatgtggagcgcgtgctgagcctgcagttccgagaccagagcctcaagcgctctcttgtgcacctgcacttcccctcttggcctgagttaggcctgcccgacagccccagcaacttgctgcgcttcatccaggaggtgcacgcacattacctgcatcagcggccgc

SEQ ID NO: 146256 - DNA, 360 bp, Homo Sapiens
tcctaatatatatcagtttattacaaaacgtatacaaaaatcttctaaacctgtcacattgaaaggtatattaaatgggggttatacaactgccaaaagacatttctttgggcaaatcgtgtaaagatatttaaaaatattgatctactgtgaccatggacagtgattaacattctctccacctggcaattccaggatctatactggtgactaaaaaacaggagcataatatgatgctaaggattcagtctgaaagtagagagccattcgatgcattcaaacaaacccctttgtttttgcaatatcccctccactgtcttgatgtaattatttcaattcacttttttggtttgctgcata

SEQ ID NO: 146257 - DNA, 659 bp, Homo Sapiens
tttgaaactaaatgcattttaatagaaaacaaaatacaaaataactcttttcagaaaacagaaatatttaatcctttttccacaaattagaacttgctttatcctcagagcatagtttgatatgcgtgcgtacatacttacgatttgtttcacaaagtgttcattagactggtattgcagtgcaggacgtgggagcagttcattgcaggagaaaaagacgtggaaaaagccacacctctgaatggtcattcagaaattcaacatttttctaattctatcttgttacttattactccaaattattctttatcataatctttcttttgaggggagagaattattaagagaagtgcagctttggaaagaatttttctttcccaccatcactataatagcccaaagtgttctcaatcaaacccacccacccacttccagaaacatgtcagccagggtgatcaatctgtcacccgaaatttccctttctcccaatacactgtgctaccaaattctctgaattccctgaacctcaaaattccaagtatcaaaaccagtgccaggagtcaaacctgaaagattaaaagcagagaaggtgccctctgcggacgcgtgggcggacgcgtgggtcgacgatatcccgggaattccggaccggtaccagc

SEQ ID NO: 146258 - DNA, 425 bp, Homo Sapiens
tctctggtcctttaagaaaaagttttcgattcctttgtctagttgacaaaaagtttggaaacataaacttagaccacacaacttgcattttaatatgacaatgttgatcttgctaataagccagtacattaaattttagtgaaagctgtttcatgtattttacagtaaatactgccatattaggtacctacaacaaatggtggtttttggaaacttttacggtgggtttttaaagttattaatagtccatcatttcatcatttgtgtttctgtatttattttgctaagaactaaataagattttgtacatcagattgtgtttgaaccgtaaggcacatctgctttatctaaaagaatcttaaggtggaaatagtgtaaaatttaaaattttttatatttctaataaactttttatatataaatgt

SEQ ID NO: 146259 - DNA, 1009 bp, Homo Sapiens
  misc_feature (29)..(29): n is a, c, g, or t
gggggcagaccatcccgccccccggaaancggtggccagctcgggggcaaccggcagggggctttggcccccggaatggggttcggaaatgaccaggtgggacttgagggccgacagggcgctggggagggtggcgccgttgcctggccacctgctgcatgagctgcaccgcgcgctccgggatcttgctggggtcggcacaggcctgttgccacagcggcagcttctgcgccagcagctccttgcccttggagtggtaggccgcggagttcttggccacggcgcactgcttctccaccaggaagcagaagcgcctgcgctcctctgtcagtgcggtcttgtagccgtcggacacgtaattctccagctcgccctgcttgttgctgatggcgtcgatgtactgcagctccttgtccgagtacttctgaggattcttgctgccctggctcttcttccgaagcttcttcagctcagcctgacacttgtccagggcgtcgcctttgctcctttgctcagtctggtatttcttcagcgcagcactcagatacctggagtccagctccaccttctgctccagctgcgtaagcagctcgttgtgaaaagacttcagcatttcttccagctgattctggatctgcctgtggacttcagccatctggaagagaacgtctccgagttctttggagccctggctctcgctggccagctcccccatcttcaccagggcgtcaaagtagcctttggctgcatacgtcacacctgccagtgccttctcgtaattcttccccatggcgatgaagttccggaggctagggttgaactgctccatgatggtcttatagacattttccgtgagccggtgcatctcctctgagcgagacagagacatggtcctgggtcccggctgcaccacagaccggagcgggggacgcaagcggcggcagcagcggcggtaacggcagcaggacggagacgaaagcggaccctctgccggaatcgccacccaggc

SEQ ID NO: 146260 - DNA, 912 bp, Homo Sapiens
  misc_feature (48)..(48): n is a, c, g, or t
  misc_feature (65)..(65): n is a, c, g, or t
tccactgccattcgtgttcccaagaaccgggttgtagagaaagggaancccagccccggccattnctggtcttctcactcttttccgtagtgccagccatcgcgggccttcaggcaccagcagggtaatgaggtcaccctccttgaagctcaggagggtgctgttgtccccagcagcgtgggagaagatggccttcacccgccatacggccattgcgctccaggccggctgccatggagctcgagcgaggcagagtcttgttctcggtggtggcatagctgttttttggggtcacgctcttgcgcacggggagtgtgttggagtaggagtcgctgagcttgctctgagactgcggaggagacagggatttgggctgggcagccttgcggtcagcccacgggctgtagtcctcgccatccgggcctgtgacgccgttcatgatgggtgtgctctcctgggcagacatccgccccacgaacggtgccagctcggggggcaccggcaggggcttggcccccggaatggggtcggaaatgaccaggttggacttggaggccgacagggcgctggggagggtggcgccgttgctggccacctgctgcatgagctgcaccgcgcgctccgggatcttgctggggtcggcacaggcctgttgccacagcggcagcttctgcgccagcagctccttgcccttggagtggtaggccgcggagttcttggccacggcgcactgcttctccaccaggaagcagaagcgcctgcgctcctctgtcagtgcggtcttgtagccgtcggacacgtaattctccagctcgccctgcttgttgctgatggcgtcgatgtacttgggctgagcccctaccggcctcaggcagaccctccaatcccgggaatccggaccggtccagcctc

SEQ ID NO: 146261 - DNA, 307 bp, Homo Sapiens
ttttaaataatacaatcaacacttttattgatttctgtgtttgttttaagcaggagagctgacccaagtgaccgaggccacctgcagctgctctctccacttgccatgggagcctcagccgaagatgtgggaatgaagtagtcagggcatttgtttccatgaaaatcctctttgtgaggccgccttggctggctgtgtccctcggctgagtgtccctgctcctctcaggcaccctctccccacggctcctacttcactggtccctcagggccttgggtggcaagagctctgcttctgatgcctgtgc

SEQ ID NO: 146262 - DNA, 542 bp, Homo Sapiens
gcttttccaaaattacccggtttaactttttgaaatttgtaacataacctttgggatccctaaattagagatgatttctggaacattcagtctagaaggaaacccttggaattgactgatccctgtggtttggtttagaaaattcccttgtgcatggtattacctttttcaagctcagaattcatctaatcctcaaactgtacatgtgtacattcttcaccttctggtgccctatcccgcaaaatgggcttcctgcctggtttttctcttctcacattttttaaatggtcccctgtgtttgtagagaactcccttatacagagttttggttctagttttatttcgtagattttgcattttgtaccttttgagactatgtatttatatttggatcagatcgcatatttattaatgtacagtcactgctagtgttcaaaataaaaatgttacaaatacctgttatcctttgtagagcacacagagttaaaagttgaatatagcaatattaaagctgcattttaataaatatggtgcatagggaa

SEQ ID NO: 146263 - DNA, 509 bp, Homo Sapiens
ccattaaggctgttacagtttaaagttacgtaaaccacgtacaaagaaacagttaaacgtacaaaaaggggagtggggagatgtgaggccgcagtgggagatgtggtgctccccacaggtgcgtccatgatttgggggctgcgtgcgagggggcctggctccagccggcctctccctgccttgactctgcacttggggccggtgcccacctcacgtcactcttgagcttttgattctggatccttctctgagggccgaacactagctctgcagctctggcgcccagctccagtgcaggggccgtcctcggacatgcagactttgtcagctgtggctctcagccattggtctggcccgaggcggggggcaggcagtacgttgggggatccgagtacctccgcttggccccaggtgggctggccatcctcttctaggggcttcagggcgccctgcactggcaggtctgccccgggcgtgatgtacacggaatgtatctggtccgggcggcg

SEQ ID NO: 146264 - DNA, 445 bp, Homo Sapiens
tttttagggcttttcacactttaatgtgcatataaatcccctgggaatcttgttaacatgcagattctgattcataagctctggggtgaggcctgtggttctaacaagcttccaggtgatacccatagtactggtccttgggtcacactttgagtagcaagcgtagtccactctttcctggtgcaaatgaagacacagaagtggactggctaaaggtcagtcatagcaagttagcatcaggcgaaactgggtccagactcccacccattctgaattccctgccagggtttctgtgtgctgcaccttacccctcttactgaattgaagtgagttttgggaaatgcccaagggactgctggcaagctgtgaagcagttggcaacgctttgagaaggcagtgctcacagatgagcaaaggaatgcatcagaacatcatttctcccatt

SEQ ID NO: 146265 - DNA, 450 bp, Homo Sapiens
ctgaactgcatcctatatttttcatttattcaatcattcactgattcaatcatttcacctagtcaacaaaacttatgttaggccttggggataggatgatgttttaaaaagatacaaaggtttacaaattaattacttaagtctgcatttatagttccactgtgaagaaatgggctttgttgccataagattcaattctttcatcttctaaaaatcctgagtgagctatgaagaaaaagaatataaatgcaattcactccgaagtgtgaaatattacccctggctaccaggtaagctgagaagactgtgagttcacacaaatcattgatctttcttgacaactgaatcctaacctgatgaccccatttaaagaaactctgtagtttcattttagaaacaccagcccaaattctgacgataattagctctaatcatcatttatgccattta

SEQ ID NO: 146266 - DNA, 648 bp, Homo Sapiens
  misc_feature (123)..(123): n is a, c, g, or t
ggcaccaagagctggcaaggcccggggaggagccaaagagccgagctcaacccacagggggccccagcaaggggctgtctgacaggtagtatgtctccccttttaagagacgtgggcttttcnttcatttccttttgtttctcaaagaggtttatttttaattttgactcctgtatgaatctttccacgccctggctccgagggtcttcaggcttgtcagcttgggctgcctggttccggctgctgctctcaatgtgtaaagccagtaagtgagcttctttgtacacctccacgaacttctccccggccagagggctccaggcaaagggactctcagatgtgggcaacggaggctgttcgggaaccggattatttaattccaagctggcagcaatacatctttctttatgtccaaagggtccgaagaagacttcatcatcttcatttgcactcgaagaagacaatgaaagatcgaagtcaaatttttcatcggccaaaagaagaatgtcttccttcttagggtcatccatgttcacgtcccctgcccggcagggtgaaggctcatcgcggccgccgcctccttccatggagagagctgtcagaagtcaccaaagcggcagacgatgcaggacgcgcctccggcacccc

SEQ ID NO: 146267 - DNA, 578 bp, Homo Sapiens
tttgccaactagagaggagataggcgtacctccactggttttctttctagttgcaatgcaatattaatgcaggataaggtgctgtcgtgtccatttaaaagttaatttgaaaaacaatccacgttttaaatattacgtctggctctaaagctggaagaattaacgctttctcccccgctccctcccccacgcctccccgcatctgataccacacgatttagatggacgttcgcctgttcatctttgacgtaaaaataccacccactcttttatatgtgacaaatcgttgtgggaacccctgtaaatcgagccattcttcagaaacgtatagcgtaatgtatatctctaagaagaaatacgtgggacgcgttacccgccataatgtatcagtcaagcaacaagtgtttgttgagcgtgtctgatgttcttgaactgccgcgcgtgagatactaagccccgagcacggcagtttggtgggcgagcgtaccaggttcagctctagaatgtttggggcgctcacatttgaggcctgaggagtagaatctggcaacgggccgcttaggctctagacgttcttt

SEQ ID NO: 146268 - DNA, 438 bp, Homo Sapiens
aggtgacttagactttctctccgtcctctgagtcgtaacggacggacacgcaagggccgaggacgggtacaagcagcagcgactagaactgatctgggtgagatctacgcctcagcaacaactgacgcaaaaagattttgttctaggattggctacagctgaaactaccgcgcttgattcaaagctcggggcttgcagcgggaggcagctggctcctccctctgaacccgccccctttggctggcccaatccgctgatcccatcctcttaggccctgcccagactccaaatctaccagaattaatgctcccagcgctgtttgtccactcctgcctatgatttgctgtgtgactactactcgtgggggtaccgtgattagacgctttaaagctattagctatcttgtttaatattaacaatgctactagtgagatcaaa

SEQ ID NO: 146269 - DNA, 969 bp, Homo Sapiens
catacttgtggccagccaaacttaccatgctttacatctctgttatccttggttaccgcccaagatgtaagcttctgtggtcttctgtgctatagtctcatttccatgctgctttgtgctttctttcgacttaggctatcactgcttcttcgtttcttccccatttaacccctcaacaccccatctgtgctttctgaaacctctatttcctgcttaaactattttacatattcaacttctttagtgaaattctccttcatctcctaaccttaactattgataacacgtagattttcctgccagccatttcagttgagccctttctctgaccctgcatttaaaggttgggcatggctgtagccatgttgaacggatttcaattcctcagaatactttcttccctcagtatcttcacaaaggctcttttctctctctgggacatttgagctccctgtttcctcctatctttttctggataacttctattaaagatctgagtttagctgtcactttacttgaggggtataccctaacttccatagagttaggtatttttgctatgtactcttagctgtcctgcactttcctcacggcatttatcacatgtatcttaattgcttctttgccatccctactaagcgagactgtcggtgagggactgtgtttgtctcgtttatctttgtaactccagtagctaatacagttcttggcacataagacagtcagttatttcttgaatgattgcaggtgctgaaggtatgctgcagagatcaggcagttaacgttaatgaatacttcacccttagaaggggtcacctgccactcagctacagctgattgtggctatgtgagaatatgatcccagttttgccagaacatctaattttttcaaaaaaagttggaaataccattttttaaaaagcatcctctcccagtttttaaatgttgtcagtggaatagaattttatt

SEQ ID NO: 146270 - DNA, 616 bp, Homo Sapiens
  misc_feature (129)..(174): n is a, c, g, or t
gcaaattacagcctctttggcttctgaggatactagtctttctccccttaactcagggaaactgctggactcagttttgattcttcctcctgtgctacagcctgggcaacagagcaagaccctccctcnnnnnnnnnnnnnnnnnnnnnnnnnnnnnnnnnnnnnnnnnnnnnntgttctgttttcatacgcacatgtctgcctcactcatagttttatttttataaattcaagcacacagtagagactctctttctgactttatttgcagctacttttagaaaaaagaatctgactggctcagcacagccaatggttttgcttccctagtgccaagtgttcattcctgatccaagtagctgtggtcaagggagcaggatcacaggggatgagcatgtctccagggccacactgctgggtccaagtgggggaagttttcagaagagaggggtgtagattggacagtatcataaaatgaatgtagtacagagggaagccagaagtgaaagtaagagagagggtgtttctagaaaagaaaagtagttaacattgttattctgctaagagaacaagcaagataagtactgaaatttatagaagacttagaaaataaatt

SEQ ID NO: 146271 - DNA, 436 bp, Homo Sapiens
tttttgtgatttaaaattttattgagccatattaaaaaagtaaaaagacacacactcttctcgtgcgacacagaaccgggacccccgtacagaacattttactgttttcccttaatacccaggaaacatgcactaacctggtaaatacctgcttcatggagagtagtctttcaggattcataccctcaggacattgttggggacctactggactgaacaaaggcgggcaacacgggaataaaagacaagagacaacagagtatatttggaagaaggggttaggggcaccttgcctttagtggacaagggccctgagctttacacagccctccgtatttattaggcaaaaagagatagcgagaaagctgggggagggggtgattgtcagtctgccgtttggttcacagtaatcttgcattttttggacaataggcac

SEQ ID NO: 146272 - DNA, 360 bp, Homo Sapiens
gactattacagaattttaggaattctataaaactgtagaaaatgcctgataattactaaataaatattggatttgattcttctaagtgattgtttgtttttaaaaattcaagtttttgaaaataatcatttatatataaccaagaattagtcctgtttagcttctaaaaattaatttcagtaccaccgagataaaaagatatgtgaaagaatatttgtcaccaaaatactcaaaagagttaaggggaaaatggaaaattttaattggtctttggccaaaggttaatacattcagaaatatagaatggggttatcgcgccttaaatattctttcaatcattgcctaggttttcttgcttag

SEQ ID NO: 146273 - DNA, 218 bp, Homo Sapiens
tttttttgggaagccacctggctgcgccgggagaggcgacacgctcatccgtttatttcctcccttgaccatttgttcagcgactctcccctccgttcagcatccaggttccttacggctacagtgccccagccccgcctcaccagcgcgacattctgccctgcctacacactcagacacagtgcccttttcggttcttcaaacttgctaagcgtttt

SEQ ID NO: 146274 - DNA, 479 bp, Homo Sapiens
gcttttattattatttttaattgacacaataattgtacatattttctgggtgtacagtgtactattttgatacatgtatgcaatgtgtcttggtcaagtcttggtaattagcatatccatcacctcaaacatttatcatttctttgtgttgggaacatttaaatcctgcttttatagttatttgaaaatatacaacaagttgctgttaattatagttaccctatagtgctatagaacactggaacttactcctcctctctagttgtacttatatatccattaaccaacctttggctactctcccttctccgcttcccttccttggctccccttcttctcctctagtagccactattcttctctatacttctatgagatctacttttttagcttccacatgtaagtgagaacctacagtgtttatctttctctgcctggcttatttcatttaacataatgtcctccaacttcatttgtgt

SEQ ID NO: 146275 - DNA, 293 bp, Homo Sapiens
tttaatccagtttgaaatttattgctacactttatttgggtcagcattagttcactttggttaggctatatgagcagggtcagtgagtatttgaaacttctgtaggcattcatggtataacccaagacagtccagacaccaggggaaaaatacacatttgtatgaatcagattgagaaaatgttgtgctgattcctgtgttttcacacttaagaggatggggaatctgtattgggaagctgccattcatgttgtagaaatgttcaggagaggccatattcacaggagtttttc

SEQ ID NO: 146276 - DNA, 313 bp, Homo Sapiens
ttttgtcataaacccataagtgagtttatttatatcaaatgaagattgtagcctggattgatacaaagcaataaaaagcaatactccaacctttttcctgtcatgatcctcattgcttaacgtggacaacattaaaggccttgtaccctaaaggaaagaaggcagaggttatgcaaagcaattgaatgtaggtaattgctgaggcaggtggttagtaataagtccggcctatattgcttgagggcaagcagccattggtgattcctaaaatgtccattggtgttaacataatagtttagaaataaatagtggg

SEQ ID NO: 146277 - DNA, 542 bp, Homo Sapiens
  misc_feature (492)..(492): n is a, c, g, or t
ttttgggtgttgggctgtattttattttctcagtttgggaagggatgaggccccagaactgaaaaaaggacagtcaatggccaggaaccgaatgagttaaaaccgggccctatagccttcatccctggtgactctggctggcctcgttagcgcccgcgcagcacgcacagaaggacccttcgcgcaggatgtcccggagactcgtccacgctccctagccgggctgcgaaggcccagatctcccagcgcctccatgccgcgtcggccgcggccttgggggtcttccggggacagtggccagccctgggccggtgacctagcctttgggcgcttccccggggctctagggtcccagggcgccagggccaacaccaggaaagccagaaggttccttcctttggggcaggagttggggggagtcgccgtacgcccaccctgccacgcgggaggcctccgggagagggcagagggcgccgggcagggaccaatcancggcggcgaccggtcactcgcgccccagcgaggagaccctgagatccgcg

SEQ ID NO: 146278 - DNA, 458 bp, Homo Sapiens
gatgatctggtttattcaagtaagttctatctaattacatgaaaccttcaaattgcagaacattttccaactgtggctcaaaacagagactgagatttgacaacaaaagaaggatcagacagatgtgatgttgctggttttgaagactcaagaagagccatgagccaaggaatgagtgcaacacctaaaagctgaaaacggcaaggagccggattctccccggagcctccagaaatgatcacagccctactgactcctaaatttagctcacgaagacctttgttagatgtctgatgttcacaattacatgaaaacaaatttgtgtttgctaagccaccaagagtacagtaatttgttacatcagcagtgaaaaccaatagatttatcttactttatttttacagcttgtgatataatttaccatttctttcttgaattgatctcccatatttatttta

SEQ ID NO: 146279 - DNA, 563 bp, Homo Sapiens
aaacatgattttaaggtattttacatcaaataacaaggacagtgattgctgaggtggggaaaatatacaaaaggagccctctgatgaacgcatgctttgctactttttaaagagagtttccaggccacagtgctgaagaggaaccaggtagatttgaagctgaggaaaaggagctgagatcccagacaggccaagaagtgtggagatcacagactagacagtggatagcagaacactgttcagagagtgagccccgtagatggccggagagagacccagccttggtagagtgtggatcagtgtatgggaaccctggaaagttgtacatgagaacacaccttactctagggggcttgccttaaaatctaaaattaccctaaaatttaaacataatcagttacaaattttaaaacataaagaaagacaccatgttaaagaaagataaaggaaaggtggatttgcaatattaaaatataaaaagtgtatttctgaacaaatgataatactgatgaggggggacaagtttattccatcacggcaaatgatttaagagaagaacattc

SEQ ID NO: 146280 - DNA, 748 bp, Homo Sapiens
tcttttgcaaaggcaagcaactgattcttctcctgccaggcttaagttattaaactcccattacatttagacaaaatgcaattctcaaaataggatgctaacacaagtgccaatgtgcctagtaaactgaaggaaggaagaatgattgaaagtacaaagatctttcaaaatcaacattgtgtacaacagattcataattccttttagaagttagctctggaaggggcactagatggacagaacataagggttcatttctgtctccctgactctgtttttcaattaagttttaggacttgccaaaaatattctagggtttggaagagaaaaaggtaaaaaggttgcaagagtgcaagatttcaagattcatctttgaaagctaggttaatggattagtctgccaaaaatatgaaaatataaaaatattataaattagtcagatgtccatggctgtaatctgtttgcctgatgccagatgtacttatgataggaaaaacaggcggcttaaaaatagctagaaaatgttaagtacttatataacacatttttttgttttaagtatcaaatgggttgttatcttattagggtttccagtaaaagaagtgcctatgatttaacttggaccaatggtaagttttcccattttaggatttcagtgttcatttagggaactataatactatgtagtacaaatcctttattaaatcaatgcattcattatctgaaataaaagttttattcaatcaaa

SEQ ID NO: 146281 - DNA, 515 bp, Homo Sapiens
ttttacttccttaggacatgtattcttcctgagaaatgggccttttatgcgtcactgccaaatctgtagtagaggaaataaatcttgttctttggtcttagagttctcagataaaacagtttcttggttggcaatcccagatggtgctaataagatggggcttggagatggaggatgcaggttttggatgattagcttgagtgactacaagggagaaagagtccggccctctctggatgtggcagcagctttgtttgggctggcatttccctgggtcgcctggctcatgtgtgactgccagcctgttcagcaaggtagataatgtgcttggggatctcgtgtgctgggacttctatctccaaaagttaattgccatagaaacaaatgaagacacttggttgatggggcaggaggagcaaaaggtaaaacaggggctggggacagaaacgcagtgcacgctagactcacgtggtccagcctcaagcattcctttcgccttctgtggggcagtttaa

SEQ ID NO: 146282 - DNA, 1317 bp, Homo Sapiens
ataagcatatgtttcctatagttgtttgtagcataatgtttctaatctttccttttgtcccagttgctatggaattttgtgacaggcgttcaacatcgttcaggacattcttagagtaccattattgtttgtaccccttgaaccagttcctgctatgacctgaataagatcttgaaggcctggtcaacttaagaaatctctgcttgctatcatatgagactcttgccaggtgcctccggctctgaggatttttcagctcggaaaggtcggaccataaggttgacacttgagtaaaagctcctgacatcactttctagatgaagttgtccctgagaccagttaagaaagcaggaacattgaagaaatttctcctcaggtacccttaagtttgcctgaaggttcaagttgataaagttctccagctccctcagagtcattggatgtgattattggagtatgaatatgtacaaagccactgtccttaaaagatagaatgaatagcagctgtcgcttcactgcgaatcctcaatatagaacccagaacgttagtcctacacctaaagtgaggatattgtcgcaggtactccagaggatgcctctctttatatttgatggggaaatccttggcatcacaatttccaataactttaattttttctgccttcagttccacattttgccttttggatggactttttatcagctgcccttgtacttccacagaactcccaaaagttaattctctactgtcaaggcctgaatctgcaacaacctgaaggctttccaaagatgacccatcatttacatgcaggaacaagacttccttctgggatcggacagaacgaatccatccctggatcttaatgcgctcctcactcgcgttctgagccccgagagggtcccgcacgctcagtttggctgaaggtttgtgcttggggaagggggcggaggaacagaagcgcacggaccgcagcaggcagcggacccccagcatcccgcgtccgcccaggccctccgcgggagcagcccagaccccacggttcgaaccccgcctgcagcggccctcctttctcagctgctccccttccgcggccgcagctctgctctaaggcactccagagcccctcggctgcgcgctttctccttcaggactcccagctctgtccccacagaacctctccgcttcccacttcccaacggggcggaatggacaggacactaggcaaacgccagaaagaaaccacgtgcagttggcagctggggcgccccactacccgcgacaatttaaacctacgaacagaacccgggccgcaacac

SEQ ID NO: 146283 - DNA, 695 bp, Homo Sapiens
tttaatttagtaattggtgtttaatacttacaaatacgtaaagcaacaaactggaataaaaccaagggatgctttgtggaagtacttgagaatgttgaagtccaactgatttctaattagcattactttcccatgtaaatgcacgcccctccaatccctaacttagcacatccttcgctccagctacgactcaatcgctgcacatcccatctcatccaaacctttgagctgcatcacttcccacttgtgcctgtggccactgcagtctgattctgactctaggaatcacagcaggtgacagcagagagctcctcattgtcaagtccaagtggactttccaggcctccctcactgggccctcctgctgcatttccagtgcagatgctgcctccttcctggagcccctgctcctccagccatggcacagtctcctcagattgccctgcctgtgcctcctccctcctgggtcacatgtgaccttactgtgtctttacctctggactcccactagactcagctccacatcgctcctggtcactgaaacctagcactgtggtggtgggtgactatccctaacattccaaatcattcctgagtgacaacactgtgtggatatttcagagattaactcaatcttcatgactctatgaaataaaaactacaatcttcatttcatagatgaggaaatggatcag

SEQ ID NO: 146284 - DNA, 517 bp, Homo Sapiens
ttttagtaataatagctaatatttattgatcacctactctcggccaggaactattctaagcaatttatgcaaataagctcacttgattcttagcaaaacggtaagaatctttttattgcagatgaggaaacaggcgcagagaagcatcttcccaggatcactcaacaaagtggtggtgccaggactggcataaaagattccactaaatgaataagagcgccgagaagggtgcaattttgacttgggggaaggcggtactcatgcagggaaatcttaaaagaactcgggagaaggtttttctcgagatcgagaaggttccccattaaccgaaggattgagggctgccctagagagcaggcaaacatcctatgggcgcctactgtatgcagggatcgactctagacactaaagagatgaatagtcccgcgggtcgctcgattacgggagatcctcctacttgacacaattttagagacggtgacaaatgcccccagcagaggtgcaagtaggaccctgg

SEQ ID NO: 146285 - DNA, 398 bp, Homo Sapiens
cagtaataggcagtcctccccttgagtgattttgtttccaataatttctaatgtatagagccctattaactcctattactggttgcaggcaggcattacacaaatgaaatgacctcatccagtttcttttctgaagagttccatcactttgttcctagtctgtttttttctgcagccatcttacacagcatggtgatctcttatgtcataaatagtcccatagagattattagaagaaatgagtggtaataagaataaagttgagttttaaaagatgaaagaaaaatgtatatgaccaggaaaacttgagctttgactaacaagtaaaagaaaatacctggctgggcgcggtcgtcacgcctgtaatcccagcactgaggtgggagtgtcccttgagc

SEQ ID NO: 146286 - DNA, 1164 bp, Homo Sapiens
attctgctagagttaaccttgagttcagagcagtattaaatgcgtgcactttcaggtcagtactggggaccaagtaccctctggtcttttgtgaatggatggttttgtttcctatgggaattttggcaaaggttttctggaaagaacaagtttctcaaaggactttcttcctctagaatgttcattttatgagatcgctatctgtaagtccagttggattacaggaatacttgaaagttactttctaccactattagaaaatatgaagtcgcatgcactggatatctatatatcattaggtttttgttgtgtttttggttatgctgtcccccttctccttggggagatatttgggagcaaacttatttagatttagagtaaacttttcattatagagcaagtaaaaacagacaaatgaaacaacctagtgtttcacataaaaatacttctgacataaagtaccaagagcagtgtgaatatacttggcatagtcaaaaaagaaaatacatttaatattagttcaaaattgttaaaaatacctttagaaggtctagtctattattgaaaactcaattttttcacttatatggctttaaaatggagctatttgctacaatataatgtatgtttatttttttaagttatttaatgttaatatacatagctagacttaaggtttttcagaaagatgtccataataaatattaaaaacaatggtattttttaaaaaactgccttagggttttaaaaccttccctacagttataaccacgtgtaattttgtggaaatgatataacagctattattactactataacataggcataaatattttcgtgtttatatgcatatacaagttaaaataattagaaactatgactggctagtaaagtcatctaggtttatagttcagtagcttaggcagagaaacagtgtcatctcgttttaggtcagaggacacagctcgggtctgagtgaggggtacactggcactgggtgctagatcccatctctcttcagacaaggctggaagttcacacagcaagctatgcagtaagctcactgcagggacatttggaaaagagacccatgggatggtggagtacgaggttcggggccattcccagcagcataggggcggaaagcaagtagttgacggccgg

SEQ ID NO: 146287 - DNA, 555 bp, Homo Sapiens
  misc_feature (65)..(209): n is a, c, g, or t
  misc_feature (299)..(461): n is a, c, g, or t
ttttttttgcccatctgccccttctaccatgtgaggacagtgtttaaagcaccatcttcaaattnnnnnnnnnnnnnnnnnnnnnnnnnnnnnnnnnnnnnnnnnnnnnnnnnnnnnnnnnnnnnnnnnnnnnnnnnnnnnnnnnnnnnnnnnnnnnnnnnnnnnnnnnnnnnnnnnnnnnnnnnnnnnnnnnnnnnnnnnnnnnnnnnctgtatgattccattactggaactctagaaaagcaattctaatctttctaaaaagataggaaagagtcattgtttggagccagcaaaggnnnnnnnnnnnnnnnnnnnnnnnnnnnnnnnnnnnnnnnnnnnnnnnnnnnnnnnnnnnnnnnnnnnnnnnnnnnnnnnnnnnnnnnnnnnnnnnnnnnnnnnnnnnnnnnnnnnnnnnnnnnnnnnnnnnnnnnnnnnnnnnnnnnnnnnnnnnnnnnnnnnaagctgagtttttaaaaactcaataatatttcttcctggagtcaagaataactatgaggtttctggcttgggaaatcagatgtatgctgtgcca

SEQ ID NO: 146288 - DNA, 484 bp, Homo Sapiens
  misc_feature (325)..(335): n is a, c, g, or t
  misc_feature (365)..(443): n is a, c, g, or t
ataggaaagagtcattgtttggagccagcaaaggggaaaggattgattgggatgggacacataggaaattgccggtgtgatagaaatgttttgtctctatctatgaggatagtgacacaagtacataaatgtattaaaactcattgaaatatacacttaaaactgttgcattttattatataaaacaatgagtcaataagctgagtttttaaaaactcaataatatttcttcctggagtcaagaataactatgaggtttctggcttgggaaatcagatgtatgctgtgccacctacagatgaggaaacacagaagcagattttgnnnnnnnnnnngttatctgggaaatcttgagcttgagatgnnnnnnnnnnnnnnnnnnnnnnnnnnnnnnnnnnnnnnnnnnnnnnnnnnnnnnnnnnnnnnnnnnnnnnnnnnnnnnnttctacatgtacactggatatcaattccttatcagatatat

SEQ ID NO: 146289 - DNA, 1236 bp, Homo Sapiens
  misc_feature (203)..(235): n is a, c, g, or t
  misc_feature (485)..(501): n is a, c, g, or t
acatcccacccggaaagttcaccccgttttccccccaaggacttaggaatggccttggtgcttagtttttaatggtagtttgggcttattctggggaatttaacaatccaaccaaaaataagaaagcccatgtggttaaccagtagaggagcccggggactctgtctccattctctcatcacacacaagtcatgcatctcccnnnnnnnnnnnnnnnnnnnnnnnnnnnnnnnnnctgtcctctgaggaggcacaggtgtgacagataaggaacctgcagctcagattcaacaggcacctgccaagtccacactcaggactgtgacagcctcaacaacatgaggtccagacacattcactgtggaaggctctgcccacgcgaacaaagctgtcagctctagcaaaagggacactgccttcttcctccctcacttctcacctggtaagcccgggaatcaaaacagcaaaaatgagcccccaaaaannnnnnnnnnnnnnnnnagcagccactgttaccagcagcacccgctgcacaggcagaagcacctctggtgccactttcaagacaaaacaagagcacagttgaaacatctaatttgaaaatgttgatctcctttcctaagacattgctaaggggcccacaggaaggctggtggcaccagggaataaaccctggaagtggtgcagccactctgggaccaggcagctccggccagaggcctcaatccatggcagccagctgctcgatggcacggcgcactttcttcgcagtttcctcaaattctttcttcttattgttggtttcctttgcaattttgttcttggctctttctctgtccagtttcaaaaattcaccaagggttaattcttcaaactgcttcttgacagaaaggaaagcgcaaccggacgaatgctttttatgttcctctatggggtcgtcatctggctcccagccttccagctccttgaagcagaagaaacactgggccaagtctggctcgttctcagtggggcagtggatgaagccagcctcggccatccgctccggggtgcaggcgcagccctccaagaagggccagttcttgaatgtagagatgcggtggtccttgagaaagggctgccaggcagggggcaacgtcggggcacccatgccgccgccgccacctctgccaacgggtcccgcgattcaaatcctcgtgccgatttcaccacccagcctcgtacctagcctatgtt

SEQ ID NO: 146290 - DNA, 1829 bp, Homo Sapiens
  misc_feature (798)..(828): n is a, c, g, or t
  misc_feature (1078)..(1094): n is a, c, g, or t
  misc_feature (1520)..(1591): n is a, c, g, or t
cctggcttgctcaggtctggggttcgtggctctggcaagcgcccagagacaactgcgtctctgccaggacgctcatcctcactgcggctgtctgggcagatggctgttggcaggctagggacgacgatgaaaaactgacaatattttaaaaacccagtagggtccacagcagtgtttgaaatgacaggctttttatttctcaggaacagccgagatgacctccagaggtttccagcgaagctgtaacaatccaccctgcagctctatgacagggaggagggcgaatcaaatccatcatcttacgccagacttcagccctgcgggagctgctgcctccaaagaaagcggggacctgggcggactgcgtctctcccccgtgtggagaacgtgacagatgtgaaggttgggctgacagacacacggcctgcagcagcccagccagtcccccacagcatcgagccaagtcatttaaaaaggatttaggccactgcctttttctgagggaggagcggccagcatgtgccccgcggctcactgggcctgtctaatcacacagcagtggcaaaaggagtatctgccagacgcttccctatcactctattctgtctcctcatccacctgaagttcaccccgtttccccaatgacttagaatggctttgtgcttagttttaattgtagtttgtgctattctgtgaattaacaattcaaacaaaataagaaagccatgttgttaaacagtagaggagccggggactctgtctccattctctcatcacacacaagtcatgcatctaccnnnnnnnnnnnnnnnnnnnnnnnnnnnnnnnctgtcctctgaggaggcacaggtgtgacagataaggaacctgcagctcagattcaacaggcacctgccaagtccacactcaggactgtgacagcctcaacaacatgaggtccagacacattcactgtggaaggctctgcccacgcgaacaaagctgtcagctctagcaaaagggacactgccttcttcctccctcacttctcacctggtaagcccgggaatcaaaacagcaaaaatgagcccccaaaaannnnnnnnnnnnnnnnnagcagccactgttaccagcagcacccgctgcacaggcagaagcacctctggtgccactttcaagacaaaacaagagcacagttgaaacatctaatttgaaaatgttgatctcctttcctaagacattgctaaggggcccacaggaaggctggtggcaccagggaataaaccctggaagtggtgcagccactctgggaccaggcagctccggccagaggcctcaatccatggcagccagctgctcgatggcacggcgcactttcttcgcagtttcctcaaattctttcttcttattgttggtttcctttgcaattttgttcttggctctttctctgtccagtttcaaaattcaccaagggttaattcttcaaactgcttcttgacagaaaggaaagcgcaaccggacgaatgctttttatgttcctnnnnnnnnnnnnnnnnnnnnnnnnnnnnnnnnnnnnnnnnnnnnnnnnnnnnnnnnnnnnnnnnnnnnnnnnggggtcgtcatctggctcccagccttccagctccttgaagcagaagaaacactgggccaagtctggctcgttctcagtggggcagtggatgaagccagcctcggccatccgctccggggtgcaggcgcagccctccaagaagggccagttcttgaatgtagagatgcggtggtccttgagaaaggctgccaggcagggggcaacgtcggggcataccatccgccgccgcctcgtgtcg

SEQ ID NO: 146291 - DNA, 859 bp, Homo Sapiens
gcattctgccctcgctgcaagtacggcaccggggaaagacccgggagttcgacaccaggtgaaaaaaggaagccccccaaacaacgagacatggtgagcagggaaggcaggcccccgggtaacaagcaaggccccggcggccccagggcagaagccccctctggtgcccctttccaaggccaaaaacaagggggcccaggtggaaccattctaattggaaaaagtggatcctcctttccttaagaccattgctaaggggccccccagggaaggcctggtggcacccaggggaataaacgctggaagggggtgcagccactctgggaccagggcagctccgggccagaggcctcaatccatgggcagccagttgttcgatggcacggcgcactttcttcgcagtttccctcaaattctttcttcttattgttggtttcctttgcaattttgttcttggctctttctctgtccagtttcaaaaattcaccaagggttaattcttcaaactgcttcttgacagaaaggaaagcgcaaccggacgaatgctttttatgttcctctatggggtcgtcatctggctcccagccttccagctccttgaagcagaagaaacactgggccaagtctggctcgttctcagtggggcagtggatgaagccagcctcggccatccgctccggggtgcaggcgcagccctccaagaagggccagttcttgaatgtagagatgcggtggtccttgagaaagggctgccaggcagggggcaacgtcggggcacccatgccgccgccgccacctctgccaacgggtccggcgattcaaatctggcggttaatggcgcgccgcggggcatgtcccc

SEQ ID NO: 146292 - DNA, 382 bp, Homo Sapiens
gtttccctgcccctccattgcccttggctttttctggtatgtgctgtgctccacgaccaagccgagaaaggacctagggtggggaagggagggtctcttgattcctaaccgcccccacatactgctccaccgctgaacttcgggtgccggggaggagaaattgggctgatgtgagctccccgtcacccgccatggagccggctgtgtgtgttcatcagatacagttctcccttaaccttgtcctttctctcctgtgtctcagtctccgtcagtctgtctttctccgctcttctctgacccctgtgaggaacctccttaccctgttctggaatcgctgccagactgtagcttttaatttaataaaaataaagtaaaataaaaa

SEQ ID NO: 146293 - DNA, 1114 bp, Homo Sapiens
  misc_feature (661)..(720): n is a, c, g, or t
ttttgcaaggaaccacatcccaagtttatttgtgcttttcaaaccagccagaacaaccagtaatgtcctcctcccaaggtttccttctctctcaccttctttgtgaaaagcttgtggaaaaggcagatgtggttgtgtggacacatttagagatggggatgagctatgactaggctggtttagtaacaggtttgatgaacgtgcctcttcccacttgtcttactggtagcttacagtcactctgaggtgtcaagagacttgggtctcttcagcaaagagaggagtccaaggcgttggtggggtggcagaagtagggagtgggaacttttgatgatcagtttcctcataaaggcaggagagagggaagaatatatttcctgggtttcatctttcttccacttcaaaggcagtggtgagatactcctttggaacaatcccaacgaggctgttcagttctcccacccaccagccatacatgttatactccttgctcagaatacggatgaggtcaccccgttgggagggacagttcatctggctggtcaccataggcaatcccatagggcctggtagtaactggcatagtctactccttttcgtcgagtgccactctcatcctcttctagatcatgctcttcatctggcaagacttcataaatannnnnnnnnnnnnnnnnnnnnnnnnnnnnnnnnnnnnnnnnnnnnnnnnnnnnnnnnnnntatggaatggttaaggagctcagatcctttaacaagaaacttatttgatccacccagtctctggcttctgctggactagtagctgtaaactcatagctgcgcctatcctgggaggtcagttcaaggcgggattctttcttggaatctcttcgcaggtggggggccatccgtacactgtagcccttaatgaggaaggtccctttgggctgcttgctcttctcattagcatagtagtagaagagacctctgctgacaacacaccatcgcttctgccactccgatccaaagaaactatgatctttgctgttcttctccaagtatccttgcttgattacgttatcaagttcttgagctccttttacgatgtcttccattccctcatcctgataatctg

SEQ ID NO: 146294 - DNA, 433 bp, Homo Sapiens
ctaatggcagtgtttttaaaatttggattgtcagcagttggcctttgttgagaaaatgtgtgactttgcccaagcccagtaacttggagccttgaatttgagatgctggaaagggagtccttcctcctttctgcagtgtttgtctgggttgtcccctagtttaccaaagtccattttgaatgtaccatccccagcccaactccagcctacagatagtgccagaccgccagtaggtggagtagcactgtcttcctggtcccggacctcagagggctttgcctgttagggtactcttatcactcagagatgggccttgagttttcagagaacagaaacccattaagctgtttcccctattgtattcatgtgccctttgtgtttctggcaataatttattttatatttcaactaaattttaaatttctaattcaaa

SEQ ID NO: 146295 - DNA, 689 bp, Homo Sapiens
ctgaagctgccttatagtcatttcggacatacttgtccaccgaaactgaattcatcgctgtgactgcataccagaatgataagataacgcagttaaagatagacagcaacccttttgcaaaaggttttcgggaccactggaaatggcggaagagaaaaaagaaagcagctcaccctgcagtccatgagggtgtttgatgaaagacacaaaaaggagaatgggacctctgatgagtcctccagtgaacaagcagctttcaactggttcgcccaggcttcttctccagccgcctccactgtagggacatcgaacctcaaagatttatgtcccagcgagggtgagagcgacgccgaggccgagagcaaagaggagcatggccccgaggcctgcgacgcggccaagatctccaccaccacgtcggaggagccctgccgtgacaagggcagccccgcggtcaaggctcaccttttcgctgctgagcggccccgggacagcgggcggctggacaaagcgtcgcccgactcacgccatagccccgccaccatctcgtccagcactcgcggcctgggcgcggaggagcgcaggagcccggttcgcgagggcacagcgccggccaaggtggaagaggcgcgcgcgctcccgggcaaggaggccttcgcgccgctcacggtgcagacggacgcggccgc

SEQ ID NO: 146296 - DNA, 584 bp, Homo Sapiens
  misc_feature (517)..(517): n is a, c, g, or t
  misc_feature (520)..(520): n is a, c, g, or t
tttaaaactacagttcttttattcatcctaacacctagcagacagccctccacatagtaagcacttaagtatttggtgactggagatatgaaaaggcctacagtaaaagagaaaaatcatgcaatcactagataaaaaactacctagatttgtgtatctgactccaaaattgggctggaattgttagtagacaaattttcttctggcaaacaaacaaaaatgcaacaaaacttcaagataaacaatctatgtagtaaggcagtgtcaaacacatccgttttacccaaacgacagaacaaataccaataagatgacagacatcaaaatcaaactttgcagcaataaacaaattttcatatctgactgtaaattaaaatcttgtgtgcttagaaacatgttcatttagacagtattaaaaagtaggatgttagtctcaaaatccaagagttaaattattaattcaatttcaatacttataatttagtatcttactgatagatagaggaccaggcacagncanagacgtaagtgcatgcttacgtgatccagaagtggcagaaaggtgcataaggcctcggcgatct

SEQ ID NO: 146297 - DNA, 262 bp, Homo Sapiens
tttaatagtgcatgacatgttcagtaatctttctgttagactctgcattagtcagaaccttatttgaggacgtggactcagtctgggtcactgaacttcatagagatgtcaggaaactgaccaagatccagagggatcgatcaacttgatggaggatgaagaatcccagagaaaaatcaaaggagtcaagcaggcacacttcggaaaaaacagagacacctttcttcccttaatgctggggaggtttaagtccgagtctcct

SEQ ID NO: 146298 - DNA, 446 bp, Homo Sapiens
ttttttaacatttttataataatcattttactaaagcaaagattaagtacacattttcccaacataacaatttcatctatggataggcattagctacatgatttttcattttaaaaccccacaatgattatttttcagacataaataaaaaatacactggttctagatgccaacaaaatcacatttgcaaaccttaagagtttggtaagttacaacattaagatgactaacgatatgtgtgcagtattctcagtatagaatacccaaaattcccgtgtacatctgtgttgcttgagtgtcccagtatgggaggaggtagacttggcacatcgaaagccactgctatactaaagaatcatacaaagtctcagggattcttcagagaatcagctattataaaatccatcttgataattcattttgtgcgagaatgtgagaatgaaatg

SEQ ID NO: 146299 - DNA, 372 bp, Homo Sapiens
tttgcagcggtctgccttcatcttttaatggccggtgcggtacagttagtggacagacgggggatgggacacagcaggggtgaaacagggcagtcacagccggggccggggatctggaagcgggggcggtcctccccctggaaacaccgtctttggaaggacacccttaggatcccctgacctcagggtgccacccacacgggcctggtgttctgggaggcccgggctggagtgacccccagcccctccctacgttccagggacccttgggtctgtcgagtcccttgctggatgagggtcaagacctaggtcaagctgactttagccagggtgtgggggcccggcttcgtagcccccagacttacctcccct

SEQ ID NO: 146300 - DNA, 318 bp, Homo Sapiens
gacggacgtgtatcatttattacatgtcatcagataatcactattgttgacaatgacaccgctgtcatacacctcaggtcctcgcaggtcctcaggttctaccgtgggatctgttttattaataaatatttatagtcagaatacagtagagttggtagcgagtttcttcacagtctaaaatgaatgggactttttgcccatgttctgagcagctctctgattcccaggagatgggttccaatcagtcctcattacagccttctggaaaactactccactgcctttgtgagactgcttgtgttggcgtctgcgatggta

SEQ ID NO: 146301 - DNA, 474 bp, Homo Sapiens
tttttgtggtgagaacatttgaaatttattgtcttagcaattttgaaatagacaatacttcattgttaactacagtcaccatgctgtgctgtagatctcaacaaaatatattcttcctgtctcaactaaaacgttgtactctttgacaacatttccccattcctctcaccccctccaaaaacacccattctttatgttgaagagaatggctaaaaagtcccagcaggtttcaactgacggcttcagtggttgtcccatcacacttcaatgttattaataaaaaggggaggggcaatacataattcggacaggctgaaagtaccattgtaaccactttcttgacttcacagaaaaagtcctcttgttttcatctgtaaaatgggaactgcgtgaataccattcttcttttcttcagccggaaagagtgctgttttggaggaggctggggcaagtgtggatggctcgagtgggtcc

SEQ ID NO: 146302 - DNA, 1012 bp, Homo Sapiens
tggaccggtccggaattcccgggatatcgtcgacccacgcgtccgcggacgcgtgggcaatgccggaggctcggcccctgagacagcgggttccgccgaagctccgctgcagtacagcctgctcctgcagtacctggtgggtgacaagcgtcagccccggctcctggagcctgggagcctgggcgggatcccaagtccagccaagagtgaggagcagaagatgatcgagaaggcgatggaaagctgcgctttcaaggctgcgctggcctgcgtgggaggatttgtcttaggaggtgcatttggggtgtttaccgctggcatcgataccaacgtgggctttgaccctaaggatccttaccgtacaccgactgcaaaagaagtgctgaaagacatggggcagagaggaatgtcctatgccaaaaatttcgccattgtgggagcccatgttttcttgtactgagtgtttgatagaatcttaccggggaacatcagactggaagaacagtgtcatcagtggctgcatcacgggaggagctattggtttcagagctggcttaaaggctggggccattggttgtggaggttttgctgctttctctgctgcgattgattattacctccggtgagagtaattgcctgcagggacggatgatgccagccccggatccgggctgctctctggaggacagtttctgtaccacactttgctgctcctggactccagccagccttcacagaggacgtcccgtgccagattctctcacagcagatcgggagacaggatgttgacatataggaattcagctccacaaagcttcaggcctgaccacagctggccctctaggttgtttggtgttgtgggcacagaggtgacagtgtctctgcaggcactcaggaagctgttctaccttggaactccatgcaactatccgtctcgaataccagggcagggcaaggcggactgatgccgtccaaccaattatctcacttgttttgtgttctgtcatccttg

SEQ ID NO: 146303 - DNA, 523 bp, Homo Sapiens
aaggaatttatacatttgcatctgaaattgtattcattatcttctagaaaccaagagtggacttggtatccgtctgattatattttctttgttggtaaagagcctcttttttccctttttattttcatcttctctttctctagtgtttataatcttatttttatgaatgtagtctaattatttagaacactgtctccgagtatgtgtttatttgggtttgtgttttgaacattgcctccaggtgcgagtttatgtgtgtttatgtttcctatttgaggttggacacttagaaaattttctcaattcgaaaactattttccttcagcactcagaaatttttatcaatgattatttccacgattatttcctgtccttggtttttcgtgttcttaacctagaattcaattgtttaatgttagaccttacacatcttcaatgtatcatatatatttcactcatattatttattgtcatatcttttggactattgtgtgaaagcaataaatgtatattactttaaaaa

SEQ ID NO: 146304 - DNA, 883 bp, Homo Sapiens
gggtcatactggctactttgtagaaaatggattgtaggggcaaggtatgagagcaggattgtagcacaaaatctcacacatggataaacatgtagaattgatcacacatggttggcagctgaggatgagctgtgctgagtcattgactttacctctcaagataaaaagacaaaagaaaatggtaaaagtaaactttctaattagactatttcaaacccctggattatgtataaaatatattgtttatgtattttcagaaggggaaatgaaaagagaagtaagttgtttcttagattaaaagatagaacagccagcagattccattcattcgcttcagctggagactaagagaacaggaggagagggcaagtatttcctgccatatatcagacagtgagaaagtgttgccatgatttagtttagatgaattataatggcacacacaaagcacaagctgccttgattcaacaaagaagatggaaaacagaagccgctctgatcagtgaggaagaaaagaaaattacgaagacaagttatgtatttgctctgatttcagacactccgaatgtatttgttctgtggtgcagaatattaagaaaataacagacacgctcatgcattaaaagaataaccgcaatgtactcatgcataatctacaacatgtttttaaaggatggaaatcaaatctatctgtcatactttgccctcaagtattctgtgggctgttgacatcattttgaattacaaatgatgtatacagcttgtgctacaaagattttggaactagaaacagaatcagactcatgcattacttttattgtttttttaaaaatgccctgggacaccagagaacaattccatttataaattttagtatagaagc

SEQ ID NO: 146305 - DNA, 649 bp, Homo Sapiens
tttggtcaacaaaaaaagtttatttggtccccacagtgtgtggattataacatagttctgagtacttttaggaattataaaggaattagaggccacatctctattctcatggaattattatactccatgtaagacaggactaatcccagtcaaagctgataagcacaccgacaaaaatattaccaactgccgccgctgataaggactctgttgatcctccaatggtgcatgcccgggtttaggtgtagtgaactggaagctctaggagactcaaggaagaaaacataggcttaaaggatgggttccctactgaaggttcaattattttggaaaaccatttagcacaaactcatgctactgtataatttttgttttaaaggtctgatactgaaaaaatttttacaataaaaatgaaacagtttagtataactacaggtgttatcatgataactataatttgtgtctacataaacctttccaccaagaaaagaacacacatatatacaaatgatggtttaaatgtctagttttaggagactaagaagttaacaatacaaaagtaacagcaatatgtatactgcatatgctactgaacctgacagaaagatattcaatagcccatttcccccacctgcagcataagaaatta

SEQ ID NO: 146306 - DNA, 484 bp, Homo Sapiens
  misc_feature (202)..(218): n is a, c, g, or t
gtttcccaagtttttattagagcttccaaatagcttgcatgcatatagagagcgtggtttcctcatcacatctcttcatccatttattgcctttgtaaagatacggaaactgttatatgtcagcattatcggtgtgtgatgaattgtagacctcacttatctgtaggctgcttatctggccacttcaccatttagtaagttnnnnnnnnnnnnnnnnntgttttggagaatctggacttggaaggcaaaccagactaagttcaagtcctaggagcgctatgaagtgtgtgacgttagtgccagaaggaagttcagcaaacttcagcttcctcatcaggagtggtgaactgggcaacctgctgcccagctgataggagttgatgagatttgcaggtgtagacagctcagcacgcagcctcgctgctgttcttcagcccgttatatctgggtacaattatgcacatttttgtttgttttgtttgag

SEQ ID NO: 146307 - DNA, 685 bp, Homo Sapiens
tttcagtttttataactgcagccggtcatgactctcctgttgtaacctggctgcaaagtggccatttccctcagattctcatcttggttcttgtgggctccagcaaacagtcatgtaaaagggcctgccaccaaaacctgttcccctgaacttaggacagaatctcgttgggtcagatattggtttcattttcaatcctgcctgtcctgcagtgagaggcaccaaggtctcactcatttaattaggttacatagaaatatctttcaaggtttgagctgattttcactagaccctaccaaaggatgaaatttgaattaagtgccatcagggaaccagtgatgcaggtggtctgacacatcactgctctatccttgcagcctccagaggttcagggcttcagtgcacctcagcaccgttatgttgtaaaagtcagtctttgtcacttgagctctttggaggctgcatttgtttctcattcactattttacccctagtttggcaacatgcctggcactgaagacatttggcagctggcatatggcagctctcataacttgctttggcccagaaggagggatttcactggtgagataagaggcagggaaggtaaaccttcaaggtaaaaactacatccagcaggaaagcatacctttctctacgagcactaagatctgtctacttgaag

SEQ ID NO: 146308 - DNA, 1220 bp, Homo Sapiens
cgcccagctggctgagacgcgttgagcctggcggcgagtgggggcgtgcgactggttactctggttactggtggccgcgccgcgctggcgagagcctgccgcccgcgagggatgctggtgaggaagccgtcggtgagccgcctgccgccatctgaggtgaggtaccctggaaaccaccttttatcggtggggaagtgcagtcgcggtgggcggctctgggggccagcgaaacgggaggcctctaaatctttaggttggggctgcattgccctggagccgcactcttgagtccgaggccatcttttgttggagaaggcgtcggcgttggcgttttcccgaggttgggctgtacagtgtctccgtccgcggaaaaagaagcctctgaacccgcgccggcccgcagcccccgtgccttccggccgctgctcgccgtcgccagaggctaggccacgtttcccccagtgccgaggtgtttctgtgaccctccctccactcccattcccttctgaaagggcacctgctcttggtgagaaaagaaattatagcacgaagagccagtatcagaagagtatccatcacccgcagcaaccgctcagggaacaccatcaatcacacgacaacacctgggacatatctggatttcctggtgctgacggagtgatgcgagtcttgctcgtggagctgtatccagcaggcgattttacaatacttgctttctaatgccctatacaacttggcttcacatacttttacactaactttatatgatttttaaaaactggtctgattctggacttctcgtcccttgggacactgttaactggagtctggcctggctctccgttgctcctcttggtacctcatatcggggacgaaccttatacccactcgagcacataatctccgcttgaccggtgcaccaaagaagccttggaccatgtggacttttctgggcattgcccactttcacctatttatacagaagtcggggacttcatcacttgcgccaacagggaggtcctgtctgtgcgtgctggtgttcctctcgcctgggcctggtgctctccctacctgttgtctgccaccgacaacgggggtgtctccatcggggcagacaagcagacgcggtcccaagttacgccatcttcatcggatatactctcaggcctgcctttcatggcctctcctgtgccacatccccctgaatcgaacctagtcaa

SEQ ID NO: 146309 - DNA, 470 bp, Homo Sapiens
tttttgacctagaacaactaagatttatttcttgctcacgcaacatgtccagccagaggggtgagggctgtgcttcacacagttaccgtgcaggacctgggataacaaagatgttcccattttatgatcgtcacaaggctccaggatttgttgcaacagagaagagaagatagagaagcacgcagcagcaattaaatgatgctgcttggaagtgacagacttctcacattatgtcgaccaaatcagatcacagtcacaccaacttcaagaagcacaggggaagataatagtcccacattcttgtagagcataagtttcactgcagaagtgggccactgtccctgctcccagctctggtgtagtggcatgggtgttctatcttcatattagctctgaaacagacttcaagataaaacctagctacgtcgttctggctgaaactttgtaagtgttaggtataaagtaagcac

SEQ ID NO: 146310 - DNA, 381 bp, Homo Sapiens
aatcatatgttcactgcctgaaaagaaatctccaggtttgaattagcaaataagcatgaggcagagggttcagctgtggtattttcagtgatgttgaaaaaatagtaacaataataatgacaggtgataataagatactgatttcccactttccgttgggttcaataggtgtttcccagtcactgtcacttggttggattatactcttttcatagggtgctcgagtttctctctaaatctcctagaaactctttaaaatccttctgcattaacatatgcacccattttggaactagtagcactaagtttaaaacaaatttgaatagtacctctaagaatgtcatgacttacatttgggattgctaaatttgcttagacaaa

SEQ ID NO: 146311 - DNA, 473 bp, Homo Sapiens
  misc_feature (118)..(143): n is a, c, g, or t
ttcttttggattctgaagcagctccagggtgggagcctggctcttctcccccacctctaagatgagcttcttcaatgaagcgatagtttgattgagttttaacgtgttctcattcagnnnnnnnnnnnnnnnnnnnnnnnnnntgttcaatctctgaagaaacaggtcctcttcttcaaccaggaagttgtgcagctttgaaaactccgtgctgattctcattcgctgactctttatcttatccttccactgtgtggcgttcttcacttctacatcctgtaaatgcatgactttcttcatcttggccacgagattacgctgagacttaagaagtttctcccggtagctctcgaaggcctcgtcgatgggtgccatggcgtgagtctggtgctcctgggactccctgcacaccaggcacactggccgctggtcgtcctcgcagtatagagcgcacgggctcccagtggcggccc

SEQ ID NO: 146312 - DNA, 826 bp, Homo Sapiens
  misc_feature (109)..(109): n is a, c, g, or t
  misc_feature (144)..(144): n is a, c, g, or t
gcagccaagtctggctctgcccagctgtcgccatgccagtccccgagctgaccccctctgcagtccagggattaccagagcatgaggcacagggtggcccacccaggcncaggtcttgccctcaccttgctgcggagaagcccnccgccctggtgctctggtgtgctggtttctgatgcactcttggttttttccttgttgttattgggttcattgtccttgatgatgtcatactggcggcagaagagggcaatgacacctgcccacatgaacaggaccacgacgatgatcagcacctcgcctgtccgcagctgttggttcctccccatctctttcatggttacctcatctttgttcttggaggccatcttctcagcctcacgcggggtcttgaagagcacaggctcgctggctgggctctggccctgaatggagatggcctgcacgtggactatgtactccgtatcctcctccaggtcccagagggcacatgagcgggtggtggtgttcacctcctggatgaagcgcagcatccgcacatccttcttctgctgggagatggcaaatccgatgacaacctcatcctccagaacatcccagctcaccactgcagagttggccttgaggtgcctgacggtgacgttcactggggctgagggactgtccgcctgcaccagcgcgaagcagacgcagcccagccacaggcggagcgcggcgcgggcgcggggcggccaggcgctcggcgacccggggtgtatggtggctcctccggccggcaggcccggggcggcgcagggggacgcggctccggcgcccggcggccgca

SEQ ID NO: 146313 - DNA, 606 bp, Homo Sapiens
agaaggaggaggaaaagaggagaccttttttattgtgccaggcactgtgcaatatgtagtttagcccttgaaatgaccctgaggcatgactggtattatctagtgtctcgtattatctctactgcaggcaaggaaaccacagttcacaagcaggtcagggaaggaaccaccattccagctcaagtctccccaactccaccattgtgaccatctttcaggtggctccatttgcacagaagtaacaggcatgtgagctttatagtacttacaagtccagtgttcctagaaacctcaggggcaaataacactgaaatattcccaaggcaatgctttgtttttctgtaaaattgttctgggcagaagaggaagaagagaccgagcgcctcggtctgcagtgccaagcacgtgggtgctgtgagtacagctgctgtggcaggagggcctctttccggggctggggtctgagtccttgggcagggctgggcagtgaggggacctcagcctaagggaagttctgccattaacaacctgtgacgctggacaagtcacacgactctttggaattcaactggaacagggattcatttcatttcttttctttttttc

SEQ ID NO: 146314 - DNA, 276 bp, Homo Sapiens
tttgatagtaaagtagcatttatgtttttggatcaattaagctaagccagcactaagaattttcttactattcctccactacattacagttacttcttcatccctatacataccgcaataatgagtcggctacatccatttagattatcaacccaacccaggaaaagctggtgcgacgttgctccgcacaatggagggccttaggatggcaatggttaggttcctgctctcctgctgcaccaccatttctcccaaggccttgctataggtctaaat

SEQ ID NO: 146315 - DNA, 666 bp, Homo Sapiens
  misc_feature (197)..(255): n is a, c, g, or t
acatataataaatcactcctttatttctatctccttagagattctaatggcttaggccattagaatccttcctatacattattccagagaaattctggcaactcaacaccattaaatgtaacctaccagtgagtccaaatttcagccaatcaactaagcaaatagtgccattcacagctgctctagctaatacattnnnnnnnnnnnnnnnnnnnnnnnnnnnnnnnnnnnnnnnnnnnnnnnnnnnnnnnnnnntgtttatgtttttatgattttataggataacaatttgggctgggctcagtggaggcaactcatttgtgctctacgtggtgtcagtgggatcattgatgcatttgcagtcagttggcagtttggctgccagatggctggtctcagatggcttcattcatatcttcctattggtgctggctgttggtaaaaccacgtatcttcagtaggttagtccaggcatcttcaacatagagtctggtaaatgatcgtatcccacctaggtttcaagaacgagatcattccaatctttaaaaatgtcctcggagtctcaggccgttgcctaggtcctcccggtaaaaccctggagactgctagggagaggagcaagggaggggccagcgcgcagaagtgcggacgcaacccggcggcccc

SEQ ID NO: 146316 - DNA, 841 bp, Homo Sapiens
gaagagagggaagggcattttacttcaggaagtaacatgaatttcagacccttaggagtgtggtacaggaagcatgctttgaggcaaacccaggcttagattggagaagtccaggagggctcagttgatgaagggctttattttgtaagttctgaacctccagattttggcagtgaatgcagaggtacagtcagttttctttaggttgagttgcagaagcagtgctttgctgagtgcaagccggtagccagttaccagtctttaggggacattcacctgtataataatatgcagtggtttattcttataccagctctcatagttttgtgtccttgagtatgattgcaacacataaattatttaaaactgtagctagcagctttattttcattaactgaaaaaatggggttctagaaatgcagtttgttatatcttagtaattacaaactctccatttccttaatcctcagattttcttagtggctctcagagcttatccctgagtagagtattttcattgtaatattaaatgtggggatagaggacttggagctgcctcttatggtttttgaatctggtgttctgaggagatgacagtcatcatcatcggacattggtaaagtccttggcagtttcctatgtgctctcgtgtactgcctcattgatcatattgatggaggtatatgctgcctaaagtttcagtgtgactccggtactgtttctccttgagcccagctatggcctcaacacagccttagaggcagccatcccagttcagctgggctggcaggtgaggtgaactctggtggccagtacagtcatgacaaagactctgcctggt

SEQ ID NO: 146317 - DNA, 872 bp, Homo Sapiens
tttgaggacttcagcttgttctatttattttcaaaattatctattgctttataataaactcccccaagacttagtggcttaaaaaaaccatcattttatacctgatgtattttgagtcagaaattcaagcagatattgaataggtgattcgtttgctccataaacctttaactagaaggtaatttggtggcattcagccggtggctgggttgtgttggggagtccaaaacagtgtaactcatttgtctggtgtcttcctgtggatgacaaggaggctgggcttaggtaggttccttttcacatactctctcctgcagagtagttaaactcacatggctgctcagggatccaaaagggagcatttcaggaagcccaatagaagcccttcagctttttatgaaatctcagaaattccaaaatgttatttgagtgtattccattgatgaagcaagtcactaaatccagtcttgactctgctgctccttatagatacttcatttgtgccagatcttcccgccaaggcgagctgtaaaagcatctgtttattcttaatattcttcttagcctgttacaggtaacagttcttcaaaggaagaaatatgttttcagtcaggactcacagttgtaagtaacagaagctaattctggctcagctaatcaattgagagctgttactttctctggaggtgtctcctacagggctgtacaaatcccttgacacaaattctccatgagcacagagatcttcgtatatctataataattgtactcaggaaactcaaggtatgaggagagagattcccttccttcggggcttgtaggagacttcccacggaatcttctttgggaatgtctcccttttaagccctgaa

SEQ ID NO: 146318 - DNA, 829 bp, Homo Sapiens
ctcatactgtctcgcgctcattgcagggctgagaagtggtcagattcagcagatgctctcacggagatggcacagtcatggtggccgccgtccgatggatctgaagcagctgcctgcggagtggagtgtctctgctctcccagtctgaagtgtctgctccctttcgcgcgcagcatctccagtcctgctcgcgcatggcttctcccgctcccgctccagtcgcagctgcttcaccttctgcagctccagccggttgtcctcctggatcgtcttgttccgctccttcagctccttctcctccaggtggctgatccccttcttctccagggccttattccagatgaaggtgcccagcaggttgttgtctccgaaggggttgtcggtgttggtgtagcccatgtactcctcaccccagcccatcttctcccgcttcttgcgctccttggcctccttcttggccagccgccgtgcgcgcttctcctcgggcgtctcgaaggccttcatcagctcctcctgctgcttccgctcctcccgcagccgcagccgctcctgcaggctctgctgctggctcagggcagccgcggccgcccgggggctctgggatcgccctggagacgcggagctggatgctgaggagctaggagaccacgagcgtgcgcgccgtcgccggcgagcccactggccccgtgactgctcctctcctgagtccgactgagaggacccatctcttgagtgccacttgggccgcggggggctccggcttcgcatccctgagcgctgccaccgccctcgtgccgaattcggcgcgccgtcgacttcatactctctc

SEQ ID NO: 146319 - DNA, 931 bp, Homo Sapiens
  misc_feature (62)..(71): n is a, c, g, or t
tttaacactgaagctgatataaatgtacttatctgagccatcacattttttccacatacttnnnnnnnnnnccccacaaaagcatagtgaaaagattatgtatttcaaataaaattatacatgttggaggcagaacagaaccaggggtcttcagcagaggatttctcagtcagccttcacaggcctcatgctgtggctggcagatactttccactgagcatagaaagtttcaggataacaagaaacttgttttttgcctccatgaactgggatgtcattattatagagaagatgaataatttaaaaagtgaagactattcattcaaaatgctagagtgacaaatttactttatgaaatttaaacacagcattcatcctcgggaagctgcatatacattatggtagtagaaccagattaggtacatttcagcgttgaaaagattttgtctaaaaatgaaaaggcagctttcttaaagaccagagttatagagtcactcttgtatttttcatcttgttttagtggaccaaagctcagcttgttttagtggaccaaagctcagtaactcactcagattagaatctataattctgttgagtgttcaggaccacagaagtcctcctgggactttctatggaagtatgtgcagattttcctcatggagctgggcgtgatggtgaccgggcttggcaatgtctttccgctctgtctcctggaattgggtgtctgggatgacggacttcgtggagatggattctcagccttccgtttggctgccatggccaacaaccagtttttattctctggggaactattctctttgcctaccatttcagacccttctccacaaggtctcaaaggaagaggtagcgttccacagctttctcggacgcgtgggtcgacgatatcccgggaattccggaccggtaccag

SEQ ID NO: 146320 - DNA, 337 bp, Homo Sapiens
ttttttttgttcgaatgccgtggttattttagtttaaaagcatttctttcaaagctgcttctctcttcacaacagtagagctctggcagtgaattaagcggtcgaggattcagcgaaactgtggctaatttctggttccaatcaatctcataaaatggcagagaatagtctcgtcggtaagtggtttctttataccatggctcggcaggctttgaatgtctgggagctctctttgcactatgatcaaaatggagtcttgccagctgcccagggtaatagccttgaacgtctcttccttggtgagcgatgaatatacttggcgggatcactgggcgac

SEQ ID NO: 146321 - DNA, 565 bp, Homo Sapiens
  misc_feature (34)..(35): n is a, c, g, or t
  misc_feature (62)..(63): n is a, c, g, or t
  misc_feature (93)..(95): n is a, c, g, or t
  misc_feature (144)..(145): n is a, c, g, or t
  misc_feature (207)..(207): n is a, c, g, or t
tttttgtaggagaatggggggaatcttctactanntgttgtccaacccctgctcttaaggtnntcctggcctccaaggtgaatccctttctgnnncttggcctctcaaaggtgttggagattaccaagatgtgagcccactgtnngccccacctaccttcttatatattttaatattaaacaaacctcccaacgtttagcacccaanctctctacacttgcgaaaagtatctcaaatgcaacttggaacaggcgtgccccagagctggtgtgggcttggctgcgggcacctgcactggggctgagggtgaaatatggcactaaagaggacagacggatgctggagcagagccgggggacaggtgggtggtgggcatcccctggcggatgcagctatgctggctccctttccttggttttgtaggactaaagggcccgggcactctggggagaaatcttaaccgagggtcttcctagggactaaaagtgtttggagttttgatgccgttcgctgccttggccgagcttcacatcggcaggaattctatcatggggctgtgaaagtt

SEQ ID NO: 146322 - DNA, 499 bp, Homo Sapiens
ttttttcaaaggcaagacgtgtgtttattcaatgtacattcactgagaaccttatggaagcattgtttctgccctcgggcttgcagtcaactggaggagacagctgtatgggggaagataaacctcagtgcagtgatgagggtgggtcagaggcacacttaagacgcagcaaggcagaaaggaaaagacacggcgaaacaagagtttggggtaggctgaattggcaggaatcagcctcatatgcctgcaggtgccagtgcgaataaatgagtccctgggccagtgtggggacactggtgagtgcctgtcccacccagaagggccctgctgctcagttcctgctgactggttctgtgcggaaatgccagcccagtgttgtcacagctactgattttttctaagaaatctgaaattttacgtaaaatgctgtttttaaactactgtaggaagcaaaacaggtatgcaggccaccagtctgcaacctgtggataagagaaat

SEQ ID NO: 146323 - DNA, 619 bp, Homo Sapiens
gatttaaagaatagtttcatatttatgtggacttttgccatttatgatgttcttcctgcattcccaaagttttgaattgcccccagtaatctcttctgtctgaagaacttggtttaacatttttttaaagcagattctttggttatgaatttcctcagcttgccttcatttgagaatgtctttattttatttcattcttttattccagtaaaatagaaatttttactggatatagaattcttgggtgacagttatttcaaaactaaaaatgttccacttctttctggcctctatagtttctggtgaagatccagtctttcaaagaattgttcacctgaatgaaatgtatcgtttttctctggctgatcttatttttcttggtctttagttttcagaagtttctttatgatgtgtctaagcttggacttttgttgttaatttatccagttgtgtggttcactgagcttcttggtttgtaagtttatatctttttccaaactatcatctaatttatggactccatgctttgtcatttccattctgtttaagaatattcaccaatactttctgaaggctggttataaatagctgctttgaagtctgtatctgatcattccaa

SEQ ID NO: 146324 - DNA, 728 bp, Homo Sapiens
  misc_feature (197)..(232): n is a, c, g, or t
tgaaagcacagaaggccattttctgactaaaagccaccaccgtcattcttggaaaatggcaaaaattaaatctgctttagggcttgctccactaggacggctttaaactgcttagtaaaggaatgtgctgaagagtggctggacgaagcttctgtctttcagagtgctgcctatttcaatacaccaaagattcagcnnnnnnnnnnnnnnnnnnnnnnnnnnnnnnnnnnnnatacattctatcttaccctaatcatgtatacatagtcccttgacacctctactattcattaaacaatgataaataaccataacatgcgcttacctgtaatgctttcaagataacacaactttggtaacacttgctttctaagggggaatcattaatcaatcacatgcctttggttgacaccatcagtcctccaaagggctacttatggctctctgtcctaggatactggtgtcctactacatgtgctgacatttgcaggaggtaaagctttcgctttcaggaagtcgaagagaagtgacacgtgtgaaaacatggtacataaaacatgactaactttcttgattacattccagtgcaatgatctggagttaacggggcagtttgtttcccaaaaggtagcattacttttgtaatatgcttttcaaggcattagaaatttcaggtttccctgaagaagtactttgtttgctgatacaaggtgagccaatggggtggt

SEQ ID NO: 146325 - DNA, 583 bp, Homo Sapiens
tttgcagattctgtggcttcttttatgaccgaattgcacttaattaggtgacaaattctgttgccattaagagttactgtgttttcgaatacatcaactttgcagtaaaggcagactcctgaaaggaacttctagaaattagactcccttcaagtccaacaaaacacacccacactcacacaatcacttagaaaatgtgcttagaacaatgtcagcgcgtcccagagggcaaataaaaccgtgaaatcggagagtggagatgaaccgtgttcccagcggaggaagaggcatcggtctctagacgtggcgagagcagtttttacattccatggcattgcggtgatttcgaatcatcaagtggttggattctgctcgaggcttgtgttcccgcggctcctgagagggggcacagatggaaaccagaaggggaggcgtcaccggacagggtctttcctaattctgccttcctcattttggttcttcaagcttcaattagatgtttcctaatatcttccttatggatccgcaccttgtagaagctttcgtatgttcggatacacaaataccactgtattgcaattgc

SEQ ID NO: 146326 - DNA, 838 bp, Homo Sapiens
ttttttgacgtctcttaaatatcgtttattcctgtcgtgcccaagccaaatcatgtcatcacctctgatttcctggggcaaacaaatagaggaagcaggaagcaaagggctggtgggttttccttagctttgggcccacttgggatagccaaacagtggaagcctccacccaaagttaacgggctttctaggctcatttgcacaagagcagactccaagaagtttcttctggaatttcaaatgtgatgtggtctgcaaatctgctccctgtcagctaagaagatgttgacctgtgcagatggctgtttccagaagtcgagctgtcagactctttccaagggcaggacccaggcctcccccatctgtctgtggagccctcataagcagcatcctgccttagagatgggttttacttagaattacagaacatttttcctctgggcattatctcagctcctaacttatgtttaacatttgagccaatgtccttctttgcctcatcttgggcattttgtggatttgttcatgcttccactcgacaaacatgcattcaattcctgccatgagtctgtctgctccgtgcgggagctgtaatggtgggcaacagaggcaacgtgcctgctgttaggtgttttgttctggtggcacacgcatgcatgtataaccagaggtgtgctagtgtaccagctctatgcccgagtaggggtgagggagccctaatttgtactatttgccaatttctatgatgtaaatggtgacccagccaatttcaagttacccacactcaccgaatgtggagttaatagagatgtgtatgttcatctctcagaagcctgtt

SEQ ID NO: 146327 - DNA, 450 bp, Homo Sapiens
gacgacgtcctccattttgtcggaacgactgtgggaacttggaccccctaaaaaccaaacccgtgggccggaaactttcctcggaagccccaactggactctggcattcggccaagggaacaaccccggctgctggcgtctgcgtccgcggggccacaggggacgggcacgacggtggagagacccagacgcagctccccgcctccatcaaccaagatggagggagctgcgtgctcccctggagctgggctcccaccggttggaggggctgaggcctgccctggggcgtccttgggcgccgccgtcctgtgctccgcagcccggggcgctggccctgcccaggcctctctaccgcctgtcaccgtctcctggtcctcaatggttgatggagactccatggaggctccctccacagcccgctgcatcgcggggcgcactcgctgcggccgc

SEQ ID NO: 146328 - DNA, 603 bp, Homo Sapiens
agggaaaggatctatctacctctttgctctactgcagccagaagtttcctagcatgcgtcattttgggattcttttttattttccctaccctctttcctaagcaaggaaaagaagtacttacctttattctcccagaattgtgtgtccccatagattgaagaatcaatagagtgagaactagtgaacagataaaaatagctcagtccttcacagcttcctttgtaataatagaaataggagacaaataggagaaaaaggaagtgctctttataaattgtatgaagtattaagtatggtacttgctacctgcacaacccaggcatgagattagcacttggtgttagtcacacccccttaggccactactcattgccaccatttcaaagcctgtgggttgagtagattcttatataaaggtgactttcctaacctaaagagattgggcccaaaagcacaagtttcttctgattcttcctagacactacatactggaaaagacaagggaatagagacgcttccttttcacatgtcatccctctttcccttatgtgtccagccttgaaggggaatgttatttctactcatcccctaccccaaccctt

SEQ ID NO: 146329 - DNA, 258 bp, Homo Sapiens
gctggggttgcatatatcactacccccgcctgtttataaataaggattctgctgcatttcatgagccctgggctctctcttcttctcctcgcagtggacaaaaatcaccgatattctttgggttaaaaaaagtttgtagtttaatgaataattatgcggttctgacatccagcccttctgtgcctcacacgcggggactgcagctcgcagactctccctgaagtcttcggaggaagcaggcgagcgccggcagactca

SEQ ID NO: 146330 - DNA, 480 bp, Homo Sapiens
gctacaaatattttacatttattataggaatacaataaagaggttctgcagacacatgagtggtaactggtctattggaaaagaaaagacaattaaaaaatgatctaagtttacaaaaatgatgaatcatgctttaaaaatgtagaaacaattaaaaaatatcctacaatgttagccaaagttcaaagtgtatttcttttgaatgtaaaaactaacaaataagtaagtgttaaatacagatctgagtaaaattgataaaagatagacaaccaactgctttatatatttagctttcatccatttttcagacttgtttataaagccagataaacccgccaaagccttgtttgtgttttacactgaactttccagaagaagcaccctatttccagtgtttatccacttcacaaatacattatcttaaaacaacaaaaatgattaaaggtgctttagcctaacattaaatggaccataaatcgg

SEQ ID NO: 146331 - DNA, 416 bp, Homo Sapiens
ataaacatacttacttcaactttacattactcctaggatgcacgagaaattagtatgattaacagccaagaagcctgagagaattctgaaaactagaagcaaagatgaaaaggaagcacaacaggtacagaagagaatgaagacattctctgcttcaaaacttgtcacgttttgcctacttgtgagtgccactaaaggcctatgaaacccttccactgtgtgacactaatgtctgtatgggggccttctatccaaagttcaacaactgacagtgattgctctggaccaggatctacatcaccccacctcatgcatgccaaaagtattctcacagactcacacaactcagaatgaaggtagagtggtggactgggaagaacatcaaattcatagtcttacaatgatttattagaagt

SEQ ID NO: 146332 - DNA, 473 bp, Homo Sapiens
tggtttacccctttgcattttgctgcggcctccacttcagggtgctttgtgtcctgaattgttattaaacaacggggcagatgttaacattcagagtaaagatggcaaaagtcccactgcacatgacagctttccatggaaggttcacacggtcacagaccctcattcagaatggaggtgaaattgactgtgtggataaggacggcaacactcctctccatgtggctgcaagatacggtcatgagcttttgattaacaccttaataaccagcggagctgacacagccaagtaggttaccgcaaaaatacggtggaataattgcctcaagtgggaatactgccaaaaagattcttccgtgcagtagatagttcccatttatccaggttaaggtggatctataccattatactaaatacaaattaaattttaaataaattaagtgccttttaatgacagaggcaaagatgaacca

SEQ ID NO: 146333 - DNA, 966 bp, Homo Sapiens
ttactgatttatccattttagtgagaaggatttttatggtaaatgaggttttcaagtattccaagactgatttgatagtgtattctcaaaaagaagccctacacatcatatcactcccagttaaacagtgctttgatgcttcatgatgtccacatttagggtcagcattcattgttcagctaagaacactgggtcctcggaatatggcaagcggttgaaataatggcctcagtttctatggcatgggtgcaaatcggtctgttagagctcacagtaaagagctttgtgaaacactgtgccaatcagcagtttccctttgtacacagaggcaactgtactgccttgcaacactgtgccattttctgcataaacctgtgttactttagggttcttctgttagaatgttctggattcgaagcacctctgatgcaggaggattctctgagtcatagaagaagattttcatgccattgggatggcatccaacccaaaggtctcctgtctcaggatccacagatatgttatccacgagggtattaaagtcaagggacttcaatggagttaaagtccaattagcatgcttttcatacacatgaatcttatgagccagcaactcagctatatagacatacttgccatcgggtgaaatgttgattccattagcaaaatcaaatccttctgccaccactcgaacttcacttggactatagtagacaacatacgaccacgctaaacccaaatacatctcccaggatcgttagtaggggtcaagaaaatagtgatcatttgtgccataaaagtgctcaggtcccacagcaacaatatcattcaaattaggcagaagtttatgtctgatggtttttagatgcaaaagcgatttttcttcttcttgaaatttaaacaactccactgtggacttggcatctggatggttcaccaccaggaggtacatggcattatcttcat

SEQ ID NO: 146334 - DNA, 384 bp, Homo Sapiens
ttgagaatgaaatatcatgtttatttggtggggaggggacagtggcgggaggagctggctcaccaccctgtggacaaatcaggccttataatttgtgattctgtggctttgtctaaaagtccctaaagcaccttgatatccagtctcacagactgctcacaacagtccacaaggctggtggggagtgcttcttttgaatgatatactaacgacaaaaataatagaagtgaacattctttgcaatgtccaagcagctagacacacttaagaccattaagaaagccaagaaataagacccagacaaggtgggcagaagttggaaggcaggagacaggtgtgaggaggtgggcctttctgatctgccagcccatctctcctcccctt

SEQ ID NO: 146335 - DNA, 220 bp, Homo Sapiens
ggctggtagagaacaggggctggtgccaaggcccgtggagatgggaaaaaggaagacagggctcatggaaagaattgtggggtcaggggacagtggcgggaggagctggctcaccaccctgtggacaaatcaggccttataatttgtgattctgtggctttgtctaaaagtccctaaagcaccttgatatccagtcatcacagactgctcacaacagtca

SEQ ID NO: 146336 - DNA, 428 bp, Homo Sapiens
  misc_feature (331)..(341): n is a, c, g, or t
tttacccggggagggtctgtattctcgcagagcccaggcggaatcgtcccttccttgatccatttcctccttggactaatagacgttttggaaagttcggctagtgttcgtgtgtttgtcgtagcacccagagcctccaccaaaccctctccatgtctttacctcccagtcgctctaagaatctgcttgaagtctcgtatttgtactgctttctgcttttctcccacccctcctagcacccccacatcccccatctagtaacatctcagaaatttcatccagaggaacaaaaaaattaaaaatagaacatagcaaagcaaagacagaatgnnnnnnnnnnnaaatattgtcctgtccctgtctgggagttgtgttatttaaagatattctgtatgttgtatcttttgcatgtagcttccttaatggag

SEQ ID NO: 146337 - DNA, 1336 bp, Homo Sapiens
  misc_feature (371)..(394): n is a, c, g, or t
tgtaaaagttccttgagctaagctaaaaccatggaagaaacatgctactttagtgtttagcagtgtaccaagactagcaagagtttgcttcaggattttgttgaataattaagataatattttgagtgtgtcagggccattcaaattgttggtgttgcatcacagctaccttaactgtttttaacatggatcctctgtgcctgtgaatttacttgcatgcttgtacttgacttcttaggatgggtagctgaaaagaccaccattttaagcatttgagaattcttaaatatgaaatttattcagaattgaagaatggtgacctattcagagcctttttgtccttgtcaacagactgggacagtgtctgattnnnnnnnnnnnnnnnnnnnnnnnngccttgccacacacagctaatattctaatggtaaatttctctgtatcaggtggggaaatgtgctgaaggacagtatgtatcccttgcttcatttttaggtcgtaggtttggaatgtcttgtcccagttcttcaaacactcttaaatttttcttaagtaatgtaaaaatggaactgccaattttatttctcttgcaaaaatagtaaatacttgatgttacattattcccaggtttaatgaaagaacccaacttagtttttcagtgaatttgacacctattttttagtgatgaaatttttctttgagaactggcaaggatgcagtcagctgtttgcagtttttagcctgattttggggtctatagagattgctttattggatacttcaagtcattcttgcttgcacttcccctattgacacatgaaagctgtgttggtgttttattgtacatacttcagatgcacataggaatagaagtgtgttataaatctagctttctttatgatgtttctgataatacgagaattgaaaactttaccttctcttgtacatagtcagactatttgtattaaatttacatttcattctaagttcaaaagtttgaaaattattagttttgcaagatcacacactaatgtaaccattttatgaaggttgaagtggatttatgcaggcagttctatatatagaaatacaattctttttaaatttttaggaccaatacaaaataacaaaaatgtaatggaatcagactgaattaaagtaaggctgtatattgaaagtcatattataaaaggtttgctttctttaagtgttatttatcttaaattataatcgttaaatgtttggaagataatttttgaatcataacgtcagcataacttcatttgacttctcaataatcttgatactagaagcaataaaagaaccattattaaatata

SEQ ID NO: 146338 - DNA, 413 bp, Homo Sapiens
taaatctctgcaatttttaatttctgagatgtcaaataactttttccaccgggctacagctttatgaattctcgaatttagacaattctaaaactaaaatttagacattctaaaactaaaatacattttaaagtaaaaatcacatttcctagttgtctgtgtcagacaactttactagtatactatagtattattaactaccttaatttttgttgacattaaattttacttgaagatgataaaaaagtagcagcaatgacagggatagctaatactagaaatacaataaagctctgcggtaatgcacctgagacaaatgtaaattttggtgaaatgtgactgacgactgctttctgtcttctggccactcttatattcttaaacagatacactaaaattatcttgtggaggaa

SEQ ID NO: 146339 - DNA, 638 bp, Homo Sapiens
  misc_feature (509)..(547): n is a, c, g, or t
tttgtaagcaccatatgtttattgctgttattgtaaggaggtctggacttacatttaaaatcaggttgtaatcataacactttgcaaatagaaatgacctcaggtacaactgaagacatagtctgcctttagcatctaaagatattgaaagactgagaggttgcatgtatttttcagagatctaagagctagctaatggtcaaattggattgggacacctgtgtgctcctcttcagctcagcgcttctctgtttcactcttcttcttcattattaaatagcagaatgtgtttctcatcagtatgttgaatacataacttgaacagcgctttagggggcaaatgtgagaatagaatgacctaaaatgtttcacatgttgagaccacactggcacgttttcttcaagcagcgttgacatacatacactcaaataaattaatgttctcatctccactgactcactaggcagaaaaagtttgcctgccaatttaaaaagagacaggaggagannnnnnnnnnnnnnnnnnnnnnnnnnnnnnnnnnnnnnnggtggtccggggagaaatgcatttttaaatgtgccaaattaataattggtttagacaaacaaagcaaacatttctaaacactggcaaatat

SEQ ID NO: 146340 - DNA, 167 bp, Homo Sapiens
ggtcattctagccttttcataaaacaatgtctcttttaaccactacacttatcttattcccttctattgatggatttagtcagcatctttttagacttgaatacaaacgtacccactcctaaaaatgaatgaaaaaaataactgtttctggtataagtgtatatatt

SEQ ID NO: 146341 - DNA, 434 bp, Homo Sapiens
tttttttaatatataaattaactgctttattgaatatcaataaactgtacatataactatacaaaacgtttccctgatacaaaatgtttgaaatataaataccagtgtacctttaaaaatgtaaacatcttcctcccaggcccacctgtcgggcccccagaatagttctgggagacacatcggtcagaccagagcaccccacttgggcccccgacaagtgacagccattactcacagtcccttttcagacattgttaaattgcccgggaaacaggtgccaccccaccaaacaggaggctgaaatagctgcctgggctcggggcatctcagactctagtctgccaccgcctccgcaggccctggggctgcacctgggggtggattattgcatagttagtcacacctcgtggagggtggcctgagggttccttgtg

SEQ ID NO: 146342 - DNA, 444 bp, Homo Sapiens
  misc_feature (308)..(329): n is a, c, g, or t
tttacaaagaatatcctgcttcattttttatttgtaccctcatcccatcctgaggaatttatagccccattttatggatggggaaacaggctctaagacattaagtaacttgccttgaagttcattcttgtgtttatggagaggacaatcaagactggaaaagtctgagaaggaggaagcagggtaagccagaaggggaaataccattggcaaaggtagaaatgttcaagcttatgcacaggcttgtgttggggaactaaggaaggggcatgaaagagggcagtgagtttgatttgatgaaatggctnnnnnnnnnnnnnnnnnnnnnnttcctagtgggaaataaaagggaaaagtcagctagtagtttgaaaaagaccacagaagaaaatcctgaaagagatgatggactgagtaaggacgtctgaggtgggaagaccagtc

SEQ ID NO: 146343 - DNA, 398 bp, Homo Sapiens
ttttctaaatttcattttataggaatagtatctattgaaagggcagggtgcatgaataactcagtgacaggcgtaaactcagccaggattagaaacgtcttcccaatggaggccccgctcaagttgagaatttcatggacacagtaaatcatccaaaagcccaccttcaataaccaaagtaggcataaaaataggccgatggttactttggagataatataatcctcggtcttattgttgtggagcagatgtcattatgggtggggctgaagcgcagagcagctgaaacatttttaaaccaccacccgcacactttcaatgggatagaagggactccaaaaggtaagagctcccaatcgtcagttgctactagaaataactaagttttgatgtggccg

SEQ ID NO: 146344 - DNA, 234 bp, Homo Sapiens
ttttgatggtaaatgtgggggattttattgctgttggacgtggctctcagagggaagaggagctgaaaagcagacagagaaggaaggtaatcttccctcaaagtccagctgtctcctgggattcttcttgagatttacaccatcgagctgtccctctgaagtaaggcacttctctctgatgtccagctgcttctcctgcctttgctggctgagcctgcagttttcacgggcaca

SEQ ID NO: 146345 - DNA, 464 bp, Homo Sapiens
ttttctcatttatattaattttattactgaggctgaaaagattaaaaagaaatataagtaatatacttcaaggcactagaaaaactaaataagtaaagcctgataaaaagaaaaacatagctaaagagttgggcctattaaaaatatactcgctccatttctttataatgaagtggaactcctctttgtacaagggcaacagaactcactgatagtgacttctgcccatcgtgatgtgtgcggctgagtgctgagtaagacaacatgcttgtacttgtctatgctccttctcagaagtcagtgagatgatatcaaatgccctagaagcagttcctgagggttttgaggcagaaagattggaagacatgtaggatgtggactcctggtctctgcccctgtgggctaaaatgacatcattagaattggataagtctcaatattctggtacgtggtgataaatgggg

SEQ ID NO: 146346 - DNA, 421 bp, Homo Sapiens
tttcaccttttcccaatgtttttaacaagttttgtatgttaaagcataagagtttctttcaggtgatggggaaggctagtagctgttgggtgggatccactgaaggcaaagactttgctgtgatgatggagccctgcatcaggtttcctgtagcccaggattcagtaccaggccatggtatcatcaaatttttgttctaacaaggactggatgtggtctgcctcatatcccacggacaccatgagctctgtgtttcaggagtcctggtaatcagagagcagctcccggtatggccttcgtgtctcctcctgaccagtgttgatccataggtgttccatgacgtggactagtataggcctctccctgcagtcagaaataggtttatgaagctctctggtctgtagctgggtgctggataatg

SEQ ID NO: 146347 - DNA, 790 bp, Homo Sapiens
  misc_feature (438)..(460): n is a, c, g, or t
taaatctgatactgcttataattctttggctgggaggcggtgctgggatttagttttaaatggaaaatgcctctggcttttaattttctgggcccagcagttttctgttctggaatggagcccttgtttcacacagttcatgtttagctgcaggggttttagtttatagcttagactggttaagcttttactcccagaggcctctgcatagcaactgtagaaatcaacaaataagttcatttatgtctgcagcctcctctcagtagctgactttttacatttcccaatatccatttcctgacttttctagccccagagaaaaaagctccactaattggagcttattttaattgagccttaatattggatctcactggagttgcccccagagctgctgagaacagaatgagatgaaagtacctaaggttgaaggtgcannnnnnnnnnnnnnnnnnnnnnnaaatttttcacttgacctacagattcttttccctcctgaataaatcatcaagcctgttcacatttctgattaaggatctgacagcagatgataataaagacaattgaggtgtgagacgtgtgatatggagctgaagaaattggtttctatagttacttcactgatttcatgcaatttttaaggatctttgtgctaaataagagtgattttctgagcaaccttttcccttaactgtgcctcttgaactatgaaatttgttgttgcttaacattgctgcagttggctcctaggtgccagcagcagcaggttatttatgaacgttttaaaggc

SEQ ID NO: 146348 - DNA, 1186 bp, Homo Sapiens
tttaattgtgttgccatctttattcagaaagtcattattttcagcaaaatggagctgaggcagaaaatccaggttgcaggactgggaaaaaaggagtgtctgccccatgggacacttataaattgttcactatgacagcagccctttctagaggtattaatgtcattaggttgtgataattctccagaaaccccaacagccctggattaagaacatctggaaattgttcagatgacacaaatttctctgtttcctgctgttaaggcttccgtgatgcctctctgtggcatctaccacctccatttttttcttttcaaacctcctcctttcaaatcaggaagtatacataaagtgcaagtaaggttcattccctcgctgtgctcctaggctcttctcttgatagtattaccgaatctatcaggtaaaccgctggccgagtaggatgtctgcaggaatttctggagttagcaaataacttcatctggcaaagagagtatctgaagatcaacacagtcttggcaagaaaacatgaagtaccacacacaagacagggatgtgaaggatgcaagaagtagcagggagattgttgtcactgaagaggccatctttggatctcaaagaatttaagagaattcaggaaccgttactaaaatgaacaaggccagcagatttcagagcacggtcagtcttcagtgagggcagattcagttttcctagttaaattcctgaatttctttttggcttctgccctttcttcagcatcaaagtaccagacagtcatagcatatctggttgcgtaagagggctgcacttcgtgtgggttcctacgatctgaccagaagaacaggagtctgtcaaaaatgggctccacatctgctatgaatgatttcccctctggaaatatccgcaggatcccaccatgtagcttggcatcccaattcttgttcagatagtagatgcaggtgatgcagcgaccatcaccgttggggttgtccacgtggcgaacataacctgttccatttcccggatagcaagccaccattgcctatggagaaatcccaagaaagctggttaacaaagctgagacagacaatcttctcctcccactggtgagcagataagtaacacagtctccttgggtgttacgtgacatttacaggtagttgcatcccgagaattccggacc

SEQ ID NO: 146349 - DNA, 561 bp, Homo Sapiens
  misc_feature (52)..(52): n is a, c, g, or t
agtacttcggcatatgttccaagtacaagaatatttcatataactagagtanaattaccaaactcagggaatgttgatactctttatcatccatattcgttttgttgtcccagtatccttggtagcttgttttagatcccccccctctagagtacaggatcattgaatttagttgttctcagttgtctttaatgtggaacagttccttagcctttatgtgttccatgacctctatgttttttggagtacagggcaatttttcttgtaaattgttactcattttgcatttgaattgtttattcatgcttaacgcccttctcaagtatactctccatctgctcttcattgatgttacttttgagcgcctggtcaaggtgtcctggttttgccctatgtgtggtacttactactagcaatctctgggaagcaatgtgcaaataccctgttcctttatcaggagctcccttggcgattctttccagactaaaacccaaaccagtctttaactatgatggttacaaaatagtgattttccaaatctaatgctttgtccatttacag

SEQ ID NO: 146350 - DNA, 590 bp, Homo Sapiens
gcttagaagcaagtcacgggtcctaactcacactcaagaggagggagccacacaaagcaatgaccatcaggggaagagattaggggtgccaccttagagtttgccacacggtcttcctaagaaaaccaagatctagaatttctagtagaattttcttttgttcgtctaagaatcaattgattcttaattctaagcttgaagtgtaactgcatttttatgggcaaaacaatcctggacctggccagtaacccaaccaaaccaggggcagaggagatgctggtcagccagaggatacaggggaagaacagaaaaggcataacaagagggaagaagaggtgactggagaaagagagacatattcacgccacagaaagaaaacaataaaaagtcatctgatttcctcatactgagtagctccccatgtgattcgggtgttgtgggtactcatgtcctggtgactgtacctcccagctcaagctgccaatcacggtattttccctaaaatgttcccttcccaaaatggaaacctcatgttcgttgtcaagataataaaagttgcacattagcggcacatttacaatcttgctaaa

SEQ ID NO: 146351 - DNA, 934 bp, Homo Sapiens
  misc_feature (85)..(130): n is a, c, g, or t
  misc_feature (850)..(884): n is a, c, g, or t
tcttctgctccttcattttatcccagctgagcttttttcaattcattaaacatgtgtttgcagtttctgagctcccaaacttccnnnnnnnnnnnnnnnnnnnnnnnnnnnnnnnnnnnnnnnnnnnnnntgatagaggatacctcctaaagtagcctttgttggtacattaagaccttccacacttggtccttgctcttgtccaccttcattattttccaaagtggtttccacaggccttgatgttaaagaagatggttctgctattgctgatgcccacgctgtgtcactcacctcaggagaaacgtgagaggcaaaaaaatcttcctcctttggtggaggggacaaaggtggaaccacacaactatcaagccacagatcagtgccatgcttccgtgttgcttgagaggcgagcgatttgattttctccctatagagctgagcagcacgactgttgtacttggcattggtgtcattggtggaacacccatgttgatgaaaaaaggaagatgcactagcgtttcctccgacttgcatgcatcgcaactgaaaccatgaccagttggaatccaactctgtagatcgaataaaactcaagtgaacaccaagtgaccggtgggaccctgagcaatcaatgcaaaggaacactccataggttatgcttgcccagctgggatttttggcaccacaatcaaaacacaccttgttagtgggcaccgagcggaggcgcttgaagatggtcaagatgtcctgcttgctggggtcccccatcgtcagctgtgagccgcggcgcagctgccccggccgtaatggccgaattcccgggcatatgtccggtaccgtcgactgnnnnnnnnnnnnnnnnnnnnnnnnnnnnnnnnnnncggccgcttcctcgctcacatgactcgctgcgctcgtcgttcgggacctt

SEQ ID NO: 146352 - DNA, 478 bp, Homo Sapiens
  misc_feature (420)..(420): n is a, c, g, or t
gcttcttcttgcgggctttggagggagacggcttcttcacggtggctgctcccgccttctcttcctcagcaccagagtccatgggggggtcggcgggggcggcaaccttgccctctcgcccttagtgggcgtggcgcggttgctctttctctctcgctgcttgggcgcggggcgtgcctcctgttcctccctgagttttgggtttttcagactagaaagatagttttcaagtatggtgcggtcgatagtgtgcaggtagtaggagactggcttccccgtccacgacaccgagcccttcaggggcgagagctccaccacgcgcatgatggtgccgatgtcactcaagtttctactgtttattctgaagctcagaggtgcaaagggtttcgaggacacgattctgccaccttccttcatgtntgcaaaccgcttcttcagctggtgatccacctcaggaccaaaggcaaaaatattcaca

SEQ ID NO: 146353 - DNA, 310 bp, Homo Sapiens
ccaaatacttaacagtttttaattatgaaatagcttcaggctgaagttattagtgggcagtttcaatcttagaaggtggtaaaatattacatagctcatgggaaagggttgattggagggccacagtgaaatggccatttccagtcattaagcaaggatgtggaagagaattcttagttatatgacattgcaggagagtcagtgaccaaattcataaggaatatgactcctccctacatgcaggttcttggactcttggacagtatgaatccgtttgtccattgaacaaaaatgtattgggcctcactat

SEQ ID NO: 146354 - DNA, 529 bp, Homo Sapiens
gaaattctcacagaaacatacagtgctttatatctctagtcttccagaaatttaggggggaaaaaaagcaacaagagaagagttagttaaagtctatctgtctgctaccaatcacagttgggatctgatggaaggcagttatcatgtgatgggtaaatacttaaatgaataccaacagttcaagtaaacaccaagtttaaaaatacatgagtttccaaagcaattcaaaaacgattcaagctaagcattcactttctccaattaacatttgcccttacacagttcatcacatcccaccgaagaatctgaattttccacgagtctcacaagaatgaactgaacactaagtgggcaaagcctaatcatgtacattacataagctgttggaactgcagaaggtacagatatgactgattcctttgtccagattcttgactaaactgaaaagttctgattactataattacaacggatcctctcaaatgccctatagttaccaactcatatttggaaaggacactttgaggag

SEQ ID NO: 146355 - DNA, 500 bp, Homo Sapiens
  misc_feature (17)..(17): n is a, c, g, or t
cagcctttattgcttcnccactttcaaagaccttgagagcttttgaaactatggggaaactgaggctgggaacatctgatacacccagtcagcttagtcacttagtaaataactgctgaacaacttacgtggcacaaggacgaaaacagaggtctgtttgatcgaaattttcacttccaagctgtgtacactgtgggtacttaataaatcctcctagacttaattgattttgacttaattcaccacttctgctgaatctcctcaaacctcatcacgtagacgtctcataattctcagaacatacctggaccattgccaacatacatccctggtgtcactttttactgtaactgttgtttcatgtggctttccccttttactagattaggagcattcaaggagaaaatagatctggaaaaaatatagataacaatttacgtttcttcctgagcaactcctgctctaacaactgtcagaaggagttgagatataggaacagg

SEQ ID NO: 146356 - DNA, 874 bp, Homo Sapiens
  misc_feature (35)..(35): n is a, c, g, or t
tatcaattccaccgaccctgcaagtgatttttgtngtcattattactccagggatacctaaagggggaagtttgtttataattcgtacccacttccttgtagaaaaggattcaagacagccgatgatgaaaacacccatgctttgcaagtgaaggttctgcctgtcacttctcgcagaggctgcagaaaaggcccaggaggctgttgatgacatgaacgaccaccaggagaagctggagcaggctgatgcacagaagggcggagaagagggacacgtgccagacaacagctgcagagggctccaggcagacggagttccagagcgaacggtcatacagataattcctactatgcaggtctttgaatgggtaaccatatttccaagcttgtgtctgattgaaggatgaaacatcaaacatgcaaaaaggaccatctttcagagcaactccagaagtgacaaagcaaatcagggctccaagtaaagccaggccacctgacaacagagcagtaagcaccatgaggcctcctccccagagcccagttcccagcatggcatgcctgccaaggaggcccctcaacaggtaggtgacatcccagttaggaaggaggagtgccacgttggccccagcagcaaacagggctgcagtcccaaggctcagtcccaggatacgggagcaagtccgtgagcttgccggcgtgcagggagaggacaccatcctgcatctggtgtcaagaatcagaatgggagagacagaacctggagaaaggctgcgtcttcagagtggggctccactcctccagctccagggctggacctgaaggttgtctttccaggactctttccaggagggccagggaggctctgtatatacgt

SEQ ID NO: 146357 - DNA, 476 bp, Homo Sapiens
ttttacttttatgaacacttttatttgccagatatcattctaggtcctttacaaaattaacttttttaatttgtaatataaccctgagatgtatattaggattatccccattctacagataagaacactgagaagttaattaacttgccacatatctaggaagtgacaaggctagttgcacagccaggcagtctggctcctgagtccacattttagacatcactatacctcctggttcttttgaggcattactgctggaactatcctaatactcataaataaacatttcttttggggagggccaaataaaattttaaacagaaaagttttcaccaactgtcaagctcataaagttgtacgttatacacttttttcatgatgcccacagataatttattaatgatatcatctattttaaaagacgtatgtaaaacccaacccttaagaaaggattcctatcactgttcccacaggca

SEQ ID NO: 146358 - DNA, 513 bp, Homo Sapiens
caaggcggtagtgattttcacttttaatatattacatataatactacaaaaagactgaagttttaaggaaaatccattattattaaaagtttagtactcttgagtctggactttctgacaataaaatacaccagagcaaaagcccaagaaagtacaacaaagaggtatactaactggcaaaatagctgctgcaacatgccacaggcacttcaggcctaacatttctgaaaaagcatggaacgtgtggattcccaggaaaaaactgcctcagatcatttgtaacaggaagaaatagtaagtgacctctctaacaacactcactagtagatattacatatttcccgtggcttgtttgtttgcatgttattgagaacagggcaaggaaaggcactgttttctccaggtagttgtttttgagcaagtgagggcaagctatacccctgcatcagtacttcgtggctgaaaaccctccctccgaaggctacccatgtcaaagctggtggagaccataca

SEQ ID NO: 146359 - DNA, 473 bp, Homo Sapiens
ctttgctttcacatttaatccaaggaaaaagaaagaaaaccaatcagtgagaaaactcaagaattggatggctgagggagggaacagaggaagcgcactggggctgggactgaatatggacagtggatggtagggtcctcactctcttgaggtccctcaaatacaagagtccacaatggcagggagggagaacagagtcatagagctgtggtgggggcacacacctgttccaacccagccccagccctgttccaggtgagccaaggactgacagcctctgctaggtacctgggagggctgtggagtgagggctcaggcaggggaggtaggaggctgctcagagaggaaagaccgagaagagacaggagggaagggccccaggcctgccccttgagcatccctagcagtgaaggtgccatgaaggccaggtacccaacccatctccatcagagatgatggtcatttggatcaag

SEQ ID NO: 146360 - DNA, 513 bp, Homo Sapiens
  misc_feature (408)..(408): n is a, c, g, or t
ttttctatatgctagatattttatgccattaaaggtgctatgatgttctgaatcttctgccggggctcttgtaggaaatgttcatcaaaggctttggtggcccccacagcttcctggagggcccctaatgtttctgcacaggaaagcggtgactctgcaaggctgtgtcttggctgctggcacagagatacagggccgagtcttctggctgcagggtgtgtaggtgaaggaataagtgagagctgttggggcattcaggtgagaatcgacttggcacactgttgttttcattctgttctttaaagttgtagacaatacatgagctccagtggcttcttagcactttgcttgtaccaatacatatcgttaatgccccagatgttgttcacatttcaaagacttcgtatntgtcattcccatgaccaggtgtcttgttgtctgcgtaactcccgtttccatgtggaccgctctcaggagacagagaaccgcacagcagagcaactagcaccccat

SEQ ID NO: 146361 - DNA, 413 bp, Homo Sapiens
tttaaatcaaggactgacaaacttgaagatttttactgaaagatgccaaaacattttgagacactgggaagaatgtctacagcagatagaaatgtggtgtcatctacttccatcctgacttacaaaggggtggcttagagcccctggagtactaaggggctggaaattgctgaactacatagatgtgtggcacaggacaggtgtctcctcacctctgcctcttttcacagttcactgatgtccttcccatgtccatgtgggctgggtcaggggcatgattagctggcaaatcagtcatggagttcagttgggtagttggtagtgtgtatagctggtggcaggtgatggagactccagttagcttgtttttcaggagcagggatatagagagctcctactcctggtcatttgag

SEQ ID NO: 146362 - DNA, 468 bp, Homo Sapiens
ttttttaaataggaaatggctgtatttgctttacaatgttttcagctggaaagctgagggctggaatcatctgaagccttgttcacttgccagcagttgatgctgactattagctaagaccttagctaaggctgtcagctggaacacccccaaaaggcctcctcatgtgctctgggattccttccaacatggtggccaggttccaaaagtgagtgttctggcaagtccacagaacactcactggatgcagaacaccccaggaaatgaatgagcttgggtaatggagctctctgaagctgaggccatttttacaagaactggaagctgagggctgtctgcagcaacactttcacagctggagactccatcctgtcatcctaaaagaagttctgtgtgacacatcatagcatccaccacacaatacttaggcatgttgatggcattcaaatggattaaccaatagatttg

SEQ ID NO: 146363 - DNA, 619 bp, Homo Sapiens
taccctctgctgttgcccttctcctctcgcaggctgtgaggctgaggcagacacactgggtaggtcccacgtctccttgtggcatttagatccagtcttactgaagggcatgctgaagaggagatggccctgactcctggggtatggagggacactgctgccagcccaggctgcgtggcacatcctgccagctgcaggtgcctcccaggcatggggtaaagcttagcagtgttctgtctattctgatacaaaggaatggtctgcacattttgttagttttgtttctgttgattttctaatcgaaggaaggaaatgagcccgtaatgatctactccttaaagcttgaacacagataaaacgacatccgatcccatcttaatgtggctttgaaataccctttcctaatacttcctgagccctcttcagatgcctttacatcatcagagcctttagttgccatttttgcttgtggttgcattatggcttttcaagcagctgctgtggtttttgaattgtttcagtatttttgttataaattaatatctgcattttgaaatgcagatccactcacccccaaactaatttttgatttttgcttatcatattgatagtaatgaaa

SEQ ID NO: 146364 - DNA, 378 bp, Homo Sapiens
gttggcgtctagtaactttctgaatggagagaagaccatagggaaacttaagggttttgctttttgggggccctctcagacctggcggagttgatcgaaaagggtcgtttaaagtcagacctcattcttgagcttaacgtcttatgtggacagtgttgttttggattgtgtgttgctcctgttgtgacatttcttttggagagacatttaagatactgaggaaagtagggaagagcactgtcaggatgtccagggcgatattagtatcaggcttgtgttaattttttgagttactcagattaagagattacctaaatcagtttcaggagttctgtttgtaaactagcttcaaactatagtgtcactgaaattaggaaa

SEQ ID NO: 146365 - DNA, 1111 bp, Homo Sapiens
ctcatttttaaaaagctaaaaataaacaggtaagctaattttaataatatattttatttaattcaaataaaatccaagttatatatccaaaatatcttgtagacatgtaataaacattttaaagattattaataaatattttacattctcttttttcatactaagccttctaaatccagtttactcttgtagcacatctcaagtcagactaaccacatttcaagttccagcaaccagttcctagtggtcatggtggacagcacagtccttacagcttttttgtataacgtaatgtcttaagtattttatcagtgccctttaaaactttttagcatcatttttaatggctacgtagtatttcatcatttagatttactataacaatatattgaggtagttgtgtttttctcaacacattgccaaaaaacatcacctaaatgtttccttttgcacacaactaattaaattcatttatacataaaacaagtatattcacctgaatatctgtgtgctctgtactaagttatattggaaagcggaagagggggtttccagaaataaagactagatccctcccatatgctgtttacaagacttggctccacagttggactgcacacaaataccgtattttattctgccttaaatgcccttcccttcatttcttgctctacctcacccccaacacacacgtacactgcctggttagcttccacttatccttcaaggtgccaatcaaatacaacctcctctgatgagtcttcccactgattacttgattcccttcttcactgtaatatacaaagtgtgtattgtattcagagcaccatggtgttctggttattggttaactctctgtcttctctactagagtgggaactccttaatgataggaatcttattttatacatctctttatttccagagcctcaaaaactgtcaggcaatgaaatgtggatttcggtaatgtctgaaagatgtgttgaaaatgcaagtgatcacattaagcatcagttggatggtaacataagtactaccttcagagttcaaagagatcacttagattggcatggttaaagaagacagaatgaaggagttaaagaaatgagtt

SEQ ID NO: 146366 - DNA, 387 bp, Homo Sapiens
tttactgattaatgtttcatttattgttgctcaaagttagataacagtaggttcaaatagccactggattcttaaaaatctttagtaaaacaaaatacatgggaataatattagtgattaatccatacaataagcagattcattaagttagcattactttgctttcatagaatatttttcttcttgttaagaaaatataaaaatgaaattttacattggttcttgtcaaaatccaattaatagccaaataattatttctaagtgcaacttatttctaagtgcaatcagcccttaacttaagggcttattgaaacaaagccactgtaaaagagcttttcaagaagttacaatataatgggaaaataaatcggcccatacattttgttg

SEQ ID NO: 146367 - DNA, 409 bp, Homo Sapiens
ttttagtttagttccggtttttaatcttaaataagacacttccccttgatgtatgatctcagagaacctcactcacatgagacaatgctagggcactatttggaattttccagagtggataaaagatgtactccctgaagaattgacacaggccgattccaactggctgaggcagaagccaccgtcttgacatttcgaacggctccgagggtgcccgaatgcagcactccccaaatcaggaagggcaggaatgaaaatcagcacataaatttgggctatcctgtaaataaaatgtgtgactgattccacctggcaaggtcttggctcccatgtagctgaatgagaagctccggtggccctccgtgttcttagggtgtgtacccatctcacggggacacaggggacattt

SEQ ID NO: 146368 - DNA, 565 bp, Homo Sapiens
ttttcaggggagaacaaacaagctttatttctcggaagaagactcatcctttcatacgcagcataactccaaaggactaaactgtggggctttgctcgttgcactggtaactacaggtcattttccggcatcctgagccgacatcttcactcatcaacgtcattcttgtctctcttcccctcctcagcttctcctgcatctttcagattatggcgagcaaactcctcaaaaactaaatttgcatcctgataactgggtcctcaggctgagggtgcatgaggcggaatgggacctcagtggcgacttcactggaggtgagctctcccagaaagcctgacactgtgagcttcaccttgatctggtaagacaccaggattcccaggacggtccggtctatgccctccttaatgatggtgctggaggcaaggtttgtgtcctcgtgcttgattttcccatccagggcaatgcctctcctttctcgattgttagcagcaagggagcagcgtccggcttggtcaaagtgctgttggtggcacttttcttgcgcttccccatagcacgggct

SEQ ID NO: 146369 - DNA, 549 bp, Homo Sapiens
gcggccgcctggctgcagcatgctcgcccgccgggggctgctgcggctgccgcgccgctcgctgctcgccgcgctcttcttcttttctctctcgtcctcgctgctgtacttcgtctatgtggcgcccggcatagtgaacacctacctcttcatgatgcaagcccaaggcattctgatccgggacaacgtgagaacaatcggtgctcaggtttatgagcaggtgcttcggagtgcttatgccaagaggaacagcagtgtaaatgactcagattatcctcttgacttgaaccacagtgaaaccttcctgcaaactacaacatttcttcctgaagacttcacctactttgcaaaccatacctgccctgaaagactcccttccatgaagggcccaatagacataaacatgagtgaaattggaatggattacattcatgaactcttctccaaagacccaaccatcaagctcggaggtcactggaagccttctgattgcatgcctcggtggaaggtggcgatccttatccccttccggaaccgccacgagcacct

SEQ ID NO: 146370 - DNA, 535 bp, Homo Sapiens
tcttgttgcagtgaaataacctcctgctccagctcttggcatcgaggacaatagccttcctcgtcctcctcctcctcctcttctggcagtgtagatgaagatgggtggccatgggattcggacgttgctggggaagtccagccacgtaatgtatgcacaggagaggttgacagaggatccacgtcggccagatggccatattcactggctgacgaggggtttggagttggaaagcttcccgagagcaggtaattttgtagagagtcagtgaaaaccctcaaaaaggcagaagtttgttgtttcctttgcatatactgcatctctatgtctacattgtctgaggtctgactgtggacccctttcccaatgtgacagtgctcctgtctttcgttgtaacttgagccttcctgctttacgcaagaaatcatggactgagaatggttggagtccaggagttttcctccacaatttaagaggctaagaactcgtctgcactctgggcaaaggcaccccagatcattcgactctctgcggt

SEQ ID NO: 146371 - DNA, 331 bp, Homo Sapiens
tttgagatcacagaaaaatttattatagaaataccagaaatgctgccccttgacagtacaactttgaaccaggaaatgatgaagtcacaagaacagcctaagagacccacactgagcccatccaatgccccaagagaatcatggacttggaagttgtgttaggactcagctagcaagtgaaggtgactccagatcatagaagcaaagctacattccctctctcaaggcctgatactttcctcttcctgccctctccagcacatctcaagcctcttacataagattcaaaattaagagtcatattctcacaaagggctcacagctacagaga

SEQ ID NO: 146372 - DNA, 530 bp, Homo Sapiens
taaggataagcaagcttttattccgtcaagagaacaaaggtcaggacttttatcctggtggggggatggggagtccagattccttctctgatgaggcaaaaaaagaatcaagactcctgttcaagtaaagggcagagggtgagagctagtactcttattctagaaaggaagtagatacttttctttgataaaggaatgaacggtagactcctagtttgcagaaaaggtgggaaagatgtgacttgtactttggtaaggagatagggaaggaattaaggctattactctgaagaaagttggggggccagggctcctatttttttgctgaggagatggaagatcagggcttgtattcaataagaatgggaggggccaggggatgcctggcaaaagccttgcactgtgaggtgcaggtagaggcttttattctggtgagaggacatggactctctctctcccctcaggtaactgtgccctgtaccagcggggaggctggtggtaccatgcctgtgcccagagggccggaccgg

SEQ ID NO: 146373 - DNA, 356 bp, Homo Sapiens
tttgtcttttttatgaatttattaaatttttaaaaaacaactcttgataaggcaaaaattctttcaatacttagatgacaggcatctttgcattttaactgtaggggtttgtttattcttaggaataaaattggtcaaaagaacctccacacaaatattagtctgtgtatctactaaaaattcttctctaatgaatttgccctctgattaagaatcaaagttatatccaatgatactagtattgacatggccttccatacatacatatatacgtatggaagttgaaagttgccacacatccttgaataaactagagtgattatacttactgactcagcgaagtccctgccatttaa

SEQ ID NO: 146374 - DNA, 860 bp, Homo Sapiens
ctaattaggttgcggttggagattccagcaggagcgctgcatgttggtccactcatgctctaggaactggttcatgaaggacatgtattcctccttgctgccaaatcagtaggagttgatgatcttgcagaaggccagctcgcagcacatcttgaggttgccctggtgctctgggaggtcagcggccgagcacttgctgggatccacttcgcagttctcatctgactcatacagcgctttgatgaactcacctagggcgtcctgcaggtacttctggcccactagcttgaggtactcctcaatggccttggtggccagtgtgttctcccggaagatgaggtgctcgttgtccccgcagcggtccacctctgacatcatcaggtctgtcaggaagtccttcaccttgcccgtgctctgcaggatgtgcaccagggcagatgccatctcctccttggtcttggcactgaggatgggctcgagggctgcacacagccccaggtagtggttggtgatgtgctcagcgaactctttgtacatctccatgggcaggatggtgatggtttggtagcgcgccttgatgcggatcatgggtccagggcccttgccgcccttggggttgggcgtcaccaccgggtaccacttctccacgaactgccgcccggccaccgaggcagcaggtaggctcaccaggcccaggtaactgttgcgctccttcttcttcttcttgtcggtctccccggtacaggtggacagtgaccgtgcgcagaggcggcaagttgtggaactcgaagtgctcgccccagaaaacattgtccgtcttgagcttgcccgtggtgcgggcataagagcacatcgtccag

SEQ ID NO: 146375 - DNA, 533 bp, Homo Sapiens
tgtcaaatcttctcatccattccagaatcactaaaatctattccaatattttgaagcagatcatgaaggaatcgctatttctcttcatcgtgaaagtattgacatctgttggcagagccaggtccagttcccatgttatcattatggagttgttggaaaaccgcactttggaggaagtacctctctgtatgtgaatattcgaggtaagcaactgtagaaactttccagatctgggggaaattcttctggcagctagagtctgtagtggccatctctctgcgggaagaaactgcagcacttggaaacactgcaaaactctgctcaaaataccatgtagacagtgccagtaacaaagatgttctcaatgatcttttcatctttagaattcagagaactggtacaaccacggatactaaactagtgattattttcacgaattgtcaaaatgcattcattctctattatcggggttttccttaatcccgctccccccgtttgtcgtgggcgcgtgttcgctccgagcaggcggccgc

SEQ ID NO: 146376 - DNA, 409 bp, Homo Sapiens
ttttttatagccaatcaggttttactgttcttactagtaacagaatcagaagtgcacagaaataactattttttaaaagaaatgtttagaaataaaattggatatgagacatcatgcgttcaagagaagtaggtaaaataatttcacttgtgcacacgtttccaaacgtctcaaagaccattgaggatgccttctaggttaagagcaatactgcctcctccctaaaagaagtgtttgcaggctccaaatctgctgcatttaggagatttcaatacagttgctttttcctttttccatacttgtgttatctgaaaaatatctcaagtagaagatggcccgtgatgccagcccatgtccaggattccgtcagcctcgatgtaactttcctgatcctcgtttctctctttgc

SEQ ID NO: 146377 - DNA, 555 bp, Homo Sapiens
gaagcttgacacagtctgaagatgtcgccactaacaacattatatccaggactacatctctattcaagatcccagtaatgcagtgatggtgctggtagggttttcggattcggtccagacggacactgggatcccgagactgacctatcatctggatgatgaagataggcgcctagcagaggatgtaagccgtcacgatcacaaaagtcatcttcaccgtgcggatcttggcccttgaaatggacttcacgctgctgacacagggtgcgagcaggaaccccttttggaaggccacacccagcttgctctgcactcctctgctacttgcgcgacgccgtcttacccgcggatcgttgcaccagatgttgtagcagatgaagctcgtagcaggtacccaagatgaccacggcgccatcaaagatgccgcccgtcatccaggtcacgtaggcacgagaaccccagtgctggatgaaggtgcccagcagtcgcgggccttggtgacattgttcacctctatcatggagaagacgaagtactgcgtgcctcagcacgaag

SEQ ID NO: 146378 - DNA, 592 bp, Homo Sapiens
  misc_feature (127)..(127): n is a, c, g, or t
  misc_feature (147)..(147): n is a, c, g, or t
  misc_feature (193)..(193): n is a, c, g, or t
ctagctcgtgatctcagtcagactctatgttttacccatcttcataggtccatttttcatcctttaatcattccgttgctctccttggacgtctctagttctcataatcgtcttgaattgtggagcnccaacgtggatatgtttctncaataagggcccgactaatgccaagtatagtgggaggattatttcncagttcttgcatgttttacatctataacatggagtccaagaaaatctgaaataatatggagttgttttataattgattgcaatttgctcactctgtaagtcgctttcaagtagaatactgacatattcttttaaattttattttgttcatttgtatttgagagttaactggtatttataatatctagtcaaatatttaaataaaacaagcttttaaaccaaaattgttaataattaatccaatatcaaattaaatttttaagcacctacgcatgacatggattactgttgatttcccttgtattattttgtatgttgagttattaatcagtaaatgaaaatttagttcttcattgttaccctggatactaattttttgaagtacgctttcatagcatta

SEQ ID NO: 146379 - DNA, 902 bp, Homo Sapiens
aaccactccttccttgtccaactggaaaaacctaagaaataggcctctccaggtcccttctggtctttgagataattctctaggagagctgtggccatgcctgcattaaaacaaatgcgactggccaggaatgcagtgtagaattgaaacatcagggctgagtgattcattcctctttacccagtttttgttttgttttgtttatctgtcttccctcttggggaagcctccacccagttctcccatccaggccagtgggttctgaaccccctccttccctccttcagccatcccacttgccctgcttgggccttttcagcagtgtgtgtcacatcatcatcagatggaaccagaagcagccaggagtgctttttggcacttccagctcagccagtaccgtagaggatccagggttactatccatggtgaaaagaactttctctagaattggtattaatgaggttaagtaacttaatttccaccaacaacttatccagacatttaaaaaggcaatagagataaacagcttagtaacaacagattggccttcaaatttcagagtattgttttctccctaactgagctgtctgcttgactggttagtctaataaatgcacggagaaggtgcacacacaacacagtacttttcactatttaacaccatgatcatgtggaatacattagaaaggaaataggtcaaaaaccatcatgtgaaccatctaatttgatgtttgggctaaggctaaaatcttcacagggaggttctaaagtgctgaaatgcagaacattcaggctgactggttcacccacaccagagagagaaactcaagtggggctgggagggcaggggggcccagaagtgacccaggaataacctgcccttgtgttcatttccagagacc

SEQ ID NO: 146380 - DNA, 313 bp, Homo Sapiens
gaagatgtacgctctttattaataatacttgtcactggtattagagaagtggaggaggggcagcccccaggccacgcctctgcttgagtttccttctgtcgcactgccacggagccacagccaaggcggctcgggagtgaacaatccaggtgcgcggtgtgttccagcctcagtcctcctgggttctttatccacaggcatctgggggtggatgtgacggcagacttgcaccagctcccttccagaggcgccagggaagaagcccgggctgaccccgcttggtccagcccctcgggagtcgtcagtgggctcg

SEQ ID NO: 146381 - DNA, 530 bp, Homo Sapiens
tttttttaacaacaaagactttattgtgctttaatcaaaataagtgggggctttgaggccaaggaaggggtccttttccccaagaagaggcattcttaggcattgttgaatctatgctggaagctctggtcccaccttggagcctcctgcagtgagtagagccaagtttcctgactttttctgaccacaaaatgcaactgccaagaatggcagatgagggatccagcctcctggactctcatttgcttagttttcttcagtcttgtgtcctggagcagattgtggaccctggaagcagggccccagtgccatctccttgggcctcagaactctgccccattggtggtctggtggtggccacttatcctgcaggagcctgaccatttctgcttccttgaatggatgaggttggtggctggtccacgtgtttctgccccaccctcaccaaggtggccagtggtagtttgagcttggtaacatcatcagcttggccttgcaggcacacataggccccgggtatgtacgcagtg

SEQ ID NO: 146382 - DNA, 523 bp, Homo Sapiens
ctctttcgtcttctttttggaggagataaattctcagtagatatttcatcttctgaactactacaaaatcgagtaattcgtcgacgacatgatgttcttaaaggaggctgcaaattgatgcccgcatcagctgtccaatcggaatatctagatgaagagtcacttgaactttcgctgtaactctcactttttctgtcacttctccattcatcctcttctgaagaaccagaaccttcactctgatcacaggaagtctcatgtcttacagagcttgaagactcatttccagaagataactcacgccagctacgatttcttctaccataatttggatatttacgcctacatgtcctttgtctagactgtgataccaaaaccactgaatccgacttatgtgagagctgaagagtctttctttttcttcctattatataagatttctttcctcttcacctttctctaatcggaagtcttccagcttcctaaatatgcctagtggtacctctggtacaaccactcttcg

SEQ ID NO: 146383 - DNA, 1062 bp, Homo Sapiens
  misc_feature (50)..(89): n is a, c, g, or t
tttgaatcttaaattattattatttcttcctgtcgcttacacccgaggtnnnnnnnnnnnnnnnnnnnnnnnnnnnnnnnnnnnnnnnntttcctctccccctaaggcactgactgggaaagccgaaagtagggagaagggaggccacattgtccccactttctggggctgggccccaggtctccccagccctgggctccccccatcacctgaaatgctaagatgaggcccaggacaacccgatctccccgccaccccaatatattacatcatcactttttaaatagataacagggactggtcccgctaccccctccctgtgacccctccccactgttaggggtacctgggcagctgtgcaaatgggcatgggggtgcatggaagggaggaagagcaccgggcccctgaacctgccccttttaaggagggggaggagccgtcaggccaggaaggggaaatagtgcaaggcagagcccaggctgcaaaaggggtccagcacccagcgaggaagggggggtgtcccccacccccagcagaattgggtagttaaaaatctgaaactagatttcaacaagaccaacagaagaggctatgtacagaatgggggtggattcaatcctaagagcagagtggggattattctcccctgcctgacaggaagcccggctggcaaggatctgggaaggggatcactttcccacaggtccgcagccccttcccctgcggccaagcgagaagttctgtgcccactgccttggcaagggggcgccgctcaccagctggggtggatgaggagcgtgaagacagctcgctcccagtggctcgcggggggcgctcgcccactcagagcatggccgccagatggcgccggctcgcccgctctccacaaggctcttccaaccccttaccctgtcccacacccttcgctgcgccagcccgggggcggcgtgagtcaggggcggcagcggtggcggcggctccggctcgcacctgggcggggaggattgcttaggcctgggcctcggccgaattcacaacccaggcctcgctacctagccttt

SEQ ID NO: 146384 - DNA, 708 bp, Homo Sapiens
cctgattagccataggatttaccctctgtgctttattttccatgcccttaagattaggatggtaattacagcacccatttcacatggccggcttaaggatgttatgagaattggtgttagtcctttagttcaagatttgacaagcagtggcttttttaatccttttaaaataaagtacctcgtggtgttgggatccggagaaccagacccagacctgccttcaaggaacccttgggtactgccagagccatttctggatcagttgtggatggtggaagtcttggagacgcatttcaaaccaagaggtaggaggtaaaggccttgatggatgtcagcatagttcacagtggaattagatttcacggggcacccatcacgcagtcctgaggcccaggtgttgcctttgatttcttgtttactgcatgtcaggtgccgtacattattcgctgtaagcctcaaaaactcaggaagatttagccccattctccagataaatgaagtggctcagagatgttaagttgctggagatcacataggcaggattctaacacgaaagcttattctcatttcgctatgttccactgggcctgatccagtctcagcctcaattctcctgtttgggtggtgctatgttatccagcaagatgaccctgcaaagtcaatgctgtgtattcaaggcacaatagacagtcttctagaggcagtagc

SEQ ID NO: 146385 - DNA, 930 bp, Homo Sapiens
  misc_feature (734)..(869): n is a, c, g, or t
aatttttcaatacttcataatgaaataatttcaaacctgaatattacacatgtggcaaatatcttcaccatctgcccttcattcaaatgttaaagctaatgcttaatgccattaaacttttattgatgaaaaatactacattcacatatttcttaaaaccagggctagaaggttccttagaaaataatcacttacatgaaatgctgacaaataatttacataccatttcgacacagcattctgttcacaccatgtataatcttgatattatcaataactgtggatacatttaatgttgaacttacaatttaatacttaaaagccattgttcctgtccattaattgctgaatggataaataaaatgtggtacacactcatacaatgaaacatcatttagccataaaaaggaatgcagtactgatacatgccacaacatggatgagccttgagaacatgatgctaagtgaaagccaaacacagaaggccacaaattattgcataattccatttaaatgaaatgtccaaaacaggcaaaatcacagagacagaaagtacattactggtttccaggggccgaggaagggaagaactgggagtgactgctaataggcatggagtttctttttggggtgacagaaatgctctggaattagacagcggtgatgcttgcacaacactagtggatatactaaaaaccattgaattgtacactttaaaaatggcaagtttgagnnnnnnnnnnnnnnnnnnnnnnnnnnnnnnnnnnnnnnnnnnnnnnnnnnnnnnnnnnnnnnnnnnnnnnnnnnnnnnnnnnnnnnnnnnnnnnnnnnnnnnnnnnnnnnnnnnnnnnnnnnnnnnnnnnnnnnnngaccgcgtatgcggccgcaagcttattccctttagttgagggttaattttagcttaggcac

SEQ ID NO: 146386 - DNA, 827 bp, Homo Sapiens
cttcctttgagagtttttgaaagggaagccattttgatcatctcccccattgttgcccccgaaattggagaggatggagcttcatgttgcctcccgaatgctggatccttcttagcatctgcagaagccctcagcccttctggcagcgggtgcactaaaggcaaacccgcagcactgacccgctggaaaatgagaatcagaaacctgttccagacgtggtcggttcgattccagtgaatcatgatccactggggatgggcctggatgaaacggtttttacttgtttctttttcagtttaaggatctgctgttcaacttttgcaatttttcaatctacacgatccatactttgtattaactcttcgtttgatagttttgaaggtaaagcattttgatcatctccacatggttgccccgaaattggagaggatggagcttcatgtttgcctccgaatgctggatcctgctggtggcgggtgctgggaaatgtatactggacagagtgaggaggataacgactttgttctgtgctgaatgctccttggttgggaggataacctgaacttgacattatcagtaaagaagtcctcaccagactgtgagatcaatgccaataaacaatcatgtttctaggaaaccaccgggagctggctaagcgtgggagccgacgtgcgccccggcctgaggagtgggacgcggccacggcgcgcggccctacaccgggacctcgttcggcgcggcgagtcggacgctcactccagccgccgccgccgccgcggctgctgcttcgccaccttggccgccatcttgactcaacccctctcccc

SEQ ID NO: 146387 - DNA, 805 bp, Homo Sapiens
gaatggtgtagccttttccactgtgaattcaagcactgagctacaatggaacaaccatgataatgataatatgaatatttgttgagttatagcaatgtataccacatcacctcgtcacccctcctcagcaggagcatcagctccttcaggaagcttttcctgattatttgtgcctgcttcagacacattagatgaccccataaatctctggacatatctgcaccacttctcttgccagcttgtatgttaattattaatagctgtttgggtgtctgtcccccacagggaatcatcaaccaccgcaatagagaaatacataggattctgtggaacacagctgggagaacaggcaaatttgctcaaagagttccaaaaagctatagaaaagaagtgaccttttaatctggatctaaagagatgagtagagatttgttttaggaaggaaggagtaaagggcattttcaagtagatcaaaggcatggtgtgtttgtcaggccataatgcttatggggtcctcccacatccaggcactttgctagtgctaagagtagacagaaggtagatttggctggaaggtggagtgtgtggggcaggaggtaatgggggtgagaatggggaggtgagttattaccacaggtaaagaaccttgtggaactagctaaggagacagctctttttttcctggaggccaagggaggcttctgaaggattttaaggagataagtgtcagagtcctatttaattctaaatgagaaagatctctatgaacaggtatggtgtgattcataggatgtattgattggtg

SEQ ID NO: 146388 - DNA, 392 bp, Homo Sapiens
ctgagaggtaatgaggtaaaatagaagttggttttgtgttcaggctagttgaggattcagtacttcagttgaaatatatttggtactttgtgcacacagctttcccagctttggtgagaaaactaatcttgaactattttgctataaatattatttttcagaatttttatattcatttaaaattagtgtttagagtcctttcattttaagattcagaaacagcctttgtccaacattttctgtagaagaacttcatcttaatttatgtcacaaaataatttagcaccgtatatagaattttgttcctcaaatcatatccctcttattttttatgattatctctctcatgccagcaaatttaacattgtgagaatgaatatagcaaacttatt

SEQ ID NO: 146389 - DNA, 811 bp, Homo Sapiens
cctttacctgagtaatcctagcacaccactttgcctacttttcctcttggtggtttagttaagcaaaaagaaagatccaattttcctctttttcaaacatcaatgagtattagcttagaataaagttcttattgctgttccttcagggaacagggaaactgctaacttgtcagttccaacaactgatgtaagatcatcttctgaccatagcgaacctgtaatgcttgctgttccctccagctgagtttcgcatagacttccttattactgagtaaaccttggtcagtttttaagtctgtggcataggtctgcaaagtcagtagaacactgttttgaagcagctgtctccacgatgctttgagcttgggaatatttgtgatcgtcaggctgccctcttcccttttatcatctccccctccatcctggtctttaagctctctgaactcctcagcaggcatgcacagtacctttagtgtggtggtcagctcctcttcagtcagcacctcctccctccctatcacaaaggctccctcttcccctaccatctccagtttgcataggaaatcccagcgctcgtacactaggtgcctttcagcttcagtttttgttccctgtaatgctgcctcacgaactgtcaccatctgaatgtcagctgtgtcatctgtgttgtcaggatatggttcaacaaaccgtacatatgaatcagttgccagttagccatttgcccataagtgttgaaaatctcatggcctttaggaatgggctgagtggctaccatccgaagacattcgcagagtattctagattggcg

SEQ ID NO: 146390 - DNA, 533 bp, Homo Sapiens
ttttttgaatttcaaatgcagtttattgcagcaaaacaaggaaatggggagtttaagacctctccacaaaagaaaaacaacttgcttacaccttatgtacaaaaccaaaacagcacagagataagatgctaaggagctgtccacaccctgggtctaactggtcctactctggctggcttaaggaggtgctttgaaatgtcatgtgggtggtggtcactgctgaactgtttctcagggaaagaacaaagcagggtcatagccaggggactgagattgccactgatctgaaaacttcattgggaaacagcagaaaagaaagagctgggggaataggatgagctagtgtaactaaccatagctcttttctccggtaaggctgggacaaatcgacctcggtcttgccaagcatatttgttagtgatgctgggggagaactagagctaatgaaacagagggcatctctttatctggttactccggaataagtggtagaaacaaacttcatgctggaactgccaccagaggacttgaca

SEQ ID NO: 146391 - DNA, 479 bp, Homo Sapiens
tttttctagaaattgccctttatttgtctggctcacactaacttagtcttcacttgctctagcagcacgggttttactgggcaagtctgtcatggtgatgggttgtggaaagagatttcctggtgacaggacctatgagtcgaagatacgataatgcttcactctcctcctccctcaaggccaccagggcgatccatgagctcctgctggaacccagtcggcagatggaggtgcagtccttcttctcctccttgttcatggccctgctgttccagatctcctttttggtggttgaaggggacgctgaaacaagccgggatcagcaacacatagctgaatggatggaccccataaggtactttggtgtttgctagtgattatgctccagggaccatcagcttagcacctttgcctgacttggtgtcagcctactgagcctgaataccctctgtacaccctcctgccagggcatttaacat

SEQ ID NO: 146392 - DNA, 423 bp, Homo Sapiens
tttttgatgaagattatttaaagcaggtgttttaatggtaaaaatgaacactgagctaacacaggatgacaacatcaggtagcagctacctgtctagggctgggaaacaatggaaaagattaaggttctcggaacctagaaactcacaagagtggccccagagagctagaattagacaagacagcggaggcaggggcagtgcgaggatcatgctggtacctcaggtattcagagaagagctttgcagaactggaattcagatgctgtccagttgctaactgaactttcaggaaggcatgttgaagcacattgtgttcacctctgaaagtcgttactgtccagctggtgctagtagccagagtgggatcaatgtggagagttctgggagagctaacagaagcggtttcatattccttgaagctc

SEQ ID NO: 146393 - DNA, 457 bp, Homo Sapiens
tgatgtgaaaatggagattttttctcctatgcctggagaatcctgtgagaatgccaacacttcgttgggcagaagaatgtcagttaattgtgagaagttggtgaagagggaaaagccaagtgaattaatttttccatctaattatgacctccttcgccacttacagtatgcaacacattttcctatacctctggtattgatgtctgttcctccttctgtttgagagtcacctctgaggatcataaaaaattgagataagtgatgtaaacttccacatgtgttatatgttttgtttatgttaaaatagcgaatatgccttgtgtagaattagactgcatgttataagtctgacctgttttatcatttacatttgaacttattgaaatgagaagtcatcttcagaagagactttgcacaataacatgtaataaaggtgttggcattaattcttaaatgg

SEQ ID NO: 146394 - DNA, 476 bp, Homo Sapiens
attcaggtatttccttttattagctcttacaagattcctgttggaaagctgagaggtcatggaaacatttgtctacaacctccttgaagaatgtggtgagaaaaatatacatacatatatgtgtgtgtatatgtctactttgtgatgagtctgaggttgtttcctgctctgaaggggctcagaagtgcttctggagggcagactggatattcttcagcaggccccacttagctcggttcttcccatgtccatctggtgttaccaccttgcagatatcactccattgcccaggaccattatcattgatggctctaactttaaacacgtattctgtgttgggggtcaggttgtgcagctccagattttgctgcattatgtcccgaatttgtccacagagctccatttgtacgttgttaggaggagaagtaatgacttcatagaattccatctcaaaagagtccacgtcttctgctgga

SEQ ID NO: 146395 - DNA, 443 bp, Homo Sapiens
ccaaacaattaggatgtttggtacaacgaaatggaatacaatgatataaattatcacagatgatactttggaagtcagcaagtattaatatatatttcaaaattattaattcatttttaaaatgccctctcatttcatatttatactccttgtataccaaatcttttatctgtaatctttattttatttttatctttattgtctcttagcaacaacaaaaataagaacttcagttttgcccaagttacatcagttcaaaaaccctacaaatcaattctaactatacatatgaatgtttttttaagtttatttataatatgaatatagcttccctgaagaaagtgccaagggtctctgagtgagccactagtacttgtcgcctcgtgcattcgaaagcaaccggacacatgcgacactcctgatcagtgctccagagctccggg

SEQ ID NO: 146396 - DNA, 1292 bp, Homo Sapiens
  misc_feature (463)..(463): n is a, c, g, or t
ggtggacaggccattctttcctttattccgtggtacaggcccttccaattgttctgttcaaagagcccctttttccaaaagcgccttcggaaggaggcaacctttcacaactcttgggcagttcttccctggtgatgttcctaaggcccttcatttttcagatttcagaggggagtctcaagagaagggacctttgccttattccttccagtgttaactggcactccctgtggttggcagccactggaaagtagatggctatcaccttcaaggagctacctggaattggcctttatcacaagcttactgctctatttcagtgcagcaccagcctagaattcacaaaaacatgaacagagcttgggtgacatgttttgaatttgcaaccttaccacactgtgatgaacatcataaaaaatgtatctctacttatcaatcaacaatgggtacttgttcttacttnggatgattcagctctgatggttactcttcaagccatgtgatgttagtatttttgatagtgaagtgctcaatctgaaatgctacacaggtcctttgactttaggtcaagcttacatatcaaaaggtgtatctgtgtgtttgtgtgtgtcctaaagtactgccatttatctgaatgggtttacaaattcagtctttaaccacaagaggaataatcaagaactgtggccccaggataaaaaaaatacagtgagaacaaagacctcaggagtgtccttgtcagctaaaggaagagaccagagacagccactcctgacacatgggcagagttcacagtttaacacattgcacgaggaagtcagctgactgggttgctttttcaaacaggacttaaagccagcccagaaactcttccaggtgtggtcttgaagactagctacagacacctactacaatcacttcatcagaaagaggcgtgcagggatccatctgcagaggctgtgtgaggtcgctacagaagatgtttggaaaatcttcgagtcctgacactgccgcgattgctgaacatgagacgggggtacaacctgtatccggggtcaaaaaccctggagtgcgacaggttggcccagaacaggactgtaacatcattaaccgatagttcatctttcctaagagctctggggtcaaaggttttagcaatgttagtgatctggtctgggtctgcagtcagaatatagacttctacaaacacgtcgtggtcatcaactcgcgatactgcgaattcacgatgctgacattgtcccgcacaggcataggtattgtaataagatctt

SEQ ID NO: 146397 - DNA, 278 bp, Homo Sapiens
cactgtcctataagggagggctaactgtattcctggtcgctcctgggactgggagctcctggggaaggaatcctaaaggagtggttgtcaatgcattttcattaacagccgcgcttctcggcagcctcctagggctggggtggccacgtgctcccttaaactgttttcacaactcgaggctgtgctgtgggtggcaacttgaaggtttccaagaacttttcgtttttctttgggccaacatttctgttttctgtcaatcaatagtttagttatttaaa

SEQ ID NO: 146398 - DNA, 626 bp, Homo Sapiens
  misc_feature (227)..(252): n is a, c, g, or t
ttttttttacttcctgaatcacactttatcacctggctggttgcaaaggcacattttttttctgttttcgtcaaattaaaatcttaaccatgtaaattcaaggctgtaaaggaaaactcaggatccttcatagtaataattacagtattaaaattcttagttgctagaaagtggttagaaccattgagaaacattttatcaggttacgtggttagagcaagatttgnnnnnnnnnnnnnnnnnnnnnnnnnnccaatgtaaaatatcagaacatctgagatgtccaagctgaaaagtgtaataaacgctatcaactgtagtggaaagaaagttccaaagtatgaagtccagagcaattgttggtagcatgagtggtgggattgaagtaaactgaaataaatggaaggcatttgtttaacctatgatattgctgaaagacaagtcccagcacagtagctttctcctttaaagactagccagatgtcggcctttttaagagcacaaagaagggagccacagaaagaggtaacaatgctggtagagaatggcagctacagtaaggttgtttttaaatggatagaaatctatgtaaaggtgactccgacaaaacacagtagctgtctcct

SEQ ID NO: 146399 - DNA, 317 bp, Homo Sapiens
catggcgctgaattcctcctgccctgctgtgtccagaacgtccaagatggcccattgattgtcaatctccgtatgtttcaggtaggagtcttcaatggtggggtcatagtcaggcacaaagatcttctggaaaaactggatggtgaggcacttttgcccacacccccatcccccaccaccaccagcttgtatgtggggaggttgtcactggggacggcgctggttgccatgtttctcgtaggtcagaccgcgcgctccagccccggctcggctacgcactcaggccgccccctcctagcctgcgccggtgaggaggc

SEQ ID NO: 146400 - DNA, 726 bp, Homo Sapiens
cagcccggtgaggagtggcttcaggtagatctgggaacacccaagacagtgaaaggtgtcatcatccagggagcccgcggaggagacagtatcactgctgtggaagccagagcatttgtgcgcaagttcaaagtctcctacagcctaaacggcaaggactgggaatacattcaggaccccaggacccagcagccaaagctgtttgaagggaacatgcactatgacacccctgacatccgaaggtttgaccccattccggcacagtatgtgcgggtatacccggagaggtggtcgccggcggggattgggatgcggctggaggtgctgggctgtgactggacagactccaagcccacggtagagacgctgggacccactgtgaagagcgaagagacaaccaccccctaccccaccgaagaggaggccacagagtgtggggagaactgcagctttgaggatgacaaagatttgcagctcccttcgggattcaattgcaacttcgatttcctcgaggagccctgtggttggatgtatgaccatgccaagtggctccggaccacctgggccagcagctccagcccaaacgaccggacgtttccagatgacaggaatttcttgcggctgcagagtgacagccagagagagggccagtatgcccggctcatcagcccccctgtccacctgccccgaagcccggtgtgcatggagttccagtaccaggccacg

SEQ ID NO: 146401 - DNA, 375 bp, Homo Sapiens
attcctcttggactcccttatctgcccctggagaaggttcctgctagcaggatgcgggcttggtgagggatcccgggacagggctgggaacagaggagctgctcacgtcaggcccgcttcagcgccgtgtacaccagggtccagccgctcgggctgcggcaccttggcggctgggtgagccacggaaaacatcctggacactcgggagagcgcggggggcttccgtggggcgccggcgggctgaagaccggggaaactcctgaaggagaggctgtcctcagaaagaggagagcaggagtcccccagactctcactacgcacccccagacccagccccatctgacgccctttgaccccaccaaccctggcggccgc

SEQ ID NO: 146402 - DNA, 1255 bp, Homo Sapiens
  misc_feature (77)..(77): n is a, c, g, or t
  misc_feature (254)..(298): n is a, c, g, or t
  misc_feature (326)..(326): n is a, c, g, or t
  misc_feature (350)..(458): n is a, c, g, or t
attgtttcgccgtccgcccccgagtacagtggtgtgtgatctgcccccacacaaccattggaggggtcgaggttttngtgttcgacgggcaacggcgggagggagaacgtcagatcggagggtgttggtgttgtcactgcgcggggagtgtgaggcacccctcccatcgcgcaggagagaggtctcctccccgccgcgcgcgagtgtagaggggggtggtgcgctttctctatgtgtgtattcaccgacgagcnnnnnnnnnnnnnnnnnnnnnnnnnnnnnnnnnnnnnnnnnnnnncgccccctttttatttggagagagaggnagttgtttatttaccgcccccggnnnnnnnnnnnnnnnnnnnnnnnnnnnnnnnnnnnnnnnnnnnnnnnnnnnnnnnnnnnnnnnnnnnnnnnnnnnnnnnnnnnnnnnnnnnnnnnnnnnnnnnnnnnnnatatcacgtttgttccgtgtgaaaaataggacgttttgtacccgcctcatctgtttttacctcccgtggggagggtagaagagctccctctgcgcccgtggttgagggcccccgcccccctgtattttatgtgcgcccttctttgataaaagaagggggctggcaaattcgggagtgttttttgagggtgtgggcaccgaggggaaactttcccacagttttttttgcgcccagggaaaaggcgttttccaaagagggccttttgggctttggttttgttccccaggatccattccgggggaaggcccaaagcggggaattctctttttgggattcccctttttttgcccggggagtttctcttggtcctggggggtgcacttccaagtaggccgtcaggccccgcttcagcgccgtttacaccagttccagccgctcgggctgcggcaccttggcggctgggtgagccacggaaaacatcctggacactcgggagagcgcggggggcttccgtgggggccccggcgggctgaagaccgggaaactcctgggcccccgctcgtggctgccgaggacgcctgcgaaggactggctcctattgacccgggcgctgagcagacggcgctgcggccgcaccgacagggacatcatagagtgagtccgcgcggggctccatggctgcgctgggctgcgcggacctcgcgctgtccttgcgctcggaggtgcccggcctgcctcgtgccgaaatcgccacccaggcctcgctacctaggaccgaatgggggcggttttggtgg

SEQ ID NO: 146403 - DNA, 723 bp, Homo Sapiens
  misc_feature (555)..(595): n is a, c, g, or t
gctttccaaagttttattttttatttgtacctgccttgttccagaaaacattgaaggtggcttcccaaagtctaactagggataccccctctagcctaggaccctcctccccacacctcaatccaccaaaccatccataatgcacccagataggcccacccccaaaagcctggacaccttgagcacacagttatgaccaggacagactcatctctataggcaaatagctgctggcaaactggcattacctggtttgtggggatgggggggcaagtgtgtggcctctcggcctggttagcaagaagcattcagggtaggcctaggttagtcgtgttagttcttccctgtgctgagcagagacttccagaagcaccagaaacggagccagatgaaaggaccccaacacctccccccgccaacctttgacagaatataggggcatcttcagcctggacacgcatgcatctcccctctcagaccctcagcacttcttccactcccatcaagagccccctcacggtccctctcacactctgccagtccccctagacaccnnnnnnnnnnnnnnnnnnnnnnnnnnnnnnnnnnnnnnnnngcccctgttggttccaggctgagatgcgtccccacctgattaggcccaaatctgggctcctcgtcagcactggggcctggcctctgccccctccaggacagggtcagggatgggcctcactgttgttt

SEQ ID NO: 146404 - DNA, 489 bp, Homo Sapiens
  misc_feature (53)..(160): n is a, c, g, or t
gtcttggtcgggaaggaggctgtggataacttggggcatcaggatggagtggnnnnnnnnnnnnnnnnnnnnnnnnnnnnnnnnnnnnnnnnnnnnnnnnnnnnnnnnnnnnnnnnnnnnnnnnnnnnnnnnnnnnnnnnnnnnnnnnnnnnnnnnnnnnaacaaatcctgggccaaaaggttgaggaggagccagcggtccaggtggatatggtcccctggggcctctttgactctcaccaggtgtgaaacacgctgcaagagcccaaaggcccaatatcccagtcagtgatttcatcctttcagttgcctctttgtgtgaggatccgtcttacagttgattaatctgctggtcaaaatgactcttgaatcagggtgaaataacaatattaagaagaatcacacatactcattcttttcaccccatcaccacatgtcagctaagtacacaggaccttgttgagtaattcacagcaacttgtttctgtt

SEQ ID NO: 146405 - DNA, 475 bp, Homo Sapiens
ttttggtaattatttcaatctctttgttaaatttctctgctaaaattctgaattctttcttcatgttttcttgacattctttgcgcttcttcaagacagatattttgaattccctgtctgaaaggtattccctatctgatagatctctatcactccagggctggtcactgggcagcttatttagtccatttgatgagatcatattttcttgaatgttctcaatacttgtggatatttgtacatgtctgaacactgaagagtttcttatttattccagtcttcacagtctggccttgcttgtactcattcttcttcagagggccttcaaagaattcaaaggggactgagtgctgagttccctaagctgtggtcactgcagccatttcagcactagagggtgccataatcccaagtatgcaataaatcttgcagactcctagatacccagcctagatagatgtgggaaagagaagac

SEQ ID NO: 146406 - DNA, 478 bp, Homo Sapiens
ttggctctattcctttttaatggactttggcgccttggcccactttccttctttgacagcactggtcctactccagagcattcctctagctagcaaagcagtgtgtggatgtgtgggtgtaggtggcgatacagacctcactggatgaggaccgcctctccctgcaagttcacgatcccggcaaactccagtgcttgaagttcagagtcctaccccacccccctcacctccacgccccttctgcactggtcaagccagcgagccgctgcagccctgatcgagttaaggctgctggagaaggatgcggacggggccagtgactcgtagtagatccctccgcgcggagctcgggccggcgcttcttcctgcgggaaacccctgggtgcccaaggcggcggggccgaggccgcggcgacagtggggcggggcttgcggtgggaggaggcggctgaggcggaaggacacacgaggctgcttc

SEQ ID NO: 146407 - DNA, 896 bp, Homo Sapiens
cagcagtggcgttacttctagcggctggataccgggttctccgcgagatcgcgagatcccgagatattctccccgcacggaagcgacgactggcctggccagaggactcgcgtgggagcgaggtgccggccccgacaggacggtgagaaattgttttacagcctacccgtatattacaagaaatctcaagtcaaacactggaaaagatgtcagaagattcagaaaaggaagactattcagacagaacaatcagtgatgaagatgaatcggatgaggatatgttcatgaaatttgtaagtgaagatcttcatcggtgtgcacttttaacagctgactcttttggtgatcccttcttcccccggactacacagatactattagaatatcagctagggagatgggtgccacgtcttcgtgaaccaagggatttatatggtgtctcttcttctggtccattgagcccaacacggtggccataccattgtgaagtcatcgatgaaaaagtccagcatattgtaacagtgacgagagaatgagagcagaagagacccaaaaggaagaggaaagcaagaccccgtcgggccactgcttctcagtgtcacttccagccgcatgtgctcattccactcaacttggttccacctcacctaactagaaaacccttctgtcacatctttgccacacctttcttttccttaaatttcctagccctcactttcagccgtcattttgccctcagtcacaggagtcaccatcagcagctcagagtggggagagtttctattttccttggttgcttggtaatcccccactgttactgctgaggttctttcagatgtgggcagctgtgtttctggcctcttctattgaaattctaaatatagtttctaaccaaa

SEQ ID NO: 146408 - DNA, 727 bp, Homo Sapiens
  misc_feature (78)..(78): n is a, c, g, or t
taagttagcatgaaagcaaactttttttctctcttcctgggagatgtgcagagtatgttgtatgaggaggaagacagngacttagggaagaggctaaatattttggagcaagtctgactcagccatttgtatctcctggttggaaaacggactgtcatatcactctacattcatcatcacattagagaatagattattttcccctttagagatgtcctgggaacgtgtttgcacaagtgtccatgtgggtactgaggtgaagtttggttgagctagtggaaacctagtggggaaaagtcttaaaaatccatatacatagttaaaatcatctgtccaagtatctttcattttagagaatcgagtcacttgatacttctgattgtttcctccactttaagttaagcctgggcaacatgttgagatcctgatctggtttggctgtgtccccaaccaaatctcacttgaattgtaattcccacaattcccacatgtcatgggtggtgactgaattatgggggtgggtctttccggtgctgttcttatgatagtgaatgagtcttacgagatctgatggttttaaaaaccatcagtgcagggagttgccctgcacaagctctctgcctgctgccctccacataagatgtgtcttgctcctcttgccttctgccatgattgttaggcttcctcagccatgtggaactgtaagtccaattaaacctgtttcttg

SEQ ID NO: 146409 - DNA, 678 bp, Homo Sapiens
tttttttctgactcagaaggtttatttgcagcgctggcggggcggacaattggcggcctcggggtgcggcgggtgcgggcgctcagcggctgggccagagcagggtgaaggagccgcgagcgcagcggaaatcgggctctggctgctccggcctgggctccacggagatgaggcgccggaccccgcgatggcttagtgggatgcagtcggagacgcgaacctccagggtgcggccctccccctggcagtgtgcggccagcacgcccaccagctccccaacgcggttgtccaatggcggccgggagcggtgcaggcacaccacgaggtcgtcctggccgcgggcgtgcagcaccaccagctggtctcctccgctggtcacgctcagccccgtcaccgcctcaaggggcacggcccgcatcacccggtactgccggtcagggtccagcttgtagaggtgctggtctgtgagcaggagggcccggttccggatcttgtggaagcggttcaccttgcggacatggcttgaaaagagcacagccccgaagccatctttgtcccgaagtgtctttagtcgctgagcaaacaggcttgatgctgtgggattgtcagtggcagaggacaggtagtcttcggcccaggcccgtcggcagccccagtcctgacgagacttgcagggcc

SEQ ID NO: 146410 - DNA, 330 bp, Homo Sapiens
tttaacatttcatattcttttattctttcttgtttacattcataataaaagtcagtgttagcatccggcaatgtttttgtaattttttgaataaagtcacatttgtaagatgtctcctctacaaactgcaccatataacacaccaaaggttgaagtaatactcacacatgggcccgactgtttgacttcaatctttccactgctttggcatctaactttgcatcttcagaactagaagccttcgtaagcaaacttatttctggatcagcaggccagtatgaaattcggttaactccagctcatatcagagtgtttcctccggttgcattt

SEQ ID NO: 146411 - DNA, 676 bp, Homo Sapiens
  misc_feature (648)..(648): n is a, c, g, or t
gtttaaaggggaattactgtttattaaataattcatttaaattactttactttcaatctttgctttttgtttctgtactgcgccagtactcctgtgaaccatgtctcagtggagtaatgatggcaccacagtccggcctgcatggctgttggcatgcgtgctccctcctcgtgcagccatggagaatggcttcatgaaattcagccacctctttctccagactgtcagttccatcttctcaactctgagggtcttccagagtccgtgccacaccacagcctggaaactctccccaagcagtaacctgaggcaacagtagccctcattgtttcacgtctctcagatgtcactgtccttcattgtttgatgtgcgctgtcttgcaatccatccttccagataaatcgtccatttttacctgtgataagccatgtccaattgccataagtttttccacaacattttgtttcattcttcctgcaattacgcaatcattactgtaccaccgcctatatggatatacttgtcaatgtgaagctgagtaaggaacaacgttcaccaaactcacagacaaagatggacaagcgagcaggcctttgtatcactaaagggaagctcagattggtaaatatgtaatgtctgtagtagtnctcgttggggacatccacagtatgttaa

SEQ ID NO: 146412 - DNA, 598 bp, Homo Sapiens
cagggctgctgagcacacaacagtgctcggaggtcatcggcaggtgcagagctgaacagcatgactggcttggactcttatggacttgggcagaagaggagcctgcagcccataggaatgggtggttttgcacaaaggacacttgttagcagccctcagcctcagcccagcatggcccagcctggtgatgccacacacggtgccaccatggccacagagcagcagaacggggttggatttcattagctgtgacccctgtgaccagagctgccctctgtccctcagacacaagtattttaaaaggaaagttttattattaatcaggtacagtgaggccaacagatcaggagatggatgccattgaaaaggaattgtgctacactcacaaatcccaggagaggtactggaggccacacctgtaaacccaataggtccttttaatacataccagggagctgcaactgggggatgccaccgtggtgctgggcctgcaagggagcccccaggagactctattaagctcccatttgacaagttttaaaactggcccaacccaggcatgtgcacaggatcagaagccccatctctctaaattact

SEQ ID NO: 146413 - DNA, 492 bp, Homo Sapiens
tttgaatacttcaatcaaggtgcttcttttttatgtgaggataaatcatactgaattaaggggaaatttaagaatattttttaagaaataacaatttcaggtaggcaattgtgaggaaaataacaatcatacaagccaaggccacgtgattcttccacaagccccagggtgagagatcgatgccctgctttaccaaatattcttcgccagtacatgttgcatagttacaaggattgtttcctgttgcattgagtcctgggcagaagttttgtcccaaaaattcattatgctgcaaagcgtaaatccatatcgtggaatgctgaagtactgaagccatgacagccaagatgcaatggttgtgagattgaccaacagacctgaaaaaatcatcataaacacaaaacagatggtcatgagaagtgttgctacagaaaccacactctgacctgctgctatggccagtgccatggaactggctgaataagccaccat

SEQ ID NO: 146414 - DNA, 893 bp, Homo Sapiens
attctgatgtattcactgagttatgcttttgtaaaatttgcaagaataagatattttaactgtaatcagttaaagccagttgtgtgagatgatattcgaatggccaatggcacttttgagatccaaatgagggactggtgagttgagggcacattttgagtttaacagggtatgtttaggtggcttgcagttgcttcagtgtctatctaaggaaccccagaatgatgtcagaatggctttcagtgtattcctttggcccattgtgcctgctcagccagcacatgacaggaaggtatgaggccagagtccagaccaccctatgaaggtgtcctatggtgctgtgacagacagctcccacacagttcccaaggatgctgcctcctgtgtaatcttccctgtgtaatcccctccctgtgagtgtgggtggggcctaggaactccttccaactgaatagtgatagaatatcacttctgtaagtagattacagaagagattgtggctttgttttgctagcatgttccctcttgcttgtgcactctgatgaagcccgctgccatgttgtgagatgctccatggagaggcccatgtagaaagaaatgatttctatagtaattatgtgaaatagaatttatcagattcccttgtttgtagtcacaaacctataggaaatcaacaaacaccaagtgcatcttttacagctaatatatgaaagaaacttgatgggggtttccagaattttcctcaaaaaatacagggggcaatatattatagaggcatgtcagaaaattaagcacaattgtgatgtttatggtatatgtgaactttctaaagtttgtaatttcttgttatttattttctcaacctaaataaatattcgttttcttacctaaaa

SEQ ID NO: 146415 - DNA, 491 bp, Homo Sapiens
ttttataaatggtacagaattttatttttaacaaataagtagccagatgtatgactcctaggggggtagaagtggccctctctggaaattcataacatccaggatggatacgatgggattggatatggatatcctgttctggggcgctggagttcaagaaatgtgtttcttgtggttacagattattctgggagtactagatcctcaaataatctatttcctcagatgctccaagtcagaaagcccctttcctccattctggcttctacaaaagaagctcctcctagtgggcaaccctcccccttggctttccatgggtaatgccttttagaagacacgtccttttttgaccttctcccttcaaccaggaccagccttgggaatgagatctacgagttccattgaaaccctgggctagttcagtactaaggccatgttgtggttgactgagtataagaaatccagatatcccactgcttttatattcctct

SEQ ID NO: 146416 - DNA, 309 bp, Homo Sapiens
aggtgtaaaggaaggggcactggcctgagggctgggaaactgggctccctccgttttcccatcattgaagggaagggtgggactagatctggggacacgcaggcagagcacacagaatgaggtgggccaggtaggtaatgtcccggcgccgagggcctgcactttgcgccagccagttgttgcctggcttgagtttgggccgatgctaccatgttatctgattttgcaagagaaactggaaacctggatttttaaaatgtgaaatctcctgttttttcaaatgttggcaactaattaaacttttttaaa

SEQ ID NO: 146417 - DNA, 605 bp, Homo Sapiens
  misc_feature (331)..(340): n is a, c, g, or t
ttttttttaaaagagcgtttaaaatgaattttattctttgaattttacaggtagtctttagaggcttcaaaccagaactctgttgcaaaactctaataaatagcttgccccaagtccccaaacaaaatgtaaaacaaaatgagaactaaactcagaaggataagcaagacttcagaatgcttggatgttagcaatatttctcatttacaaagagatatcaggcaatgtacaatctccttcatacaagtcaaagagagaaagagacagacaattgaaatcttcacaaagcactccgaaatcttcctatttccatgatagaaatgtcaccagnnnnnnnnnnttccatggagaaatcacaatcaagaatgaaactgtagcataaaaatctggtagtgaatgtagcagggagaagagaggaaaatccatcctgtttctttcagggatggagagaggaaggaattgagattacttgggtgagggaacttccaatcagatgccgctagagtgctgaatgttcccttagaccgacgcgtggtcgacgatatcccgggattccgaccggtaccagcctgctttttgtaaaaacttgttctatattcctatcc

SEQ ID NO: 146418 - DNA, 450 bp, Homo Sapiens
gccttcatcattcatttattcatttgtcattaacaaataattaatgagtacctacatgttatctattgcagtataacaattacctccaaacgtagcagcttgcaacaccagtaaacattatctcacataatttcttttggtaggaatttgagagtggcttagctgggtggttctgactcagggtctttcatggggttgcagccatctgaaggcttgaccagggctggatgaccaacttccaaggtgcttctctcacatagctggcaaactggtgctggttgttggcaggtttcagtttcttgccatgtgagcctctacacatggttaccaagtgtcgttatgacatagtggctagcttccctcaaaatgagcaaagcaagagagagcaaggcagaagccacaaggtcttttatggcctagtcttggagtcacactgtcatttctgcaata

SEQ ID NO: 146419 - DNA, 400 bp, Homo Sapiens
aaccttttttctgtccctgggccaccagttaaaccaacagttagcagcgtgactcgtaactccatgactgtcaactgggaagacccagaatatgatgggggctctcctgtgacagggtactggctggaaatgaaagacaccacttcaaagagatggaagagagttaaccgagatcctttcaaagccatgactttgggtgtttcttataaagtgactggtcttattgaatgttccgactatcaattcctggtatatgcaatcaatgctgctggcgtgtgtccatcaattctgccatcatacccatcgactgctatagatccaattgcccctcctggtcctccatttcccaaagtgacagattggactaaatcatctgcagatctggagtggtctcccccac

SEQ ID NO: 146420 - DNA, 505 bp, Homo Sapiens
  misc_feature (62)..(62): n is a, c, g, or t
  misc_feature (65)..(188): n is a, c, g, or t
gggggccccgcttgccaaaggtttggtttttaaaagttttttgggggtcgaagggtgttttnaannnnnnnnnnnnnnnnnnnnnnnnnnnnnnnnnnnnnnnnnnnnnnnnnnnnnnnnnnnnnnnnnnnnnnnnnnnnnnnnnnnnnnnnnnnnnnnnnnnnnnnnnnnnnnnnnnnnnnnnnnnngaagcaggagatgctttatttcagaacaaggtacaataggccacacctctgtcctgcacctgggaaccttgggcatggatgagcagagcaaccacaggtctgaagagacaaagcagaggaagcctgagcgtgcttctcccctgtgtggaggggcaggccgccattgttgtggtgtggctcctttcatctcctcagctgtccagggactagggtatgaagggacaagaaaaccaggcccaatatcctctaaaattaagctgaggcaggagagggacacccaaggcgagggtgacaggcctttcttgttggctggagag

SEQ ID NO: 146421 - DNA, 747 bp, Homo Sapiens
  misc_feature (572)..(629): n is a, c, g, or t
tttattagcttgtattttttattgatttttaaaaatactttttatccagtttgttgaatcagaggatgtggaatccacagatatggagggccaactgattgtatgcacacacatatatatgcatttatacatttatttatatttataactacagttttgattcatgagggcaaaatctgaatggataaagcactgagtaaaaatatctttgcaggttgtacatatttgttcaacatcaaaataaacctcatcacctactgtgcactcagaactattctagcaactagacatacaaacaaaagtaagacatagtctctgacttggaggcattgataatgtagtatggaatgtaactcagtaagtgggtcattgaaatgaagtgggatataccggcatccttggagatattgtgggtcctggttccaagccactactactacttttcttccttaggggtgtctcttagtccttgctgatgctgtgatccagatccttatttctgagcagtacgagctcctgttcactatgcccttcccaagccatggctgctgtacttgtgtatttacagatannnnnnnnnnnnnnnnnnnnnnnnnnnnnnnnnnnnnnnnnnnnnnnnnnnnnnnnnnccgctttcccctgcataaccagctcgcctgctgtctccaactctgagccctgaaggtcacatgcttgtggcaccacccatggggcctgaaataccctggaaccaccccgccgccctcc

SEQ ID NO: 146422 - DNA, 453 bp, Homo Sapiens
cgtgtcaaagaaattatcaccctatgcacaccgcactccaagaaaggctaagaaaacaagtcctatgagcggaggtcggagcaacctcttttccgaagcctgaacacaatagatggcaagctattgtccaccttcagctcgctccaaatgccagcagttgcaggagtatgagctgcaacagctcggcacgactagtccaaagacgagcattggaatataagaaaatggtccttgcgcatcctaccctcccccatcgatcaccctcaaacaagtcagttacccggctggtccccacccccctctgcgggccgccaccgcccgcctgggcccggctcgcagaaggtaggagcccggaccggcagagccgaggctccatgtgagccgcgcgggaggcgcagagggggctgcaccggacggaaggttgcaccggtggcgggcgcaagcagcggccgc

SEQ ID NO: 146423 - DNA, 794 bp, Homo Sapiens
  misc_feature (182)..(192): n is a, c, g, or t
tttttgtcagcatgaggtctaatttattatgatttaattctacattcttaagtaagccagacatatatggttatttatctttcattttcttaaaacacagagtaaaagcatttaggaaaccaaatattgaccatcttacactctttctctatttcttaatgccatacattttactgctgacnnnnnnnnnnnaaacattttcaaggaaatgcttattctaattccaagttatcttgcaacagatcactaaataagatcgaatttttctcaatctgttttacaaaacagcaaaatttttactcttaaacaacaaatgtgaccagtatcaatcctaaacttagattacaatgttaaataaaaggaacatttgaaaaatatgccccaaaatacagataaaacttcaaattatccatttagaacagaaacaaaaggtattatacagtgtgttccctccagtaacacccagtccttcactccttggaacagtgactgccctctttaaccacaaaatgcaaaatttgcttcaacttcactaggcgtgggaagagctgctagccttggccttggaacactttctgcccatggcactactgccatcattgagcatagctgcagcttggactctttcttcctcatctctcaaagcctcttcataccagaactggaacgcactggggacagttttattgaccttggcccaaaactccaggaccttcatcttgctggtttcagcatgggctcttggaccccacaggaattcatagcgtgcaggattactgttgggcagcttggcg

SEQ ID NO: 146424 - DNA, 254 bp, Homo Sapiens
tcttagaaaagaagttgtttttattttaattcaagagggttggaaacataaaaacagtacattttccttgcagaaaattaccccatttaaattactatttggtacagagattatttattacactgcattttaggcaattttctaacattaagtgacaagttatacttttgattttattttccacattggagctattatgatttgcactcataataccaaagctactgaactcaccaatttttttcttagtaatt

SEQ ID NO: 146425 - DNA, 634 bp, Homo Sapiens
gagatgtggaaccaggtcttattaggaaacggcagagtcaaggagcagtggtggcggcccgcaccccccacccccacttgttacaactttcgctcccacccatatcctctgctgagcagcacctggctcttccttgtggtccccatcctttcccttacccttccttctgcctcatcctgaggctgcagccccgaagtttcttgcttcttccctagggtcacttgagggcctctgcatggcgattcagggcctgagaaagggctgtcactgctcccatcacacggcccagctcccaggtctcaatctggcttcggaatcgctgcaggaagcggtcagggtgccagcggacctgctggaccctcaagtacctcctcagagccccctgttcctccaaaggggggcccctggccaccagggctgcagccatggcctctgggtcccctcccccagggcagggccagtgcacatcaccaaatcgccagaggctgcccctccccgctcctctggggtgctctttcctgggcccggccctggttggcttgagttttctgtcccctatagcctgctgcgccctactggctgggctctcacgcagctcttcctccttgagcctggctcgctccctgaagagccg

SEQ ID NO: 146426 - DNA, 429 bp, Homo Sapiens
  misc_feature (57)..(99): n is a, c, g, or t
ctgattgttgctgctggtgttggtgaatttgaagctggtatctccaagaatgggcannnnnnnnnnnnnnnnnnnnnnnnnnnnnnnnnnnnnnnnnnnatcagcaacatcagcaacaatgaactaattgggactaatgaatgctattctcccctaaagcaacattggcctagagaactgtaatcctaatactatagtagctacctaaagctctcaagtttctggaatgtgcagaggaagtcagaaactgcctaggtataaacaaatggtgtaggggttaactcagtgcatccaaattcccagtttttatacctattctaggtaaacagaaaggaaacttaaagcctccttcctacttctatgaaataatgccaagaaatcatgtaggaaactgcaatgaaccaactattaaaccatattctacaagaa

SEQ ID NO: 146427 - DNA, 722 bp, Homo Sapiens
  misc_feature (627)..(681): n is a, c, g, or t
aactttctcattttactcaaacaggagagtggtttgttgtggataatgtctgtgaaagataaaaagaagaaggagaaatattgggttgggaaagccttcagaatatgatgcagatctgaaaaatgtttaaggaagggagtatgggtgaggaaaacagcactgggcagggggcacctcagatcacaataaagacaaagcctcagctaatccaatgggaagcttgagagcaaggaatgcccattgcaattgtccaacatcgggcaggaatgaccaggctctagcacccttgccgtgttctgtcttggtagagagctgtcccagaataaagcatgactgtggttcaaaagctaatgtcatcctgaaagcattaaggactagaagctgtccactaactgtacaacttacagctcaccagcaggttctttccagaagggagagctaagaggtgcatttccatgactgccatcccctagataccttgcacttacacgactagatttgacctatgcttcctatcctgaatcctccattcctagttctaatttttttccaagtaattttccaaagcacaactctgattgtatcaaggcctatattaaatccttcaatactacttaatattattgnnnnnnnnnnnnnnnnnnnnnnnnnnnnnnnnnnnnnnnnnnnnnnnnnnnnnnnggcatccaatacccaccaaaatctgggccaaataattcttt

SEQ ID NO: 146428 - DNA, 415 bp, Homo Sapiens
tttttttactggcgggactacttgttgcaaggtttatggggaaaagtagccagagagcaatccagttatcagcctcagccccattccgctcaggtacagctcgggaagtaagcccccaaccctagttgggtctggaccaacaagacacgaggaggcagcagcgcacagccgacccctcatgccacgcactgagcagggttccgcatggacgctggtcttgcctcccaggcgcctgaactagcggagttggggtatcgggtggagtctcggagaaccaatccaatctgagggggacgcctgtgggagtcctaagtatccagcgcagctgggaggcccacgttgggaagtcggagaccgaccctcgtgccggcacgaggcctcgtgccgaattctggcctcgagggccaaattccct

SEQ ID NO: 146429 - DNA, 733 bp, Homo Sapiens
acgagagtaccagggagagcaggatcatatggagggcctattggatatacggggtacaaggacggtgctatctactctatagtatctcccacataccatactaacttgccaaaattatttctatctacctggattagattattatcacattggcaggctttatatgaggatataaatgaggtcatagatatatgtaaaatgtgtgacataaaataggctcgcaaaaagatagctattgttttgaaaaaatagaaatacaagtggcctatgagcccagatgtgatattcctttaaattagatattagacttactcacatttctaaatgtagacattctgagaatccatttgagtacctgacttgagagtactgacagtctaagaatttagaaaatactgatgttcttcaataatttatttttgctttagaggcttgataagacattcagatattcctagattcatataggtgtttttttaagtccataaaataaagcttcatggtttgaagtcattcacggaatttgaacaatatgcatacacagtctatgctgcctgggaggaaaagtctttttaagttaaacttatttactatagttatgatttatatatttaagaaaatgttctttatagagatttgttcatatgtattgttgacttgttttaatgatataaattggtgtattgctcccccaccttttattttgagaaaatttaaaccgttttttagatac

SEQ ID NO: 146430 - DNA, 421 bp, Homo Sapiens
tcatttatttactatcttgttgcacagtggattgatgcaacttacagtaataatgtgaagtattatggcagtaacaacaaaatcaagaaaaacataaagtaagcacagtcatatgccacatgttctcactaaactataaatttgtccctgaatagccttgcagccaaaggaaagagaaaagttacaagcagttgtacaatttttactgttttatgtggaaatataaagctatttattgggaagaagaagtatctcttcaactcttaattcacttctgtttagacattgagagatacagtagataaaatcattgaaagacaccgtagatactttcttaaataacatccctatagcaaataaaataatatgctggaaacgaccatgttaaaatttgttcttcaaggctgggcacagtggctca

SEQ ID NO: 146431 - DNA, 571 bp, Homo Sapiens
ttttcacacatatctggactttatttcccagcataccttgtagttagtgaagttatctacctaaatattggccaatggaatatgagcagtagtgctgtacacagttatcaggatgagcacttctgggaaaatacgtctttcatatgctctttttctgtcttttagctgaacagagaagttctgattacctattggccactggaatcatggaagggggaagaatcatgtgcttctgaatatgtagatctctttcatctaatggaattgcaccacacctcagattaataatttatattaaaaatatgaagttgtgagatctgtatctctggaggtgagccatatttatcattgctgtcattcatttcaaagacgggaatgtcagaatgtcttgtgcggggtctgtagtctttgagatttcaatgagcaaaagggaatattaaccaatgatgtattttcaaataagtagttcactcagcagatatttgcacaaaacctggtttgatcttcattgttgaaagaggcactgaagagatagaaaaatcagtcttgaaccgccgatgccacctctttc

SEQ ID NO: 146432 - DNA, 499 bp, Homo Sapiens
ctcccaataccgtgcggtgggactatgacgaccctggtaagtcagccacaggatatcagttctcagaatagaagagaagccaggtctggcagcacctgatgatgcatttccaatttaatcttggaatgatagccgagggcaagaagccagcggtgcctgagggatgctaaagagccaaccgatccagggaaacaaatgccagcgagggaccccacagcaaagagacagacactgtgagcaactctcctgttaccatgaggcttgcgaggcgtgtgtgcgggtctccgcattggcaccatctgccaattcctcaggaggacagaacaaaccagtgaggcatgaagattagattatgtaacgctcgaggattgctgttttcaaagaggaaacaaatggaatgaattgatttgcttgtcaaagtcatgtcactaaaggagatctattccctccccttctaagaggacctcattaaagagtggaatgatttcacagattcaaa

SEQ ID NO: 146433 - DNA, 472 bp, Homo Sapiens
gcactggctttcttcaggccccgtgtcattgggaaccaggcccagggaacatttgactggagatgatacatggattatataggtcaattatacacttaatctgccttctggaggattaagtatttgcagattgactctgcatttggcttctccgtggcagttatcagatcaggaaagggcctcttaccaaaccacctcgtaagaacttaatcaagcagtgtggtcagcttcggaaggggctgctactcagtattctttgcctcgcacggattttaatttgctgttccattttcaaatcgtgtatttgtccagtttgtgtggcagaacaataattgagtgtgactagttcccttgaaaagggtaatttgaaacatgaaacctttgcctgttaaaatatatttgctatatttatatatgaaaccacagatacccttattttaacaaccttattaaattactaaagcaccataaa

SEQ ID NO: 146434 - DNA, 400 bp, Homo Sapiens
gggccccacgaaccccaaccaccacctgcctggactcagcctgcctctgctgctcaaatcctcacctgcctcagcaccccaagacagacacctcgggccccgcatgggttggagacatttattggcagtcctcatgcacttctctgaccttggagggctcttttggtttaagactgaagcccaggacggagcaaaaggagatggagctgagaaaatgggatcatcctgtgtctatcctgggattctgggcttttctgtccattaattcaccgaaggaggaaacttagctccctgatcattcaaaacacttgtgccttttcccctcaactcctcattttcttttcctgaccaacctccagtcgtctgataaataaatcagtgtgacttgtcaatagcgaaa

SEQ ID NO: 146435 - DNA, 410 bp, Homo Sapiens
tccttactgttggtgccatggggagctcagcattggtgtctgcttataacagaatatattgtggggcattctacgttgaattcctcagtgaggggaattgtcactgatgaggagaattctatgtcgttaacctcttccataaccaaaattcctaccaccatgctatgttccacttcagtccattgatctcctgttaagtggatattatgtgactggtaaaaaagtagtcatgtataaaccgcctgattttggaaaccctcctctgcagtgaatattctctggtgaatatttacatgagaaataaatatattcacaagctaagcccattttgagagatctgcctacatggccctactttagtcttgctagtcttaatgttccaaacatatttttctctgactaaatgaaaa

SEQ ID NO: 146436 - DNA, 441 bp, Homo Sapiens
ttttgaaacagaactactggttttattaaccactttgtcttggaatccaaaatgttgagaaaatgaggaaagctttttcggaggaaaaacgaggaccatgttgccactgcctctgtaggtgatttatgcctgctgaaggcatcaggaaaccagtagccaggctctccatgcacttaacactagaaatgcaattgtacaaacaaatgaactacagggcagattaattaagtaggctacagtagtgagactctttcctttctagtttccaaggttttatgattccaggacatacacaaattaagtacacctgggaagatatatttacatcttttctaaatgaagtattgcatccacctgtttcctgagtctatcaaagaagcccatactgccatggtttccatttatataaaatgaataagagtgtacaggtgtgctcagaca

SEQ ID NO: 146437 - DNA, 759 bp, Homo Sapiens
tttgttgaagttattgagctttaatgatgccattatttttaatcaaagcaaaaagctatgaagatttttctgaaagacatttcaccataggcagcaataaaaaagtatatttcttagtcattagtgatctgattgacctcttttgccaggacataaggtttaaattgtctagatacaaccaattagatatgaaatggcttattacacggatttgtgactcacaatcaagaagaaaggcaaagcccctctcccattgttataaaaggtctctactgtttcctaatctatgctgattctgccaatcattcttctgatctcttgattcaatggttttaagattcactttatagcaaatatttaagacacaccaagtgatgtagcagatgtgcttggtgccctgcccttatttcttcatcatttaccacttccacgcaggaaagctccactttcagctgccagcgactgtaattctgtctgaatactttctgtggtagccagagcctactctgcccacacatgggtcataccagaagatactgggggattttcctgagtaactctcaaccaatgactgacgagttgataaatactctgactcccctcccctaggacaggataactctaagatatgttgtatatagcctcctagagttcccaggtggaactgaagtcgaattccctatggtgtaacttgctagatatacactcttttttagcttctctctctttcctgactcacttccccactcccctagtact

SEQ ID NO: 146438 - DNA, 408 bp, Homo Sapiens
aacaggagatattaactgtttttaaagctttacattatttttttacaagaatttgttttcctgtaattttcttcacagttaaaatatcctaatttatattttaacaaaagagatgtaagatacatcaaatatagatgattcaaggtaatgttttttagacctgaaactattgattcaatttatcatcagtgtttatttctattgtatctagttatctatccaaataattgtattggcttagcggagactgtatgttaagtgtattagttttagattgtgaaattgtgcagtttaggtaaacatcaaatccctttatttttgtacagcagatttccagcattagaaccatgtataacaaatatactagatgttaaagattacacaataaaggaacttggcaaaccaaaa

SEQ ID NO: 146439 - DNA, 374 bp, Homo Sapiens
tttttttagagtttaaactgtcagctttattattgataaaccaattggagaaaatgacattagatctgtgaaccaaagagcctattaatactctgtgactgccaactctctcctgtatccaaatacacatccaaagcctccctctgcacccaaaggaaagtttggagctgtctctagggaggaaaatgggaagtttacagtcctttgatagagttgttctaccccgttagcaccccatcaccacctagcaattaggtaattaatttctctgctggaaggagtgtgtgaggagtgagactacaggccaagagttgtatttcaatggaggtccttcaacacaaaaacatgagaccagggaaaggactttccctccc

SEQ ID NO: 146440 - DNA, 479 bp, Homo Sapiens
tttatcttacaaatggagagtgacttccagattttaataagaaatgaaagttgtatcccatttgatgaatgaagggctaggccacagcttggagacgcagagacggtttttcctatgcagaatgctttgccgtgaaaggagagtgcatcccagaagctgcatgcctgagctcagaggcaatcgtcacctgcacattaggaaggcacctcctgaggccgtggctcacggatgaccaccgttccatggctagaagggtcattccttccttccagcaagttcccacgcacatatgctgaccacctcccaggtgtagacagtgcccagagcccccaggcacagagcggggaaggctcggcccctgcttcccggtgctccacaacctcagcagagcaggccagtggggtggcggcgagcttctcctccttcgccatggaaaggagcatggggttgagggctgggagactggattctaacttccg

SEQ ID NO: 146441 - DNA, 985 bp, Homo Sapiens
  misc_feature (581)..(592): n is a, c, g, or t
  misc_feature (676)..(676): n is a, c, g, or t
gtaagaatttcagctaggattttaaagagactgcattgaatgcataagtcaatttggggagtattgccatcttaccattattaagtcttccaatccatgaatacagaatgttttttcatttattcaggttctttttaacttctttccacaatgttttgcagtttttggtgtataaatcttacgcttcttttgttacatttattcccaaattttttattcttttggatactattgtaaatgtgttttcttaattaaattttcagattgttaagtgataattcatacaaccacaattgatttttacattttgatcttgcatcctgcaaatttgctgaactattagttctaattgtcttttgtgtgttgtttagaatattctacgtacagtatgatgtcaccggaaaatatagttttacctctccaatttggatttcatttctttttcttgtcttttgccttggccaggaacctccagtgtaatgttgaatagaagtagtgagagtggacatccttgttttgttcctgatgttagggagaaagcagtcagtctttcactattaagtatgatgttagttatgggnnnnnnnnnnnnaacagatgcagtttatcagattgaggaagtttcctctattactagtttactgagtgtttctcatcaaaaggtagtgaattttgntaaatgcttttctgtgtctattgagatgatcatatatttttctcctttatcctattaatatggggatatatattgaatgatgtaaaccaagcctggaatcctaagataaaatccacttgtcatgcgtataatccttttttgtgttactaaatcggtttggtagtgcttggtagatttgcattcattttgaaagaggatggtcctgattttcctggaaaaccttttctgtttggtttaagtaatactggtcctagactgaaatgggagattctccctttttaatggttgaaaaattgggattgatttaat

SEQ ID NO: 146442 - DNA, 774 bp, Homo Sapiens
  misc_feature (566)..(566): n is a, c, g, or t
ttccttggttagaaacactgatctccattttgggtagccacaaagaaaagactgaaacattttctcatacccttattagagccaaacgctaatatttgtacttggcagaatttcagagtcacagtgatgggagggcttgaaaacgaaatgggcttcactgggtttctgaacgtttttaacaactctatacataccgcagaggggctctggggattagaacactgcaaagggagattctggacgggggttggggcagggcgtctgcaactctggacttggggagcaacggcacttcccctttggtaaaaagctagatgactgcctgtggagaagaggctggctgctccttcgtgctttcctgcttcctaggactcttgtgggatgggaactctactctttgctgagggaagtgtcccctgggatctctgtagcaggccctcacccaggaagtttgctgttctggaatagggagaagcgtgatccaaatgggcctgttcctgttgtggaagaactctggggctgctttgccaggcctggaatacggcaggcctgacctggcccaccanctctcctcactcacccgtggagagctagaggcagcagctccaaagaggtaggcatcaccttgatctgtgaaggatcagggaacaagatggacttccagtccctgtgactgatgaggcaggagaaaaatgctattcagctctcaaagcccagagcttgtctctactcaaaatgccccgtctgtgagatcgagcagcccaggccagtggc

SEQ ID NO: 146443 - DNA, 519 bp, Homo Sapiens
gcaggttctcatgttttattgtaaagcaacaagaaactcttatgtacactgtccgtcttggggcgcctccatcctgtgccatcttctctaccaggccaggcaggcatgggtggggcgctcagagtcctctgccctgtccctgcccggccaggaccccgcagacctcatgctagacgatgaccgtctgcacctccagctggccctccggcgaggcgatgaccagctcgcctgcatgctccaggatctcgatgtcctctgatgacaccatggtcacagtggcctgttcagtgccacttgtccctgcccgggcggcaagcacagtgccctcgctgatggccgaggccagcgtcatggccacctgctctgtcaggctctcgggggtggcaatggtgatggtgtcggcggaagccgcctctgggcccagcgccgtctcctcgtccatggtgacgttctgcacgatgatctggtggcccggcctactggttgcacgatcttgtgcaccaccttcaagatgtgggc

SEQ ID NO: 146444 - DNA, 357 bp, Homo Sapiens
cgatcgagtcccgctgccctccgttctcaggcccctgctttagttgtttccgggccaccggggacagccatccttacaaggcgatgtgttcaccggtgtccttccccgccacacccacctctctgcgccgtgaattttgtcacttaagagtatagtttgcactccatccagcctgggcgactgagcgaggccctgtctctaaaagagtagagcttggggaaggttctgtgctggctcaatccatatcagaaagtttacccctcggccaggcacagtggatcacacctgtgaccctagcactgtgggaggccaagacagaccagcctgggcaacatagcaagactcgctctctctaaa

SEQ ID NO: 146445 - DNA, 645 bp, Homo Sapiens
  misc_feature (88)..(110): n is a, c, g, or t
  misc_feature (112)..(121): n is a, c, g, or t
ggtgctctcattcctctctcatggccttgaaatgtattattatgcaaatgtgaattttgatactgaatttaagaagaggttgttggannnnnnnnnnnnnnnnnnnnnnncnnnnnnnnnngtcccacatgtggtcatcgtcgcttctttatgttgtaaggtgaattgtaactatgcattctgcaaagggggtggggaggagagggcagaaaggggaagggagtagcgttgcatccttgttcttcagtttctgtgtccatggtgtccccgtgtcctggaggggaaggggagtgagagacgaatgtggtaaggtcagcacagtgagatagagacctctgagtcctcttgccactgttgctggcaggtctgatggccaggtaaattccagggggcctgcagttcctgtcaaccaatgtggttcaggattcttgatcctagccgtgcagtgttaatccagtgcagcaatggaactccacaggctccagtgttctctggaaaaagtactcatcctttcctgaattcagagcccttcaagctcaggaaaccacgcttcactcgtgctgacctgaaagttaatctttaggtcgattttgaaaaactccgcctcctctctcctttttaatatttctttcttcctttttaatc

SEQ ID NO: 146446 - DNA, 341 bp, Homo Sapiens
tttcggtgtggctggctcatttatttaggcaaaaccatcagccaggtgcagaatgcttgggtgcatatgtgggtatgagggtaggtatgaggtgcaaggccccacccattcttcgaggttttctcgcctggcagcccctggccctgcccttttctcaagggtgggccctcctcccgtggtttttctggctcttccccccaccccgggcctcagcctcagccaggagccgcgcacgagctactcactcttcctgtgcctcaggactctcacttctagggaccaagaggagagaagtgacagcggagttaggagggaaagggggccaggatgagacttggata

SEQ ID NO: 146447 - DNA, 278 bp, Homo Sapiens
agttttaagtttacagaaccattggaagtcactacagagagtgtatgtatatttatccaacacagggttttctttattaactttctacattactatgtgggatattttttcacaattatcacaccattattatacattttcattcatttaacaagtgcacgcattaattgtatattttttgccttaatgtcaattttctgttccaggattccatccaggataccacaacatatttagatatcatgtctccttgtgctcttctccactgtgccaggttc

SEQ ID NO: 146448 - DNA, 565 bp, Homo Sapiens
taacttcaatagaagagtagataaaactaaaaacccttattgtctccaagtgtgtggcaaaatagaaaatgtttcaattacattaggaaatcgggtggataacggagtatagttattccacttaagaagcattccagtcaaataatcacaaaaacaaattcagattgcttggatcttggtcatttatggcttgaagaactggatttgaaaaccactttaggctaaaataaatgtatatgaataatgcatagactgtgtatctagaaaatcatgcaataaatatatgttctcatgtacactggaatctcagtgaagaaaggtgtgaacagtactgtttcttcactttaaccaagagactacacacagcaagatacttgcttttggcctattcaagatcttatttgccaggtcatcctaattttctcaggttggtaaaagaagctaatgtttcaagacacctgtgataaagaagtgacttgcttcaagtgcaggtgccatgaaatctgagctaggcaggaccagactctcctgaccctgccaccctgctgcaaagtcaatttggagt

SEQ ID NO: 146449 - DNA, 380 bp, Homo Sapiens
tttgataagcgtaccacatctgtgtcctttgaatatcaagactgtgttacctactacaaagcagcaagccctagtaccgagatagatgccatccggatctctgtgctctatctcagtgcagcagatgaccccttctcccccgtttgtgcccttcccatacaggccgcccaacactccccgtacgttgcgctgctcatcacagcccggggtggccacatcggcttcctggaagggctgctcccgtggcagcactggtacatgagccgcctcttgcatcagtacgccaaagccatcttccaggacccagaggggctgcctgacctcagggctctcttaccttctgaggacagaaacagctgacaagagtaccatttggggtc

SEQ ID NO: 146450 - DNA, 1958 bp, Homo Sapiens
cgttcgcgacattaaaatggaacctgttatacaccccttattgtggcacgttttaaaagtccattgtcaaaaaagaatgggacaaccaaggaggtccagtcgcaccctgtgaatcagccaagaggaaagaatcccctccccaatgttacctgaggaaatgtttcttaagatgatgaggaccttgaaatttaccagatgatcacctatgcaccagccctaaacttccgtgactgtccaaaccaccctcaaggtaacagcaccaaagcactgtgggagaagcttctcagggagagcacccgttcctacagttttttgagattacttagatgaattaattctcctttaggattccccgggatggggcagaaactagaatagaaacgactcttgaagagggaaataatgaagtacaagtgcatgtgaaattgtcaaagtaagtgtgtgagggctcactgcttatcaccccagggttatcaaaacagccttggaaaatgctctttcctcacaatgcctgtgaagtcgtaaatccatccaaatttgctcccccttgagtggttatactcgggaaaggaattattgaaatgtgcaagtattcaaagaaattgaaacatttctccatttagctgcaaggccaagtgagaggaaaactaattctgatcctagaaactaaggcacgctgaagctttcaaagatccaatcatttgaaacagtcttcacaaccatcagtatcctaggcagttatttggctgctagtccttcagtatggtgcttgtgttctgattccaaaatcaattcatattctacgcagcaccctttgtgttaaggccatgatattttactccttctagacaaagctatgaatgatcataaactctacctcgaaactatgatcacccaaggaaatgctctgtcagcagagtagacccttcccagctccattagctgacagtgtcttatagcatggtcttgaacagatttctttagagattcaacccagttcaaataaaaaaacctgagctggttagctacaaatataagagagaaaataaagcctctacacaaagaggaatgttaagacaaattctattcaagaaatccaccaacattatgttaatcctatcatgtttcacagcattaagtatccatccaatgaaatcagtctgcaaagaaacccttaaaggctatttttcattgcacaggcagagcagttgtctgaaatatgcactagtccacacttacattactgaaaactatgcaggagatattatcctgttcttgactcagtcaaccatttacccagtggagtaagttttagcagatcttgctcatacacactagtaagaccagaaactttcccgtggagcctttagttcaactccagtttgtcaaatgttaggaatattccagcatctgatacagagctagatttgacaagacactgaagattttaagtaaaggcttggtgaaatgaaggggaaaaaaagggatatttgtttccaggtttaagattgaagccatagtagtcattatactgtattcaatacagtaacaattgcaaacattgtaagagcaaggtgggcctcactttttctttcttcagtatataagacatggcgcctgaatacttgaacatacatagtacattcaatgtgtaccacagagagagtcacctctacttcattccagcaactcaatttcaaagtttgataacatatgggtcctttctaaaaagcacttggcactctcactagtttaaaaagctcaagtctttgatgtgaatattcatgagattcgtcttttaaaagagaccaatttctcagactgaggaaaggctattcctaccctatggtgtccgtaagacctcctctgacataggggtatggaagctacaaggcttcactccaacaccataaagtacaatatggaaagatttctttaaccgtgtggtctttatttca

SEQ ID NO: 146451 - DNA, 369 bp, Homo Sapiens
ttttcacctttcaaacacacaatttattagcaaaatttttaagtccgtaattctaatgtaaggcacttccactcattttcaaataaaatttccatatgaagttttttattcttttgtaatcaagtcttcacaaattcagtaatgttacttcatgtaaaactttattaaataatgaattttggcataagtgccataattatctttacttctgaaaagaatgaaggataggcatcaagctctgtgcaagctaaatttaaatgaaggtactcttggtctgttttagatttagacttagcagtgttttatcttgttgatcttgttcaaggatcttaaaatcttcccaaggaagactgcttaaggcagttggta

SEQ ID NO: 146452 - DNA, 748 bp, Homo Sapiens
  misc_feature (57)..(141): n is a, c, g, or t
  misc_feature (188)..(309): n is a, c, g, or t
aaatacgtaaggcatatagaaagcaaatagcaaagtgagtattttacaaaatagctnnnnnnnnnnnnnnnnnnnnnnnnnnnnnnnnnnnnnnnnnnnnnnnnnnnnnnnnnnnnnnnnnnnnnnnnnnnnnnnnnnnnntgaaaacaatgtgatatatgctgtctgcaagagaaacactagtttannnnnnnnnnnnnnnnnnnnnnnnnnnnnnnnnnnnnnnnnnnnnnnnnnnnnnnnnnnnnnnnnnnnnnnnnnnnnnnnnnnnnnnnnnnnnnnnnnnnnnnnnnnnnnnnnnnnnnnnnngttaatagaaacaattaacattttataatgataaaagtgccattctgcctgtaatcccagctactcagcctcatgatcaaatggcttcactggtgaattctaccaaaaatttacagaagaatttgcattaatctttcattaactctagcaaaaaatgggagagaaatatttaccaactcattctatgtggccagtattacctgatactaaaacaagtaaaatacattacgagaaaagaagattgtacagcaatatttcatatgactatagaaataaaagccattgacagaatcagcaacatactaaaaggattatacaccatgaccaagtaagatttatcccagcaatccaagactggttcaacatgctttataaaatcaattaatgtaatacaccatattaaaagaagaccaaaaccacacgatcttctcaagatgca

SEQ ID NO: 146453 - DNA, 1167 bp, Homo Sapiens
  misc_feature (241)..(250): n is a, c, g, or t
atgggacatatagaacagtggtacaaaaagcaggctggtaccggtccggaatttcccgggatatcgtcgaccacgcgtcgcttttaaaagcaaagccactttctgttctaagattacatcaagacttgagcaggtgtagtaattaaaatgtgtgcttaatgagcataatagattctggttttaggaaataacatatagcttttatatgaatattttctttgctataatgaaagtcacagannnnnnnnnncctggcttttatggaggaatgaaaagagtggtctccctctaagagtatactatttttggattctcatagcaataatgtcaccattcttatcagagggtaaataccccttgtataggaaaacagacataatttcctctggggagttctctttatgacttagcattttcttctacttgagaaaattcctgtttttccgattatttcatctgtgaactttcttttttttaagctttggtgcaaggtaatagttggtggatccatcttggtacattttcattttatttcatgtctttctctcacctacctgtcagaatcagctatagcagattttgaattctttagttaaaaaatagttgctttactgtgtttcctcatgagtttgttaaatagctttgcattttagtcctctattatgctatgaaaattattaccgaagtttatattgttccctttttaagcctgccttactcttgtcttttgtcattgtctatggtttaatgaagaacacaccaaactaacatttttgtttattttgaggaacaaaaaaacttttctcttttaagggaagttactacacattgagttagtaactactctttcagtcaaggttccttaatcagtccagtctacatcaggactatgacttggggggcggggctaatcctttttgctgttctgagctactattgtcaactgctgttgtacatactgttatgtgtaatggcgtaaatatatttattatgtttgtaaaattcattgcagatcaaggttgctcttctgtgatatatgggatattatgttttaaagaccatcttggaatacaattagagaacttagtattttgatgtactaagacctattttaagtttaatattctactttgcaaaaactttaattaaagatgttatttaaaaaaa

SEQ ID NO: 146454 - DNA, 843 bp, Homo Sapiens
tttgcaaaaatgatcttttattattgagctccaagaatcaagtaaactggactatcattcaataatattccaagataccaatcaatacgtgaatcattgctttctcttggaagcacacattttgttaaatatttaaaacttaattttcataatgaaaatttttcaagatagtctctacatatgcctcctccccacttaaattatttaactcttgaattttgatctgttaagaagctcttttctactctatactaaaaaattcaaatttatgaatcagccagtatcccctaagtgactatcttgggcaaaactagtaaatgcccatacagaccgcaattattataaataattaacatattacaaacatataacttttttacctgtaaatacccataaattaggtaaaatacaaaaactccagcaacacatatgaaaaactgagtaagtttgttaaacttgctgagattcatgccaagtaccacaacgtcgtcaactgacttgatgtgtggtgacattgtttgggttttggatggcacagtgatagaaatatatttcctggaattgttgaacttgagatccattgttattttgctgcattcaatgctttcagagttatttttgttggtttcctggactgttatgttctgtatgtcttttgcttgctgtgtcaagtccccaaggccggtatgtcacccggaagggtgacggcagcctgcgtggcgtctgagctagacggagcatctccccctcccctggtccgtcgccatcacctcctcttcctcctcctcctcgcccactcctgcactttccaccgcggcggtcgcctccccggaaagcactagg

SEQ ID NO: 146455 - DNA, 418 bp, Homo Sapiens
ttttttgagataacaatttggctattattttattaaagtgcatgataatcaatgtttgactgcaatgttaacaagaaaaggggtgaagggattcttggtcaacattgtgaaggaagcaacataacttagtgatttgagaagtgactttttctgaactttagaatgtccatcttctagtcttagaaacttgtattcaccgaaagcagtcactcctgatcttagatttcaaatcctcttaaccatgatagtggcttcattttcaacaggattctcctggggaactttgaggatccttgtaatgcctggtggtcacaaaagtatccctgaagtgtcaacttggttgacggaaactgcagtagtccctttgccttagttcctggtggtttgctggtgacgtttggcattcactggcttgtgg

SEQ ID NO: 146456 - DNA, 576 bp, Homo Sapiens
tggggaggaattcgttttgcttttgctaatcaaagagacacaaaagcacagctgagtcccgaagctggcacacgggaaatcgaggtaccactgtcccctcaccggagcgcgcaacaatcacttggggagcggggaaaaggtttccaccttccccgagcctggggcaccttcgctcccaccgccccagctggtggtggtctcgacaccacgctcgttgcggggtcacacgccagagctggaaaggggaggtccagccccaagtaaagcgacaaagtaaggacacagtggtggccaagggctgtctcctaaccccagtcccgaaagacagtgtggaaagtccgccggcgcgccagcccttgaaactctgccggtccggccgcggcccctcccctgcgcgtccccacctgttgtgaagctgcccaagctccttcttgcccaaatgctttggaaactgccaaaggacactcagaggccagggaatgtaacaggcaagcataaatatgcagaagagatggaacccaactagacgggcagcaggaccggcgctcgatgggggtcggtgcataatggcagccg

SEQ ID NO: 146457 - DNA, 437 bp, Homo Sapiens
ttttttccaggttcaggatctgcttctttggggtcagtgacagaggcgagggaaggagtgaatctggatcagcagtgggtgctccctgctccctcctccccagtagcctctaggcgaggtgctggtccaactccgaaatccaccacccctcgagccagccagccctcccaggagaagctgaagtcctttcctgtgtgtgtgagcgccaagctggagcccaaggatgacatggaggaggcgcttgggggggtcccccaagtctccatgctgctcgtcaacatcagagagatcctttgtagcagaaaatggagtcgcagggtgtgggtgcaagactcagcctgacttaatggggtcccagggcatcacactcaggtgcagcacagaggcgggagccagaaggtgaccagggtggcttggctcggtggcctgggacccct

SEQ ID NO: 146458 - DNA, 798 bp, Homo Sapiens
ccaattgggggtttttctaactcgacttgttaataaaaagtactttctggtttacactaataatttattttctattttccccatatcttagacattaacttagtgtattcttttcctgcaaatccattttctttcggtgtaacatctagctgttgctgcaccatcatcgctgaggtaggcacatccttcactccctctcatgccaaacgatttggtaaatgtagctccatctacccattgtcctgttcgattttttgccatcttcagtccaatccagtgatcagaactgcatttataccgcctaagaaaattcatttcttctatgttgtcaattatagttaggtcggcatgttgagtggaacagttgtatttacttgaattccaatctccttcttctttagagaaataatagcatttgttttggaaaccaatccaatcataggggcataaactctgagaatctcgagttagtttaactatcagagtaataatattagttgttattaaaacaccaacaattataaaacactttttatgtttggtcatcataccgtgcttcttttaatcagcgttttgattttctgctagcagctttgtgtcatgtcttgcagaaactctcttcaaagttgtaactttatttaactttaatataaaaatgttactcttgtttttacagcacagctccaaactagaggtataccacttttgaagagtaactcaaagtcgacgcgtgggtcgacgatatcccgggattccggaccgtaccagctggtttttgacaacttttatagtccaatt

SEQ ID NO: 146459 - DNA, 249 bp, Homo Sapiens
agatcttggtccggtttactgaggctctggagttcaacactgtggttaagctgttcgccttggcccacacgcgagccgatgaccacgtggccttttgcattgccatcatgctcaaggccaacaagaccatcaccagcctcaacctggactccaaccacatcacaggcaaaggcatcctggccatcttccgggccctcctccagaacaacacgctgaccgagctccgcttccacaaccagcgacacatct

SEQ ID NO: 146460 - DNA, 429 bp, Homo Sapiens
tttcttttaattctgtccccgtctagagtctcttatcctagtcttcctcccccctgtacccccagatgtctggcctttgattgctaagaacgcacagttttctcacaggctaactaacctaacaaaccttcgcctttaaaggggggaagtttgcagggcaaggtgtaatcttttccatctcacaaaaagccaaattgcaggatcttttcttccaggagtttttaccttgaatgctgcagccaaggcgcgtgtctcattccccttatccctaacctctgtcgtcctagagttgggggactgagcggtgggccaggacaagcaacggatgaagtatctcggaagccggagaagggtggtctggggctcttgggagcatgcgcggggtggggcggtggggggactgaggtggcgctcccggctcctccggcg

SEQ ID NO: 146461 - DNA, 584 bp, Homo Sapiens
gcttgctcttttccttttgactcggagagcaaatgagatgttctttcaggcgatggtgtggtgggatggaccgcaaactcagcattgatagtggatgttggtcattctttttgactttccaacatcagaacccacttggggaatgggacgcagaacccctccctctgcagaagctgccgcactgcccaggctccttgcggtgagctgagctcaggccctgccggccccacactttgttgatggctgtgaggccgaaccataggtctgtgggcagaaaagtcacatcatgtgtcccgggtgagcgctgagtccaggcgatgcaggtgccctcgctgtcctcactgtgggcttcggggcactgccctgcagtttgaggaatttcctgttaaccttttctcttcctcagtcggccggaagagttttcagttgcttagaagcccactgccgatgctgagggcactgaccagccccggccctgggccctctgtgtggctcactcagcaggtgtgctgcccaacacaccaggcgccgtgagagcagtgggccacaaggaacgaggcgggggctgatgaggagcaggtgct

SEQ ID NO: 146462 - DNA, 602 bp, Homo Sapiens
tttatttatttaaactactttatacctctgaaatattcaacccaggtagacaactgtatatacaaagatttgttttcatcagataagtaccgatcatacctttgacgtgcccaagtggacacagcggcggaggacacacaggagacaggggccatctctggagtctctctgggcctgccttttgtgaaggggagagcacagatgcagaccaaggccagactcacttccagttgagaaatgggacaaatgggacagataaaatctacatcacccaccaagatcctgtctgaaaccttatttcattcctactagttagcaaatgcctttagctcatcattgattgctcacaaaaggagcaaatccagaagaatgtgtatgcccagtatacaggctaacttcatgctgatctcaacattctaatgctcacgaggctcagttactgagcattttcaccacaccaatctgataaggtttataatgtacagacttattggtatttaaatctcataacatccctatgaggcaggaatgctataatccccattttacagataataagcctgagtcactgatataacttgttcacaggtattcagtcaggg

SEQ ID NO: 146463 - DNA, 405 bp, Homo Sapiens
caagtgtattattgtttattgaagcatagcctattaccatgtagcttagtggctcaaaagcagcacacattactcatagtttctccgggtcaggaatccagatgtagatgatggcctgagctgaaggatcagctggagagggatcatcttccaagctcacatgactgctcagctcaagaagacttcgacagtgaattattccaaacctgctatcttgatggctttagggttggccaagggcgatataattccaccatgtgagtatcaacagagtgcacagtcctgcacagttcctgatggagccttatatcatctggaagtcatgtcttccgaaaacgttagtgggatcctgaatacactctgctaaatgctgtcctaaaatgaggctttctgggatatgtgaaa

SEQ ID NO: 146464 - DNA, 505 bp, Homo Sapiens
  misc_feature (469)..(469): n is a, c, g, or t
tttgggggagaaggtctttatttggagtcaggtgggtgggagcagggaagggtcatggctggagggtaggtccaggtggtccgggctctgtgtctggtggtagggtgggctctggaggtgcagacccgggggctgcctagtgttcgggaacgcagcttcccgtctgcaggggcgtgaaaatgtcctcctccgagagtcccttgtgctgcaccaatttcttaaattcttccagggcctcccggttggtattaggattcctacccacaagctttcccatgtggcgcaggcccccatggtgctggtctttgcagtaaaagatgtagtggtccgtcctgggcagctcctgcaggtatatgagcttcctgcccccataggcgctgtatttgccaggctcctccgtcttccgcatcaggattttcttctggatgcacctatcctccctcatgaaggtgaacgtggctttcaactntccgaccgccgaggctgtcacgttcactggggacac

SEQ ID NO: 146465 - DNA, 650 bp, Homo Sapiens
  misc_feature (261)..(278): n is a, c, g, or t
gggggcccactccaattgtagaagactcatgtttatggatgtgattaacaaactgccagtgcattcagctgtggcgtagaatttttagctacttcaaatgtgcattcaaaataatgtatttctcaattatcaaattctttttgtactttcagataatccctctacttgagcaaaaactatgaattcatcatttggctgtggtttacatatagtttgatgattcttttctatcttaccttaaatcaacaagcatctaccagnnnnnnnnnnnnnnnnnngattacaggaaaaaattccaattaacttatcaggtacagaaaatttatttgcattaagcatgttatttttcctcaatctctcctgtttatgactaactgcataccattcaactaacataaaagtgtttactaaaagatcagagaagttatccaccttcatagccatttggaagagaaaaaaaatctttctactctttccaaaatgggttataaacacatccctagagaaatttcaaatgaatgtattcctctgcaatttgattctgcaaaaaaatgtatgcaactgaaaattacacacagagaatatttaagtcatgactatggaaaaacaattactatatttggatacacaaattaggcaactaattattt

SEQ ID NO: 146466 - DNA, 437 bp, Homo Sapiens
ttttggcagcttccatttcctttatttgctccccatccaaaattctcctccctcttagggatgtctaatttatacaatttgtctagcaggtatggtactggtttaggctacatttgggaattccagctggggctgtgaggaggtgaaagaggaggacggttcccagaaggtgcataacaggcattttcagtgggggctttccttctgccactccgataagcccctcgagttcctgcctcctccctaggaaagggtaagcaagacagaagaaaaggtcaacaaccacaacctagacagtgaaaatgtctctgccaatttcgctggggccctccaggggtagtaaccctccaacccacttaatgaatttagagacacattagattcatttacataacaatattttaaagaccacacgattgctttggaaaattgtctta

SEQ ID NO: 146467 - DNA, 301 bp, Homo Sapiens
gaaaaataactggtagaccgtcttttctaccccataggttgaaggcaggagggagaccgacctgccacagaaacctgcaagggtgtactgccacatcgttctgaaacccaagctgcaattgtacaaatggctcaaaatcccttttgactaaaggataaagattgaaagcaaaagacgtattttgaccaagtgtggagggaaaccaactttgaatgaaacacgaataacagataagatagtgaagaaagtgcttcactgtgattctcttaatagtactcaataaaagtatcttttaagtttt

SEQ ID NO: 146468 - DNA, 504 bp, Homo Sapiens
atctatggctcaaattttaatctgcaacaatgagacatttacccataggttccatgtatttatttagtcatcattttctctgacaaaacatctccaaaatgatgtcactggccaggctggaactcacccaggcactttttgtacttcttgcttaaatacaccacaagcacatataacgaagggggttttgtcatgcaaaatgagactgaacaaagaattattaatccagttcaaattactgtaacttaatagtagaattaacaccacagtaatctgtgccatgagaaaatgttattaacatcaatgattcaaagatagatctttaacaacttagaaaaaataactacatgtatgttatttcgtagttacgaggaaaaagaaatatatcacagatatactacttgctggatttatcaacagttacttctatgttgttattgttcttggtttaaagtacaactgacagtctgattccttaaagaactatctacacaggaaacaagt

SEQ ID NO: 146469 - DNA, 446 bp, Homo Sapiens
tttgccggtgaataatataattttattttacccaatatatccagaatattatcacttcaacatgaaaccaatctaaaactattaaatgagatatttcacattccccacctccttattctaagtcttaaaaatcaggtgtgaactttgcacttgcagcaggttttggtttggatgagccaaatcccaagtgctccagagccctggtggccagtggctccaccctggtcagagagaccccagaagcctcagcactccctgaggaccaaggaggggggagggaggagggagagcagagtgtgacttgcacattaggcgtgcctgtctgtttatacttgagattagttggctgcttttaaataccagacagtttcacataaaaatttgaatgacctggttttcttgaaaaattagaaggtctcagaactctgcacccaggttctcacaga

SEQ ID NO: 146470 - DNA, 578 bp, Homo Sapiens
tttcatgacattgatttattggagcagccaggtcatttgtcctgtcgaatagtccatatgatgtatttgcctcattgcttgctcacagcggtgtttaacctgtgcctgtgtttcgtgcacttgccgtaagctggcgatgagtccaaccgctcaattagatcccggctgagctgcgtgtggcagagatgcctgcatgtggcactgtgaacctcctcttagatgccttcaggaggcgtgtgaggtctggtggccccacctttgctgatgggaggatggatgaggggccccagtggtggcagcctgcctcttccctgataggtttccactgctcctccatcttgaggttttagcgtctgttgatggccattgcctagatccatatttagggttgcaaaatggtgctgggctttggcttactccttttcgtagcataattctccccacaccaggctcccttgcatcttatgcctgtctcttctaccagcaggaatcacatcttccctgtatttctgacttcctagcatagctgtgacttgattgttcaaaatgaaggaatgtatgactcctgactgacgatg

SEQ ID NO: 146471 - DNA, 503 bp, Homo Sapiens
tgcggacaaatttaaatgcttttcaaggatagagtaatatttttcactctctttgtcaaacttcttctttccatcttttgctgcacctatctgttcttttcgaaatttctcaagtggtgcaattaatacatcgttagcgttttggatcattctccaatgtggcttgtctcatcctcatccaagctccagttacaacaacaccaagaagtttgccatggaaatgtcaggctattctcatttttatcgcctgctttttgggggctggcagcaaaacctcttaaaacattgccagtcttcgcctttcttcttctactgcaatgagtagtcttgcaaattcttttagtgactgagcaatactaatttcatcatctgtttcagcatcaccaatacattcaaactggaaatcttgcaatgactgggaaaatttctgcactgccatagacagatctctcttttgtctgtaatgtcagatcctttagatgatactcttttaaatctaaaac

SEQ ID NO: 146472 - DNA, 667 bp, Homo Sapiens
tttgaatatcttgttttctttaatccatcagggggttgtcgcacttattaagtcccacagctgcagtttagcacggaggggctgtcacgtcaccaggcctccctgaaagtcctccgctccagctctgcgattggcgctggggtaacaggaggggaagcgggtgcttttcatcgagcctgcaagaggggggcccaggcatcgaggctggggagtcgtgggtagagccccgattccagccaagacgccacaggacataagtaagcgtggagggcaaaatgactacccaagcgcaattctgtaaggccgaagggacgttcttccaacctcttaaatttcccgggtgccacgcccctcaattgacggccctggattccaaggtgtcgcgccggaagtgacctcacggtggtggcgtggagacgtgggggcgcttccggcagcggcggcggtggtgaaggccgatgctgtgggggtgggcgtggagagaattcttctgtgggtcctctggtgttgagtggtcggcttggtgtggtgtgcggaggagctccaggcccgtcggcgcggaggtgggagcgaagggaggctactggtttgtggacggtcgtgggagggggctgccggggttgctttaggcttcagagttccaggcctcgtagcacctttatagagg

SEQ ID NO: 146473 - DNA, 625 bp, Homo Sapiens
ccaggagttgtgccgacgacggaaacttttggactgactcaaggattccatgtgcctgtcgacatagctctttgagcactgttgctgctgcggggaaacggcaacatcctggctcttcacatctgtcctcttagggatattctgaggggcactgctggaagaggctggcttcttgacaaacttgcctgtgccattctgattgatgcccacttggcagccagcaccagaggggcctaattctgtttgatgaaggtctcccaaatgttggttgtctccaggtcctggtatctccagaatttttaactccgtaatgtcacctgccctgaaggtgacttctggaacaagacacttcactccattatggaaaggccgggtgagagaaatggtctggctgacctgatccacagctgacactcttccctgatagacacccaagctatctccacaattgatggacacaatacttcccagccaatctgtagccatgtttcacacgtgagaccactccgcgccgacgggcctggagctcctccgcacaccacaccaagccgaccactcaacaccagaggacccacagaagtattctctccacgcccacccccacagcatcggccttcctcgtgcc

SEQ ID NO: 146474 - DNA, 418 bp, Homo Sapiens
ttttaaggatttggaaatttttgataacaatttagtgggggcgatccatcaataacttcataaatttcttccagagtaggataacacagttgaaccacaaatcctgttcccatcttggagtctcactcagacagttgaattcaaattcacaagtctaaagtaccaagatacagtccaaattggagtacctggagagtccaagaaagctgtttgtgatgtcacatgaggtgtcttcaatagtgttgatattcaatcctgagagaagatgtaacccaggcgaagattttaatgtagaggaatctggaactgaggtgagatctggaaagccaaatgtaggtactctgctaccagacagaagtaagttttgtctctggtcagacaacgatctctttctgtagcaaggacgctgtaacagcta

SEQ ID NO: 146475 - DNA, 671 bp, Homo Sapiens
gttctaagaacttcggacatgttatctcactggtataagtactgaggcgcctacgacataacacgcacctggtaaattaagtattgaaaaaatgctatggggcagaggaagaaatgctaagcttctgtgagaagagaagacagcttgttacacaggtgaaaagaacaagctgcagctgagagaagaaaagtataagagttgctaggtgtggcaatctcaagacttttcaaccactacaaatttaaacagccaccctaaatcaccccaaaggacagactcgagttgttctttttgtctttaatgtttgcgcctctccgaatcagagaagaagctgccaggattccagtacataccaaaacatgatgacaataccctcaactgtgcaagcttttgtgcatctaccgctatgtaaaggaagctgatgtcagtagactggggggaacagtaaggcatgtttgtgaccgaagctcaatttgccatcacagtgtggccacacctacctcactaatattctaatagtgggataaataattcaatagggataaagcctggattttcctcttattctctcttagtgcttacattcttggcatgatatcgatatgccatagacaagccaatatgtgagtgtactctatctgaataaagtatagcctttctacattgaaaaa

SEQ ID NO: 146476 - DNA, 384 bp, Homo Sapiens
tttgttttgttgattttgttactttattaaaaattgaatccttgactttttttatatttacttcttattcttgtagaataagtgtacttcatgcttcatactctggaggtactggctgtgctgctctgagtctttcagggagcaccatcactgtgcagcccaagcttttcccagacacttctggacaagtgctcctaagaggcacattcacaagcaaacatgatccaaacagcacatgcagattcagggtaagtaaatactcggacacgaactgccagtcgcacttggtctccacggcaacagattatttcttcacagaaaggagatcgaagacatgtggcaaatgcacgtcttgcatttctatacacaaaatgtattgggaac

SEQ ID NO: 146477 - DNA, 547 bp, Homo Sapiens
agtttgtgagggtaaagggtagcagtacatatactgctgttgaaagtttacatttctgatgacttttcaaatagacaattttttggtaagtatcacactgtaaaaatgtatgtgcccttcacccatcaattccattatactaaaatatctctaggaaatagagatacatgcaatttgtttttctcagcactgcttaaaatagcaatgtatttggaaaaccccttataatggattttataaattttataaatttatcaataaatttcagtgcatccataggatgggacaatatgggacctttgcagatgtcagtagatacagatgtatgttgaggtgtgaagatgtactctgaaaaaaagttggtttgattatacatacacacaaacaatctatggtgtttgtaagccaaatatgtgtacaaaatgtaacatttcttcttttctggcaggtgtattgtgatattttctcttatctgtgatgtataaatgatcagtatgtttaaaacttctagtaaatgttttttattaatgaaattatccctgggaaa

SEQ ID NO: 146478 - DNA, 515 bp, Homo Sapiens
tttttctttctttcagagagagattttaacacacctctcatagtaactgtgaaagcccagagatattgctgtgtccagggccttcttgcttctcactccggctaaataagaaaacactagctgtcagatttggatggttttacttcattgtacttctctttgaagtctcttggattcatctgtagagcttcacctacttcatccaatggtacattgatagactcagggattttttgatactccagaatttcccatatctctctaacatcaattaacataatatttttagaattcaacaggtttttaagttccttataagtgacatctttagaaatagcagtataaaaattgtggcagtttccctttattgacgtcaaaccttcagaccagccacacttttctattttcatctgtcattttcatggcgcagagcgcagcctccgcggacccgaggaccgccctgcgcgcagtctcgagcagcaaccagggtagcaccattgcgggccggcggccgc

SEQ ID NO: 146479 - DNA, 953 bp, Homo Sapiens
aacaatttgtagaagaaaatgatttattgctctgtggtattcttcgcattctagatgttgccagttgcttccttgtaacgtttcttgacgtcttcccctacttcttttattttctataaattgatagtttgacaaaaaatagtttagaatacttcataggttggcttgcacacttcttacttgttcacatcatgggcacgtcatgactcgtgtgtctctttttttacatgatgttgtagatcatattattatttaacaaagaatctctttttccattgaatgcttccctttccccagacttcatgagagaagtatagctcccaactacatgggtattgaacttagcaatttggcttgctgtggcttatagaacgtgaatgtagatgacatagatcacatcggtgccaagactacaaatgcgtttgcattgtctggcttagcttctagaattcttgccttctgccatgacaatcatgtgtttcaaatagtaactgcttcttttttcttgggatacagattgtgaagacagaataagtcaacctgaaagcaaaccacagtttggaaccaagccaagcttagcatcagttgacccacagatccaattttttcataatcaagaaataaatgtgtgtgtgtacatgctattgagttttgaaattactttttgaccaacatcattgcagtaaaagcttagtgatataaatattaatattgatcaatggagtggggtgttatcagattgctctgccctcttttaacttaatggttttggcaaccattgatgattattgcctagatcctttacctcattatgggatgcaatgtggtgatagtctaagtctatcatttctcactcatatattaatcccagaagagtacctgagaaggaaacttgggtgtggttttgtaaaccaaaaataaaattctgaagccgctccaacatcagaatggaa

SEQ ID NO: 146480 - DNA, 447 bp, Homo Sapiens
ttttttatttctgctttaattagccagagtttatttttttgcttacagttaagacctgacttatgataattatgataatataatttcaatgatgacaatggtgatgataagaactgtgttgtaggaagcaaaacaatcactcagtttgtaatgtggaaaatagataagagaggagtgagatgggaaactgagataagtgtgagactaattatattacaaatgatgtatggtggcaagagatggcatggctgatggttagtatctaactgtgtagatggacagaaaggaatagattcaagagagacattggaggtgagatgaacttgagttttttcagctgttggaccattcacagtacagaaactttgagagttgttggccttaggtgctaatgttctttgttcaaccagagatatttgggctgcagagagtacagctcagcttcac

SEQ ID NO: 146481 - DNA, 745 bp, Homo Sapiens
gtgtgagccaccatgcccggcctaagaaatacttttaagtatattttcattagctagaattgcccaatctgtgtaggtataaattacttggtatagggagagagaaagcctatcttacctgttgctttcttacttggtggtaacatccagcagttagtctatttataaacataattactttttcacatatgaaccataaaatatttaactttctgctctatattgtttgtttaccgctgtatctcccacagcttgaacagtaccaaggtacgtagtaggtgctcaatacatgactattgaataactgaacatatccaacacatgttctccaatgtaaaggatcagagatgccacatgttctccttgatgggagagacccttccacatgggaatgatggggaaggagttgtactccctggatgttcagtaactgcttctaggagaaaaggtagagtcctatcactaagccgccagatatttatttgtgtgtggctagaatgggatgttttgaatcttctgttacaaccttgggaacgtggctgttatttcaatttatgagccagaaattttcacatcccgaaactgcccagagttccaccagcctgggtatagtatttgttataatctagtcgtaacagtagttgagccaaatctgagttgatctgatgattccgaacactggagagaatcttgaacaggagtgaagactggcggctaaagctcttcacgagaatgctcagctggg

SEQ ID NO: 146482 - DNA, 557 bp, Homo Sapiens
tttttcattcaacaagtgtttattgagcatctactacatgccagacactattctagaaacctgggaaaggaggggttagggtagcttggagctgtcccagctgtagctctgtctcccagaagtgaggtctgcaggggaacagggtctgggggtcctcctgcctgggagagggaaggctgagtgtataaaaaggtggaagcctctagaaatgagaaggctgggtgtgtgggactcatgctggtgccttcccagacgaaggagagggcccagaggaggcagcttcctggagcagagacggcagcaggagcgcccgtgcccggcatcacctcctcttcagcacggatatgcaggacttcttgaggggcccgatctgcaagtgggcgtccacactctccaggaagaaggcaggcttgagtctgtgggtgaagagccccgcaaagtgactgtccaggcggctctggaaggggtcaatgggggaggccgggatgccaccccggcgggccgaatggctttcagcctccgcaggggcattcttgccgtcccgtcagcatagaggc

SEQ ID NO: 146483 - DNA, 427 bp, Homo Sapiens
ttggtctctaaagtacccttcattcattaaactaaagcaagcctggatcaatgacatccatggaataagtgagtcttttttatgaaacaaggaaatctactaagacttattttgacactggagtgtcatgcccccatcctcaatctaacatgctactgcgttgttagagggtaaaaaggccgtcttcgtcttcccttccatgctgcacgtcattgaggacatttttactatctccaatgtagtctagccttgtgtgtttctgcgaacaataggtttccatgagtttccctctcaggagaaacgccacaaacaatgcgaagagcacaaatcccaaggagggggcgatgatcatcagtagttgggagatgggcatttcattcttcattgacatgggtattccatccatctgtcctgtttttgttgtttt

SEQ ID NO: 146484 - DNA, 420 bp, Homo Sapiens
taattttagaaatatgtattttgtggacttttaaagcattatttaaattaccaaggttgacatttttcttgacaaataagctgactagactatttccattcctccaggttctgaagatctcctgtcctagcatggagactctggagatcccgagactacctgaattcttagcaatatccagcacttccttaagtatcaagggctctgtccctcactgtccccattatcccagcagcccactctccagatgccattctcccctgaaccaaggctctggactctcaggacagactaacctgggccattttgctccaggccccacttaaggcataaagcagtcaagccagtaccctctggggtcagaggactcccatctgtctcagctgcagtgtctcacgggaggctcctgtccctgttgcc

SEQ ID NO: 146485 - DNA, 500 bp, Homo Sapiens
tttttgcacacttagaatgggttttctttatataaattattcatcagaaaattaaaagggaaaaaaggctaggggtaacaacaaaaatacccttttagatgaatataaaataatccttagagaaccatcgtctccttatccttggcaagcatcccctcagggagagctgctgttctctttccacccctctgatgtcagccccagttcctgggagcccagatccacagcgttgtcagcctaagagagaggttctctagaagaatagatgttagcttgagaacagaacattacaaggagagtacacacgccatagtaaaccatatgcctattcagggaggtcaaggaagacaaaggtctttaaaggaaaagcgagcaggatcacagtggttttgagataattctccttggctacaaacatcaataacaaaggtcattccagtctgaggttggacaggcaattgctgggcagttgtccttgcagaaatattttttgtgtaagg

SEQ ID NO: 146486 - DNA, 384 bp, Homo Sapiens
  misc_feature (183)..(191): n is a, c, g, or t
cacggcaagctggcttccaactataacattttactctcaaaggtctccttaaattgggcttgtttttacttgtcctatttaattccccactattagcaggctttggatttgtgcctaaggaataatatgcaaaagaaccaagacagaatgtatatgaagaattgtttttaattttgtaaattnnnnnnnnntttagatcgttacttggaaatggagcctaagtctgtggtggacagataataattatgttttcctgggctgaattatgtagacttgtgtttgacagctatgggtttatttcttagaacattgttcattttcttttctcattatgttacttctagtgttcacctctgtgattaaagattctttggtgaaatagaa

SEQ ID NO: 146487 - DNA, 375 bp, Homo Sapiens
tttcacattaaggagtttgtactttattctaagcctaataggaagctgttagaggtttttaagcaaagggatataatgatctgaaaagatatctcgagctgctctgtggaaaactaactcttaaggcacaatggggaagcagagaaatcagttaggaagataaatttcagacaaaataatgatgacttggacctgggtgcgtagggtaagaaatatcttttccttcttcccattttaggctcactggctggggatccttacacaacatggcggcctggtgtgtctggtgtcctagagcggacgaaagcaggtgactctctagtcaacttccgacttggactccgaagatcggtacgttatttccggggctgggtt

SEQ ID NO: 146488 - DNA, 336 bp, Homo Sapiens
ctttctttctataaccttgaaagaatacctgcccttctctaaaatgattcaactagggctgcttaccaggcccacagaaagccctgctgccagccggccttcaaaatggattaaggatttggagttctcttcatttctccactcacaggatcaaagggtgcgggcgaggactgggaagcgggggaggaaatgcaagatggaacaggccccaagtttttaactggcataagagcaactgtggttcatcctaggctcagctgagctgcagggagcaggcccccatgatctgtacagcctgtgcccttgagaaataaacacaactgccagaaagcagca

SEQ ID NO: 146489 - DNA, 435 bp, Homo Sapiens
ttatacctaatggttgtttgaggtaagtgaggaggagaggtgaagaaaaggtttactatttatcacatttttcatagcaaagaataagtagatattgccttaattgatacattttaaaaattgtcatttaagtataatatttaagttcagaaaggcaatgaccagaactaaggaaaaatgtatctaaagacataaaggaggagggaagaggagatatgatagatagtgcaagattcctaaacacttaattgtctggatagtgtctaaaggtgatgaatcatttaatagagtatttgggaaaaatataattcctttatagaggtacaaaaattaacaggtattaagtaactttctgttagtgttgaccagtcttaaagtttcagacaaacgaatgacatcatttagagctagatatggaacacagaacacagagtg

SEQ ID NO: 146490 - DNA, 363 bp, Homo Sapiens
ttttctccgggtgtttattcatttcctggccaattctgctttggaaaaggagtgtcttttatgtcacctcagggcacagtatcaaccctgcactgggtgtggccgcccccacttccatttcctctttcagtcttcaggtgctcatggagctccaggctctctccaggccacaccatgcacatccacccacaggccgctgagaaaaaggcgccaagacgccaggtgaaggtacaggagccaggcctccaagggccgtaggagtcggatgggcggagggcctgggctaggcaagccttcctcgcggccccgccccacggcccgactccgcccgcccagcccggcgccctcgggtcggctgagcgc

SEQ ID NO: 146491 - DNA, 443 bp, Homo Sapiens
aatccattggttatttgggaaggtaggttaaatttcacttatttgtgaatttcccaaatttccttctgctattggtttctaattttattttactgtagttagagaacatactttatgtatttcaatcctttaaaatttatttaggtttcgttttacttgctaacacatggtctatcctggagaatagaccatgtgcatttgagaagaatgtatatttagctgctcgttgggtggagtagtctatagatgtctgctcagtccagttggtttacagtattgtttaagtcttccatttctttgttgcctagttgttctacccattattcagagtgggtgttaaagtctccaactctcatgtttgaattgtccatttgcctctttgattctgctatttcatgcattttgggctctatcatttctcagactggacaagtttgctgatt

SEQ ID NO: 146492 - DNA, 372 bp, Homo Sapiens
tttttttacaaaaagatcaaaatattgtatttagtagtgtatatacaataaaatataaatgtatattattttcacacaaaaaactgaaaacatacagcaatattttaacagtggtctatctggatggtggtttaacgtgatttttattttccttgtattctctcaggttttccaaattttctaaagcaacataattatttttatgatctggaacaatgtttctgttgttttttgatatacctgcagggctatattgagtagagagaggtatatggccaagttcctttttatcagtcatttgctggctctacggttagcataggtctttgcatgtacccctttctacagtgaccaggcaccttagctgcattt

SEQ ID NO: 146493 - DNA, 368 bp, Homo Sapiens
  misc_feature (41)..(41): n is a, c, g, or t
  misc_feature (49)..(49): n is a, c, g, or t
ggtcagagtgttagagtctttcctggacatagaaacccttntgtgtganttcagataaaacaatcagcatgttctgttaatcacagaggtcggagctgagaaccattagcgtacatccacctctcccgagagtgttcacgccttttccacgtggggctaggctgctgctgagtgtggttctgctggctgtgggtgtggcctctttcctcaaccacagccatcgcaggcctgccacagttttggttcttcgtaaaagagaataggcaacacaagagaaataagataagttagatttgaaacctttaaaaattatttcctcaaacattgtatatattttctgcccatacctaatttgataacaattttaa

SEQ ID NO: 146494 - DNA, 443 bp, Homo Sapiens
ttttgtagaaatatcaatattcaagtaaacaaatttattaaatccaacagcaggtaaccttccaaataaaaaacattaaaggaaaaaatgtagacatcaaagacaaaaatgtgtgtaacaagtcaataaaaatactcaaggggccatttggagagtgcaacagtgcagaaaatacaaacaaaagtattaacttttgtcaagtttgtacaacctcaacaaacagacacactggtcacaaaccaagagggatccacaaaggtggagggtcacatgagcagtggactcatcacctcagcggcttaaggcagggtatatctgtgggaccaattcatccaagccccatgtgcctattgcttcacattccccctttaaaacctagtcatattcattagtgcaacaggtaagagcaattaagcacagacggagctggggaccagggtcag

SEQ ID NO: 146495 - DNA, 415 bp, Homo Sapiens
tttgattattcagagttttatgccacaaaatgaaggctgtctattttgccacaaataaaagcagaaaagaaacagcattacttaagcaaactcaggctcctgttagatggaaaggctcgcttaccaggttcatttcctgagtcaattcagaaaggattattactcctattatgcagtgttccacagtaccctggagaaacttcttcacatcagcaataatttctctgaagacaaattggtctttctgaacctcaaaccaccccaacttagtgattttagcaatgacttgaataagagcttggatgacaaagggagccagcttgggctgtgatgccacgtaattcagaatgtagtttctgatgtccatcctctgctcaacaggtaaaggactgactcggctgacaagttttgaaag

SEQ ID NO: 146496 - DNA, 329 bp, Homo Sapiens
gaattgcttcaacaattttatgttgtaatccatgtgatagaatactgatatattttttaaaaaagaggttagctccacagaagtgacaggaaactgtccacaatgtgtcctgaggccaaaacaagttgcagaacagtatgtaaacagtttgtaacatttttgtaactacataggtaaaaatacttttggctttacttctttgtctgcttagactcccagattctctgatgataccactctggtgcttgtcctaatgggaaagtttcctgaaatcctgcgatgagtttgacagtttcaaaattccttcaaacatacagtgaatgacagac

SEQ ID NO: 146497 - DNA, 468 bp, Homo Sapiens
gtatctcttcaaacagtgcctgggttacagtagcttctcagtaaatatttgttgaatgactaagtgagggtatgacttgcaaccctggttctatcacagaacaacctgggccacatgggagaagaatgtcacagcctaagacaagaaaaagtagtgtaaattttaagtcacccagataagctggcttctttctgatctgactagatccactctggctgctcagaaatacagtcttttgccaaacaactgcatctccaggaacctagttgtgtcccactaattacaaaaataatacatgtgagaattgccaggatgctacaactattaagtttaatgggaaacaggatatttacaagattcagattatttattaattacaaaaaagaaaatagtaatttaacagtggcagacactagctttcttacctgatgctaatccaaattaacatcacttctaatgagacaaatt

SEQ ID NO: 146498 - DNA, 476 bp, Homo Sapiens
tttccagtgtaagacaatttttaagctttatttttatgaaacatttcagattccctcatatcacagcacatcaataagcagtatgtacatagactgacttttatagtacgtgtcatgtcccaaattcccaatcctaggtaagatatcaagttacaaaatacaagtgccgataattaaactataggtagtatattaaacaaaaatgagtttttagcaattatgtgaaataaggctttaaccaaagcaagacttaatgccacaaggtgtcttttttccccaagagtaattaattcaatcaagcccatgattccaagctcaagtaacaagttttatattcttgaagcaaacaagaaaaggcaatcaatgcttaagtggtatattttagtatatattacatttctggacaatctctcattgcattcaatttttagaacttgtcttgggtccaataaaacaaaagaattagagaagaaagc

SEQ ID NO: 146499 - DNA, 888 bp, Homo Sapiens
  misc_feature (768)..(802): n is a, c, g, or t
gtagccggatcagccagctgacgggaatgtgtctccgagaccaggcagcgatagcattctcccaccaccagcctttatctcggttcatcaccagaaactgtaaacttgttgtgggctctggccagtccgataatcctacatagcctataaaagtagttcctgtgaatgcaatctgcccattctttaagaattgcacatccactgtcagcttgcgtaagacattcccaaaaggataatccaaattccgaccatggtaaatgtggcctctggagtcttgagccacaatactggtgcagaacacggaggactcgtaggccaggttgaccagaaggcagtccgccaggctgaggttcatgaagtcacacatgccgcggatctcgccggtgaagggctggggcaggaagcgctccagctccaggaccacttttccgattaacacgtgcacccacttggggactctgtccccgatgacttttgccatcgcggcgcgcaccaagtccaagtcgtagtgccgcagcacgggcagccagcgcagctcggggaccgagtccaggctcacgttgaagcgcggcgctgctgggggcgaggcggctgacagcctcgccccggccagcagcagcagcagcagggacggaagccccgggcgcgcctcccggtccgcggtccgcatggctcgggctccagcggccgcaacttggagacctgcagccgctgtcccccggccgtaatggccgaattcccgggcatatgtccggtaccgtcgactgnnnnnnnnnnnnnnnnnnnnnnnnnnnnnnnnnnncggccgcttcctcgctcatctactcgctgcgctcggtcgttcggctacgaagagctagcgccctataagtgatctataaattcttt

SEQ ID NO: 146500 - DNA, 681 bp, Homo Sapiens
  misc_feature (655)..(655): n is a, c, g, or t
gaaccagaagttttcaaatctttattgttgaaactgtaaaaacgctgaaccccaatttgaaaaggggttcagaccccaatttgaaacgggatttatccccctgtcttcatgccaccccatgccaggtcagagggggcctagccatctctccagaagagttcaactttgttcaacaagcacatattgagctcttgttgtatacctgggctctgtgccaagccttgaccatacaaagatgaaaaagaccaggtccttgacttcagattgaaattgaacatgccctagttgaagttggcagtgcagggactggagtgcagattccagagctttatcttttccaccacctccgcccacccctttcaccaactagaggtccctgaggcatcttcctaaaaccctaaggctcctagaaatgttttgaaagtaccagattagacttttttcaagcattttattatgaaaaaattcaaacatacagcaaagttgaaagacatttacaatgaacactttaatatccaccacctggtgtctaccattaatattttactgtagttgctttatccaataagggcaccctcccagccctgcaagatttcatgactcagagagggctatagtgaggagtttgagttctttttgggaaaccctatgaatnctgtgatggcaacaccagcggctgca

SEQ ID NO: 146501 - DNA, 1462 bp, Homo Sapiens
  misc_feature (427)..(436): n is a, c, g, or t
cgtctctacaaatggttttctgtcacgggttttacagtggtacccgaggaggtgccccttttcttaaggccttaccttcctggggggatctaagagctctctttgaaaaatttgctggaaaatacaggcttgtatccccttcttttcgatccgtgcttcttgggaatggtatccttccagtgaagtctttcctggttcggtgatcagttgttggcccatttcagagccacgttttaaaatgtcagtattgccaatgttctgtgccttgccgcaacttctacttttgttccgatttcttcagattctaaaaaggtatcctcatacttctcgttgtgttctgagtctttggctgaaccaaatttgtttatgatgcccagaagttttttgttcagaacaaaaatttgatcctgaactccatgatctttcnnnnnnnnnnacaaggctgttttcttcactggtcacactgagggtctcaccacatgctccagcatcagaaatgcagacagttctatcaagctgacttttttgtgcaacaggttcactttcagcatctgctttattacacacagattctcttttgctatcactttgaacaaaacctgaacagctcttcctacatccttttttagttttcttaattgggattcctttcaaaatagtcacctttcctttgggctttctaacctttctgaagttaacatcatcaacaccctcatcttctttcaaaagcaaatgagtggaagtaaagttagagagtcctctgctctcctgcaactctgaactactacttggcggcataaacacatcctttttgcacttgcttcgggtcctgaggttccagtttgaattgttactttggttttgtagatgggatgtcagggctgccatgctgcagtctttatatcttgacttgataccccttttagaaagtacagtaaaatcaaaatcttctggcttaagagaagtctctccatttttgtgaagataattagcaagtgaacttttggatctgaacttcagtccttgtgggctgataaagtacacatcaaatcttcctgctgtcttcccgaataacctttgcttcacaactctttcccatccacatgggacagacttacggcattctgttcctgcagtagcaccaaactgagcagaagcgatgggttcttgtagcaagggattacattcactgcttctttttatcatcatttgttcctcatcttctcccactctttccaattccatagcaacatcttctttgcggaggtcattcggcgggtctgggactaggcgctcactagaggtgacggtgggggcagctccgcggtcccccagactcagactctccagcccagtcgtgcccatcgagcagggtccggctgcagcaacgagcccagcgccgcaacgcccagggtgtggggcggagtaagatgtgaaacctcttcagctcacggcaccgggc

SEQ ID NO: 146502 - DNA, 761 bp, Homo Sapiens
  misc_feature (442)..(508): n is a, c, g, or t
ttttctacttagtagttcatccagttgtttttccaggtagattgaccaaaccacagcataatgacccactgtgagaataatgaacaagagtaatgccagctcagcattgctcatttttctcacccgcctgtagtagaatacaggctgtcgccaatctggaagtccattgatcagaatatcatcatacctctgccttcgttcatcatcctttaaaacttcataaatggccaccaattgtctaaactgagtttctgcattttcatctttattcttgtctggatgtaaagttagtgaaagcttacgatatgcttttctgatgtctgcagatgatgcatcctgctgcaccccgaggaactggtagaagttgagctgcacctcctccactaagtcaaacaactccaggtctccgctctcccagccgcgcgccggcgccacggcggcnnnnnnnnnnnnnnnnnnnnnnnnnnnnnnnnnnnnnnnnnnnnnnnnnnnnnnnnnnnnnnnnnnnagctggcggcgtccaggaagctgcgccggctgggagcaaggagccgtcatcgcgctgggctcggaaaggtcacccgccgcgcagctccgttggccgagagctgggacgtggcgggcggcgctggctgtggggaacagcgcctgtcagtgaaaagcgcgggcaggcgcaccggagcggcccgccaggtggctggccccagacagagcgcggaggcggcgggagccggctaccattctgatgttggagcggccgc

SEQ ID NO: 146503 - DNA, 852 bp, Homo Sapiens
  misc_feature (821)..(821): n is a, c, g, or t
ttttttaacgtgccataataaattttatttagattggttttagtcagtacctgcatcatatccaagattcttgaaagggttcccccatcctcaatatatttcgcttttttaaaaaaaagctcctaaaagatccaccgctcccactccacccccaccctaatcttctgggaggtgcagaggggccagtgcatggaggataatttgaaattggtttggttctgttttttaaggaatggaccagaatgcggaggcagggcaaaaaattgaaaaccgatgtgtgccttcaaacccagtcctcctaccagctcactgcagattcttgtatttgtggctgtggccacgcacaggtggttgaaagtatccagagtgtgaaaacacaaatctgcaactcgtgacaggaatctccggactccaaggccttacaccccaaagtccaggaaacaagacgcctttctcagtgagtgctgctacaggcaaacaataaacaagcattttaggaatcaataaacacacctttacacctggttttctctaccaaacccaaatagcgtgctttggggtcccgagactgtaatagaaggtgctgcccctaaagaaaagactgaggcggggctcctctctctatagctaaccccagaaaaaaaaggtggagggggaattgctggggccctggggaggggttagagccctggggaggggctgcgggaggcaaggaggaaaggggagagcagggtgggacccagctaacccttctcccttccaaagcggaggtcgagccgctgcccccagtccccagaccctgcctcctgcctccctcaccnatcacagagatgagcagccccgaggggtctt

SEQ ID NO: 146504 - DNA, 562 bp, Homo Sapiens
tttaagtgtaaaatgtttattttagtgaaatacaagaaggtgagcaatttccaatttccgtttaacttgacttattaaaaataagtctcattcacattcttctagtattattgtatactgctataaaatttaaaccagaaaagtgcttctccttgtcagtagctatctgcccaaaaaaatgaatatgacaattccagatctcatctgccatctctaagaaagccacttggaaatgttagataggtcccatgggtcctgatccagggatctgtccctgggtccccatcaggctcggctgcaggcagttgcctaaggcgtcttccgccttcagccacgctgcaatccttgctccaggcactgcggcaggttctctccatgcccccaggaagactctccaaacccgaccagctcatttctcctgccccggaggatccagacgccctggcagctcctgggctccagaaccgagaatgggatgctgcctccaatcccaattgccctaagtttctttccagagggccgggagactgctccaagtttgctgtggcgggcgagcggtcgc

SEQ ID NO: 146505 - DNA, 343 bp, Homo Sapiens
acctcttccattttcaaaggatcttcggctctacttttcaagcaaattcaacaaatcagtgtatgcctgtgtaactggtaaatagtgaagggtaattatttcatgtgcttctaactcagaaccaatggaatattaacagcggttttctgaagatccagttggacaattttcattttcatcatataatggacatttatctcctacctgcattatccactgtcttccctcggagtccacaaatttcactgaaggcagcatctatgtcttattcatgcttgtgctctctacctcccctgacccagaaggacttattcttctttctgcacattttagtagatgtgtt

SEQ ID NO: 146506 - DNA, 416 bp, Homo Sapiens
ggtttccacactgctctctccctttattcctctctttcctgccctgtataccaacggcataagaagcctgcacaaagagaaaaatccgtatatccagttatatctacacggtccaaactgggggcggggggaattcaaacagctttctaaagacgagacggcagtgaaaactctgagggagaggggaaggggaggccctcctgagcgaagttcccatgtgtcaagaacgtgccctcccctccccatgaggacctgaagctgggggttgtcttgggaagtgaggggggttgggaaacaccatcagcagctgccagctcttaattctcaaggagatcgaagggacaggaaggagagccctgcgccacctcaggctagcctggctttgagctttaccaagagacagaattccacataca

SEQ ID NO: 146507 - DNA, 279 bp, Homo Sapiens
tctgaccacagtggttccggggagaagcctttccaggacccatgtgtaggcacaactgttttccctgatcaggatacttgcggcactcaacagaggaaagaaattcctaagggaacactgctcagaaagtactgcagcatgtcttcaaatgcctgaggatcaagttggaaaactagaagcaacagaaaacacaataagccccaggcgtgagtcactggagagcgcgacgggaggaaggggcgccctgagtccacagccctgggggaggtcggagggtct

SEQ ID NO: 146508 - DNA, 1006 bp, Homo Sapiens
acatcaccttggatttaatacaggctttcaagtaaatatttgattttaggaaaacctatgtgttgaggctttccttccaagtagaatggagtagctggtagcaaattagtacttctgcttagagcaatgagaaaatcaagataaaatatacatgtaaccattctgtatcagagttgaccttggggatgtatttcaagtctcagttgtatctgtagtaaagcttattcttcctctgttttgtcctaattatattggtaatcacattcaatataaattgactaattattaaaattgaatcactaagcttgtcaggctgtataaaacaagtaaaccccaattatatgctgcattcaagagccacatcttaaattaaatgggaggatgaagctaaaaggatgaatagatacactgtcctaacactgaaaggcaaactggtgtagctactatatccaataaggtagactataagataaagactaaatataggtggtccataacgtatgatggttcaacttacaattgtttgacgtaacggtggtgcaaaaatgatacacattcagtagaagctatgctttgaattttgatctttctctaggctagtgatatgtaatagaatactctattgcagtgttgggcagtagcagcaagctgcagtttccactcagccaagcagtcatgagggtaaataaccaacactctatagtatatgaaatgtattttttgacttaacaatatttttcacttacagtgggtttctcaggatatagcctcattataaagttaggagaatttgtataaaagatggatgttttataataataaaagggtaattgtatcaggaagttttcactatcctaaatctgcatgcacatagtgagatagtatatataaagcaaaaattgatagaagcaaaagaactggacaaatccccaaatatactgggagaatttatgatgctgtcagtagtaccaaccatcaatagctgatagaacaagtagatgacaaa

SEQ ID NO: 146509 - DNA, 549 bp, Homo Sapiens
tttgttggaaattcagatgtttttattattgtacaagaaatgctgagcagactaaagaaaatagggcttcctcggccaccgcggattttccggtgcatctgttgacagaagagctgctccttggtcctcggctgttacaactcattctttgcttccgttaaagcagagaggatcagaggagccgggggtcaggctggcccagggaaggtcatcagcagggcgccgagcacatcctgcagccccagaccctcagctttcccatctgcaagcggggccgggcgtggatgcagggttccgtgacaatagaagcattgtgcccagcacagcagctggtctgtggcctgggtcctctgtcactgggagtagcttgtggtccattgccagctttgggtttcatatcctggcagcacattcttcaagccggcagtccgtggtctcattctatgccgagcctgttccccccggactctgtagctctaagctcctgctctgagcagtgcagtgacgattagtgtatttgccagcattatgggatcaacttctttgcag

SEQ ID NO: 146510 - DNA, 438 bp, Homo Sapiens
ctctttaaaacaagagcattaaactgtgaatttttgaagcttctatccagcaaccaatgaattacttctgcagccttctgccctccttgggccattcatccaacagtcagatgaacgtttaagaacacaaccagttcataaactggtacttgaccatgaatgacaaattcatactgatttttttcttctgtcatccacttgcaatatttctctcttattcatactcttcttgtagatatatttctccagcttggaccatctgcttttccccctaaactcagaacctgccatggcttcctccttaccgtcaaaatcagcattcagtatggcctaaaaggtccacatgcccagagttcctatcaaaatctcaaatttttcttttgggttaaataggaaaagaggagactattaacaccagaagtcagaagagtaagattt

SEQ ID NO: 146511 - DNA, 644 bp, Homo Sapiens
gacaaatgatttcctttattccccctgcttgagtatgagtatgacctatcacttccttctaaccaacagaatatggcaaaggtgacagcgtatgtatgattacattccacaagaatataatgtccttcttaccagaagaccctctcttccttactggctttgaagaagctgtcatgaatgtgaactacctataaagaaggctatgtgaaagcaactaaatctgtcaacaatcacatgggcttggaagcagatccttccctaattgagcttctgataagaccttggccctaaccaacaccttgattacagcgccttgcaaaggacccagctaaatgtgactggactcctcacccaaagaaactgtgaggtaataaacatgcattgtgctaagccactaagtttgtggcaatctgtcatgcagcaatagatgactaatgcactcagctagcagctcagcttataccattcattataaaaaaaatttactgagcatcacctaccaagtgccagacaacaatatactattctaagcactaaggatagagtaatgaatgaaatagaggaagactctgctcatgtcagtcaataaacaaaataaatatctaatatagagtcaattagtgatgcggatatttgagcaagga

SEQ ID NO: 146512 - DNA, 378 bp, Homo Sapiens
gatgtttcatgcatgcttgttttatgctccatttccttcagaattattaggttctgaggaaagtagcattttccccatccattttctcctggggcagcttttagaatgttttctatgagcattttatcaatatatcctgttggttctgctacatggcgaggttgtttgcagcttaccctctattctgtacggagatgttttacattcttcaagtctgattaattgtcccgtttggccactttgatggatgattcaggcacatgtgacttgatgcaggctttgtaattaagaggctttttgggggtcagctaaagcacctgccctgtagcaaacatcagcagcatgggaagcctatttaggcagaggtggacttaaagg

SEQ ID NO: 146513 - DNA, 595 bp, Homo Sapiens
ttcttgtggacaacagaaatttatttctcacagttctgaggctgggaagtccaagatcaagttgcctgatgattcagtgtctggagaaggcacatttcctggttcatagaatgcactttcttgccatgtcctcacatggtggaaaggatgaaagcacttcctatggtctattttataatgaaaggaatcccattcatgaggactgtgactttgtgagataatcacttcccaaaggcattatttcctaataccgtcacctccagagttagaattttaacaggaattttgggaagacacatttagtctatagcattagtcttacaccaactatttcctaaatccagggctgattttgtctcataattgtaaacagttagatatgacttaatgtttattctgccatgttcatggaacatattttagaaaaaacttcatttccacaaacatatcttgggcatatcttatgttcaaagctttcaagcaggaagtagcatgatcagttttgtgttttaaaaagatcattttgactattgtctagagaatgtggaggaaagcaggagtagacataaggaaataggactttctaggattgtgt

SEQ ID NO: 146514 - DNA, 560 bp, Homo Sapiens
tgccagaaaaacctttatttccaaggggtggcccatttggcctcctgcagttacccctcctccgggacattgagcttctccttcaccccacaggccaccacggcgaaaaagaactccgggaagaaggtgcggacgtacacggcggccttggggatggggttggccataaacacctcttgcttcttcctccgcacggtgcgcatcacctcctccgccacctctactgggtgcacgccgtaggtcagcttcctgaaaaagaatttccaaatggaagcttcccagtttccttgctctggatacacgtggtacgaccggatgaaagtcgggctcacggtgctgatgacaacatcgtattcctccacttcggctcggaggcagtcaaagaagcccagggctgcgtgcttggaggcagcgtaagtcgtacggaacgggattccaaacttcctttggatattcttcactaacacgattttgcctgttctccgggagatcatgttgggaagcaaggctttcgtcaatgtgatggggccaaagtaactggcatccatgatctttttgcg

SEQ ID NO: 146515 - DNA, 652 bp, Homo Sapiens
tttttcaagtgtaagaattgtatttatttaagggcgcctatggagaattttggtggcaggagcagtgctgatctgtaagaacgttgatcatcccaagaaatattgtatctggggctcaggaggcagagcagttcctaggaaatgatctacatgcagaagaaaccagggccctgaaggttcaaggccaatggaggcaaggtaggccccagttcattcttacacacttcaattgggagaaactgaggtattcaatattgaatacctggcagagcgaggtagtatctccttttacccaatctttggttggctctggggatctcctatacaaagcttatctgtttttctcattttagaggttctttgtttctagttcctctgttcagcaattggaatagtagtatttaatctgtcctatgagcacatccagagaatggcatttttgcctcacattcaccaaaaccttgtctctcttgggggtaggggctgagacccctgacattgaatatgtagcagagaagaagacgtagtggagagagtcagttattcacaagatgtggcttctcatcctggctctgggaagttgagaaagtcatttatcttctctcatctccatttcttcatctgtaaattagcgacaatacagcctatcttg

SEQ ID NO: 146516 - DNA, 481 bp, Homo Sapiens
ttttttaataattagtaatatattttatttaacccaaacatatccaaaatattatcatttcaatatataatcaacaggaaagaatagataatttacattatttattaagtctttgaaatccagggtgtattttagttacagcacatcttaattcaaactagtcacatttcaagttctcagtggccacatatggatgggcagaggctaccatattagatagcataggtctaagcaagtccagaagtatgagaccccccaatagctaaacatgaatgggagaaaacttagtttcttctaaaagttgtatttatttttctgattttcttgaatgcaatggaaactgcaacctgacttttagcaagccccaggccatctccttgcatgactttaatcactggatttttcttcccaaaaattaaatcattggatccggagcaaaatgtagattaggcccctcaatgttttttcccttaaattataa

SEQ ID NO: 146517 - DNA, 762 bp, Homo Sapiens
cccttggttcaacctatggcgggtggtggccactcacgagcacaccttctcatcaacgcccagcaggcttcccgtggctgtatcagcccagcctgcagcaccgccccggaagctcctcatatgctcagtgtaggcggcttcaacgccaccctgctgcagtccaagtcgggaccccagccccacgcggccacgcggctctccttgcagcagcagcgggcggagctgcggggccagcctgagatgaagacgcagctggagcaggacagcatcatcgaggccctgctgccgctgagcatggaggccaagatcaagcaggagatcacagagggggaactcaaggccttcatgacagcgcccggcggcaagaagacgcccgccatgcgcaaggtgctctacccctgccgcttctgcaaccaggtgtttgccttctcgggggtcttgcgtgcccacgtgcgctcccacctgggcatctcgccataccagtgcaacactctgcgactacatcgccgccgagaaggccgcgctcatccgccacctgcgcacgcacagtggggagcggccctacatttgcaagatctgccactaccccttcactgtcaaagccaactgcgagcggcacctgcgcaagaagcacctcaaggccacccgcaaggatatcgagaagaacatcgagtatgtgagtagcagcgcggccgagctggtggacgccttctgcgccccggacaccgtgtgccggctgtgcggcgaggacctcaagcacta

SEQ ID NO: 146518 - DNA, 530 bp, Homo Sapiens
caatgtacacactttatttgtatattaaacaagtagaaatatgtttttccccatctttctttaaacatgttcttctccccatatatcttctgtttacccttttttaacaggaacatgagcattcaacctattccattttttcttatatgcaaaggcagagtgcaactgtgataggggcaattgattcttagctttggttttggggacaatatggggtggtgggaactacggcaaactggacagtactgccttagctgaaggcagcagcccctattcaatgccaatcaattgttggcacagagaatgcaggccttatgtcgccaggttttccaaaatttcaaaaagaatccagaagtctcaattttactgtgcaattctctaattatcaaatattgctagccaatttaatttggaggttgacacccagcagaccagataaaacatatctatgggcaaaattgaaggctgggcatggtggcttatgcctttaatcccagcactttagaaggctcagatgggggatcaacttg

SEQ ID NO: 146519 - DNA, 139 bp, Homo Sapiens
cctgtttttatatagcttgaaaactaagaatgctttttacatgttttaattgttgaaaaaaatgaaagcaaaatattttatgacacatgaaaattatctgaaatctaacagtgtctataaagttttattggaatacaaa

SEQ ID NO: 146520 - DNA, 378 bp, Homo Sapiens
  misc_feature (121)..(249): n is a, c, g, or t
ttttttggtgagatgaatttaagtatacatgtttatttcctcaaaaagatatattttacaaagtagataaactactgcaaatgaaagcattgagttcatgaattgagactttagagaatannnnnnnnnnnnnnnnnnnnnnnnnnnnnnnnnnnnnnnnnnnnnnnnnnnnnnnnnnnnnnnnnnnnnnnnnnnnnnnnnnnnnnnnnnnnnnnnnnnnnnnnnnnnnnnnnnnnnnnnnnnnnnnnncataatcaaaatataggtttcagatgatgccatgtttgaagttaaaacataggagaaatcaatgtgccccagagtgcttcaataggaaaagcctcctggctgaagagagacttcagagacatcgatttt

SEQ ID NO: 146521 - DNA, 673 bp, Homo Sapiens
  misc_feature (307)..(331): n is a, c, g, or t
  misc_feature (405)..(414): n is a, c, g, or t
gcaggaatggcttctggggcttcgtctggggcttctgtgccggcgccgccgctctccatcttggcagagctttccatgcgcagcggcggccaaggagtcgcggaatcagagcgatccgggacgcgaggttcggggcccgcgagggggacacagagagaacttgggtgcaggaacagagagggaaagaaaaggaaatatgaagcgggagccctgacggaagttaaaaaatatataccaaatccccgggagacttcttagagtgggagccaaaaaagtgaaaatgctttttccgtccctgcacgccagnnnnnnnnnnnnnnnnnnnnnnnnntcgcgggttggcttcgggagcctcgcgtggcgctcgcgtgtgaggctgccgctggcgccttcttgtttctaagnnnnnnnnnngcagaagcagcagcaaaagtcagtgctgaacgcgctctgccgcgtctcgcgttcctctcctactaaggctgcgctctcttgcgccgggtctcggtctctccagccgtggctcaggctgtttttattatctttgcttaactcccttcctttctgatttccttctttcactcgccctgcgctggccggattcctgtcggtgcgccttccgcgttcccctcgtgccgattaaccaccgggcctcgtcctgccgtaggttgga

SEQ ID NO: 146522 - DNA, 644 bp, Homo Sapiens
gcgccgcagctgagaccggcggccgacggccagccctcagggggcggtcacaagtcagcgcccaagcaagtcaagcgacagcgctcgtcttcgcccgaactgatgcgctgcaaacgccggctcaacttcagcggctttggctacagcctgccgcagcagcagccggccgccgtggcgcgccgcaacgagcgcgagcgcaaccgcgtcaagttggtcaacctgggctttgccacccttcgggagcacgtccccaacggcgcggccaacaagaagatgagtaaggtggagacactgcgctcggcggtcgagtacatccgcgcgctgcagcagctgctggacgagcatgacgcggtgagcgccgccttccaggcaggcgtcctgtcgcccaccatctcccccaactactccaacgacttgaactccatggccggctcgccggtctcatcctactcgtcggacgagggctcttacgacccgctcagccccgaggagcaggagcttctcgacttcaccaactggttctgaggggctcggcctggtcaggccctggtgcgaatggactttggaagcagggtgatcgcacaacctgcatctttagtgctttcttgtcagtggcgttgggagggggagaaaaggaaaagaaa

SEQ ID NO: 146523 - DNA, 492 bp, Homo Sapiens
ctcctcggggctgagcgggtcgtaagagccctcgtccgacgagtaggatgagaccggcgagccggccatggagttcaagtcgttggagtagttgggggagatggtgggcgacaggacgcctgcctggaaggcggcgctcaccgcgtcatgctcgtccagcagctgctgcagcgcgcggatgtactcgaccgccgagcgcagtgtctccaccttactcatcttcttgttggccgcgccgttggggacgtgctcccgaagggtggcaaagcccaggttgaccaacttgacgcggttgcgctcgcgctcgttgcggcgcgccacggcggccggctgctgctgcggcaggctgtagccaaagccgctgaagttgagccggcgtttgcagcgcatcagttcgggcgaagacgagcgctgtcgcttgacttgcttgggcgctgacttgtgaccgccccctgagggctggccgtcggccgccggtctcagctgcggcgc

SEQ ID NO: 146524 - DNA, 886 bp, Homo Sapiens
gcggccgccgcggctgcggccgtggcaaagaaacaggctgcgggcggcaggaagggctgctggggctgcggctggggctgctggccggcgccgccgctctccatcttggcagagctttccatgcgcagcggcggccaaggagtcgcggaatcagagcgatccgggacgcgagtgcgaggttaaaaccttcagccccacgtgctgtttgcaaacctgcctgtacctgaggccctaaaaagccagagacctcactcccggggagccagcatgtccactgcggtcctggaaaacccaggcttgggcaggaaactctctgactttggacaggaaacaagctatattgaagacaactgcaatcaaaatggtgccatatcactgatcttctcactcaaagaagaagttggtgcattggccaaagtattgcgcttatttgaggagaatgatgtaaacctgacccacattgaatctagaccttctcgtttaaagaaagatgagtatgaatttttcacccatttggataaacgtagcctgcctgctctgacaaacatcatcaagatcttgaggcatgacattggtgccactgtccatgagctttcacgagattagaagaaagacacagtgccctggttcccaagacccattcaagagctggacagatttgccaatcagattctcagctatggagcggaactggatgctgaccaccctgtgagtccatggcccgtaggatgagattttttcagtgcctctcctccactcccctcccttcctcttaccttctctacttggagcaatgtacttgttcacttgttcaacaaacacttattgtgttcctatttacacgagggctgggaaaaattagcaagactttattgtcatcatcaaa

SEQ ID NO: 146525 - DNA, 407 bp, Homo Sapiens
  misc_feature (59)..(59): n is a, c, g, or t
  misc_feature (69)..(93): n is a, c, g, or t
  misc_feature (167)..(176): n is a, c, g, or t
atccccgggagacttcttagagtgggagcaaaaaaagtgaaaatgctttttctcctccntgcacgccgnnnnnnnnnnnnnnnnnnnnnnnnntcgcgggttggcttcgggagcctcgcgtggcgctcgcgtgtgaggctgccgctggcgccttcttgtttctaagnnnnnnnnnngcagaagcagcagcaaaagtcagtgctgaacgcgctctgccgcgtctcgcgttcctctcctactaaggctgcgctctcttgcgccgggtctcggtctctccagccgtggctcaggctgtttttattattttgttaactcccttcctttctgatttccttctttcactcgccctccctggccggatccctgtcggtgcgccttccacgttccctggccagaagcctcgtgcc

SEQ ID NO: 146526 - DNA, 1144 bp, Homo Sapiens
  misc_feature (334)..(391): n is a, c, g, or t
tttgcgattccatgctctctgtgctcgtggttcccgtggcggcctctttgtgttgtgtgctctctgtgtcctctcgtctttccattctcgggttcttccgcgctcctccccctgttcttttgccccctgtggctcgtcccagtgtgccaccccgtgcccacgtaccgttcgtccctctcttcggcgcccccgcggccgcttcttcggcagcctttcacatccccgtatttggccggcgtttccaggcatcactcggcgaaacgtacccttccctgacttgctggccctacttgtggcccccccctgaggctggcctcgccccggttccactcgnnnnnnnnnnnnnnnnnnnnnnnnnnnnnnnnnnnnnnnnnnnnnnnnnnnnnnnnnnctgcgcaggctgcggccgccgcggctgcggccgtggcaaagaaacaggctgcgggcggcaggaagggctgctggggctgcggctggggctgctggccggcgccgccgctctccatcttggcagagctttccatgcgcagcggcggccaaggagtcgcggaatcagagcgatccgggacgcgaggtgcggggcccgcgagggggacacagagagaacttgggtgcaggaacagagagggaaagaaaaggaaatatgaagcgggagccctgacggaagttaaaaaatatatacaaaatccccgggagacttcttagagtgggagcaaaaaaagtgaaaatgctttttctcctccctgcacgccgcctcctcctccctcgtctcctcccttcgcgggttggcttcgggagcctcgcgtggcgctcgcgtgtgaggctgccgctggcgccttcttgtttctaagaataaaaaaagcagaagcagcagcaaaagtcagtgctgaacgcgctctgccgcgtctcgcgttcctctcctactaaggctgcgctctcttgcgccgggtctcggtctctccagccgtggctcaggctgtttttattattttgttaactcccttcctttctgatttccttctttcactcgccctcctggccggatccctgtcggtgcgccttccacgttcctggccctcgtgccgaattcgccacccaggcctcgctaccttaggaccgttatgagtttactgccgtcttttta

SEQ ID NO: 146527 - DNA, 370 bp, Homo Sapiens
atacagatgatattaatatatttattttgttttttaatgatagtctattaaaatatttgtttagatagaccttttataaaacaattactttttaaatattttatagatctctggtcatcttggtctatgaatttataatgcagtgtggtcaatggttacctgactgtgcagtgtgttaggggatcagctgaagcccagactttagtgttatgtcacacctgaagagcttgcaaaggaaaaggaagatgacctctcagtgtagagcacatgaactgaaagctataatctgtcaactctcacactgccaacaaatttcttgattcgcagattttattgaagcaatgttatgtagcaatctgcttagactata

SEQ ID NO: 146528 - DNA, 360 bp, Homo Sapiens
  misc_feature (342)..(342): n is a, c, g, or t
tttgggaaaaaaatttatttgcagtttctaggtaagatgtttctttgatgtactgagaggtctctgggtatgatggcctgttccccctggatttggagggggaagtaagaaacctgggcgttttggccactgacattataataaagctaatcctgcagaaggcagagctgaaggacagagagaaactggatccttgatgccattggtagagcggttgaatcaaattgaacctgaagccagatctggccctgtgtttccagtcacatgtccctgtaaatcacttttactatttaggtcagtttgaattggctttgttgttacacgcggaaaagtcctaatgcnctccctctttttctgccc

SEQ ID NO: 146529 - DNA, 1136 bp, Homo Sapiens
  misc_feature (204)..(237): n is a, c, g, or t
taggtagcgaggcctgggtggcgatttcggcacgaggagagggtgtagtgtgagtgggccccaggaaggggaagggcactgggggtggggatcccccatttcacatgcactcacaacactgatctcccagggagccggaatggggcagccggatggagccaggcccccttccgccctggattataggaggaagggattagtgtnnnnnnnnnnnnnnnnnnnnnnnnnnnnnnnnnncaggccagggcccccgccaaggggagagatgtacgtgggtggcgctccagggacgggaggcacaggactgagacggagctggttcagggtgagcgtcgcgggaggcgcgggctggaaggggttggtgacggaagggggagtggctgggcctccgcctggcaggaaggggttggaggccttggctccaggcggcgtggggcccggccggctcaccagcgagtccaggtcgacgagggctgcattgggccccaggaatgactccggcgtcttccgggtggggggcgtgggagttggtgtggctgcaggtggggggctgcccacagcctcagccagagatcccctgaccccactcatgtcaaacgccccagggcttcgggccggcacctctcctgccagcagctccagctctcctgcgctgctcccggaggtcggcagtgccgtgcggagtcggtcaaagtcagagaactcgtcgggctccgtgtcgaatcccccggctgctgttgtgccattggtgctgggcttggcaggtgaccctccccagggatctgagaaggccggggccggtgtccagggatcggaggctgagggcccacctgaccgggacccccaccatcggaacttccccatggattcaggcgtggcccctcaccagatgcagaggctggtcccaccaccaagggtctaactgaggtgcctgcagggacaacagtacgtcatggggtctcccagtagccacggcttgtgtgggtctggaccatcccgcagggatcagcagctgtaggtacacggtgatccgcatcagggtccgagccggggacagccgtggggacgcagcccacgcgtccgcgacgcgtgggtcgacgatatcccgggatattaatacccgcgagcgggggtaa

SEQ ID NO: 146530 - DNA, 789 bp, Homo Sapiens
  misc_feature (203)..(323): n is a, c, g, or t
cagacctgaaatgctggtttttatttaaaggagacaggtgggaagagggggatgggaataacaacacagccatttgctgcataactaattaccaaaaattaacagcttaaaacttaaaacagctcccatagaccaggagtccaggttcagtgtctcgcagactataatcagggagggtctagcgtcccatctgaggctcagannnnnnnnnnnnnnnnnnnnnnnnnnnnnnnnnnnnnnnnnnnnnnnnnnnnnnnnnnnnnnnnnnnnnnnnnnnnnnnnnnnnnnnnnnnnnnnnnnnnnnnnnnnnnnnnnnnnnnnnncaaggtacatcctccgtttgctgagctccatgtgtgtgttgcaggactttctccttagttcagctaaagacggggtccttgtcaaacatccatgaaatattaggcttgcagacacttagcaaaatcagggggattggttttaaggaaacgatgtcttgtggacccaggatacaaatgcagcctgactttatctgctgtccaatttgtgctttacagttccagccatggttccaacaaccatgctatctcatcccattgtctctggtagaatcagtatctctctctttctctcctccattcccagttctaaattcttagagaaggaatcttgggtgggctgctcatctgtattgtagttgtcaaccagtccttctgcagtcttcacatagttcaaagccaaaggatcatttccagcgctgacatatttgtggaatctgcttttgaagaattcacagtctcacaggag

SEQ ID NO: 146531 - DNA, 443 bp, Homo Sapiens
  misc_feature (431)..(431): n is a, c, g, or t
tttttaccctattatcaagatttttattgtatttactcttcttgtttcagtccctttctttacccttgaagctttaaagtaaatctgtgacacctgcattgcttaaggatttcctttaggtgattaaatgagatcagggtggtgtctattatgacacaaacaaaacaaaacagtactatgatgggaggtacaggaacccagagatggagggagaggcaggggtaagaacaagagcaggcatcttccttcctcccaggcacagaagcaaagggaggctgtggtgctgacatccccactgtgtaaggagcgggagggctggagccctggagaacaacgagaagagtcctgcttcagctgtgccaaagaatgggttctttttcttatggcagccacatgcagccacagcggtggtgttgaaatggggaaggttnccccgtccccct

SEQ ID NO: 146532 - DNA, 403 bp, Homo Sapiens
  misc_feature (215)..(273): n is a, c, g, or t
ggtgttggctgcagaattgattgcttgtttattggtagagagaaaaccccacacatctggtcacagaagtcttctgtattgattgttgtcgagtgagagcagaggaaaagctgtttgattatcaaccaacttgtcatatctggtcttcaacaggaggcgtgacctttggaagtctgctccttaggatctttagcagaaccttgagttgcagatannnnnnnnnnnnnnnnnnnnnnnnnnnnnnnnnnnnnnnnnnnnnnnnnnnnnnnnnnnaaaaaataaatgcagttggccctccatatctgcaggttccacatctttctgaatagtagaaattaagaaatgtagaattttttgggcttagggtgggattgcttgctctgttatgtaaatccaggagtca

SEQ ID NO: 146533 - DNA, 453 bp, Homo Sapiens
cttaagccttgcacacttgactgtatatagccagtgtcttgtttaaaaaagataattaccacccacccccacaaaagagtgtggcccagagttgagctccagcataaaaccaagcaagactgtcattgcccttactttggcactacacttttattacagcagctaaggtctcaccatggctttggggatgagcaccttgaactgttgatttatgctgggtctacagtcactggagagccccacatctttctcatggctgctcagccacgtccactcatccggtgcttgcaggctgcaggctgggcccagtgaattaggttgtagaaactgagatccagagaagtacagcagtttgctcaaggtcatatggcaggtcctcaactaaagtcaggacttgtaaccaggccccctgacttctatggcaatgctccttctgccattgcacagtggccc

SEQ ID NO: 146534 - DNA, 355 bp, Homo Sapiens
  misc_feature (266)..(315): n is a, c, g, or t
tttaaaacaattacagagaaagctttattttgggccatttaggaggtttagatcattttgatcatcttcagctgtcttctcttcacatacaggaaaggccttggaaagcagtcgttgcgccagacagcccagggaagagcggcaggctgaggacctagggccacctgctgttccctgggattcatgtccttctggggaggagggaggacccaggacaatggctgctgttcatgatctggagatggagagcatgaatctgaatatgnnnnnnnnnnnnnnnnnnnnnnnnnnnnnnnnnnnnnnnnnnnnnnnnnntgggggaggtaaagatcgggccaagagtaaaaaggtccac

SEQ ID NO: 146535 - DNA, 635 bp, Homo Sapiens
cctttgcaaagaaaatttattcgttgtaggctgcaagaaaggcagggggttcacagcataggaagagacctctcccagagctggccctagtactccctcagaacctgtggggcttggaagggtcctggtgattcaagctacctgagtgccatctctgccctcctacttacgcttctccagcctcagccttcccagagccccacaccaggccagcctctgggaagtactggagcaggcctcggagcaatcctcattttcctgccaaggaccccaaggaacagccaatcctgcaggaatgcagatgaccagcagccatgggctcctatctgtatgaggctctgtaaccctgtaaacccctcctctcaccccactgcccagttcaggtttgggcaaaacccaggggatggcattaggtggaattgcaggagaagcccagctaaaagactatttgaggtgaccctgcaggggaagggttaatgtctctatatgtgggtgccggcaaggggagtctgcagctttagggacctcctataagtggccaaacaggatctctttggggtcagagtacagactttaaagtcaaagagacttggttttgatctcagttctggcacttacaagctgtggacttagga

SEQ ID NO: 146536 - DNA, 427 bp, Homo Sapiens
atacctcaaactttttattaatacacaagaaatagagtggcctggaatgacaagacactttagacacaagataaacaaatgagaacatatgaactatgcaccattttccaatattctgaagaagtgtaatagtttgatacatgagtttttttcaggtgatgggaagcactgtggctgttggtgggatctgctgaaggcggggacttcactgtgatgatggagctctctgcctcaggtttcctgcagcccagcatttttgtatgaggccatggtgttgtgaattttttgttccaaagattcctggatgtgatctgcgtgaattccatggacatcacgagctctttccttctgtgatcctggtggtcatttattattttttaaccttcccgaaaagatgcagcgtgaacctcgtgatcaaagagcagct

SEQ ID NO: 146537 - DNA, 1066 bp, Homo Sapiens
gggcgaccgccatgtacttggagcactatctggacagtatcgagaaccttccctgcgaacttcagaggaacttccagctgatgcgagagctggaccagaggacggaagataagaaagcagagattgacatcctggctgcagagtacatctccacggtgaagacgctgtctccagaccagcgcgtggagcgcctgcagaagatccagaacgcctacagcaagtgcaaggaatacagtgacgacaaagtgcagctggccatgcagacctacgagatggtggataaacacattcgaaggcttgatgcagacctggcgcgctttgaagcagatctgaaggacaagatggagggcagtgattttgaaagctccggagggcgagggttaaaaaaaggccggggtcagaaagaaaaaagagggtcccggggccgaggcaggaggacatcagaggaagacacaccaaagaaaaagaagcacaaaggagggtctgagttcactgacaccatcctgtccgtgcacccctctgatgtgctggacatgcccgtggacccaaacgaacccacgtactgcctgtgccaccagttctcctatggggagatgattggctgtgacaatccagactgtccaattgagtggtttcactttgcctgcgtggaccttaccacgaaacccaaaggaaaatggttctgtccacggtgtgtccaggaaaagaggaagaagaagtaggaggagctgtgtgcccggatccgaggagcaagttaatctgtcccttcattcgtgtcgcaatatttcccttccttttaaaactaccttgttcggttgatacttagtaactccgtggccagttgaagcgctggatgtttcctagaacaagaaccaccaaagcctgttcgcacagaagggcgaccttgcagggactcgccgccgcgacctcagtgtggcttttacaggactccccccgagcatcagcagggaccccggcggacgtgggcgggcgcgcgtgagctcgggctgcccggccgggcgtgcgggcggggacatggtaacctggtccacggagggcggccgca

SEQ ID NO: 146538 - DNA, 455 bp, Homo Sapiens
ttttctgattaaaaactttattttcagaagcagaactgtttttaacacaaagttcaaggaagcagtctgtccaaaaagcccaaattccacctttctaagtggctgcctctagactaactccctttcaaaggctctagaactttcaagcagggtctagaaactaagcatcctggattcctacccccgaagccccatctttagagctctcttcctggggtttggacgactgccactccaagctcagacttggtgtcccaacttctctcccttctacacctttacgacagttctatttccacaggaaagagacagcccgatctgccttctgaagaggccgtttccatgggaaacaagagaggaaggggctctggcaagcagtgaaggcgccttcataggcagcaaagccgctccacctcctcctcacagtcgtagaatttttcgaatagctcaggaga

SEQ ID NO: 146539 - DNA, 773 bp, Homo Sapiens
  misc_feature (752)..(752): n is a, c, g, or t
agctgttagtgtttatttaaatgatgaatctactctggagtgttgtgggaaagtatttagtgaggaagacacccccactctttgtgtctgtccttgacagctgcataaagagaataaaacgtgactcttaaagtacatcagtaaagaattacatgatgccaaacgatgacatgggtctttgaagccatttgagaaaacgggatatgatttggtccttatgatttttcctgggggaaatgtgaaagtctgaattagcaaattcaaagggagccagagagagatcttgaggacaaggccagtggcttcccaggttctgcatttccagccctgagcagggtgtttggcatgtcagagacgattactaaatgattagtggataaatgacttaccaaaagtatccaaggaacagcttaagccctgggaaagatctggcctttgaaatgtgaccacagtatctgcaacattcgaatagtgtagtatagccaagttgtcaagggaacgggttttggtgttcaaaacaatgagattctgtcctggcttccctgttatcagctgtgtcatctgagcttcaggactcttatctctgggtgttgggatcataggtgagtcttttcttcctgcttcttgaaacttttctgttttctgaatgcttatagtgagcaggtattgttgttggctgaatgctgagaccattaatcccttccccacagtcacagtagccaggcttcaatactcgaggcaggagattgganggttcatctggtttgtgtaga

SEQ ID NO: 146540 - DNA, 975 bp, Homo Sapiens
tttactgtcaaaacgtttattgcaaaatggagtcttagaacaaaggaaagcaaagaaaagttcacatcaaaatgaaatgtatgacaccaacttggatttctgaatacactgtggactttgtgctggaatatcaaattccaactataaaatcagtaactgaaatagtcttaccacacaagagtaaaatttaatcttccatacaaacattatacaagatatttggcataggacttgctcagaataacattgcaatagaataattgagaaaaagtttttgttaaaaaaacaataaagtgataatgccatctattcaaagctcacactcaaagaatataaatattttctattatttagtacaaaaattttaagagtgcaaaagcaatatgtgcagtgtatcatatctggacattaaaagatatactattctgcacacaatataaaataattaatgtaggtgcttggaactctagttttgaagtaaataatcacatgccagaaagctcctcacaggcaacagagtgcaaacaaaggtggagtctgagaaaacacggctagtcttctagatttcctgatggatactcatttttcatcatagaaatgctgtatctagagctgtcaggctatgctacaatcgagaggagagaatagatttttatgtctggcgatgcttaacacttaaacaggaaaacagtcttactcaagaagcagcaaaaggtgcctgattatagaaaattttatggctctggtaatatatgtggtatgatgaaactctgctactttcaaaaggcttgcgataagtttagtacaataattttctaaagtattaatatttaacttccgaataaggttaaaacttgtcttcattaaaactcttaccatccattgaaactctgaaattaagttgtcgcccagaattctggaggcattcggatcacctaaagccccccgacctaatcttaatccatgggacacttg

SEQ ID NO: 146541 - DNA, 743 bp, Homo Sapiens
gctgttagtacactattatacatttattgaaagtggggaagctactttccttccagacaggactcaggtctgggcatccatgtgtaaggccaagattatcctggaggatttgagcttggagtctctggatgtgtttctaccaaataggaatgtccttggatactttaaagtaaaggaggatgcctctccttgtgggtagacctctcaggcctcttgttccaaaacaagttaagttttatctacgctgaaattctgccgaagtagataagctaccccttttttgttggtctctgtggacattgatggcaatatatttatatttgtggctttagttctcatttgatgttgcacattccaaatgcactgtgggcaacagtcaatagaagtttgatcatcctttttctgattaggctaatgagaatctgatactgaaactgatactttagtcacacactggaaaggttttatgtttcatcaactgccttctgtccttttgtgcagatcgttattaattgaatagatgggcatagccctgttcatgttacgtgatggtcttttccttagaatgattcccagtgttttcatcatgttataacatttgtcatcatctttccacgtttaattttggggtgggggctgggggtcaaatagctctactttcatttcatggaaatcataggtctctttgtattatcatttgcaattgcttttgttcttatcagacaggatgaaattaatagtct

SEQ ID NO: 146542 - DNA, 927 bp, Homo Sapiens
  misc_feature (23)..(24): n is a, c, g, or t
  misc_feature (31)..(31): n is a, c, g, or t
attccttcttttttctgcttctnncaagttngttctagaaaacttagctttttctttcctgaagcttttctttgaagttcagcaactaagcttgaagaaatctcctctggtagagtcaatggcaggactttttgctatttggttctccagatgtttaactttttctaataactctttctcaacaacttctctctccaatttaaattcttttagggcagtctgaatagcttcatctttttcacaattaagcttctgaattaactgttctctgtcttgctcctggctgctgaccaatttttgtctgtctttctcaaggttctggataatagcttcgtatttctcttcttgttgggtaattttttcatctttttgtctttcaagagcactcaattctgaatccaatttactctgcagttcaattatttgttcttttaggttttttttctatttcaaatgcttggttatgcaaagatgttactttgtttaattcagctttaagtatattagattcttcttcatgtctactaattaactcggaaatacactgatctttttcaattgtcattaaagttcttagctctgctaagcccacctgataattttcattattatcctgaatcttttggttgagtttactaatttctgttctcaaattttctgtctcttgttcaagaagagatttcaaggtctccttctgctgggctctgctttcttccagcaaaatttttatttcatcagtttctgcttccttcaacgcaagttcaacctctaacttgcatctcgtgtctgacaaatcagaaaccttgagttttaattcctgtaactgtttttctttttcctggataatttcagcatgagattcttgtatttgattaattcggacgcgtgggtcgacgatatcccgggaattccggaccggtaccagcc

SEQ ID NO: 146543 - DNA, 533 bp, Homo Sapiens
  misc_feature (11)..(11): n is a, c, g, or t
tttttatgctntacaattgagcttcttccttcgagtttctttgatctaatcaagagatagaaggcctccagcttcacattcctcacgattatttacaaaaagaaggatggctcagccaaggctaaatttaggttacagtccctaatcttaacacagtttttaagtttaggtttcagcttttgggatattattgttaccttgaaaaatgtcacgtttaaaaacacctcacaccctctactatagattggatcttgggaaatagggttgaggaccggatcaatacaagaatcctcataacctccgccccggcgcgaacctgggagggctgcagacagtctaaaggctgtggtgacctcagcgctgcgtccctccagcaaccggcgagtgctggggcacaggccatacccccctaagctcggcatcgcctgcacctctcacaggtgctctgtccgccacagtaacgcactatggaaaggaaagttgtacggcgaacgactgaaggagccaaacgaggtggatctggagcggccgca

SEQ ID NO: 146544 - DNA, 562 bp, Homo Sapiens
acattttatactttccactggtttttctgtattgtatgtttttgagtaatttccaaaagtatatctagaaaagtcttttacctaaagttagtctaaaaagtatctatatatgcatgtgtatgtgtatatgaaacacttaagagagagtggcaataacataatcattttttacaaactgccaaattatagaaaatattgtaagaaatttttcagaatcatgaagccatgtgtattcacaatacagttcatattatcatgtttcatttgaaaaatttatgatctctatttataattgttaagaacttacagcttatttcacaaaatcattgctcttttccactgttatttgtaccatacgtatgtaccatagtgtgcttaaacgtgattatttgaacgtctagttttttggatggtatgcgcattctaatctaaatcaataatgaagttttatctttggggtagtttttgttgcataatgaattctaattttatgtttaatttaaagcaaacaattattgttagaaaactatgcacaaaataaaattcaaggatgaaaaataaa

SEQ ID NO: 146545 - DNA, 681 bp, Homo Sapiens
aaaacaacaaacatttattatttcacacagtggctgatggtcaggtatctgggttctaagttgctgggttttctggctcagagtctctcatgaggtttcaatcaagatgtctttcggggccattgaaggtttgattgagcctgctcttctttcccgactcgtctttaatacccaccaggagccagtcgccgcgggcctggctctgtggtggcaagttgcatgggttctcccatcaggacctcccgatgagcctacgaggtcggttctattactgtcgccacttcagagggaggaaacaggcccgcagggttggggaacttcccgaggtcactgaactggtgtcaggcccggattggaatccaaacacatcccagcccatgcccggctctacagcgccggcccccagcgtcttcccgggtgccagcggcacccgcatccattcaaatgctgcccattccccgctcctcagtcgcttcccgctactccgcacgcgcatctcccccacccgtcagggtcaggcctctcggtgacttttcctttttctctggcagaaactgaggggtgagaccgatggttgtgtcccgaacgagggcagattgcctagagctcgtcagacagggacccaagggcgagtctggcagggcgtgtagctccgcgccgctcagcaatcccgggaattcc

SEQ ID NO: 146546 - DNA, 404 bp, Homo Sapiens
gactgtaaaacaattgtcattttaatgaaagtgaatccatttggaagataatgtgagcaacactgcatctctcacagcagcacaacccccatccaatcctattagaactaggagcctcatactctgtgacgtcacagaggatgttctttcctccagtgtttgcaggagccccttcctctgcgtggagtgaagctccctcctattctgaaacttccccagaattgatggatccctcctctgtttcttgctctgagttccactgttgccaggccatactgtgttgtaattttcagctctatggcctgtctttctcgcctctccctaaggatggtgactgcacttcagccatcttggtgtctctaggctctcaggggcccacaggggctgcagctgcagggatctgg

SEQ ID NO: 146547 - DNA, 393 bp, Homo Sapiens
tttttcactctttctctttagcatttattgtattgttcttggcattccatctttaaagtggtcacttcttgtttgtgtaaattgtcagagtagtgttgatcacattccgttttcgtatggagagtcaccggggtgaagggcatcctattcgaacaactattttcagtcctttttccccggtaggcgtgcatgttgtacaggtccatatccttccaaaggtcccatttgagaaaacatcatctttttcgccctaagggaacttatttttgcctgtgtaaaaattgttgtgtagtgccacctgctggttcattggccacataataataaactgtcttaaaaatataaaaactagaagaaacctctagttgggcaggtctaaccctcctcctttta

SEQ ID NO: 146548 - DNA, 611 bp, Homo Sapiens
  misc_feature (559)..(559): n is a, c, g, or t
tttttttcagcctttaagaaatctttaatttcagcccgcacggagccctgcagaaggtgagggaataaatacaaaaggttaagatgcagcatgcccagcccccagcctgcaagggatggggggatgcttgtgggccgcgatttctctcgtccgcaaaccggggcaggacacgctgtgagccaccgagctctgaaagtgacagtgttttccagcggtctgttaccccttgcaaagggaagtccctgcacccctagtccacaggttcctggaaaggcgttccttctcctgtccactagagtgcgccagagtccacgcccgaaggcgcctgaaggctctactagccccatcccagggtgtgcgtcacccacagagggtcccagaaccctgcccaggaggtgacacgcccggagatggggctcctgagagatgcccacccacccaagtcctcaatcccctgatttcttcaccttttcatccaccctggcatcccaaatggccgttttgctccttccctttcaaaggagggaaactgagtcaagcaagggcaggagtaccctgnggggcggctgtcctggtgagaggcagagaagagagcggccagcagcgggccg

SEQ ID NO: 146549 - DNA, 495 bp, Homo Sapiens
ttttttaattttttaaaacaattttactccttattcataaaacagtacatttctattacataggtttcatcccctaggcatgcacaaccatttgaactatttaaacagtttataacaaaacaaatgagaagataagggaaaaagagctctcctggggacttacatagctgtttggtttttcaacttgattgaagaaagttattcgggggatctgtccaattcacaccttctgttccctgatcaaatactttagggtcaaacataaggttttattgatttttgctcaagcaaagaattaacatttttgataaggaactgtaatggcaattataaggtaatatggtgtatggtaatattatgctgccagaggaaacatttgactatgattaaattcaagcccagtactgggtagctctagataattaaagataattttatccattcaagtcccctctgttaagctgcacattgacacatatttgttccctgtcttgt

SEQ ID NO: 146550 - DNA, 283 bp, Homo Sapiens
ccgcctgcacaacacagaagaacttcgcctgcaacaagagtaggagaggcagggcagggggaggtccggtggtgagacgcctgcccgctccactccccatgctgtgcagcctcggctttctgatagatcctaccctgcagccccagctaggccgacggtgacctctccaccccacccccatccccggcccccaaagctccaatcgtcggagctctttcctaggggacggcggacccgggtagtgtcagttacccgcccagccggtcccatgccccgcggccgc

SEQ ID NO: 146551 - DNA, 483 bp, Homo Sapiens
ctggaataggagggcccctgccactgtgccccgtttatcccttattccccaaaccctgctctccccaacacctactcacttaagcacttgtataaagcctccagggttgggaatgggagtaaagggcaagagggcggacacatgaagtttagtttctaacccatcatcaccctaactcaaccttttctgagccaaatggcttgaattgaagccagttgtcatggaaatagtaagaggttagggtttaagagctggggatgcgggggtgggagagagaaccctcaacatccaggatctatataatgagagctactttaaaccctcaggtccaccctcatgatgctgagttatttagccagagggtgcagcctgcttatgcccaaattccctcagccaagagagagaccaaagagcctctggaatggccctgcttccagcctcttatcttcaggtcaattagagagagtatagagaccccagagt

SEQ ID NO: 146552 - DNA, 789 bp, Homo Sapiens
tatggtttcagtgtcattctttagttaacttgggagctgtgtaatttaggctttgcgtattatttcacttctgttctccacttatgaagtgattgtgtgttcgcgtgtgtgtgcgtgcgcatgtgcttccggcagttaacataagcaaatacccaacatcacaaagatgatctttcttcttttaacttgatgatgatgtgcaggcacaaatctttggagaaggcttaactgtagaatagatgaattctagaactcttgaccctgcaatgagaaactgtgacagatctgtgtcaattaacttgattagccagaaattaatcacaggcctagagaccaaagaaaaagctcccctgagtctcaggcaacagttttgtcacggatgcaaagcttcctgaaatcatgaatgctggactcagtttggcaaacgcttacacctattatgttctgagattctgagaaccagaatgcaaacttaagtaagatacagttcccactgtaggtgttttaatcctggtcttatatagaataaaccagtactttgctgagtgaaatcaccatatagaattcagtattaacagatcatgcattcagatgcttgaatgtgcattcttgttgtgggcttgatttagatcctattgcggggtcattacgcgaaaattcaatcataccttccatagacaaatgtctgatttttgtttaaatctgtccgttaggtggcctttccttatctgaggtgtagtggtctaacatttaggaagccttgctttgactttatcgggcagcattaaa

SEQ ID NO: 146553 - DNA, 522 bp, Homo Sapiens
ttttttcacaggtctccaatttgtttttattttttaaagatcaaatgaaaatactttcaaaatttaaaatacacagcctgctatcttctgttctccaaacagtggaacattagaaggctttaatttaaaatattagatccttttgaatattccaaagtgtttctgcactcttcttgaaaagggcctcctcctcagaattcaagttaattttcacaacatttgagacaccattccgccccaagacacaagggatactgagaaagagttcttcttttattccatataatcccttaaccatggtggaaactgggtgcactctcctaagatttttcaaaatggatcctaccagatccatcacagacagtccaatagcccaagaggtataccccttcagcttgataatttcataggcactttgaataacttgtttatggatatttttccagtgtcccttatctgaatccgtcctactttaggtccagagtcttagagcacaccagcaacattacccactcatagggc

SEQ ID NO: 146554 - DNA, 1142 bp, Homo Sapiens
tgtgttgcgtggttgctctctgtccatcatgtttgtgtgcgtcgtttgtctgctggttgtcccttgggccgctgcgctttcggctgctgtttccgctcttctggggtgcgttgggcccgcgcagtttggttactgctatcgctagggggtttgtgctcgcgcgttcccatgcttgtggtatctcgttctccttggtttgacccgcagctgccggttctcgggcctattgtgggcccgggcccagagtttgcgagttaactctgttggagtttgtccaccaacatcatctagacaatgtactatatttgggagtttgtgaccatgacgcatagacaagccgtgacatgcaccttcccccaccacgtgcacacggtgcgcacgcacacggagttcaagttcaagcaattttgtttctgggcttctctttggactcctaagtccaaagtgagagaatacatttcttggccacaggccatgagagagtacacaggggacttggggcaaactgaggcctggtgcatgtagctcagctacacgtggagcttcctgtgggctcatctgcagaaggtctaaggcagagaacacagattcttagaactctggcaggaaagaatgttcatggcatgtaaagaccatggcatagttggatatcagccagtcatatagaaaagcccatcctgaattttcaatttgaggccccaggaaatgtggttgggtgagtcatggtcctcaaattatcttcacaaggaatctggtagctcagactgcagggcagggcactgctgggttctccccgtgcctggcccctcagagccttgatgtctggggccttccaggcgcatggatggaattaccaggcaaggccagggtttaggtgagcagggtgggttttctcagcaagaggaagagttcatttgctctctggcacaagatcttgactttgattctttgtactgttgtgacctccaggttttcagccaggttgtgctcaggaaggacagcaggaaggtatccccatcaggcctcctcttccgcctctctggcacccacggcgcccctgcttgcctctgtccgggtctcggaggcgcgaacaccatcccaagcctgcgaccgcgcgccctcggccgatttaacccccaggc

SEQ ID NO: 146555 - DNA, 837 bp, Homo Sapiens
  misc_feature (397)..(460): n is a, c, g, or t
  misc_feature (826)..(826): n is a, c, g, or t
tactcattcaccttttatttacaatcaaacaagtatttaccaagatcatgtaacaaacaaaataaatgttccattctgtgttagtgagaagaaaatagagggcaggatgcagagaaaagggaagaggcccagagaagacagggccactgtgtttacagggggcagaggctgtggggggatcgggagggcaccttcctgtgggtagcaccctgctcatctttccctgtggctccgccctgtgccctgtgccctctgcactgcccaacctgcttacagggagggcctgggagttcaagggccttctcgaccagaagcttcaggtcagggtcacaagtgcgtggcgctgtttggttctgttaaacacaattttggtgtttaatgacgatttcttgatttnnnnnnnnnnnnnnnnnnnnnnnnnnnnnnnnnnnnnnnnnnnnnnnnnnnnnnnnnnnnnnnnattgtaatccttatgaatatttagtaacatctgattatgatcggccaggtgtttgcctggattccattcctagtcagtccccgccggtctagttaggaaccgagctttgtagcgagtcctaggcttggtcttgcgtgctccttggaaggaagggtggtggtgggcagggaggtggatggctgggtcccccgggcctttctcttggacaaggctgcagctcgtcctctctcaggctccagggcggggagggcaccttctttagctaacagccttgctgggaaagttactgtgatcatgtaggtaaaaacgcattgtcaaccgcaaacttccagacgaaagtcctgtgaaattcttatcgtactgttncggacagggcg

SEQ ID NO: 146556 - DNA, 896 bp, Homo Sapiens
ctctagggagcgaggcccctgagcggtgttataatcggcacgagggctgtccctgtcctcgcccgagtccctgccctgcaccaacggcgacagccacggcgccaagccctctgcttcgtccccctccgaccaggcgacctcagccagctccagcgccaatttcaccgaaatagacgaggccagcgcgtcctcggagcctgaggaagcggcaagccagctaagcagccccagcctagctcgggcgcagccagagcccatggccacctccacagccgcgcccgaggggcagactccgcagatattcccctggatgaggaagcttcacatcagccatgatatgaccgggccggacgggaaaagggcccggaccgcgtattacccgctaccagaccctggagctggaaaaggagttccacttcaaccgctacctgacccggcgacggcgcatcgagatcgcccacgcactctgcctgtccgagcgccagatcaagatctggttccagaaccggcgcatgaagtggaagaaggacaacaaattgaaaagtatgagcctggctacagctggcagcgccttccagccctgagcccgcccagaggagcccagcggcccaagagcccgtgccacccccagccctggcccctccaatcctccccgctctgccgccgcccgctggggaccggttcccacaagcctgcctcgccttgtgttacgatatttcgtttggtcttaggtcttcctgtggctccctctctcctggactggttatcttgttattattgttaataataattattattattattttccttccatgctcccaactcccttctgcttgtcccaaatccgccagtgtttctgaatgtttgtgtctgtggttgcagtctttcccccagga

SEQ ID NO: 146557 - DNA, 345 bp, Homo Sapiens
cgttgattagaggtttattttgcccaggttgagaatgtaccctggaaaaagaaatgcaagttataataggatttgtgacctatgctttttccaaagagggttttgggaacttcattatttaaagggaaaagagcaagcaggaggggaagaaaaaagaggagggagggtaggcagcaaggcaagtgctttcattcttgtggggctctgattagcactcaatgaattccacatttcacataacgcaagcatgtgaaattacagccatctatttgggaacaaaaggaaggcagtttttgcctgactcagtctcccactcttaactctccctttggcatagtgagtttg

SEQ ID NO: 146558 - DNA, 465 bp, Homo Sapiens
tctgaacaattacattatttaatatttatggaaaagttaaattaaaagaaatacacataaccgtgtcatggctagcctttgacattttcttaaaaaattaaagcacaacatactgaacaattacattattctaatgtaaggaagtgtgtgaagagcacaaagtcagaaatggccccagtggccctaagggctcatctggttgtaggtgggcttgtacttgagtcctggcttgtctgaggatcagttccagcagttagtgattgaaactggacaccctgatggacttggttaaacctgcatctctgcatttctccagggcctttggacagatgcaaggctctcataagggcaatttactcagccttttgcacagaagtccctgttgggagagttcttgcagctattacctccaagagagtcactatagcctagacagcattcctccttctgttggtgactaggctg

SEQ ID NO: 146559 - DNA, 693 bp, Homo Sapiens
ttttaggaaacagtccaagactttatattgcttgtcacagcagtacctcttgtaacaattttttcatgtgtgtataacaaaaatatgtaggccagtggtttcttcagacaaaagtagtcttcacattccagaaactcatggggaggttgttgaaagaacaagttgtgcacacagaaacacacctgaagaatcagccattccctggactggaactttagctctgttttgaaatagctgaggtgatgttgacctccctggaaaagacttagtcaaccccaacaaggtcattcaccttgggagcacaggtcagagtagatttggccaatcagttcatggccatattcgtattcaatgttgttggttcctcaggggatgggacttgggtttcaacacccaaggaaacagcaagtgaagacatcaatttaagaagaagaggaaaaaaatatgactactaggacaaattaaagacttggttgtgcacaaacagaatgccaggggttagcataacatggggtggtgaaagttgaccagaggtggaggccagagccctggacactagtttgcacctactgcaagtcacttttcatgtcagatcctcatttttctcatctgaagttgaatctaaactccctctgtaacagaacgccagtctggggaactctgaattgactacaggttcacagatagagattg

SEQ ID NO: 146560 - DNA, 505 bp, Homo Sapiens
tgaggcttagctgaggtaagttaactgaatcacaggctgcagcagaaatactatttaaaatgtcacatagaaaattcaatttacactttgctttgccttttagtatctggatggcagatgacaggggttatgtggccaaattggtctttcccacctggcagcagctctcttgacacccacatcccttgttcgtcttcaaaagttcctcactgcctcagcgactatctcagccttcatgaacaaagtgctatgctgctataagtagttagaataaatgtgatttcagcttcatcgggtcctatcctttcaccttccttgtagctggtgtatgtcccacagtgcagccataaactatgaagcccagaagtatatgacttccactgaaactcaacatgccacacacaggtgcttgtgggcacagaagaagaaaggacaaatgtctgagcctcgggacttgcagcctctgcccttgctcctgacctccgtgttttgcccagatcagcag

SEQ ID NO: 146561 - DNA, 590 bp, Homo Sapiens
ttttttaagatttgattttcttttatttgtggcactaaaagacagatagctgtgatgaagagcaattggctggtagctcgtgcctcaccaagagtttagcaacgttaatcagtgaatgcagaacagcttccattctacctgaggcctagatctgagatcgctgtgaaacattaaagtgacctcaccatacttgttttctcactcagatacacattttatttcatcaacacatcttgatttctattacttttttcaatataacaaaatgttttagagatatatatgaaaaactactgctgtagttagacctcattataaatattggtgactgggcaccatgtgagaagaccacgatatcatacaaagggagccaatgagctgttggacaaacgcgtcaaggatgaaccaaaattgtgacgctctcagcgcaactttgatctgaactcttgacaggtgggcatccaacatccctgctccttgaccctctgcaggattccagaaggctcccagtgaagtcatcaggctccgtacacaggcaccgtgggggaggcctatgtcacttcatagcctggggaatggctgtccatgtg

SEQ ID NO: 146562 - DNA, 610 bp, Homo Sapiens
atgctgcccagctcctcatcacactgtcagccctcaggagcccggtgcccaagactgactgactagggagcttgaagggccggtgttcaggccctctcctcctgcaaggacatgggcctcccagcccagcccagcctgagaaataccctcagcagcgaagcttcctgacgcctgtctgcaggcgctgctgccgccgtcgcttctggctgaagacgtttgaggacgatttgcggaattccaagtccactactgggttccagctgccttcccccggttctgactccagatccctggctcctcagccaggcccacatggagccctcccagccaccagcctgcctccatgttcactgtcggccccacagcctgcccgccccctgttgctgctctgaatccgttttccctgtgggtgtggaaccgtagatgttgctgttaccgtaggagaggcctcggggagggtcatcattgtgataaaccatcgcggttaatgacagcagaaggttctttgtcgctccccatggaccaggcctggtgcccagtgggaccctccatggccctctggtggggggattcggggggataaagtgaggattgtgcagaactgagccat

SEQ ID NO: 146563 - DNA, 323 bp, Homo Sapiens
  misc_feature (41)..(55): n is a, c, g, or t
ggggaactgaactaacatttttctttaaaaagcaaaacttnnnnnnnnnnnnnnngaggagagagatagaggaaggtgaattagactccaaaagatgaccctgctgtagctgggccctgacactgtcaccctccaccgactttgttttctcaggatggatttttgctgttttggctctcagcacctacctcagccggaatgaatgtcctggggggcagtcggggcggtgcctcagcccccttaccccacagagcccgaatgcactcctacctcaagtcccttgctggggaccccctctcccttcccacactgttgtccagagt

SEQ ID NO: 146564 - DNA, 915 bp, Homo Sapiens
  misc_feature (440)..(440): n is a, c, g, or t
  misc_feature (459)..(513): n is a, c, g, or t
aaccagcacaccactgagaacaggtcagcagaagggaaggagaggggaaaaggggagaatttccacagggaggaccaaggaaggccgtggcaggcccatttaagagacatcaccacttacggaaagaatggaggtcttgctataagacaaaaccctagtcaagtacaaaccatcacaggttataggtaacagtgtcatcatagttctcctcacagcagttcagtattatcaccactttaagttaacttgttagtttataacttgttagtgtatcaccgtgattaagaagatgatctctgacaccaacctgcctgtgtctttatcacagtatggtatatcactttacatctgtttaacttggggtatgttgtttaacttccttatgccataatggaggacaagaatcatcaaccttatctcataaggtcgttttgaagaantaagtgattgataaaaggnnnnnnnnnnnnnnnnnnnnnnnnnnnnnnnnnnnnnnnnnnnnnnnnnnnnnnnaatgtgccaggatgtacaccccattagagcatgttttattcactgagaaacctgctttgtctagactagtaagttgcatctgaagagacagaaagggagacaccaaaactttaatggcagttattcctaggtggaattttaatacaccatgtgcttttctgagttttctgatttttaacatctttgttgttaaaaattggacaacagaaaagatgtttaaaagacagaagataaagaaagggtgtggacgtgttccacattaaagaaggctaagagacatgacaactaaagagcagtatctaccctgctgtgattacaaaggagaatatccctattttaggaaatacatactgaagcatttttgaaataaacagccaggatacatgtaatttactgacagat

SEQ ID NO: 146565 - DNA, 426 bp, Homo Sapiens
ggaacattacaattcttctcttctagcaattttgaaatatatgataaattattattattaactataatttccctactataatatcaaatactagaactcattccttctatctacattttggtacccattaatcaacttctcttcatcccactcttctcctttcccttcttagcctctggtaaccaccattccactctctaccttcatgagatacacttttttttagctctcacatatgagtgagaacatgtgatatttgtgtttctgcgcctggcttacttcacttaacataatgacctccagtctcatccatgttgctgcaaatgacagcattgcattctttctatgcctgaattctattccattgtgaatttgtaccacattttctttatccattcatccattgatagacacctatcatcattt

SEQ ID NO: 146566 - DNA, 682 bp, Homo Sapiens
ttttggttggagataattaggaaagaagatttattgtttacccttgcagtgtttatggggggaaaaggtatttacagaattactgttgctagcgagaatatacagtaaagtttaaaacattttggagaattgattttgattcttaaaatgtgtctttttgcaacatatgctctggttacctataaatacattaatttggcccttgaaaacattcacatcctattctttgttagccttatttttccagtccttgttaactctctcagtgctggataataaacctgcatttcttttaaaacatttgttcagtttcggcatcagtgtcttcccccagcactcccttaatctaaattagtaacattttactgtatgaaaaatagttgctgttaactaaaaattcaataggtgagttagacatggcttttcaagtaggattttcagtggcttcagattccatcatacacaagtgtatgttttttctgtgtaagttttttccgtgtaagttttatccgtgctcaaccgtaagtgctcaaccatcttctccccacttatagacgctatgtcaaaaaactgcatgatgcttttgtgtgaagatcctggtttcgcagaatcatataaatgcattctaatggatgagagaactgtcttaagacacaacatgtgctacacgtggagcacgcat

SEQ ID NO: 146567 - DNA, 517 bp, Homo Sapiens
tttattgagtgccatttatttttaaactgtacaagtctgtgaggtaagtacggctacctctacttttatataaagggaatttacacaattggcttaaggttgaagaaatagtgtccaggttcaaaatctggtgttcctcattctgaaatcacatagtctgtatattgggccacacataaaaaggaaaatagtttatcttcttctctcttgcaaataaggacggagttattttctagtgagaaataattcttacacactttggttactggaaacttacttttttcagatgatgcattaaataaagaaaccagagcttagctttacctcttttgatattgaagtacattagctgtgtctcaaggataggggctcccatatatccatgctgccttaataggggctatagtctcaagaggatctgtgcattctctcccatcaccctacctctcacctgaacttttggaaagataatctggccggaaggagaagaaaatggagacagaaatttccccgggtg

SEQ ID NO: 146568 - DNA, 719 bp, Homo Sapiens
tttatcaacattcattcgtttattttttcattcatatgacaaatattttttaagtgcttactctctgttaggcatcctcctaggttctggaagatacagcagggaataaacatgattttctctggaatgtttatcctgctgtcttccatctattcttagcaaactcctactcatctttcaaaactcaatgctaatgtcccattttccaagaaggcttttcccaaacttctcccttgcaccactctcaaacttgtgtggcccatcaagtgatgggggtctggggttggggatacccaaggagtgggggatggtctgttcataggcagtgaatcaggggcctaaggtaactccaactcctgcctcctccctcaggcttgttttccggccacttagcaactccatggagaaatggctgccaggcacaccttttgtttgcacagaaataaccaaagaccagaaatccaggctgactggcagcacaaggaggggccccttaggaggacatgtaagggctagggtgtggagttggagcagattccaacatcagaccctgagtaaaccaaaggcagaggccagttcatctgggcaactggtgtggggcttctgtgtcataggcaggagttaggggcagggtctgcaatgggtacatggcaggaggcctcatggtcctgccttctgctccactgcacagtgggccagacttttgaaagttcctcctg

SEQ ID NO: 146569 - DNA, 360 bp, Homo Sapiens
ttttttcagctacagtttgctttattgcatcaagtccgtgacagccatgttggatcacaacattccctaaattaaaaaataccaagtgtgtgacaccatcacagtgatgtgtgatcatggactggttagccattagtccaccaagatgtcttattaaagaggaatgaatgggcaatcttaagtccgtgaccctgaagtaagaaccagatggcaggcatagtttcatccaagtttcatgggcccagaacgagaagtgggacacatctcaagcaagttgctggtttcttgaagcttagtactaaagaaatccacagctatggaggctttccttgtagactgcagtgggtggagtggctgtct

SEQ ID NO: 146570 - DNA, 377 bp, Homo Sapiens
tttcagctggaatagacaatgctttgttatcagatcctattttccattgatttaatacgccagatgatttctaaaatttatttctctatgtaaaggtagtccatgttgattgagggcaaattatctcacactgcctgaaaataagattttttaaactctaacatggtttactcatctttgcgtagacacagttggagtgtctgccagccctcatgacattgctgtgttgaagatcttgcttaagaggccataggaagccacaatcaagacacaaactgattggatcaggagggagcaattgatgtgcttgtgatttctcctcctccttttagccaggagtcagtgagatccctgtgagtgagaatttgaactaaaag

SEQ ID NO: 146571 - DNA, 542 bp, Homo Sapiens
ctttttttgttcgaaaacatcttttattgattttgtggcaagtactccacagtcaataactcgcacatctgcatatggtctgcttgcagcatcggtcttcagattttcaatttgttcgattacttcaaaaccagaaataaccagtccaaagactacatgcaccccatccaggtgtggagcaggctttgtggtactatgtaataaacatcaacacaaagatgatgtcaaacacgatgtgttcaggtgaagagagcagaaaggtttaaacacagcatgtagagaacaaagaagtaaagataaaaagataggggaaaaagttaaacatgatatatatctaaccttaaaaaccccaaaacagcaatagtagccatcttactaatttaaaaaactcaagattataatgaattacaatcatctctattagactatatgtatgcatacatatgaaatcagtttgacttgtagccataaatacacagcatgaatacacataaaaattaaagttactctcaactccaaaacaacaaaacaaaacacttaaa

SEQ ID NO: 146572 - DNA, 636 bp, Homo Sapiens
tttatttctttttcctttatttcactggctggaacctttcatattgtgtggaatagtagtgataagaggggacattcttgccctcatcccaacctctaggggaaactatgctttcaccagtttgtatgatgattctgattctgtaaggattggtaggtgatcttgagttgaggaagtttcccatgatactgctttccatactgaccgcagtatttcagattcccacaaaatgtacgaaaatagtttctccacatccttgcttgtgaagcaggttcactgcacactggttgccaatgtgtctgagttgagtgagagataatctcacggacacacagtaagttacatgaagtgaatttgttacatacagatcggcagatacctgggattcatgcattctgctccccaaggctcaggaaaaccacccagtgcagatgcagtctctctgtatgtgttcaacttgcatcacagctgtgggaggctggaaggcggcccatcctgggtttcatgctccagggatgcatggcacgttggcctccctggatctggaggtagaggctggtctcaggagattgaagtaatacctcgactggcagaatctcagggcaacatcattgaggtacagccagttgcatttca

SEQ ID NO: 146573 - DNA, 396 bp, Homo Sapiens
ccttgcatcctctaatttcagattggtcattttgttaaaacaatgagaagtgttattgtcattatactgccattctataaactcactgatacaatctgcccgggattcctgttctttggccaatcgaactctcttgatcatcgcctcaatttcatctctagcctgcatcacatctctgctaattcccaaaaccttaatcaaaggtctcttatggtccagggaaatgttaatatttaacttcttctgcagctcattcaactcctgatactccttttcatcaaagtctttgatgcactcatcttcactggtgtaaggacactgttctttttcaatcaggtcttgtagccaggagatagcgtattccacacacgtgacattttcaccacacacccgaaa

SEQ ID NO: 146574 - DNA, 694 bp, Homo Sapiens
tttgaaggatgcatttcattcccatgcttgctgtggggggggatacatgtgagggtccctatatctgtcacccagtgttttttcagtgggtggccttgggcgtccctgcaatcacacgtggctaggtcgcacagggtggtgtttggtgacgcgcagtgtgttcctcaagacctcaaaattcagtcctgacccacttagcatcccagagcctcagtttccccagctggactggttgtggggaggagtccgtggacagagcccccgaagggtgcctggtccgtgctgagtgctggaagggtttggctttattgttgctgcctccatctgtgttgggagtttggggtaggggagttcctggagctggttgttctgcagggagaggtgctgagcggttctggtgatgttgtccgggaacactcgaaggtccaagccatcacagtccacagtgtcgactcgggggcaggagcagcgcaggggacaggcccggggcaggggctgcaagctctcccccaggtgggggaaggcagcgtcttccaagccggcgacgggcgggggccccggcaacagcaggagcagcagcaggctcggccacatggccagccctgactctgccatctcgcccaagctgctgaccaggacttcctaatggaaaccaggcggtcacctcctggagcctctgctgtggccaccaccg

SEQ ID NO: 146575 - DNA, 493 bp, Homo Sapiens
  misc_feature (476)..(476): n is a, c, g, or t
gcgcccgctgcggggaactgtccagtgctgaaaacggatgcggcccggcccgcagagctcagacccaagcctgccgcacccagcggagctcgaaccgagctcctggaagcgctgacgcagagcgcagggagagccggagcggcgagctccaagcctggcatggacctgcagagacccgattcctaccagggaggagctggccctgacttcaacgaccacgtcctgcataaggtaaacatctcctgtattcctcaacctaacgttggaagaggcgccagcaccaggagttttctccactcccctgactttgctttgggacttaatgagaaacatagcttgtatctgtgagtctggggagccctttctgtctgatcctgtttcctgctcaaaacagagatgcgtgagctcgttgtggaagggctgccgccagaggctcagatggtcagaagcttcattcattcacttacatcatctgngttccttttcaccccct

SEQ ID NO: 146576 - DNA, 395 bp, Homo Sapiens
gtgaggccatcaccattgttgtcttcatatcctcaacttttagaataggcctggcacgcggcaatgaattaattatttgttgaatgaatctcagatcccaaagctgagactctgccttgattcctcaccttccctgtcatccccctcacagaagccatcagcaagtcctgtgggctctgcctctcaagtatctcgcgacctgcccacttctggctctaagcacagcacccaggcccatgccgccatcctatgtcacctgtatgttgtcctggcctccttgcccgcctcccaatccgcccttcactcagagctaagggaccacataatgatgttgatccgaacattaactgaccccctggtctctgctggggtctcatttcctcactagagcccag

SEQ ID NO: 146577 - DNA, 548 bp, Homo Sapiens
gtagatagtgcggaactcttcctctgtgagatcactgaacttggtgactccatactgagctgtgccacggtccagggcctggatcttctgtgctcgcaccatgttattgacaaagacggacaggcgccaccgggcttcttcctttgactcatatgtccggttataggtaatgacaaagttcttgaagattgaagccatcttcacaggcaagtcctgggacaggggatcctcattcaacagggaaatgactgagctgaaagtctcgtttctgttgtctggatggttttgggacagagaagaaatcatggctgagccctgagtgaaggctgacttgggctccccagcacctggaaccttggtgtccactgggccacagtccttccgcagcagcacgtgtcttccgagctcatccaggacttggaagctgcagagcagggttttcttggacacggggagccggcacaccatggggtcgttgcagggtggctcctccagggtggcctccagggagtacagcgacccctggcccgcccggcggacgcggccgc

SEQ ID NO: 146578 - DNA, 1267 bp, Homo Sapiens
tgtaattttgctgttgggcagcccggggttttctatgtttggcctatccatgctcttttttaaaggtggttagaggccgctccgttggtaaatgagctcttcttgcctggttttaaggggagctctttaggtgcaggcgttttttgcctgtggtcttcggccctttgccaagagcctaaaaagtaatttgtgaagggggttcactctggggttctcatggggcgacccccgggcagggaaggagggaaatatttgttcctgggggtgtacccttgttgttggccggaaaggggttttcattttggggtcaatggggtaggtcacccaccccgactgggcccggggcaagggggctgggcagtgttggcggagggcccggggattgggccacgggaagatccggcgggcgcccggctggtcctgcggccttgcaggctgtgcagctgctgctccagctggtagacgtcctctgtggcctggttgagtcggtcaaactgggtgagcagggcctcgaacacggcttggaggcgggagggctcaggctcacaccttgtccccagccggcccaggctcacgctcagcccatccagctggctggaggaggtggaggggtgcgaggcatcggagccagcgctgggtgggggcacatccggggataccttggagcccctggaggagcgagagggcagcggctccatcccttcaaagcggactttgtggcggaactccttgaccttgctgaggcccatccagaggcgcagcctgcgcaggaccaactccaccatctcgtagtcctggggctcccaggccggccggtacagctctccacgcaaggcgtggtagcgccagcggagaataacagcccccagccgtagggcgccccacagccgcagtgcccagagccccacacacagcaggggtgacaggtgccaggactcggcaggacacagggtagagagcccagtcccagggcacagcaccaacagggcctgggccacgctccagagggagtccacacaggaagacacgagcaggatggccagctgggcgtaggctaccccgagcaccaccaggcccaaggtgacccccaggagctctggcagagctcggcataatgtcttgccaaagacggaccactggcgcacgaagcgtagctgctgggcagccttgaccaaaagcaggaagagcagcgaggccgccaggccacgggctgcggagctcagctgcgccacctggtcgaagctagtgaagcggcgcgggcggccgc

SEQ ID NO: 146579 - DNA, 1056 bp, Homo Sapiens
  misc_feature (11)..(11): n is a, c, g, or t
tcccgctttangttttttgtcggcgttcacgtgttcccgctcaaggggcgcgaggggcgtcttttcctgttgtgagagtggtgtggggtcgttcccggaatctccctggggaggggaggccaagggtgcggggttgggggccatggttttccaagatccttccggttgggttgtgcggtttcccaaggcgggggcggggcgttcaggacaaaccttgggtaaaccaccgggtccacttgtgtcagggattggggggttaagcaaccgttgcttcaggaacagggggtcgggggcaggtggtcggggcaggccgcacgcagggggattaggcagggctgggggctccagcagctctggcagctccaggcgggggaaggcaggcggcatggaggccgtgggggacactggagtcaggctggacagcccgtcggtcagcgtgtccacaccaacatccagctctgtgtagtagaagtcctcctcaccatcactctgatcaggctctgcctgcctccccaggtgcaccaggcggatgtgtctctgcatcgccgacgccgtgctcagcaccttcccgcagctcttccacagacactggaacatgacctgggccgggctcttcctttttctcagggtgggctccccaaacagaaagtgggctgcctcggggggcagtgggggtgacggggtggacggagaggactggtcactggccaggtcccatccccagtctccactgttgctgctgctgctgtagctgcctgggggccgcaccagggcctccttccagggctccaggccaggctctgggctgaaggctgcaactggggcccccagaaggagagggctggtggacaggcttgtaagggcagcggcagccatgacctcgtccagccgggcttttcctggggtggctctctgcgctgggacggggatgtgcgccgacggagtccggggccccgccgccgcccccgtccacgtccggggggcccccaggtccgaggcccgcggctccgactcctgcgcctcgtgccgaattcgccacccaggcctcgctacctt

SEQ ID NO: 146580 - DNA, 467 bp, Homo Sapiens
ttttgaagatcaacattttatgtaaagtcatcttttaaggagggcgcagctcccaccgtggccctctctgggactgttgctccaacccaaggaaatgtgagtaggggccgagtaacagacccagaaggggcagcctgaaagcaatggggtctcaaaacaatagagaacgtgggcaggttgggctggggtgtgggcagaatagacgccagctcatccgaactggcctagagtcaaggtgctgaactcctggctccatcgaagcacaacgtcctcacttttgccagggctcagcgcactgtaagtctcattctgcagacatctcatgcgggacaccgagacctcaacgtccaagtcctggcccagccaagggttcttcctgtggtgctcttaggaccctcctctgttatccaccagctgcctaggagggccttgcttccgccaggactggaggaatggaggagagcctg

SEQ ID NO: 146581 - DNA, 356 bp, Homo Sapiens
gcggccgcagcgtggagcagtcaccaccccgggagcgtccccgggccgccggccgccgtggacgcatggccgaggcttcgggccgccgcggctcgcccagggcccgcaaggcctcgcgctcccagtctgagaccagcctgctgggccgcgcctccgcggtcccttcggggccccctaagtaccccacggcggagcgggaagagcctcggcctccacggccacgccgcggcccagcgcccacgctggcggcccaggccgcagggtcctgccgtcgctggcgctccactgcggagatcgacgctgccgatgggcgccgcgtgcggccccgagcccctgcggcgcgtgttcccggcccc

SEQ ID NO: 146582 - DNA, 407 bp, Homo Sapiens
tttttttgtcctgaccatttattggggactttttgctcagcactgtaggaggaaagaaggaaggagggatggaagcctcttcctctgcttctcctgtccctagaaccgtaaagcccagacgtcctgcttcccactgggaccctcaatgataacagggtcagtgactgactctgaggcagcaaggacagaggagaggtggaccccgtggtccaggggcccgggcgtggagctgacaggaagaacacagatgtcaggacgggctcagcaacacaggtcccaggtgtccggggtctcctgaactccaggaagcagtgacacccccgagtgctgctgtgggtgggttcttagcttacagcaggctggccaggcagcccaggcttccggggctggttggggccgatgtactg

SEQ ID NO: 146583 - DNA, 438 bp, Homo Sapiens
tttcgtaggagtcttttattttttggtgtcttaaatgtcaatgatcacaaaaacttccgggttctcttcattatagacctgcattgctgaatatgttattgctttgacttctgttccctgagggtgcttggacaatgaaaattcttctccccacactcgtacttcctattgactggcggatacttggccttgatcgccttctgttcttcagtcaaattgtaatctctaacatcttcctcttcctgcgccatgactgcaggattagacactctacttccgcccttcatccaccggacttcggcccggagttactacttccgctctagactccgccccttggcgcacacccttaaaggaccacactcctttctcggagttggctgttgacctactttagtccctaccctgccgcttggatcgcatatttaaaaagccaaa

SEQ ID NO: 146584 - DNA, 515 bp, Homo Sapiens
ttttttcttcgtaggagtcttttattttttggtgtcttaaatgtcaatgatcacaaaaacttccgggttctcttcattatagacctgcattgctgaatatgttattgctttgacttctgttccctgagggtgcttggacaatgaaaattcttctccccacccaattgatggtaatttgaaaatttttttgatcaatgttaagtactttcacttcccggggggtatgaagaattcatcagccctgaacttataaagccatttcatccaaaaagtgaaacagaagaggctgtaagtcatctccttgggtttctacttctactgtttggaggggctccactgtcccagtatctgtcatgtaaccaaacatggccattgcacattgctcaaatgcttcctccagagtatctccccatgcgtgtaacctaaagaagtatattcatgctctgtgtaatacaatccaactcgtacttcctattgactggcggatacttggccttgatcgccttctgttcttc

SEQ ID NO: 146585 - DNA, 1018 bp, Homo Sapiens
gactctgaaatttttacccccctccggggttgtctttgcgccgaattgaatattttggcccagagggctggcgggggccgcgtaaaatattggaaatattccgggagctctccggcgcctggggagatcccccctcgttcggattaaggattcccaccgttaaaatggacccttgcgaggacacctcccccattcgtcgggagatttggtttccaggcaaacgcgttttcggcgttgggcccgccccgggggggtgtgtttttaatgtgggggggaggaaatttcccaaggcccccttacgtcccaatggcgccccaggatgttttccctttagggagaaccacggcttagggcgccactgttgccactttaccctaactgggggccccgcggcggccaaacggaatgggttttagaaaactttcttcgagggccggaggcgggccgacaagttttcctcctgcgctcgctcgctgtcggacgcaggagtcttttattttttggtgtcttaaatgtcaatgatcacaaaaacttccgggttctcttcattatagacctgcattgctgaatatgttattgctttgacttctgttccctgagggtgcttggacaatgaaaattcttctccccacccaattgatcgtaatttgaaatttctttgatcaatgctaagtactttcacttcccggggtatgaagaattcatcagcactgaacttataaagccattcatccaaaaagtgaaacagaagagactgtaagtcatctccttgggtttctacttctactgtttggaggggctccactgtcccagtatctgtcatgtaaccaaacatggccattgcacattgctcaaatgcttcctccagagtatctccccatgcgtgtaactggacatctgctgtatgatccaaatactcgtacttcctattgactggcggatacttggccttgatcgccttctgttcttcagtcaaattgtaatctctaacatcttcctcttcctgcgccatgactgc

SEQ ID NO: 146586 - DNA, 927 bp, Homo Sapiens
ccaaacccgggatttcaaccctcaagggcggctgcggacactccaggaatcccttttctggggggaagggctggaggggctttccattgccacgggaaaggggcatgaggccacacttatggcccccggcaggagaatcaaaggggaccataactgttcccctgggggggtggaagaatttcttataaagtgggaatattgggggaacccagaccaagggctgtgccgtgattttccctttttgaaaagtcacactttaactaaaatatttcgtttctacaaaatttccatatatcaaaaaaaagctgtagaatttaattcatagtgtcttctcaaaaggaagaggaaaacaaaaacagttcttcgtaggagtcttttattttttggtgtcttaaatgtcaatgatcacaaaaacttccgggttctcttcattatagacctgcattgctgaatatgttattgctttgacttctgttccctgagggtgcttggacaatgaaaattcttctccccacccggggtatgaagaattcatcagcactgaacttataaagccattcatccaaaaagtgaaacagaagagactgtaagtcatctccttgggtttctacttctactgtttggaggggctccactgtcccagtatctgtcatgtaaccaaacatggccattgcacattgctcgaatgcttcctccagagtatctccccatgcgtgtaactggacatctgctgtatgatccaaatactcgtacttcctattgactggcggatacttggccttgatcgccttctgttcttcagtcaaattgtaatctctaacatcttcctcttcctgcgccatgactgcaggattagacactctacttccgcccttcccccggccgtaatggccgaattcccgggcatatgtccggtaccgtcgactg

SEQ ID NO: 146587 - DNA, 677 bp, Homo Sapiens
  misc_feature (335)..(335): n is a, c, g, or t
gctttttaattgctgaatatagagtgttgtcatggtgatgacataattaatgtacgagcaagtcccaatttcttccacatttgatagatttctgcaaagaataatgaagaacttgacaagcaaaattgacaaggcttgctgttgttcctctaacccatctgccattttctgaacacactgtagaagctggatcctcagaacctgcagaatattatcaggaagcagagatattcctggaggcatatcatctaccctggtaggcagcttttcaaagtcaacgtctaaaaattgttcatagctagaaacaaaagtgtccaaccacagcttcaggtaantctggatctttctttgtacaataaagcatccaaagttcaaagagcctctctctggatgccattctggctttcactctggcactttaagttttccttaaaaaaattatgttcaagactacagcatgtccattttattttccaagtttttcagccgttcagtaaagctcatagcagtaaggaaagcaaaaagaagtgaaacaaatggactgtcctctggttaaaaacaaaaaggcaatttcagcagtcactccaatatatcttcatcagtggtagttgggcaattaaataaatattgtgtgccgcgcggcagccgccgcccggcagccgtctaactgcttccct

SEQ ID NO: 146588 - DNA, 665 bp, Homo Sapiens
tttttgtaaagaaaaagaaatttatttttcacagttatggggtctaagaagctgtcagttcgaggtgagtctggtgagagtcttattgctggtggagactctctgaagggtcccagggtggcgcaggacatcacatggcgaggggctgagtgtgattgcgtgtgctagctcaggtctctcttcctcttcttataaagtcaccagtttccatgacagcccattaatccaggaatggattaatatattaatgggggcaaaacccttcatagtctaatcacctcccaaaggcaccacgaatcaacactgccacttctgggttatgtttcaacatgagttctggaggggacattgaaatcatagcaaccaggtaccaggaggcatattaatttgccacaataatgaaatgatatcgggtacagaaactgcacttggagtcaccatctggctaaatttacagtactctattgtcattctagaagatccatctatcttctgctcagtccaaataatctagttgaatgggagtatggcaggaatcatcatccctccactcttcaagtccttgatagtgacaccaacatttgtaattttttctgcaaatgcaatattgctttttatattatggttttcctgggcagaagcaattgctagtggcttccgttcgg

SEQ ID NO: 146589 - DNA, 927 bp, Homo Sapiens
  misc_feature (44)..(44): n is a, c, g, or t
gcggaccgtcgtggggtggaggtgttgtgacagaatagcttgtnagtcagtcgggcggcacccttacgtagccttagactcttcaaccacagcctcgtggcaggcttgcaccagatagtcggccagctgcggctcaggatgcgcctctccatctcgagcaggaggcgggcagaaacgtgcaagtcacggcggagctgagagcggccctgcctgctaggcgcgcgggcgaatagacgaacgtgtgacatcaatagaaggggtcatacaaaagcggatacgcattaatatcaggagaagctcgtcagagcaggtagggcgggacccgacatacatctgcctccactgggtctcttgaactcctggaagggacaagggggtggaggcgtacttcaagtcccccgtatctctcgcaggctctccaaactaatggtggatccacggtaaatagagttgttccagctgggtgtttgatcaaaaaatttttacagagtgttgtttttagagaaattcaatttccaactggattaagagattgtttcgatcggttaaatgggtttttgtgggaatttttccgaagatcaccactgaattatccgttctatcatctcttcacccatccaccaatgcatctcctgtatggacgtcttgattgttaactcacggcactggacctccagtttcatgcctctccacattgcagggtcctctacgttgttgtatcagtcacctttctcgcggaagcacctgccggagctgtgtgcaccctttcctgccctcaacacaagccgtcggcgttcactactgtagctcattcagaccctactctccaacctactgtccaggcacagaaacgacagttaaggttcccccggaccgtacgctggaccttgcctccccggctcctaacgggagacgggctgccgtccc

SEQ ID NO: 146590 - DNA, 535 bp, Homo Sapiens
gcggccgcccgggctccgcggcgcctcctcctggccgctgcgcgcggaaccggccggcgcgcctggccgcgggctgtagggggccccggggggtcgggtaccagggcccggcaggaggagtagccgtagacgtccttgctgcgcaggatgtgcggggagaactggtgcttgaggctgcagaggaagctccagagctccgcgtccgagctcatgaactccgtgctgcggggcatgaagagcttgaaggcgtcgcccagcgccttggtgctgtcagccagcgacagttgcgaccgcgagtacaccaccttctcctcccgcgcctccaacccagccccgtcttctgccctaaagtcgccgccccgggcggccgtggccggggcgaccgggcgccggcgccgccgcctcttcatactgcgccgcatcgaaggccgctccgggccactcacgctcgccgggtcccactactgccgccgccgtcccagtccgcgttggctccgcggcggcggctgctgctggcgtctctcgctacttttct

SEQ ID NO: 146591 - DNA, 472 bp, Homo Sapiens
ggttttaataactccagagtaaggaactcgggattgtgcggcaaaggccgcgcattgcactttgtgagcaatcggtaaatatgcgcaaccatatgataggaaatatatgcattttcattgataagaaaaaaagagatgatggtatttttaaacagaagccacaaacaggcatacctgtgccattgttggggagctaataataaaggcactgatgatcacaggagtaagaacaattgacttggccaagagacaattttaagctgggaactgtattcggctgcagttcagaaagtggacttttgagacttgtcaaacgaatggaagaattttgtgccaacaatgtcccagctttgcaggcttggcagctgaggactcagaagtaacaaattaatgccaggtgaattattattgttactactattatcaaaatgtgttccagttgcagcaatacaatggataagcaacttcaaaa

SEQ ID NO: 146592 - DNA, 540 bp, Homo Sapiens
cagaaaacaacaatttgagtttatttccaggaaacagggcctccacaacaacgtgagaaactgtcaggtacaaagtaagttatttgcgtcctgcggcttcagccaggagcgtggctgtcgcttttcccgtcttctccatcaccctctggccaccactgcgtctccatctgcaccgcgaaccccagcagcagatgcgctcgccagccaagcgaagctgcggagaactggccttgggccgatcccaggagaggccaaggagagaggagcaagagcgccacaaaagcaggcagcgccgccgccgcagtcgtatccatgccgagtttgggagaagtttcaagcagctttgcaaagagctgccggggggatcgccgcgaaatccacgacggaggagcgggccgggcctcgcggggtgaggacggtgagaggacagccgcccgcccgccctttttccttcttcgcggtcgccaaactacctcaggggcgaaagcgtcgccagcgtcgccggccggccgcggcggcagctctccaatcccgggaatt

SEQ ID NO: 146593 - DNA, 743 bp, Homo Sapiens
tctagtaataaaaagcaaatttattacccaaaactagtaaagggggaagtagccagattgctatttaaagtaactgcttcaatttttagaggggaaagcaatttttagggtttttaaaagggaagacttgataaggaaggcatgcaagaaatgggctgagtatgatgtctgtgtgttttgttctggtggctatcttgggcttcagtccacctggacctcggattgacattattttaacaatggtcaggttgttaattagccattttgaagtaatttttggaggtttgcagctgggtctccaggcttggtctgtctcaagattagccactgaaacttctaagacatcacacaattaaatagtagcatacagttagataaatgaaaagggagcatatctggtgagaaaggggagggacgtggagtctattttaaggctaaggagaaaggattttgagtttcctcaaggttatatcttgaaactgaagagaatgggaaaaaagtttaaaagcatgttgaagttaagctgcgggctgcattgcttctcagatacctgctactcagcttccctcctcattcactctgctccagccactctgatctccttgcacatgagccatgcctgtagtccgcggcctctgcactgactgttcctctgccaggagtatctatgccccctgcctcacttcatgcctcagatgtcatcttctcagtgaggcttacattggtcaaccctttctcagagg

SEQ ID NO: 146594 - DNA, 744 bp, Homo Sapiens
cccagctgtgtgtgtgtgctttttatatgaagacactaagatttagagaggtcgagtaccctcccaaaatttatagcagttgaacctcccagatctcagatcactgtcttgtttcaaagcctatgatattatgcatttggtaatcactaaagaacatatctaggtattaattctttagttgaaacattttgaatttatgacattaccatactcttaagcaattatttattgaatatatacagtgtcctgtttctttttgttcttctatttcttcttatccagttcaatattcaaccatgttccagttacaataacagagggcttactgtaatgagaattgaaattcaaattctgagagtctgtattcgtaactaattatgtatgtgtcatagtttctcagaaaggtatgatattcatgaaaatggggattcagtttttcttcaaagataagttctatcatagtagaaaatagtgttattttcaaagcagcattactctaacttctgaagttattcatagttgaaggagaacattctttatttttaaacaaacatacatacacatccagtccatgcttattttggttgacttgataaattgtgggcaatatatgtgtatatatgggtcattaatgatgataggctaatataatatatttggggcacagacaaagtttcataatatattgttaaatggaaatcaaatagaccaaacatgcatgcagcataattgtatttttggtaa

SEQ ID NO: 146595 - DNA, 650 bp, Homo Sapiens
gagtaatactgacctaaccgcgttgttttatttaaaagtattccacattcattcagtaaaaatggaaaacagtaaaatcaaatacttgatacattttaaatacacaatgtataaacatgttaccagtcattaaatttgcaaatgtagaacaacatcaaacatgtaatctgcaaaattgttagcaaaacaaagtgaaatagtttaaaaaactaaacatttaaagaatcatgtgatagtgaccgtgaaatgattatattctgacttcttaaaaagagttactttttactctttttatacaagttatgaaatgggtcagtggggttattgttgagttgaggtggtgagcaaaatcttccagtggctgctcatccaaactggggaaagaaatggtgaggaggttgtgacaggtcaaagccctggatcttccctggactcctttgtcacatgccttgccttagttggatggctctggaggggctgtgccgatacctctgtggtgtccggcagaggtcctggatcagtttcaaaatagtcatgaccatattcttgctcagaaagtctttgaaccaaaaacatatgtatttttctgtttgtaaagtcagttttgtttcattacccccaaccttttattttgacaagtttcaactcta

SEQ ID NO: 146596 - DNA, 519 bp, Homo Sapiens
  misc_feature (449)..(449): n is a, c, g, or t
  misc_feature (495)..(495): n is a, c, g, or t
aaagcttataatgttgactttatttcaccgtggaaattttgtgctcaaaggtaagaaaccatcttatataaaacaatcaaataaatacataaatacattaaaaaaaatgagtcacttcaaaggcggccacagggttgaggaaaaagccccttgtggaatcagaagcaggtgtctgcagccaggacttcctcttaatgccgcctcagcactttgcagcccaggccacttgaggagctggatccggtccatcttcctcccaaagcagccagacccttgcaccatcttggggcttcgtggtgcccgcagggtgtagaggaccattttgcggtgcccacggatgccctcggtggctacctcccgggacttccaaacacctgtgggacgggggctctcctggaggggctccagggatgtctgctccacctgcagctccgacagtttgccctgcnaatggttgcgctgctcctgcaatgaaatggggcgtccaagcctcanggacccaccccctggctcaccaac

SEQ ID NO: 146597 - DNA, 440 bp, Homo Sapiens
ttagacaaataagggtttatttcccctatcactgtgaacccggagaccagccatggctggcattgtttccccagcccagtgatggcagggctgacgtcctctgtaatgcgcttggcgtttcccccttgtttacagcgtggctgatgctgctcctggcgttgcatctgcctggctgatcctcctggggtgggaccaattctggaaactgcagttgcaggtggaagaacctggacttcggaatcacaaagacctgagttctctgctccccaaggccagcagtgagtccctgagcaagtcccaccttccaggactccaggttcccactccagcaggttaacagtgccagtaattctgctatcattgcgcctccatggggtgcggggagcaggctgtgtgggcccttggaagctccctaggaaaggatgaaccccacagtccag

SEQ ID NO: 146598 - DNA, 551 bp, Homo Sapiens
aactctatgaacaacctttattaaagtaactctgggaggaaacaccctctcctccccagcgggtccatgtagccttcagaaaagattccgcaggctccccagagggctgcagagccaagagcggggtccaagcgtcctcggatgaaaattcagctgagtcacaattgtttcggagttttcagtaaagaaatgtatttttgcacccattttttccttggatgggtacagactttcttgcctcttttggtagtgaatatcacagcccgctgggagcagctgttactggtgaattcatagcttcgcacccaggtccagggaaggggcttgtggctgtattggaagcagcaggtcttggatatgtcactcccacgtgtggcagttccaaggtggagactcaggagggaggccaggagcacagcagaggccaaggagaggcccatcatgatgctgcaaatcaggcccttctcaggtttctcccaaactcctcctgcctgatccccttttatgagactgagacggccctggggtctttggctcagcctcaattccag

SEQ ID NO: 146599 - DNA, 1946 bp, Homo Sapiens
  misc_feature (83)..(131): n is a, c, g, or t
  misc_feature (175)..(268): n is a, c, g, or t
  misc_feature (294)..(312): n is a, c, g, or t
cgggaacggatcgacgtacgcgcgggacctcaacggggatagggaaagacggagaggaacggacggaaggacgggcgaaggcnnnnnnnnnnnnnnnnnnnnnnnnnnnnnnnnnnnnnnnnnnnnnnnnncagaagacctaaaaacaatgggtaagggtcggccgggaggggcnnnnnnnnnnnnnnnnnnnnnnnnnnnnnnnnnnnnnnnnnnnnnnnnnnnnnnnnnnnnnnnnnnnnnnnnnnnnnnnnnnnnnnnnnnnnnngcacggcgcaagagcggacaaacacnnnnnnnnnnnnnnnnnnnaaaaaaaggccggaagggcgggtcagagccggggaagggaaggggcgcgggcgccgcgcgcgacacttgagggccttaacggcatgtggccgcagaatgggagacctggccggcgcggccactcttcgtctccaggttctggaggacgcctacggccaccgtctgcctcatgtggcgcacggcgaagcggccgagaggcgggtactgggagaagctctccacacacatgggctttcccggcaccatctccacgatggccgcgtctccagacttcagggacttggggttgtcctccagcttcttgccagagcgccggtcaatcttctccttcagctccgcaaacttgcaggcgatgtgggctgtgtggcagtcgatgaccggggagtagccggcgctaatctgccccgggtggttcaggatgatgacctgggaggtgaactgagcagcctcctgcggcgggtcagacttgctgtccccacacacgttgccccgccggatgtccttcaccgacacgttcttcacattgaagccgacgttgtcgccgggcagagcttcgctcagagcctcgtggtgcatctccactgacttcacctcagtggtgatgttcactggcgcaaaggtcaccaccatgcccggccgcaggatgccggtctccacccggcccacgggcaccgtgccaatgccgccaatcttgtacagttcctgcagcgggcaggcgcaggggcttgtccgtggggcgcgtggggggcaggatggtgtccagggcttccagcagggacacgccgcttgcgttgccctccttacgctccaccttccagcccttgaaccacggcatgttgggggagggctccagcatgttgtcaccgtgccagccggagatgggcacaaagggcacggtggccgggttgtagccgatcttcttgatgtaggcgctgacttccttgacgatctcgtcgtagcgcttctcgctgtaggccggctctgtggagtccattttgttcacgcccacgatgagctgcttcacacccagcgtgtaggccagcagggcatgctcccgcgtctgcccattcttggagatgcccgcctcgaactcgcccacgcccgccgccacgatcagcactgcgcagtccgcctgggatgtacccgtgatcatgttcttgatgaagtcgcggtggccgggggcatcgatgatggtgatgtagtacttggtggtctcgaacttccagagggagatgtcgatggtgatgccgcgctcacgctccgccttcagcttgtccagcacccaggcatacttgaaggatcccttccccatctcagccgcctccttctcgaacttctcaatggtccttttgtcaatacctccgcatttgtagatgaggtggcccgtggtggtggactttccggagtccacgtggccgatgaccacgatgttgatgtgggtcttctccttgcccattttgctgggagtgtgaggggctggcgggacccggggtgctctggctcagggcgaggggggctgcagtgattccggagccgagcggacgcgtgggtcgacgatatcccgggaattccggaccggtaccagcgttcagtgagcggggggtgtcgtctgtgggtgggacgcggcccgggac

SEQ ID NO: 146600 - DNA, 687 bp, Homo Sapiens
  misc_feature (377)..(377): n is a, c, g, or t
cagaccgaagcccagagagatgaagcaatttgcccaaagtcacataccaagttaactgaagagttggggttagaatccagctcttgtgacttctctcttttcagtttcccttcccactccccgcactgaaaagcttttgagtgactcttttagaaatcccggttctgtatatgaagcagaattgagcacagctgctctaatgaagggctcagagctcccaggcttttctctctcccctgccccttttccctgttgcacctctgcagtgtcctgagggttgatggaatctagtttgaaagctattgctctacctcactgcctcctgaatgcaatgtcacaaattttcccaacttgccatttctctcacactgacatanaagcattagaaacctgttgtgaagtaggaaagctaactgggtcagtagctgataagataatctggcctaggggatagatgattaggatttcagagaaggaaaggtcacccaattgatttgactctgtcctggggcgatgatatggtgaagatttctacagatgcagcagaaacatccggaaaccaggtgtgtcccagctctggtctgggaaccatttcataaattggcaaatatccaggatatacacatggctaattctgaggtgtactgaagtttcaataaagctactttggtaatgactgggagaaga

SEQ ID NO: 146601 - DNA, 221 bp, Homo Sapiens
aaccagtgaagatgggggctaggtagtaaataccgcagcttccctgtcacccggtggttacattctacatgttccttagtggacgtgagcccccgctgtacactaactgaacccaagtcccttgtttagagtcggaggaacccaactaggacactcagaatggggaatttctctttcaccttcgtcccaaatgtgtctcgtgaaccatcccttgcaaattt

SEQ ID NO: 146602 - DNA, 599 bp, Homo Sapiens
  misc_feature (316)..(316): n is a, c, g, or t
tgaacactccttgccaccaactgtgtgggttttctcccacactggccaattctccaataccaactggatatcatacaattcaattctggcattaatcggcattaagtgcagatccccagcaggttaagagctcagtcccataagatctcccccaacttcagacaccagtcacaagcagtaggttccaaagttactcacatcttctatctgacgtggctacaaagcagaggttcccatgatttccttctcagatttcaccatttgctagagtagctcacagaactcaggaaagggctttatttactatcatcagtcntattataaaataatataactcagaaacagccagatggaggcacaggaacaggtttgggggaaggggcacggagcttccacggcccctttgggctcaccactcctcatgtattgagcaatgcagaagctctctgaaccttgtcctttagatttttatgggaagctttattcttaggcatgattgattaaatcattatccatttgtgatcgactcaaccttcagcccctcttccttccccaaggtctgggagtggggctgaaagttccaaccctctaaacacatg

SEQ ID NO: 146603 - DNA, 436 bp, Homo Sapiens
  misc_feature (281)..(347): n is a, c, g, or t
tttttgaattttctctccctttattctgaaaactctaccccctcacatccctaatccctgttctgtccctgccacatacacacacagacgtctgaccctgcacctccaagttcccaaagatattgtacgtagaaaaaacaaacctttttttattgacattcacactcaacactgaacactccttgccaccaactgtgtgggttttctcccacactggccaattctccaataccaactggatatcatacaattcaattctggcattaatcggcattaagtgnnnnnnnnnnnnnnnnnnnnnnnnnnnnnnnnnnnnnnnnnnnnnnnnnnnnnnnnnnnnnnnnnnncagtaggttccaaagttactcacatcttctattctgcgtggctacaaagcagaggttcccatgatttccttctcagatttcaccatttg

SEQ ID NO: 146604 - DNA, 754 bp, Homo Sapiens
ggtattgccacactgttgatgttcatgttgcagtggtttgcagacaaagtattactggtggaggtggccagtcttgaagagctgtctttctctccctgggacttcttgatctccctgtagtcgtcttcgttgtcacacttgcgtttcctcttggattttggcaaagccttttctgcaggtgtgtccgaggtgtggctgggcggtgcgctctcagagtccttggtggcaggggcgctcaatacccctggctcctggggcaggtgttctgggatcctggacaggagggtcaggtcgattttgacccagagagacctgatctcatcactgtcctttagaggggagagaagttcgttccggccaaaggggaccagtgtgtagaactgctcctccagctccttggcgatgtcactggtggtcctggcgttgatggagcctacaggggccctaggaccactgcccccgttggcagcggcctccttcagcctctgatcattcccggaggaggcagaggcagccacggtctgtgctttggacagagggtactcctcctgctccgactccaggtcggagtccgaggaggaggatgaagatgacgactctgtctcaatgaactccttggatttggggacgatcctgcttagcccccgcgtgcggcgcttctcgcaggtcacggaggagcgcagctccttgcggtggctcgctctgttgttgccacagggcctggttttggtgggctccggggggaccaccacgc

SEQ ID NO: 146605 - DNA, 568 bp, Homo Sapiens
  misc_feature (130)..(130): n is a, c, g, or t
gcggccgcgaacctcgcgaccctgctcgacaccaacatcaacaccaatctcggctcgggcggcacgcgtatcgacacggcgctgtcgagcatgaatacgctgatatcgagcgtcggcgacggcagcgcgntggaacaacacgctgccttacgtcttcctcgtcaccgatggcgcgcaggatccgcaggtcaagggcgtgccgaacggatcatggtccggcagcaaccatgctaccacgatcaatccggcgacgtcctgcacgccgctgaagaaccgcggcatcatcatctccgtgctctacatcccgtaccagccgatcaatccggtcaatgcctcgtttgccaatgacgaggatgattacgccaactggaacatccccaacattccggccagtctgcagaactgcgcctcgcccggcttcttctacacggccaacacgccggccgacatcacggcggcgctgaacgcgatgttcaatcatgcggtccagcaggcgcacatcacgaactgaattcggcttcaactcgcggcacgatagtccggcgccgttgccagaaaccgcgcatag

SEQ ID NO: 146606 - DNA, 916 bp, Homo Sapiens
  misc_feature (222)..(247): n is a, c, g, or t
agagaaacttgttattaaatttatttttctttaaatatgtaactttctcccaccctcacccactccagggaggaacagaaaatccccacccccttccattctggagatttcgtatctaaagcctgagaggcgaggatgaagtataaaaatactatttacaaagggaaggaggtatctgttgcttaaccgtagacacccccatccccacaccccttttgatcnnnnnnnnnnnnnnnnnnnnnnnnnnggcccctgggaatcaatttaagtatagaactagccctcctctagaggggcccacaaacctcaacatggaataggaagctccgagattaactgaggaagagactgaatggatagcaccgtgggtcctggcaggggaagggccctctcttactctggagtcagctggcgcccgccagcctttgtttccataggtcccatgtaaacactgacattttcctttatgtccctgctcttctgtttcatacagagcctccctcgcctcccgtggaggcgcttggttccttgatctttccttccttcccttctaaccttactccggaaggagtgggaaggggagggaaggttgtagagaggtaagagcccgtctcatcccttctgggtcaaggcagctcatcctcctaatgggagccttgaaagaggactttctccatgttcttgatcggggtggacaccttcccccagaacagggacaaggcaggtagatagtccagtaccaggagacagtggtcttgatgggtgaggccaccagcatggagtagcagggaagaaggcttcaggaggcaggaagtgggggcacatctggcactggtcttgcactgagggtagaagcccagtcctagaacaaccttctcatcactgggaaagtgatcctcatcaccctacagtcctg

SEQ ID NO: 146607 - DNA, 682 bp, Homo Sapiens
tttaattgaactcttagcttctacctatttccatttctttttttccaggtactaagttatctctcccttattttatacaacttcctatcttcctacctactcccaaattaataaatcccaattaatcaatcaactcccaattaatcaattatctcccaattaatcaatctctgctaagagttccttacccttccactgagcatggctactttgatccttttaccccaaacataagtatttataatatttttatacctttgtatagtatccattttataattttaccatattctttaatagcgactcaactgcacttctctgatattaagaccatggataatataactcaagagtacgtttttttcataccaacaattccatggttggcagtgtccaagtggttaaaaacatgtctctaaaattaataaaacctgggtttgagtcctagttctgtcatttaataattgtgtgagtttgggaaattttctaaatcttatctgcttccctatttgtaaaatgaggagaggaatacttattttataggtttcccgtgataattgcgtggataatgcaagcaaagtgctgcagatgttagtggactcaatgtaagtagcaagtaaatacccctcgtcttagcctcactaccgcatcagctctccacaaaccttgcaaaacaaatctt

SEQ ID NO: 146608 - DNA, 812 bp, Homo Sapiens
attacccagtgatttaattggtggtgtggctatagggcacccaagccttggggaccacatgactctcccccaggaaaatcatgaagcagggcagtccccagccctgggttagagctgcctcctctgagcgtgttctccccggcagcccttggagagggaggaggggaccccctctgggagggtccaggcatacccccaggtatcctgcccagcaaatcccaacccaggcctgcgggaaggagggggagccctcaccgttaagccacccccaccttaccaccggaaaaaccaacaacccgaaaccccaaaggaaggagaatgccagggtcttcatggggaaacatttcacaaatggggacgctcgggcggtccatcgccttgaatcggagcattcccgctgagtcacccaagaagcctgtggtgttgaaactggtccgttgcctcgtgctgattaatgaattacaaatcccccacccatgtacattctccctggtcactggaggaagaatgaagaaccttgtgaacttgagggaaaaagtcccgccaagtggcctcttctcgcctctgggccgggcagtgggcctgcagtgccctcttcctcccccgcagggggcattgtgagctggttagtcacctgccccagccccagcgcctcgcttagctctagcttttggaaatgggacaagcggcgggacaataggcagggggggcggtcagcccagacaaagggcagcaggaaaaacaccatcacttgctcccaggccagctcgctggcatttgggagaatgtgtcattgcatttactcaaggggg

SEQ ID NO: 146609 - DNA, 1926 bp, Homo Sapiens
  misc_feature (70)..(70): n is a, c, g, or t
  misc_feature (239)..(239): n is a, c, g, or t
gatattccgatccgggagggttttacatttggccccagtgtgcacatgattccgggagacccacgtccancggtttcagattttccagcataaaccagccaagcggggggcgcactcgcactggtcagccttaacgcagacgcttccgttcaggcaaggctggccgccagatgcctccccaggtgagcgccccccgggtgccgctcttcccagccctggcagcacactgcatggggtgntgaacttcccgcttcacctcccgccacataacgcggtacatggtccctgtaagtgctgcagatgcgcctcccagcgcacaaggtcaggtagggcttgtacactggttggctgtaggactcgttgtagtggagcgggaccaccagtgtctgcttggagcagactccctgactgcgtccatgccagaggatgaggtgggagagattgagtaggccaggccctggggagccaggagtcccacttccctcaagaggctactgaggccccccgctctccctccagatgacagcctctcacccccattctaaacttacagttatgttttgcctcctgtgaagccccacccccagcagaaggctcctgagaagagctcaccccgggccctaccccctctgttgtcacctctctctgagggatccacccttggccccctcgcctggtatcagtagcaggaggaaggagaatccgcctaagagagtgcacagctcagccctggaccccatgattcgctttgacgctggaccctacaggcttcctctctctctccattcccacctggcttctttctcctgggaggcttcaagcagaccagcctcagcagaagcagctcagactggtgggtgggcctggcaggcagttgctcctccatctccaggacggtctcatttgcatcatagaaaccaaagaagctggactgccagggagtaataacaccatcatcagggcccccaatcagcaccaggtggcccacacgcagaaagttcttccgccatactgtggcattgggatggtctctttcccccattgatcagggccaggaagctgctggcattgaggtacaagtcatcgtggtggggatcatgccagtagttgcagatggagaattcctggccccaggggctatagcagatccgatagaggttagaccgcatggaggtggggaacagccacttcaagtagtccgtgtctccatactgtcccatctgtggagaggagagggagatgaaagaatccacgttgtgatcatccatgacagaaagcagagcccggcacacaaggcccccctgcgagtagcagatgagatgcaccccttgaggggcctttgccatgatggggaccacagcctctcggaacccttgcacctgttcccacaggggtcgcaagctctctctcccatcgaagagatcgagcactgtcaccacagtcccggggtgtgtctcattgatgtattccagcaggtggcggaagctgtacgagctgtcgaagagcccatgcaccacgatgaccggcttgtaggacgcgcggtggggcgcgggggctgcaagcagcagcagcggcaggaaaggcaacagaagcaggacccacgccgcggggagccgctgcccccagagccccagcatgctcccgccaacgcgcacccgaagtcccgcctccaactcagcgttcgggggacttgttctctaggtccaggatcttcctaatgcatcgcctcagccatgaacaacgcggagttctttaatacccgtgagcagcagcccaggccccttgaagagtgcagactcccacctggcctgggtccgtaggcctcgctccacccgctgtttacttatccccagtctggaacccacggtggcggggggaagggtgagcctcgtgccgattaacaccagcctcgtacctagccgttac

SEQ ID NO: 146610 - DNA, 451 bp, Homo Sapiens
taacccaaaataactttattatcgtctccacttttgatataaaagcattctccaaatggggggcaaatgtggcaagtcactgtggagtctgggccccctgtacacccttctactccgaggaataagccctgtgcccaccccagttgcccattgccatgtcctgccaaccccctgccccccgccaggtcaagccacagtgcagtacagaagtgaaagcctgagattggccagacacggtgaccacagggcctcttcctgaccttggctgtgggggcagggggattgcacattgcagcttcttgctgtctccaggaaagactgagtaactggggggcccccggggctggcacagaggcccagccagggccatggggccaggccttgaggctgaaggtgcagctgcagttgctttagttgggaggagcctcagtggccccagctcctcgtcccg

SEQ ID NO: 146611 - DNA, 630 bp, Homo Sapiens
cataaactgagattttattggttgaggatcagctgaagctagaggcagtgacagatgtacaataaggtacccaaggttcttatccaagttcaagccaaaagaaaaaggccaagaagagagaaggagcctgttaggaatagtaactagccacgtgtttaaagcgggcttatatcagaatgtcacaactcataaggactgttcattgtgcacttgtatgtgcatacctgtttaataactacagcatatgttatgtccctttagcatatattcttatgtccttaagaagcctttcttatactagtctaatgtcatttgtgtccttttgacatacatgagctattgatattaggaaaaatcctctctcactccccagtgttttgacagggaatcaactacacagaggatgccataggacattctatttttcacaacaatcgaaggagccaaatgaattgcagaagtcaccatttttaatgaggaaacactgaattggcaaagctaacgtgaaataagacctgactccaaaatccaaaatgtccttgaagaacacttcaaggtctagcgcgtaagtatgccaagcatgaagagttaacagatcaccaaccatcccatgacagtcagtcctccctg

SEQ ID NO: 146612 - DNA, 614 bp, Homo Sapiens
aaaattgtaagtaaacagatgtctttattctagagtaacatagcacatttgttatctcaccaaaaatagattcttttctgatgttgtagagtagagaatctgaaaccaacagtgtacgtgtaggagcttcaatccattcaactggtggcatcatatacttcacatccttaggactgcttatgtgatgtgcagtcaaggattgggcaggtcatatatcatgtcactccatccttcaatgccttttgatctgtttagcagctccttgtgacaaccttcagttctgcccagactccttcctgtggatggggagagttgctgacacaggaggcagagtagaaacgcagcagcttgtgctctgccctcctccttctccgggacaccctgcctcctctctccaggcctccatgggctccttggcctctgaattcctgtagacatgtgattaggatgcgtgggaggcgccgcctctcctagaagctgtgcaggtagcgctgggctgcaggaggcagccaagccaggcgcacgatcagagcagggacgccttccgttccttggttcctgggctccaacgggcacctccaccaatagttccagcatctctgtatgcagacctt

SEQ ID NO: 146613 - DNA, 477 bp, Homo Sapiens
  misc_feature (54)..(296): n is a, c, g, or t
tacgatgtgattttattttatttattcatgtatttacttttgagtcggagcctnnnnnnnnnnnnnnnnnnnnnnnnnnnnnnnnnnnnnnnnnnnnnnnnnnnnnnnnnnnnnnnnnnnnnnnnnnnnnnnnnnnnnnnnnnnnnnnnnnnnnnnnnnnnnnnnnnnnnnnnnnnnnnnnnnnnnnnnnnnnnnnnnnnnnnnnnnnnnnnnnnnnnnnnnnnnnnnnnnnnnnnnnnnnnnnnnnnnnnnnnnnnnnnnnnnnnnnnnnnnnnnnnnnnnnnnnnnnnnnnnnncagcgtgagccaccgcgccgggccttttacaatgtgattttgaagctgacactggcagtgggtcctcaaagtgcagactcactgggtatggtgcttcccccaactcccagggccccactccaaacccatggattcagagcattgcaggagaagaggataaaacgagcaattaattcccttt

SEQ ID NO: 146614 - DNA, 464 bp, Homo Sapiens
  misc_feature (55)..(78): n is a, c, g, or t
taaacacaaaatagtctttatttgtcaacgaaggctacacgggatcacttctggnnnnnnnnnnnnnnnnnnnnnnnnctagaaggtatctacatctgcatttatttacagccttgttggtatttacacagtcaagatacagtgttagaaacacaaaagtgttgagaaaaaaacttctcaaaattggttccagacttcaggaaaatgatttccacatggtaaggccagagtctccagtgttggtcatccagaagcagcttggtacagactccttttgccgaagctgcgggttcagaggtgctcagaacaacaggtggatttagaaaagtgggattctggtgttggggtgaatccagggctgctggggcaccgccagacacctgaggctcagctcctgccaggacggccgagcgtgctccagactagtcctcccttggctgttcgccctcagaataaatcacatt

SEQ ID NO: 146615 - DNA, 1030 bp, Homo Sapiens
  misc_feature (72)..(73): n is a, c, g, or t
  misc_feature (106)..(106): n is a, c, g, or t
  misc_feature (201)..(201): n is a, c, g, or t
  misc_feature (227)..(227): n is a, c, g, or t
  misc_feature (325)..(325): n is a, c, g, or t
tttttagggattttccctcccagaatttttcataggtttctcccgtatggttacagaaatacgtatttcttnncctttccactaggccataaatacctcccttttnctccttccaaagtatgctttatggcctcaggtagaggcctgcttcctgcctgcaagttgtaacctctagaaaataagttatatttggttaatttngatctttttcagtcgacacatgcaancaggaacgagtgggctactgaggggtttggtcccctgtgcatctcagtgagtcttgaaaaaccccagatccgtccttccttcctgccgcatgtcatcntaaggcccagtgtctgtcagggaggcaaggcagcagcagtacttttgggaaacatccagaataacattaaaaagcccctttttccccacacgtgtcttttatccagagggtctgttttccacaagttcttcagtgatttctccccagtctcattggctgggattggctttcacgcctcttaacaggattgaccatggttcatcaagggtcaacttgaaagctgaaccctgccaactttccctgaatctcctgactatggtggaggagtgtggatcctggaactaaactgaggtgatagggaggaaaagagagaaatcaacagtaaacgctgcacatcctctgtctggtaaatgtgcatcactgattgtatccaatctagattcaaccagagagacggaagcattaagaatgacatagaatatggaatttgctatagggatttgagcttctacatttgcgggaaggagcgagttgaacacttaggaacagctgttgctgccgtgtctggtggggggcctgagagtggcaggacaagcagcctgccccagaagtggaagaaactgaaagtggagtcctgagagctgaatctgccgcaggcccgcgggccgcccgggaattaggaaagttagaggggatccacgcccacaaggtaagccagcagatggggacaattccccgggctgcgacagtccctatcccggaaat

SEQ ID NO: 146616 - DNA, 747 bp, Homo Sapiens
tattatgtacaagtttattcaatactgcttgccttaacaaaagattggaaaaattcatgcacctatcaatttgagactaactaaacactcacacacacacgaacaatggaatattatgcaatgaaaatctaatcacaacgcaggaggtctctgtgtgcttttggtaagatctccaagatatattgtgaagtgagagaatgaggtgaagaacgttgtataacaggctacctctctttggggtaaggtgtaaactggacagattgtggacaggattctgagtgagatccttcactgttcagtctcctttgcatcagtaagtgtctcttaaagtaaatggacaagtagaggaatggtgtcagcataatgtggaagctgcattgtgtaatatacaatttcccccatatgttaatgttctgcactgagtaatagcagctgtaccaaaatagcagccaagtcccaaacacgatttaagggagcaagctatgaatacaatgctgtgcacaatgccgttgactccttctccactttactcattttagctacattctctatcctgaagtgcttactaagtagttcccccagttttcatgcactttttctgaactattttgagaatgggaatattaagatgttgccacagttccataacaacttgttgctgagatgccccttaagagtggggaagaaaaatccattagactttagaataattccacaagagctttctttttctactttaggtgtgat

SEQ ID NO: 146617 - DNA, 339 bp, Homo Sapiens
catggcttaaacatgatagtttatttttttctctcacataaccatccaaatataagtactctgaggctaccacggtagccttcagttgttctgccttctccaaggaagtagtcctcatctttaaggtccaaaataatttaccaccatgtgtgccacgtcccatcccaactagtgagatggagggaaaaggaaaggagaaggcataccctttcttttaagggcacagcctggcaactgcacacatcaatcacatgaccaagcctagctgtaaggaaagctacaaaatctaatcttcattttcagtggtcatatgccaacagaaaatttagaggttcttta

SEQ ID NO: 146618 - DNA, 419 bp, Homo Sapiens
atctggttaaattttactaaaatctatggaagccatagatgtagtctaagcacattctgtagcccagtcctcaataacagttcttattatgaggtggttaaagacacagaaccacagtgaagtgctgatcataatattagaaaaatttaatttatatttaaatttaccattctgtatatcaagtgcctattggctgaacagaactgtattcaataattcatattctataacttcattcaactaatacaaaaagctaaatagaaagatttacagttgaacaccaggttcctaaggctggcgtcacatatcattccctgatagagcgagaattcatcagcagaggacctaagaaccaaaccgcgagtttgatttaaaattcccttccctgccatgtataagtaacacattgtgtagtgacc

SEQ ID NO: 146619 - DNA, 859 bp, Homo Sapiens
  misc_feature (837)..(837): n is a, c, g, or t
ggccacagctagtcaggccctggtttaaatcggcacgaggggagctgaacggcgcggagctggtctgaggctgagccgagccgagcgagcgcggcggtggggccgagaggacgcgcaggtggcggcgttgccatgtcgcacggtcacagccacggcgggggtggctgccgctgcgccgccgaacgggaggagcctgccgagcagcgcggcctggcctacggcctgtacctgcgcatcgacctggagcggctgcaatgccttaacgagagccgcgagggcagcggccgcggcgtcttcaagccgtgggaggagcggaccgaccgctccaagtttgttgaaagtgatgcagatgaagagcttctgtttaatattccatttacgggcaatgtcaagctcaaaggcatcattataatgggagaggatgatgactcacacccctctgagatgagactgtacaagaatattccacagatgtcctttgatgatacagaaagggagccagatcagacctttagtctgaaccgggatcttacaggagaattagagtatgctacaaaaatttctcgtttttcaaatgtctatcatctctcaattcatatttcaaaaaacttcggagcagatacgacaaaggtcttttatattggcctgagaggagagtggactgagcttcgccgacacgaggtgaccatctgcaattacgaagcatctgccaacccagcagaccatagggtccatcaggttaccccacagacacactttatttcctaagggctggccaaggctcccatagaggcgctgtgtcagtgaagatgtacgactacctgttgggaaggacanagggatgaggctccagagagag

SEQ ID NO: 146620 - DNA, 487 bp, Homo Sapiens
ggccttcgggagggggacagacttaggagtcagccctctgccttcgtacaaaggctcgcttctcctcagggcgtctctgggtggagcgaagcggccgaggggacccgacaatgtccctttgcttttcggaccgatggccaggcctccagagccaggagcgcccgggaccccagggcagggagcaaagctcataccgcaaccccgccacccgcccgcgccctgccagcctgttggggccacagcgcgcaggccagcagccgcactcgccgctgcggggttccctttgcgctgagctcatctcctgcaacgccgctgccccagaccttgcgggccatttggtcccgggggtggggctccttgggggccgcggggcagcccggatgagaggatgacccgggagctccctgggggcggagtggaaggggcagctccaggcagccctggccaggagcttttaccccgccagccccgctgctccagcggccgc

SEQ ID NO: 146621 - DNA, 468 bp, Homo Sapiens
  misc_feature (36)..(36): n is a, c, g, or t
ctgctgcagcagggcccacaggctggccagctgtcnccgccagcgtgggccccgcctgcccggccaccacggccccaggctgctgttggacaactccaggcccagagcgctcttgacctccccagccaccatcaggaggagttcggcctcgggcatgtcctggccaccctcccctgcctcctcttccaacaggctgaggggcgggaagctggagaaggcctcctccttggacttgaggaccacgggccggccgcgccagtcgtcctgcagcaccttcttgcctctgttgtagtgcaggcagcgttggaacagcagctttcccgccacacacaggtcctcgcagaggtccccggccagcgtgccgccctggtagtcctggcacagcgcggccaggatgcgccggctcttctcgtcggtgcagcgctcggagaggacacccgggtgcgcgcggagcagcagcgcggccgc

SEQ ID NO: 146622 - DNA, 552 bp, Homo Sapiens
ttacgaatttcgagctcaggttaccctggggaggccaggacaactgtctttcaaggccccgcatgggtcagggcatggagcactccaaggtatttcacagagccaatctcccgggccatggccaggccctgtgggtaggtgatgggtgccagcttcttgtcccgcagccgctcaatggtgtccttgtcgtcgcggaggtccagcattggtgcccaccaggaggatgggcgtgtgggggcagtggtgccgcacctccgggtaccacttggcacgaacattctcgaaggaggccgggctcaccagagagaagcagatcagaaagacgtcagtttgggggtaggagagtggccgcagccgatcgtagtcctcctgacccgctgtgtcccacagccccaagttgactggtttcccgtccaccatcacgttggcagagtagttgtcaaaaacggtggggatgtactctccggggaaggcgttggtcgtgtagctgatcagcaagcatgtcttccccacggcgccgtcgccgaccaccacgcacttgatggcctgcat

SEQ ID NO: 146623 - DNA, 382 bp, Homo Sapiens
  misc_feature (305)..(305): n is a, c, g, or t
ttgatgtgcataactttttattacatctttaaaatcttacattataaattgtgacaataggagacagaatgttatttctctttttaccacaatacaaaatgttattttctgaccatgaacaatgaacctttctgcacgttctgcagagcggttggcctactcatgtgcagtttgtctttctggctcacctcatggccacagagcacccacagggcacaactgtgcagtgcacctgtcaccaacctcaacaatcttgctttgaatgctgctaacaggtggctctaaagcttaagtaactcagattnggagatgttatcagaggcccgggaaactacaaatggactgtgtttatgcttcatctttccacctagattataaagcc

SEQ ID NO: 146624 - DNA, 120 bp, Homo Sapiens
tttcacttttagtcagagggtttttattaggagtaaattttcctaggttctcgataataaaggttaatatatttttttcaaaggcacaacgaagcatcctttcaggtcaccactgatttc

SEQ ID NO: 146625 - DNA, 491 bp, Homo Sapiens
catgtcgtccgccaccgacccctggcacctggatcacctggattcagccagtgcggattttccatataatccaggacaaggccaagctataagaaatggagtcaacagaaactcggctatcattggaggcgtcattgctgtggtgattttcaccatcctgtgcaccctggtcttcctgatccggtacatgttccgccacaagggcacctaccataccaacgaagcaaagggggcggagtcggcagagagcgcggacgccgccatcatgaacaacgaccccaacttcacagagaccattgatgaaagcaaaaaggaatggctcatttgaggggtggctacttggctatgggatagggaggagggaattactagggaggagagaaagggacaaaagcaccctgcttcatactcttgagcacatccttaaaatatcagcacaagttgggggaggcaggcaatggaatataatggaatattcttgagactgatca

SEQ ID NO: 146626 - DNA, 697 bp, Homo Sapiens
  misc_feature (685)..(685): n is a, c, g, or t
tttgaactaaatggtaaattttattactttaagaaagaagggaggaatggatattgagacagcaactagttctgtctgccacagtacatcagtcagtgtccagcaattatgttcaaatctatgtcacacagaatctacatattgaagaccatgtgttctgttcacaatgcaattaaactgaaaagataactaaaatattcataggatctacagttgtgacacatataagaatgaaatactcactgataaaaacaatcatagctataacatttataaggtttgtcccagtataacaggcatccagagttgggccagaaggctgtttccaggtgaccataacagggcttctctccaatatatgttctaaagtgagaaaggaggcatgaggggcaacaaacacttccctgagtcatttcattcatggagtttctggccattgtggattcgcttgtgcattataaggttagtgcttgtgctcaaggctttttcacactgaatacatttataagggcttctctccagtgtgagttctcacgtgtaccctcatgcaagaggaattcctaatggccttgccacattctttacactcataggttttctcaccagtgtgagttctcttgtgcacaataaggtaagagcctgtgctgaaggactttccacactggttacactcataaggcttctntgcagtgtgaga

SEQ ID NO: 146627 - DNA, 981 bp, Homo Sapiens
  misc_feature (866)..(900): n is a, c, g, or t
  misc_feature (903)..(941): n is a, c, g, or t
ctttcttctccatgtactcctttcccgagccccattactaacccatttccattgatttatgatctcctgtattcttgttatatatccatattatccaatgataggatatttgaagagaccatataattttgtaagacaagacctcattacatgattgtatttttttctatgacatatttaaagagtttaataacatgtataagtaaaaccaattttaggagaagattccagatatttcatgtattccaaagaactgatactagtattgaggaagctaatagcctaaaattatatccaaggcatggccacatctttttcccaaaatgtctgaatgatcagggcaacttcttatggttcccttaggctgtcagtcttgtccttctcttctgggagctctggggtaatagtttggtctacagcagaagtgaaaacacttggttgtgctgggtttttggtgaagttgagggcatgaaaactcctgcactgtcatgtctaaagttgatcgcttctttttgtaaatatggtatctcttctcctgttgacatcacagcaatttcaggagctgtgcctagttggggatcaaagctagttgctgctgtcctcctgatatagcaggttctgctagttgtggaatgtatccaaattgagcatagaatggtatctgctcctcatactgttgctgtcttgtttgcttgaggtgaccttggaactgtttgctgaggttgttcccagggtaggaccatgtaaactggatagtattgaaacatctgtccttgctcttgaggcattttgaaggagaatacatagggcatcaccccggccgtaatggccgaattcccgggcatatgtccggtaccgtcgactgnnnnnnnnnnnnnnnnnnnnnnnnnnnnnnnnnnncgnnnnnnnnnnnnnnnnnnnnnnnnnnnnnnnnnnnnnnnctcttcatcctagcgcccttaatgagtctataccaatctt

SEQ ID NO: 146628 - DNA, 1006 bp, Homo Sapiens
  misc_feature (893)..(927): n is a, c, g, or t
  misc_feature (991)..(991): n is a, c, g, or t
tgaaaattcacaggggaactcttgactaagttgaatcccgaaaagccttaaatcggcactccatttcttgtaccctaaatccttcagttcaaatatgaatttcacttaaagaaccatccctaggaactttcaggagagaaaaagactctaacttgttagaatacaatctgcatttgctttgacaactagttagttcacatatgtaaaataagtctacctgtctgtatgcataattaagatgtaacagtagtgtggtaatgacttgttaaagcaattagaatggcagtggatcatggcacaatttaccttaaaagccgtgagcagaatacatcacaagctatgatacaatgaatagtcattaggtttaaagtagtatccacatataaaaacacaaagcatattttagctctttaaatgaaagcttcattcagtcaatattggtcttcctgtagatgcatttatgaaacagaaccacaaaacatacagcttacccgcttctcaaaactcattgcacaataggttgagggacttctctacaccaggacctattattaaaaccagtaagtcctcagtgaaaatcatttatttgcccggagtgtcatctgatgtgtctgttgtaggcagctgtggcagtggtgggtggtttagtgacacggaccctgcccacgtctgtccatccatcagtgggctagtgtctctctggctgcacctgagaagggtcagagatttattcgtttcttgttgctcttggaaacacccagaggacactggaaacatagccacagggacatagaaccaagccccagggctgctcagctacacgaccgccgctgggatccgcccccggccgtaatggccgaattcccgggcatatgtccggtaccgtcgactgnnnnnnnnnnnnnnnnnnnnnnnnnnnnnnnnnnncggccgcttcctcgctaactagctcgctgcgctcgtcgttcggatgtaaaggaggcgccatatnagtatatagtttttt

SEQ ID NO: 146629 - DNA, 662 bp, Homo Sapiens
  misc_feature (31)..(31): n is a, c, g, or t
cctcaccagctgctggcgccaacatcggtcnagggggcacctcgctgcctgaaaaggaagtgacgaaggagtgggccagggtcccggccaccggcacacctcgcagctggcccgctagcacgttgctgctgctgtcgaagccgcccaggtagctgtaggtggaggctgtcaggcccccatcggggccctgagcccgcctcaggcccatctctagcagccgcttctctggccctgcgatcaagcgaagccgcgctgcgttggtggccaccaggctggcgtagctgaccaggcagagcagcggtgtctccagcagctgcaccaccaggagcggcccggacacctgcaggagcggcactccggggaaggcgagggagccctcgggcagggctcgcaccgtcacctcggagcagtcgagagcccgaaggtgctcgaagaacgcaggatccgtgtctgggggcagcaccgaggccaggaactgcacgtcggcgtcccgcaggcggaaggcgcgcaggaagcgcacacagtcgcgcaagccggcggccaaggcgaaggcgccgccgaacgggcagcggcggaagaagagctcgaactcggcggcgtcccgcgcccggcccgcgcgccaatagcccaacgccatggtggcctggtagagtcagtgagca

SEQ ID NO: 146630 - DNA, 1280 bp, Homo Sapiens
gctggggagcagtcgcgcgggcgccggtagcagacgcgatctggtgcaggattcgcgtcgatggtctcgctcgctcattgatgtagttccctcccgtacttttgcgctgtgttcctgctgttgatggtaccttatcggtcgttgtcccactactggtcccttatagctgccccatgtgtctgttgttgtagccgccatggtggacgctcatttcgccgcgtcccgttttggggttataactggagtgattgtcacagccgcgcgcgcactgtaggaggttcccggacccgggcagtgaacgcctgcctgctaggctgcatcaacgtgcaccatagtgctcccttgtggcagatagggccgacttctagagttgtcaaggacagccattttttggtcccccaggtgccaaccataaagaaggaatcaggccaccgctttgtctctctccaggctttcctgcagggcagacgcacgcatgtcgaagttgccatctgaggggatggcttttaatttcactccaccgattaacccagctctttccactgaggagtgtgcctgatctgatgagtaagccaccagcttctccatgatagcggcctgtgtgagctctggggacgctgcctgcagccgatggatcactttggtccgagcggccagcagggccaccagggtggcttcactggcacttccctggatcactcctcccccttctccagctttctcattcaaaaatgcctttggtagttccagcatcttcccgagccagtccatcatcacagtctccagctctgtgcatgctgggcttgccgcccaggagaagccgatgcagccaatggccccgcacagcatgtccgcaagcatggccgggtacgagctggcagtggggaagtaggcgaagaagtaggggctgtgccagtgcgtcaccccaggcatgattatcttctcaacgtcgttgatgatgtcctcaaacgtgtctggctcctgaggggcagcggcagggatcagcggccgcaggtacccgggctccacgtcagggtagacctggcgtccctcaatgccttccatgtagttggccacgtaatccaccatctccttccctctccttcggaattcacttgcgttcatggtgtctgggctctgtcagaggtgaaaaaggcagccgggagtgacttgctctctgtcctctctcctctccaccctcgtgccgattcaacccaggcctcgtacctagccgtattttgggtcgttttgagggtggtgtggtttgaattgttttgtgt

SEQ ID NO: 146631 - DNA, 555 bp, Homo Sapiens
tttttcctgttaatggttaagcatttcaatacacaagggtgttggtgaaattcttacaaataatctgaatgtcttcactgcataacagaacctttggaaatatcttctatgtagtcaccatagaagacagtcaactctcagttactcaagaagtggtacctggtatgaaggatttggccaagaaattctctccttctaccagtctttttggtcatgccactgcttattcagaggtggacagacaacatgaaataaaattatgtatttattgtgttacagatcagccacaagtcagtggcagaaaaggtccaaagcttctgatgacaaggatacttggggatcatctgtgaatgttatatctcaatggaaagctgactgtcagtcacataaaggaagtaacgtacactgacatcagtcagagtcaaactaatttaaggcagtactgctcctcacaaacagtgctggcataaagtgcaggtctcattgtaaaagtgactctgtagtagtaagattttctcagtttactctttctttcttgacttctctacaattaaa

SEQ ID NO: 146632 - DNA, 369 bp, Homo Sapiens
agtaaatccaacctttgtaaaaagatggaagccaatggccactgacgccagtgcagagttgccttcaatttaaagtgggttgttaatgtcgttccctggagctgacattttgtctttaggataaggcagaaaagcaggaaaagaagactgttacttttgaagaagaaaacctgaaaacgcaacctcagttggtaactagtacttggcgaagaaggaaagccggtgcggttttaatgagagaaagtaactgccaggccttttgaccatcgccttcgctttgcaaatctggttttcatattcttgctcagtaatcacccaaagtcataactgtctctgaaattattcattaaagtcattttcagggattct

SEQ ID NO: 146633 - DNA, 405 bp, Homo Sapiens
  misc_feature (46)..(106): n is a, c, g, or t
gtccggcctgacctcggccctcgcggtcaggcgctccaaccagagnnnnnnnnnnnnnnnnnnnnnnnnnnnnnnnnnnnnnnnnnnnnnnnnnnnnnnnnnnnnngagtcgggcgtttacggtcacgggaacaggttaataaacttttacgcagcagacccggaacttaggtcccgatgtccgggtatcttaagaacaagaagcattcttagttgaagtttcgctttaaagataatgatacagatgcttgcggaggacaggcgttatgcaaagattggcaatcctttgacgagcccaggtagtacagcacgtctcccccgtgatgttttttggcttttatcttacatataaacaagcgtacccaggtggacgccttcctcctcgtgcttttgggaacaccctgc

SEQ ID NO: 146634 - DNA, 1358 bp, Homo Sapiens
  misc_feature (23)..(23): n is a, c, g, or t
cgtcacccttggcatccggctcntgccaccagtcagcatacatgccctcctcgtagtcaccctccccctcaaactcggcgtcagatagggcatcctcaggctccaggggcggttctgtctcctccagctccatctcatcatctgactgcaggtacatgtgggtgaactccagcagctcccgcagctcggcggtttggttgtggtagagcatggcctcctcccggggctggaagtcctcctcttccaggccccagcgagcccggtggaaccggtaatacaccaggttctgctgcatgacgctgtccttggggtcgaagagcatgtagctggcggcgctgcgggcagcctggcgcacatcattcaacttatagtaggcaaactgcaggtagtggtacatggtggccacgaacttgtccacgaagtagccacccacattgggggtcaaattggcctcacagtccaccttgcactgcagggactctgcaaagagatctgctatggccgggtagaagtccttgaagtccacctgctcatgggccccttcacagccggccaggcaccgggcaaagactgccgggtactctgacaaggcccgctccatgtcctccgtgctgctgcggaaatccccgctgttgtagagcttcacagcccggagggacacggcctcgtagggctgggcctctaggtccgtgagggactcgtcggcgacgtccagcatcccccgatagtagttgagatacttggcggtcagctcgtgcttcgggttcctctggaggaaggtgtaggccgccgccaccgccttctccagccggttagccttgaacagcgcgtagtgcaggtactggtagggcaggcggctctggaagtcacgcagcagctgccgcggcgggtagggcacctggaaggcgggcagcgtccgcttgcagcgccgcaggcaggcggctcgctccaggacgcggccgaagagccgcagctcgcaggcccactcgtctgcgcggccgccgtcgggatcgggcattggccgcgggcgcggggccgctagcagttggcgatggcagaaggcctcgctgtcgcgcaggagccggtcgcagccgcagcgccgcctccaggtagcgcgcgctctcgcgccagctctctccctcgtactgctccagagcgtgcccgtacgccgcggccagcggcatcaggtacctcgggcgggaagccccggaagctgtacttctcgtactgcgccccggcgctgcccagcagcaaccacagcagcccccacgccacccgagccatgcccgccgcgccgccggctctcccctcgtgccgaattcgccacccaggcctcgctaccttaggaccgtatagta

SEQ ID NO: 146635 - DNA, 595 bp, Homo Sapiens
  misc_feature (440)..(455): n is a, c, g, or t
agcttttttaaaaaaaactttattgcaaaatataacaaatatatggacaagttcacaaaacaaaaatgaataccttaattaataacaatcacaaaatcaacatctgtgaaacagatggagcacatgtacaaagctaagctcatcagcacattctattccccagagcaataatgttcacagatacaatgacctatatgaggaaagtcaagacaagtctcaattccaagactttgtgataccagactttcttttcttcggaacttggtgttgtgatgttcacctagaagtactaggagatactaggaagagcctaagagtaatatcagcgtgagcagaaggcagagcaaagccctgataacattgtttaagccctaaaactattcgcaccccaagctagttctacccctggtctttactgttatatgaatcaataaattccnnnnnnnnnnnnnnnnacctgtttgattgtattttctgtcacttgcatctcatcaagttctaactgctacaattcatcatgtgattgcctttcctgaagtaatttcttcttcatttgaactctgttattacctttctgatacagtttggacatttg

SEQ ID NO: 146636 - DNA, 500 bp, Homo Sapiens
ttttgaacacttctgaagtcctttattgggccggcaaggccgggagctgccctcggagtggggtcccagtccggagtcttcaggtcagtggcagccctgcccgttctggccggggcaggcggcccctgctgactcgctacttggtgcgcgccttcacatactcccagccctccttggagtactcgcgggccttggagggggccaccgacagagctgacatcaccgtcatgatgcctgcattccaggagtcacggatgggaaagtaaatctttggaggggctgggagctggggtatctgcaggcctgtctgctgacacacgtactggctgaactggtacatggcgggggggaccacctccccagccttctgtagggctgcctggctcttgtcgctgggccccagcagctcctggtcgtacaccaggtagacggcgcccccagccacacttcccttgatgaggaacctcatcagcgaccacacccgggccaccatggtcgct

SEQ ID NO: 146637 - DNA, 479 bp, Homo Sapiens
ttttcctcctgaatgtttatttacacctccgctcactgagcggtgctggaccgcggcccccgcgtgggctcctcgagcccctccccaggaggcatgtccacgtgcctttccagccccctgtttgccaccgcggcggagctgggcgggtgggctgtgttcggctgggagagacggccctcggaggaaggtctatctttctgttgacgagaagaaactgtaagacaggggtgctgaggttgctcaacacattccccaagcccaccaggggtcaccccagcctgcccaatgcccagggaggttgagagcagttctgttcgccatgctgggctgacacaggctggaggggagctgccggggccggggggcacggcgcaggcccatctgagctcctaagcagtcatgaagcacccttcatgatcttgtgaatgaaaaataagcaaacacgtccttctgcaggagccaagagctgcctctttggt

SEQ ID NO: 146638 - DNA, 199 bp, Homo Sapiens
tttttatcgtatagattttattaatgtagcagtttattcattttcctgtgggtagatacctagcctctttgcagtttggactattgtgattaaaactgctgtgaagattctttgtggaaagctttttatggagagatatatagagagagatggtttcactctgcactccagcctgggtgccagagcaagactccctctc

SEQ ID NO: 146639 - DNA, 307 bp, Homo Sapiens
tttctttcacattttaattgaaagacagtgtaatgccattacagtacactaagtatacagcttgatgatttcttaacacgcgtatacctgtgtaaccaccacccagatcaagatatagaacatttccaggccccagaagactcccttgtacctttttagtcaatgctgccacccccagaggtaagtacttctttcatcatggattacttgcctgttcttgaacttcatataaatggaatcatacagtatttatcactatacctgtgataatgcaatattgttgtgtggatatgtggctaattattat

SEQ ID NO: 146640 - DNA, 314 bp, Homo Sapiens
gctgtggtttgtgctttatttttaggctcaattcagctagaggcacacaacaaagcagaagacaggagtaggcctggacccaagtgaagcgcaggtggggtgtgaatcctaggcagctggcttctcaggcataggtggtgacatactggggccccatgttcccgaagtaggaacgttcccactcactcatgagctcaaagtgtacaggacggcgacagaaattgcaggcagccacagacacatcctggagggggcagcccccccgcagtccaagccagcagcagcttctccacaaaatcttccatcatctgagg

SEQ ID NO: 146641 - DNA, 730 bp, Homo Sapiens
  misc_feature (614)..(648): n is a, c, g, or t
ttatcaaagagactaatggtgtcaggattctcttcggtgacaattctccatgggtaacacacttctgcacatcttttgtgcaaaaacactgactgccttttgttttgactatccaagaatgtttgtatcgtgaatattcttaacagaaagatactgcctccctccagggcaaagggcagctttgcttacagcagcatttctcaattaggtaataatggtaatgtttagagtcatttttgattgtcacaattggagaagggaggatactgctaaacatcgtaccgtgcacaagagacacccctcccccacatgcaaaattacctggtccaaaacgttaatagcgacaaaagtgagaaaccatcagagcaaaagtaggcctgcttcctgccagttataaaaaacctagacaccctcatctgagttccagttttacaactgtgtgtgctggtgtcatctggcccatgttgccctatggaatccagagctcaggaaaccagtgcaaaatggatgctggctactgctgtgagtaataaactgttctttgtctctaaccctctaatagtcccggccgtaatggccgaattcccgggcatatgtccggtaccgtcgactgnnnnnnnnnnnnnnnnnnnnnnnnnnnnnnnnnnncggccgcttcctcgctcaatacttcgctgcgctctgtcgttcggctgcagaggagcgccctatagtgagtctatacattctt

SEQ ID NO: 146642 - DNA, 473 bp, Homo Sapiens
tttaacttgaactccagtttactttcttgagtgggacaaaaagtgatagagtcacacccaaatgctgggcctcatgcatcttacacatgtgcacatcatccattttggagatctcagagtattaaaaagctggaatcactaggctatcaaagctctgatctgacaaaaagtaaaatgacagtaaatctaaactcttccagtctttgtctaaactcaaagatatggctagagtcccatacaatctttgacagcagttgtttcaacatcaaatattagacaaataaacaacttcatctgtaagaaagagcagagatatcatctccaaacacatgaaaagataaagacaaactggggattaagagcaaatgtcctttgacagacattttgtgatatctacttgataatttccatgcattttaaaactttttatctgaaaatgagttccaatcttcaaagttgtaggaaaaagtagt

SEQ ID NO: 146643 - DNA, 554 bp, Homo Sapiens
ttttttattagaatttgcttttattacaccttcagttaaagtacactaagcaaccttaaaacagcatgaaattcctacttccgccttgcctcacatactgggccacatttggtctttgtcacttctgaaggactcaaagtggaactgtggctttgtgctagcccctgaagcgtggattacttcttatgttgaaaacaggcatgtttccgaagatgcgctgtttggggtttgtgttccagaatcttctttgtcctcaataagccagaatttcacaaggagatattttatgtgatgagaattcggaaaaagtctagaagctactagtgtctatttactcttcacaactgtgttgctcagggtgtggcaggaagacgtttcccactcattgcttctggaagtcagcgtcggccttcactattctgcccttgtgtccttccaggggtcctcacagcacctcactcagagaagtacagtccaacagcaagccactagttgacagtttaccaaaaagttgctgcaaaatctgcctttaagttgcaggaggtaaaacttga

SEQ ID NO: 146644 - DNA, 464 bp, Homo Sapiens
tttttaagctcaaatttttattaaccttggaacaaatgcaataattccttacagtcatatagcattttacaattctgaaagaattttcacatataccaattgaaccctcacaacagccctgtgaggtaggcagggtaggtgttactttcctactgctagtgaggagaacaaggctaagaggtgaagtaaggtcacacagttggtaaatgatggagctaggactagaacctaggccttctgacttgctgcctccctgagaacattcaagtaataatatcctatgctatataatgaatatttatctcctatgatgttgatcaggtctatttttatacattttacctgtttttatattacctttccctaatactgaaaaacactaaaactgatacgagacatttgagacatttcttctctgttactggactttcttagatatatcaaacactatcctaagatgaaac

SEQ ID NO: 146645 - DNA, 1153 bp, Homo Sapiens
  misc_feature (145)..(154): n is a, c, g, or t
  misc_feature (176)..(184): n is a, c, g, or t
agggggagcccttcgtccacccggggctctttaaggtttcatgcgcgtagggggggtctccgggccggacggaagcgggtcaaggcctaccggggattcaagctcctttcgagccctggagttccgggccccttctggccctcannnnnnnnnnctggcccccgtgtttcccactnnnnnnnnnttgtatttctcgcggagggcatggcttccgcccggaggtttttctgggcgttcttgaccaggtttcgggaccagggttctgagggaaggacccttgtcccttggggactcgcgggggcccggcccaggtgtgtgggcagagcccaaggtgaacgcaaaggtggccctgatgtccggcgggtaccgcagcttatgcagctgcttacggaagagctcggcgctgtcagaccccacctcctcgtcaaaggccattttcagcagctggaatgtgcaggagcgcagctggagcccgtcctgcaggagctggtccacaggggtctggacgctgatgcgcttctccttggtcagcgcagccaccgggaaggagcggaccaccacctgctccccaaccagggggtccgtgggcatccccgtgaagatgacccggtacgtggtgaggaagacggcgccctcagctgggagcaatgctggtcccccagcactgccccccgcgccctcctcacgcccatccggcagcaggtagacgcgcaggccgtccagcacacactcctcacccggcagcaggcgcggccgcagcagcttgggcttctggatgggcggcagcctccggctctcccgctgcacggcctccagggtctcgatgtgcatctggacaatgtctggcaccatgacatgcagccccttgaggtggtcgctggtgaccccactctccgtgcagaccttgtccacaaagcggttgatgaagcggaccacagccccagctacgtcgcaggtctctgcatcctcgaagccgctctccgtgtcatagctctcggccacactgtcagccatgctgttggtgaccaggctgttgctggcgctctccaggtcgcccagcccggcacgctcccgaagtaggcggctcttgctgctgtccaggggcaggaggaggtagctcatgcggttggcatagtggcatccgaagcagccg

SEQ ID NO: 146646 - DNA, 461 bp, Homo Sapiens
  misc_feature (89)..(141): n is a, c, g, or t
agaaagtgaatgtcaagctgtatttgttcaggcagccatatggtagccccacgtccttagtaaactgaggtattgaagtatcttctttnnnnnnnnnnnnnnnnnnnnnnnnnnnnnnnnnnnnnnnnnnnnnnnnnnnnnagctttgcatgctatggaggtctagaaattcacattatggtggcaggtgacagccaatacaaagagataaagcaatttcatatagtgataagctagggaggagtgctaaaaggagccaaggtgtagtggtgactggaaggtgaccagggaaaccactgtagggtttctaagtgatgagatctgtgacaaatccctgtggtcagcagcaggcattggatatgtaactttattctgtcccattgatcttgtagtcaaccctggtctgttctgtattgttttaattacataatctttgtaataatctttaatacctggaaaaa

SEQ ID NO: 146647 - DNA, 833 bp, Homo Sapiens
cgttcagttacaagcagccgctgttcaaggttctcatgagactttttgtcctcagaaagttacactttgtgtcttgtatcttcacatagtagtccacaagcaactctttgaatgactctgtgtaaaatctcagacctcaaccatgttgtcttatgcagtcgaacttccttccatgcctgagcctgctcctttgctagggtgaggcttaagccactctcatccacatgctgtgagagattcaggagaagcttgctgaagtatgggttctgtaacaggtcctctttactcaggttacaaggaggaagttgtttgctgcacacttgttgaagtatttccatcccttctccaggtgagcagaaatccccggatgccatttgattttcttgggattctaatctgtggaacagggcccgagatgaatcaaaatgcagaacgggctctccggcgcctacttcccttctgtctgggcggccaaggattcccaagagcgacgacggtctccggccactggccggaatgactctcccagagctcctcttccccgaagctccgcccgccgaccctctaaagcaaacctgcacaccctggggcagctgaagctctcaaggcggtgccgagaacctcggctggggcgggctggccagcagcgtctacaccccagaacccgcccgcgccggggctccggaacctctcgttcgggccgggcgcaggggctgggggaagcgaggcccggaaagaccaagctgaaaggcccgggaaggggaaggagccgaaagtgcactagagccgcgacgaagagcctcgtgccgattcacaccgggcctctacctagg

SEQ ID NO: 146648 - DNA, 1827 bp, Homo Sapiens
  misc_feature (69)..(69): n is a, c, g, or t
  misc_feature (185)..(194): n is a, c, g, or t
attgggggaggaactccccaacgcacttaggtccatggaccccgggatcttcccttaggaacaccacgntatggcccatggttcccctttccctacgggggcccgcggccccaaacgaaatggttctagaaagtttttcgaggggccgaggccggccgaccaatgttctccccctttcgttgcgnnnnnnnnnngggatataatatcataactttattcaggagataatcaaatacaatacagggctgacactgacacacagctatgcataaaaattatataaatctccttgctagattttccagaagaggcccagtcataaaaaataaagagaaaccaggagagtgcctaaatgactgcagtgtttcaagcgtaagcatttccacactcccttgtactgaaggcagccccaggtgaaggtggtcccactagcaggaagattaggaggcagcagctatgcagaagccatgtctcctggccctgccagagctcaacggtagaccttgctgaactcctggagggcccaccgcttgttctctgttgcctgcttgagtacggtgtactctttcaccagcctgtcaaactcctccccaaggacctcataggagttcaggacctgtcttgagttctccatgtcctgctcctgtaggtgaatggctccctccaaacggtccctaatcagacgatgaacttccactttctcaacagtgtaagtgtcggacaaaatctttagctcctccatcctcagcttaaggatcatagcaccgcacttgacttccaggtactgggcattgatgcggtctagctcggattgagtcttcagccggtgttcttgaagaagcctctgcagcaaagtgaggcagcggagaagcacctgggagtaagcagcactcttcttctccagcagcaacatctgctccttctgctggctcttggcatcctggcactgctgctgctcacccaccaggacctctgcgagtttccacacctttgctgccttcacggtttcactgtcagcatctgaattgggatcatagtagcagagcagagtgaaacatttctttttgagctgctcctctacttcttgctgtagccgagccctcatccacacaaaatcctctgagagtggcatgagttccagaaggtccgctttctccagccccagcagtggaggtatctccctctcctggctaggacctaagagccgcatcagttcagttacaagcagccgctgttcaagggtctcatgaaactttttgtcctcagaagttacatttgtgtcttgtatcttcacatagtagtccacaagcaactcttgaatgactctgtgtaaaatctcagacctcaaccatgttgtcttatgcagtcgaacttccttccatgcctgagcctgctcctttgctagggtgaggcttaagccactctcatccacatgctgtgagagattcaggagaagcttgctgaagtatgggttctgtaacaggtcctctttactcaggttacaaggaggaagttgtttgctgcacacttgttgaagtatttccatcccttctccaggtgagcagaaatccccggatgccatttgattttcttgggattctaatctgcacaccctggggcagctgaagctctcaaggcggtgccgagaacctcggctggggagggctggccagcagcgtctacaccccagaacccgcccgcgccggggctccggaacctctcgttcgggccgggcgcaggggctgggggaagcgaggcccggaaagaccaacctcgtgccgaattcgccacccaggcctcgctacctgaaaccgctatagttactga

SEQ ID NO: 146649 - DNA, 528 bp, Homo Sapiens
gatttgggaggaactttattttattgtgcaaacagtctacaaatttgaaacatactctatcaagaaagacactgttgttaggaaagggcgtgggagagggtggccccacaaaacagtgtaaagttctaaagaatttgagaggaacactctgcgggaccctgttccaagggcatctttctaagagtctgtcccttaggctctgcccctttttggccacgttgtcaaaggccttctttatgaacgaagtgagacacattatttttgttttcttgaattctaaagtgattgtcttgagttccctgggggagactcctgggaggtgtggcccactctattccagaaacaaaccaggagactgaagactcatcccaatcccatatcccatgaaaatggaaatcaaatcacccctgacaattccaaaactaacggaatcctaacataacttcttgtaactctaaaagcctagtgggctgtaattaagctccagcccacccttcccagcttctgggtggcagtcaccatgggctc

SEQ ID NO: 146650 - DNA, 499 bp, Homo Sapiens
  misc_feature (402)..(402): n is a, c, g, or t
  misc_feature (441)..(441): n is a, c, g, or t
tttgttccaaaaaatactttatttattaaacaatatatccataatctataacatgatccaaaaatactgatatacatctttacattatctaataaaaagatttacaacattatctttcctttacaaagggaacatagataataattccttgaaaataaaaatgtaacattcatgttaaagctgcatcatcgttttggatgaaacgtggttaaaggtggacaccacaaaatacatacagaggaagaaagaaactccaacacaatctctcctgaatgggaacattttcttacacttcccctggcttaaaattcctctcagcacaagtattgaaggccaatcactgctcactaaaaatttaggaaaaccttaagtcttcaatgcccataattaacatccctcacnggttttactctaaaccatgaagacctaacctaggacagnggcagaccctcggctctgggggtcatgtggggaaagctgctctgggccagcgtcattg

SEQ ID NO: 146651 - DNA, 420 bp, Homo Sapiens
tctgtcaatgtacattttatattaaaaaagccaaaataacaatggggtgagaacaggaggccactataccagtggccaagagttcagatccttggaggccgtctttggagaggctcaatgggactcgtattctggcagcagcacagcaccgtgtgggacacaggacaccctccccacacctgagctttcacccacaggcaaggggatgtggcgagaactgacgggcacacgtgaaaacagtcagccttgcccggcgctctttgaaggagagctctaaggaacacaagcacacagggctgagtcagcttttacccagcttttttaacttacctaatttttaaaaaattgaaaatggctgggttaaaagactaaaaaacctcggttgttgcaggtcaagactgcctgaaccctgcacaccag

SEQ ID NO: 146652 - DNA, 556 bp, Homo Sapiens
gcggccgccggcggcctctccccagcagccgcggcgctgctcccccttctgccgggcgcgcctctcgctgggcgccctggctgcctttgtcctcgccctgctgctgggcgcggaacccgagagctgggctgccggggccgcctggctgcggacgctgctgagcgtgtgttcgcacagcttgagccccctcttcagcatcgcctgtgccttcttcttcctcacctgcttcctcacccggaccaagcggggacccggcccgggccggagctgcggctcctggtggctgctggcgctgcccgcctgctgttacctgggggacttcttggtgtggcagtggtggtcttggccttggggggatggcgacgcagggtccgcggccccgcacacgcccccggaggcggcagcgggcaggttgctgctggtgctgagctgcgtagggctgctgctgacgctcgcgcacccgctgcggctccggcactgcgttctggtgctgctcctggccagcttcgtctggtgggtctccttcaccagcctcgggtcgctgccctccgccctc

SEQ ID NO: 146653 - DNA, 826 bp, Homo Sapiens
gcaataatatagactttgtattttaagtgctagaaaatgagataaatgttatcagtttgggtgaaaaagtagagagtaggggtaaaagctggacattgcaaaaggattggtttaagaaatactgtctaagggttagctgtcaatggttggagaagaaggagatcctccttcctctcacccatacattttttcttctttcctctttttcaatgatcacagaccattgggtctctgcaaatccacattttcacagggaggaagtcggaagtaattggagcgacggagtctcctagggggcagaccagccatctgacggcaaagctcatctttcatagcttcgtgttccttacagacaagacgagagcagatctccttgttgacgatgtacatacgtcgtaaactggtgaagcataactgatgaatgcattgtttaaccggccgatgcacagagtagagccttgtgcaggtaaatttctcatcccagcactccaagtcatctgtggaaggtgcaatatcagccaaaacagccaaaactgtttcatctgtagcgggatcattcaccagattaggatcttctgtgaatgtttctggagtcgcttgagtcacatcgtctcctcgttgactattgacccccaggggtatccagtcagaggtgatgatgaatgcagcaagaaacagcagcaccttgggtcccaagagcgacatattgtctatggtgttctgctctttccaccgagtcctttggctgctgaatgtgtctctctcctcttacgctccccggccgtaatggccgaattcccgggcatatgtccggtaccgtcgactg

SEQ ID NO: 146654 - DNA, 506 bp, Homo Sapiens
  misc_feature (465)..(465): n is a, c, g, or t
tttttacaacaggcatcaacagacatttattgaactcttgatgtgtgccatgccaggcaccaaggaggagcacacagaggtattagataaagtcctggcccttgaggaacttgtggatgatctgaggaaagaaaagtgggtggtcagaagcttttgtgatttccatgcttctgccgtttctctgtggtctcaggaaatgggagagccagaaaggggtagccttgtacagtgtccaatacatacatgcacaggctacacatgtacaatacatgtgcagagtccacgcatctacaggacacgtgtacagacacaaggtgcatatgtgtcacatgtgggtgggattcatgtgcagagtccatatgtgcttatgccatgtgactatggcacaagagctccatctccccaagtcaggctggagagaaagggggagaaccccagggcctgtcaaggcctctcaaggctgangctggtactggccctctgtggccgtgaagaagtccttcagc

SEQ ID NO: 146655 - DNA, 342 bp, Homo Sapiens
catgaaaggtgtttccctcctggggaagccagggtgaacacggtcttgcccacacagggcatacgattcgggaggttcaatgaggataatataaaaaatgtaccacaacttaagggccatgaaggaaacaatgccttctttcacttgtgatattagctacttttgaggaaaatctggctaatatatgtttcttggctacctgcctccttaaatagggtgtaagggggatattctaatcttaactggaggactcagcattgcaactggtcccataaagtctgacacttgcttctttataatgatttccaagaggtgtatgaacctttttatgatcacgttaaa

SEQ ID NO: 146656 - DNA, 460 bp, Homo Sapiens
taaagtttttctaactgttttgttccagaatcagtatgtaataaagttcgattttaatcaaggcacccccaggtaacgcagagaaacaaacacatacagcaaatcactcacctgtccaaagcctgaccaacttgaaaagaggttgcctggatacacaagcaggacaaaggcagatccaaggggaggactggatttaggtgggatgttcattagtctcagggtcactcacctccactggctctgccccaacaaccattcctaccccagccatttggagacccaagcaggcatcctcctaaacagcccgtggttggagggtctcttatttttgtaagaaaagagccttaagaacaaccaaatgttactgtactgtgcaaacactcttccttgctgttcactcacttttctttttcctaaaaggcgtggggttgacagagggatcccagggaaaagagacagg

SEQ ID NO: 146657 - DNA, 942 bp, Homo Sapiens
ccaaggtagcgaggcctgggtggcgatttcggcacgagggggagctgcagtggctggtggccaagcgggtgcaggaccacacgacggttgtgggtgatgtagtgtccccagagatgggcgagagtctgttccagctctacatcagcctcaaggagctctgccagctgcgcatgagctcctcagagagggatggagtcctggccctggataatttccaccgctggttccagccggccatcccctcctggctgcagaagacgtacaacgaggccctggcgcgggcgctggccgggctgggccatgagatccgcactggcgtccgcaccctggccgagcagttggaggtgggcatcgccaagcacatccagaaactggtgggcgtcagggagtctgtcctgcctgaggatgccattctgcccctgatgaagttcctggaggtggagctttgctacatgaacaccaacttggtgcaggagaacttcagcagcctcctgaccctgctctggacccacacactcacagtgctggtggaggcggccgcctcccagcgcagctcatccctggcttccaacaggctgaagattgccctgcagaacctggagatctgcttccacgctgagggctgtggcctgccacccgaggccctgcacactgccaccttccaggctctgcagagggacctggagctgcaggcggcctccagccgggaactcatccggaagtacttctgcagccgaatccagcagcaggcaagaaaccacctctgaaggagctgggggctgtgacagtcaaggcctcctaccgcgcctctgagcagaagctgcgtgtggagctgctcagcggctccagcctgctgcccctggactccaatggctccagcgaccccctttgtccagctgaccctgggagcccaggccatgagttcccctgagcctgggccgc

SEQ ID NO: 146658 - DNA, 1060 bp, Homo Sapiens
tcgcctttccagtttgttggccccccagcgtgtggtagtccagcacggtgagcaggaggcatgccccagccttgcggcacggctcagcaggcaccaggaattcaaaggtctcatcaaacaatgggggaaggtccttcttgtgcttctgggtctcccgggcggccagctcagggaactcatgcctgggctccaaggtcagctggacaaaggggtcgctggagccattggagtccaggggcagcaggctggaggcgctgagcagctccacacgcagcttctgctcagaggcgcggtaggaggccttgactgtcacagcccccagctcctcagaggtggtttctgcctgctgctggattcggctgcggaagtacttcccggatgagttcccggctggaggccgcctgcagctccaggtccctctgcagagcctgggaaggtggcagtgtgcagggccttgggtggcaggccacagccctcagcgtggaagcagatctccaggttctgcagggcaatcttcagcctgttggaagccagggatgagctgcgctgggaggcggccgcctccaccagcactgtgagtgtgtgggtccagagcagggtcaggaggctgctgaagttctcctgcaccaagttggtgttcatgtagcaaagctccacctccaggaacttcatcaggggcagaatggcatcctcaggcaggacagactccctgacgcccaccagtttctggatgtgcttggcgatgcccacctccaactgctcggccagggtgcggacgccagtgcggatctcatggcccagcccggccagcgcgctctgcagctgggcatgcagcgtgttctgcagctgcccctgctccagcacggcccctacccgctgctccagggcctcccatgccagctgggcgggcaacttgccgatcaccagccgcagctgctccatgtcattcaccaccacacacagcatgttggctgcctggccttggtccttctggcctgaagagagctcgcgggcccgggcctttataacctcgtccgaattcgccacccaggcctcgctt

SEQ ID NO: 146659 - DNA, 506 bp, Homo Sapiens
tgtaggctgatttctttttacctacaatcttcctaataatttttgatgataatgacccctcatttctttctgcccaaagacctcattctttaaataaaacttgttattttggcatatttctggtagggcccattgcacatgtgtatcagtatagttattatttcatattaactttatgaattctcttgacttggcttataatagttttatgatttttactacataggtagcacatttatcatttgtgacagaataatgtgaagttaagtaattactgaactttaaatggaaatagtatgcaagaaactcaggcattgaacttgaagataagagtattattgctttaatccagtgtatttgtttatggaaagaaaaacacaaaggcagactgttgagtaaaaaatattaaatattgttaaatattctgtattttggaatttatccatttataggcttcaaaagtaaatttttaaataaaatatattagtcgactgtgttaaaaaaaa

SEQ ID NO: 146660 - DNA, 874 bp, Homo Sapiens
tttttttaaatgatatatttattcactgaatcaaatgtcattaatgagttatcttctgtggaggatgactgttctctttgttaatgttcccaatcaagatcttgggctgagaagaggcccttcacccaaggagtttgaagtatcacagtgtgtgggaaggtgggaaccaggatacccattcatttccaaccgagacacagagaagtgagtcacagaatttgagcccgctctcttgactgcccagccagagacactgatttctgtaacctcttcacttgatcctgcctcttaagcattaaaacattctcctaaacctctgagtgttttgtgggttctgggtgttttgtacattttagccaagctaaccacttgtctgcaagtactgactttcctatgaattctttgaagattattgagtcagaaaggaaaaatatagccccaaattcccaggcttttaatgcattacattaactgcctattgaaatgagaagttcttcacaaacttgtatacccactaacaagattgcacataaacatgcattaaagtatatactaagaaaccctctgtccaacggctcatgcatatgaagtccgaacatgggagtttgccaattgcattcatcaagtcgttttgcggagtcagatccctgatggaagagctcacaggctctgccttccaagtcctgggttcctaactggtgaccttagcctggggtctgtggggagaccaaccctggcttccaagaaaaccacattccatggactatcagaaatagacacagatttgggtgacaaagctggctctgtatttgcattttatttttgtgttcttgtcagtttgggaatgattaatattaaacatttatttaagaaa

SEQ ID NO: 146661 - DNA, 458 bp, Homo Sapiens
gtctggggtgaggcctgaggttttacatttccaacaagctgccaggtaaagccaatacatctgtccaggaatcacactttgcgtatcaaaggtctagatgacattatcattccaaagagtttcttttacaggctctcagatcagtgttcatccactacctgactactgtcattcataggcattctgttccacagcaggccagctaacgtggtatttacaaagctcactcctcttatacaacaatccaagtgtttcttttgtcagttgtctgtgccccaggagatccctctctgccttgccttgccctctgcctttggagaccagcacctcatactcagtgaaggcctggagtgcttaagagggatttcttccagctctcttgccctggtcttcagtgtattagatgtattacctccatgctctcagtagaggcccataggaaagagttggcggccgca

SEQ ID NO: 146662 - DNA, 551 bp, Homo Sapiens
agcttcatgtagaggccgcaggcattgcacacaggctcgccctccgcattgcggcgccacagcgtggtggtggtggtctggcagttggcacaggagaggcccactcggcgggaggcggacagccggcgctgaggcttgatgagcggccggttgatgccgttcatcttgtggtagaggccgcaggcgttgcacagatagtgacccgtcccatctcgcctccagagcggggtggacatagccccacagttgacacactctctgccttctgagaagtcgtcaaacatatcgagattggggtgtcgggcggccgggttggcccggccgggcaggctgtgcaggaccgggctgtcgaaggggccggcggaggcggcggcggctgcggcccaggacgcgcccacgtcggccatgtaagccgggtaggggctggagtaggagcccgcgaagccggcgcgcccgtactgctcgcggcccgccaggcccgcacccgccgctccgccgccactgctgtaggccgcagcttcccgggccgcggcagcggcggcggcggccgc

SEQ ID NO: 146663 - DNA, 749 bp, Homo Sapiens
tttttttcatccgggctacaaaggtcatctgtgcaaaaataaaattaaatgcaatatgattagagcatcgtccaaggtaatagctttcccatggaaagaactaatttcttatgtacaggatgtattacatgctcaacaaggtacagctgatacacacaaacaagcacaaacaccttcgctttaattgggctcattctatacgtctttaaaacagagatactgaactcctctgcacttctatggtaagggggaaaagccccaaactgcacaatttagttggtaacactggacaaaatgaaaaaatacatcaagtctcagatttatggacatttggaacaatttttaatagcacatgcagcattccttgatagtgggtctttttgcaaaaccaaaatagcaaagaagtcatttatttattttgtttattaaaaagctaaaatatatatttaaaaataattttaaaactattgaaagcacctgtgcaaaggtgggggaaagtcaatttgagtaactaggaaagccacaaaaggactttcaagcctgagggggggatggacaacatatgattcattgctggcttgggtccatgtctgtggtcagcttcacataattggatgggaagagccccacttgtccattgacttctcctttccaccagtcagggtcctccttgttgaggacgttgatgatctggcccttgttgaaggccagctcatcgtcattctgcgcggtgtagtcgtacatccccc

SEQ ID NO: 146664 - DNA, 797 bp, Homo Sapiens
  misc_feature (618)..(618): n is a, c, g, or t
gggcaactttggcacaagtgctttatttgtgctattgttacaatggtcacaagtacatcttttatctcatttctcccagaattaaagatatactttagtgatctgcgtgataatatttataggtttatttacctatatttaaaaatgatcagtggctagacatgtctagaaatatatatggcctaatatgtaacttctctttgataaagtgaaaacaagtaatatataagctaatattattgaagcaatattttttggtacatacttacttattttattgttttcgatctgcatgcacaatatgaaatcataaaagcaacaaacatcaccacaccaacactgagtaagatcatttctatcaggccaaggaggtttatttttccagttacttgacttctgaacatgtttgccttctcatcaccaatggtcccagtctcattaagccaaagaataggcacaatatagttcctcttcagattctttaatacttgaattttttctgatggcttgaccaataggttgacctgcagccgttttgcaaattgtaaagtgaatccagttataggttcaatatccaagtatgtcctatgttcttcttcatttgggtttaatccatcnaatagggttctgaaacatcagggacttgcatacaagaaaatggggaagtgaaatgtacacaggtctcccttctttgcatttgctgatgtctagcacaccatatgatgtccaattttttgagataattttttctgtgcagaaacaatagttggtctggttttcaactggagaggcaaagg

SEQ ID NO: 146665 - DNA, 848 bp, Homo Sapiens
  misc_feature (438)..(438): n is a, c, g, or t
  misc_feature (473)..(473): n is a, c, g, or t
  misc_feature (509)..(509): n is a, c, g, or t
  misc_feature (644)..(644): n is a, c, g, or t
  misc_feature (688)..(688): n is a, c, g, or t
  misc_feature (775)..(775): n is a, c, g, or t
  misc_feature (811)..(811): n is a, c, g, or t
ggaggaggatggggcctagagccgagtgaattccaaggcccagtgttcaccatcataccaggggccagaggcgatggcttgcctccatgagacccgaacaccctctccttcctttgggggctttgtgtctaccctaagtgaggcatccatgcgcaagctggacccagacacttctgactgcactcccgagaaggacctgacgcctacccatgtcctgcagctacatgagcaggatgcagggggcccagggggagcagctgggtcacctgagagtcgggcatccagagttcgagctgacgaggtgcgactgcagtgccagagtggcagtggcttccttgagggcctctttggctgcctgcgccctgtctggaccatgattggcaaagcctactccactgagcacaagcagcagcaggaagacctttgggaggtcccctntgaggaaatcctggacctgcagtgggtgggctcangggcccagggtgctgtcttcctggggcgcttcacgnggaggagtggctgtgaagaaggtgcgagacctcaaggaaccgacatcaagcacttgcgaaagctgaagcaccccacatcatcacttcaaagggtgtgtgcacccaggctccctgctactgcattctaatggaagntctgcggccagggccagctgaatgaagtactgcgggctggccgncctgtcaccccttctaactggttgactgttcatggggcatcgctgttgcatggactacctgcacctgcacagataatcaccaggatncttaaggcacccacatgctaatacctacgacgaatngggtgagaatcttagatttggcacttccaaggagctg

SEQ ID NO: 146666 - DNA, 550 bp, Homo Sapiens
tttattttttcatgaaaattattggtgggccactgaaagtccccacacacaaagcctttattctatataattttataaacacaaattcatgattatctgttttgagagttttaagttttgttttaatgtttaacttttatgtgcatatgatgcttccatgtgttggttactagagtagtaggttaactacagacatactgttttgtttgtacatatttataaatctgtaccacctaacattgaacatcattttatatgaagaacatacatgttgcaaaatgactgctttcagcatctaacaggacttctgtaaataataggttaaaagttaaaaataaaacactaatgttttaagagctttagtattttgcttagcatttaatactagcagattcataactgatgcctgttcaaaaacactgttggtggaatcttttatttcatgtgtatgtaactactaaatttttcatgactgaagaggttatagcacatattagttagtgctaatattctactgaatataatttaagcaatgggctaaggtccaaga

SEQ ID NO: 146667 - DNA, 593 bp, Homo Sapiens
aaagaggaggtggcaatggtagatccacccttatgcttctcagtttagcataacctcttatggattttcatcaaattcagcgtgttggtcactggaaagagccttttccttctccttttcttactctcccctcatggtgttcccctcttaaaggagaggagcttttaatttacacttaccacctcatttgcttttctggaggccatgcaatataggcgggactacagagttaatctcctttttacaaatgaggccaagagaagcctcattggttcacagtcatgcagctcatactgtccacccttgtattctcagatgcaggacaattgcattttagttttattttgtggaggtgcagaatatttactctttctgtccaacccttgattctgccgaggaagacactgatggtttgatgagtgattcagctgtttttggctaagggcttttggagctgatggcaggggtttgatgaatccaaatgagctctagacattatcacagactgaatagatcttaactgtctcctacatgtgtgttttcaaatgtgtatagatgctattgttattaataaagttaccaattaattctcc

SEQ ID NO: 146668 - DNA, 717 bp, Homo Sapiens
  misc_feature (546)..(638): n is a, c, g, or t
  misc_feature (640)..(657): n is a, c, g, or t
ttttttcgtggatgaggcttttaatccggggtcagccaggtacagcattggggacatccccaggcccagggctggcgatgtgctgggaaggaacttaggtagagaggtgggaagtgaaagcatagggaggccatagccctccagaggggaattctaagacagacagttgaaggtgaggcctttgaaaaacaatgggaacatcacctcccaaagagggactgaggtggctggaggaaccagagccgcctctgcactctgcaccgagggtcgcgtgtggctgtcaggagagcagcgtaagcctgtggagcctctgctcgcttcctgctcagaaagccagaagagagctggggcaggccaccagggcaccagacactcaccaagcggccatcaggactgggatgagaggacagaggaaggacactctgtccccaaaccctcccgtgtcctgacggccctagaacttggaggtgtcaggacacaacacagactcaaggctcctggattgaaaatgtggagggcttgggccaggcgcggtggctcacactnnnnnnnnnnnnnnnnnnnnnnnnnnnnnnnnnnnnnnnnnnnnnnnnnnnnnnnnnnnnnnnnnnnnnnnnnnnnnnnnnnnnnnnnnnnnntnnnnnnnnnnnnnnnnnngaccgcgtatgcggccgcaagcttattccctttagttgagggttaattttagcttggcac

SEQ ID NO: 146669 - DNA, 564 bp, Homo Sapiens
ccttttaacttgtacatgtttaggaataacaaccctgcaagcaaaatccatgacgtgaaagattacatcacagatgttaacagctggctggtgacatttggtttccatctgcacaatgctattcctggattccctgttcccaaatttgatttaacagaaccttcttacgaacttgtgaagagtcagcagtgggatgatataccgcccatcttcggagtccagcagcaagtggcgcggcaggccaaggccttcctgtcgctggggaagatggccgaggtgcaggtgagccggcgccgggccggcggcgcgcagtcctggctgtggttcgccacggtcaagtcgctgatcggcaagggcgtcatgctggccgtcagccagggccgcgtgcagaccaacgtgctcaacatcgccaacgaggactgcatcaaggtggcggccgtgctcaacaacgccttctacctggagaacctgcacttcaccatcgagggcaaggacacgcactacttcatcaagaccaccacgcccgagagcgacctgggcacgctgcggttgaccagcggccgc

SEQ ID NO: 146670 - DNA, 314 bp, Homo Sapiens
tctaaagacccccatctccctgaagggcaggtgcatgcgcctctgcgatggtaagagatgctcacttgaacatgttgccctggttgatggctttgcccacatgctggaaggtcccattccatgaacagtactctagaaccagcgtctgggtctgctctctggcaagatccagttttcaccatgtgtatcactcttggagcacctgccaatctggactcaacgcacacgcatgctgctgccatttaagacccatactccagaaatggatctctattgtcggttgaggaaagatgacactcgacaggcattctcct

SEQ ID NO: 146671 - DNA, 454 bp, Homo Sapiens
  misc_feature (286)..(294): n is a, c, g, or t
ttttgatattaagacactttatttttctgtccaactttcattttaggttaaaggttactcatgttacatgagcaaattgtgtgtcatgggggtttggtgtgcagataattttgtcacccaggtaatcagcataatgcccaatagtcaggtttttaatccttaccctcctcccacattccaccctcaaataggtcccagaaaagacataattataccaaatatgagcttcatactagttcagaaggtagagttggaggatcataggcaagttttcagagaaaccgcnnnnnnnnncatttagattattataagatgttccagaggcactaagtgaacagaatctaatgtctttgtgcaatctgacgaacacttagtgtttagtagcagcattatgaaattgccatttttagataattctggcagtaaataccgtttaaatggtggtgaagaagac

SEQ ID NO: 146672 - DNA, 491 bp, Homo Sapiens
tttcccgatccattcccacgggggtcttcccttgggaacaccactggcagatttttatttctggctggataagcagacaccttaagtttaaaacaaagaggtcacctcttcccccacgaaatgcgatgtggtggatatggccacctcactgccctgagacccagcttgatctcccaactccaggtgcatgacccaggctctgaccaacagagctgggtggaggccgttcctgcagcactgggggtggccctgacctaaccaccactcctaatccttgaatgaggttcagtattacaaaggctcttgtttctacggcccagcgcagaggctgcaggagggtctttgcctctgtgcaatgctcacagctgcctcgcccaagacagagacaagaagggaagccagaccgggcagccagcatggggtgcagagccaggaaggaaaggcccagcatacggcgactcggggccagggtggagtccctgagccagacg

SEQ ID NO: 146673 - DNA, 812 bp, Homo Sapiens
ggctgatgtagctcactgatgtctgtgtagacagggagctgtgacgagagcaagaggtcagaacacatccaggctccttaagagaaagcctttctttaaccgtttttgaaacttttcaaaggcagggacttgtccagcctaacctgcctgttgctcctagctcctgaggctcagggcccttggcttctgtcctctctgctcagggtcctgcagcgttgcctctgctcagccatgctcctgctgctcgtcccagtgctcgaggtgatttttactctgggaggaaccagagcccagtcggtgacccagcttggcagccacgtctctgtctctgaaggagccctggttctgctggggtgcaactactcatcttctttttcaccatctctcttctggtatgtgcaataccccaaccaaggactccagcttctcctgaagtacacatcagcggccaccctggttaaaggcatcaacggttttgaggctgaatttaagaagagtgaaacctccttccacctgacgaaaccctcagcccatatgagcgacgcggctgagtacttctgtgctgtggtcaataatgcaggcaacatgctcacctttggagggggaacaaggttaatggtcaaaccccatatccagaaccctgaccctgccgtgtaccagctgagagactctaaatccagtgacaagtctgtctgcctattcacccgatttcgattcctcaaacaaattgtgtcacaaagtaaggattctgattgtgtatttcacagacaaaaactgtgctagacatgaggtcctatggacttcaagagcac

SEQ ID NO: 146674 - DNA, 751 bp, Homo Sapiens
tggggaagaaggtgtcttctggaataatgctgtagtagaaggcgttgcacatgcaagtcagatttgttgctccaggccacagcactgttgctcttgaagtccatagacctcatgtctagcacagttttgtctgtgatatacacatcagaatccttactttgtgacacatttgtttgagaatcaaaatcggtgaataggcagacagacttgtcactggatttagagtctctcagctggtacacgggcagggtcagggttctggatattgggtatgatggtgagtcttgttccagtcccaaaggttaatttctcatttccaaagttagaccagaggcctgtatcaccaggctgggccgcagtgatgtggagagaactgtcctttcttgcatcaccaaactgaaaggttagtctcttcagcttcttcacttctccacccgtaactactgtcaccaggaggacaggaccttccccaggctcctgtctgtaccattgtaagctggaaaaaacacttgaggagttgcagtacacagtgagattttctccctcttggatgcttagaaactgagggctctgctccagcagctgggtgctcacccatgccaactgaatccaaagaatggacacggagaatttcaggaccatcttgtctttctatcacatggtggacatggcccctgactttagctgctcctgaaagagcccgtcctggaacagacttctctgggctagaagagtgcttgctgccacccac

SEQ ID NO: 146675 - DNA, 1371 bp, Homo Sapiens
ttttttctgctcttccaaatcattttaatgaaggcatcggcagcaggacatacaacacgcccagatacacagcatagcagggcctcgataatgagataatttccccccacgtcttgagaagaagaatactatgtatttctttatgaacactattaagagaaaataaacccctcacaacattctgcaggacctagagcccaagagaacccactgaagatccatcatctgtgggatggcggaggcagtctctggggagcaggagggaatgtgcacagccaggggaggctgcagcagccttgcctctgccgtgaatgtcaggcagtgacaagcagcaataagggaacagagggggtggcagcagtgtttggcagctcttcagcaatcttaatcataaattcgggtaggatccagttggtggcattgccgggggggcacagaggtggtagcagctttcacctccttgggggtaggagagttccctctgtttggagagggagaagaggggcaatgcagaggaaggagcgagggagcacaggctgtcttacaatcttgcagatctcagctggaccacagccgcagcgtcatgagcagattaaacccggccactttcaggaggaggattcggaacccaatcactgacaggttttgaaagtttaggttcgtatctgtttcaaagcttttctcgaccagcttgacatcacaggaactttctgggctggggaagaaggtgtcttctggaataatgctgttgttgaaggcgtttgcacatgcaaagtcagatttgttgctccaggccacagcactgttgctcttgaagtccatagacctcatgtctagcacagttttgtctgtgatatacacatcagaatccttactttgtgacacatttgtttgagaatcaaaatcggtgaataggcagacagacttgtcactggatttagagtctctcagctggtacacggcagggtcagggttctggatatttgggatgacttggagctttgttccagttccaaaggtaactttctggtaacccccagaaacagcacagtagtaaacagcagcatctgcctcccgcacctggaggatgagcagcgatgaagagaaccgttcataggtcatgttgtatcgtccctgctgagaaggctttgagcctttaacaaggagtcttggtgcacatcccgggaagtgaaggtaccagaagaagttgtaagcattggacacagagtgattacagaagatttccaccacagctccctctgaagatgccactgtggaaggctgaaacacttggtccttgctttctgcaaccttccagagagagttgaggagaagccctagccacaccgcccccagagtgctctgcaaagc

SEQ ID NO: 146676 - DNA, 740 bp, Homo Sapiens
tttcagggtcttatagaaaaatataactttaataaggaaattcaactaagggtaggagtactccaggaacaatggtaatccccacatgatgatctgattctcttctgggagcaaaacattgcaaccagacaggatggacaaggcatctaaaaacccagtatccttcaccttccgaaaggagggagggactgtagagttgcccaggaaaaaggtcaagagtcttccttctcctggaacttgcagttggtacaggtgtagaagacagtttgcccttcatcggctgaacgcatctgtctggtgtggtatgccattccttcatgaccacatcgagggcagcgcctgtcaaccacaggtccctggcactcaggcccttcctccaccgacataggcatggccgtccccagttggtggaacacaaccgaagtcttcacaaccttcccctcaaagtcccgaacgttgatgttgaagccacagcgaatacaggtgaccgtatcctgagccccgggcagaggcaggaccgagccgcaatctgaacagaaatccaggtccgactgaaagctggagcaagtattggcgaggtccatgacagacatgcggtcgggtgcctcctgcctctgcgaccaaggagccgaaacgcccggaattcccagacagcgtcgggtactaaaggacttggaaccctttccaggggccggtgagaggagttaaccaactccgtgggctagagcgccagctctccc

SEQ ID NO: 146677 - DNA, 263 bp, Homo Sapiens
  misc_feature (30)..(30): n is a, c, g, or t
gtaggagtactcccagaacaatggtaatcncccacatgatgatctgattctcttctgggagcaaaacattgcaaccagacaggatggacaaggcatctaaaaacccagtatgcttcaccttccgaaaggagggagggactgtagagttgcccaggaaaaaggtcaagagtcttccttctcctggaacttgcagttggtacaggtgtagaagacagtttgcccttctgtcgtcttctcgcagccgtatagtagtagtagtaggc

SEQ ID NO: 146678 - DNA, 616 bp, Homo Sapiens
  misc_feature (130)..(247): n is a, c, g, or t
  misc_feature (286)..(298): n is a, c, g, or t
tagctttttctacatatttctgttcatgttgcttgttcatctgaattacctggaatcaatgaatctttcctgatcctaggcccaacaggttaaaaggctggagggccaccgaggctggaaactcagaggnnnnnnnnnnnnnnnnnnnnnnnnnnnnnnnnnnnnnnnnnnnnnnnnnnnnnnnnnnnnnnnnnnnnnnnnnnnnnnnnnnnnnnnnnnnnnnnnnnnnnnnnnnnnnnnnnnnnnnccgcccccgccgccaattccgtctctacaaaaaggaagnnnnnnnnnnnnncccagaggaaatcacacaggcaaaagcgctttacaaattttaaaaatgaaaactgttctagagaaataatcgcgcgccggaggcggaagccccagagcctcagctcccacgtggcggcggagccagggaaagtccaggagccaaggctacggcccgagcgctggaaccccggtcaggctccggctccccgccacgacgaactgcatgcggccgcggcgctccggaggcgcccggggacgctcacctaagctgggagaggcggatacccgcccggcctagccccactacctcccaagagaccaacacgaccctcgtgcc

SEQ ID NO: 146679 - DNA, 931 bp, Homo Sapiens
  misc_feature (143)..(194): n is a, c, g, or t
  misc_feature (549)..(666): n is a, c, g, or t
  misc_feature (705)..(717): n is a, c, g, or t
ggaaagagtttaatatattctctattgttaagtgcaccagatgggacttctgaaacaacaattatgcttctgcataatagctttttctacatatttctgttcatgttgcttgttcctctgatttacctggaatcaatgaatcnnnnnnnnnnnnnnnnnnnnnnnnnnnnnnnnnnnnnnnnnnnnnnnnnnnngtgctgggtaggaagtcaataaccaagctagtaaataactgtatattgtcaagcactggtaagtacaagggagagcagagcaagcaatgggcctgatgaggcttgctttgtctcctctgcactcccacactgctttgtatctgcttctcatttctcacgatgggtccaagctttgggcaccaggtctccctggacattccgcgctggcactgcgcctagcacccagcggctgctcaggaaacgtttgtcgaacgaacgaattcacttcttagttccccattcaacaaacctttcctgatcctaggcccaacaggttaaaaggctggagggccaacgaggctggaaactcagaggnnnnnnnnnnnnnnnnnnnnnnnnnnnnnnnnnnnnnnnnnnnnnnnnnnnnnnnnnnnnnnnnnnnnnnnnnnnnnnnnnnnnnnnnnnnnnnnnnnnnnnnnnnnnnnnnnnnnnnccgcccccgccgccaattccgtctctacaaaaaggaagnnnnnnnnnnnnncccagaggaaatcacacaggcaaaagcgctttacaaattttaaaaatgaaaactgttctagagaaataatcgcgcgccggaggcggaagccccagagcctcagctcccacgtggcggcggagccagggaaagtccaggagccaaggctacgacccgagcgctggaaccccggtcaggctccggctccccgccacgacgaactgcatgcggccgc

SEQ ID NO: 146680 - DNA, 544 bp, Homo Sapiens
  misc_feature (209)..(316): n is a, c, g, or t
  misc_feature (364)..(376): n is a, c, g, or t
gaaagagtttaatatattctctattgttaagtgcaccagatgctggacttctgaaacaacaattatgcttctgcataatagctttttctacatatttctgttcatgttgcttgttcctctgatttacctggaatcaatgaatctttcctgatcctaggcccaacaggttaaaaggctggagggccaacgaggctggaaactcagaggcnnnnnnnnnnnnnnnnnnnnnnnnnnnnnnnnnnnnnnnnnnnnnnnnnnnnnnnnnnnnnnnnnnnnnnnnnnnnnnnnnnnnnnnnnnnnnnnnnnnnnnnnnnnnatcgaccccccgcccccgccgccaattccgtctctacaaaaaggaagnnnnnnnnnnnnncccagaggaaatcacacaggcaaaagcgctttacaaattttaaaaatgaaaactgttctagagaaataatcgcgcgccggaggcggaagccccagagcctcagctcccacgtggcggcggagccagggaaagtccaggagccaaggctacggcccgagcgctggaacc

SEQ ID NO: 146681 - DNA, 881 bp, Homo Sapiens
agaagccacgccaagccccgagcctgcgtcctgggccacccaactgcccagtgagcacatcaatgtggttgccgaccagccggatatcggaccggctctcccagaggcgcatcaaagccactctggccaacatcttcgaacaccggttcaccagtgaggctgctcagggtggcaaatttcaacaatgaaggtcccaatccctgccgtacaggtgacaggggtctctcctgggttcacgccatgaagtaagttcactgttccatatggcatgccagtgggggtctgaaaggctgggaggagttttcggccgcctcctcagccattctcaggagaggcccggaacagggccatccagcctctacttccaccccagccttccttggagagcagatgagcagacaggagtcctcctaccactcgaatgtttgtttcaaacacagaggcgttcacatcaatatcaaagtccacgctgtcctggagcacttcaaccactctttggaattctgagacattccccaaaatcagcaaggtgtccagtgcatcaattagagtcagagaaaaactgccccaggtgtcgtgcccgtcacaggtgagaggtcgcagctcatcgaagggaaaggcattctccaggtagctgtcgtaggcgtggtagaacatggccttgactcgctccctgtagtgggcgggatctggcgcggagccgtcgggacctggcgcaccatggtgctgaggcagcagcgcgcacaggagccgagcgggatgagcagccggaaaggcatagagctcgtgtcctctcagcgcccccgcagcagcagcatccactgcaaccagttcatcctgccctcgtgccgaattcaacaccaggcctcgtacctagccta

SEQ ID NO: 146682 - DNA, 1886 bp, Homo Sapiens
  misc_feature (1742)..(1762): n is a, c, g, or t
  misc_feature (1799)..(1817): n is a, c, g, or t
tgggtggcgaattcggcacgaggcacgagctctatgcctttccggctgctcatcccgctcggcctcctgtgcgcgctgctgcctcagcaccatggtgcgccaggtcccgacggctccgcgccagatcccgcccactacagggagcgagtcaaggccatgttctaccacgcctacgacagctacctggagaatgcctttcccttcgatgagctgcgacctctcacctgtgacgggcacgacacctggggcagattttggggaatgtctcagaattccaaagagtggttgaagtgctccaggacagcgtggactttgatattgatgtgaacgcctctgtgtttgaaacaaacattcgagtggtaggaggactcctgtctgctcatctgctctccaagaaggctggggtggaagtagaggctggatggccctgttccgggcctctcctgagaatggctgaggaggcggcccgaaaactcctcccagcctttcagacccccactggcatgccatatggaacagtgaacttacttcatggcgtgaacccaggagagacccctgtcacctgtacggcagggattgggaccttcattgttgaatttgccaccctgagcagcctcactggtgacccggtgttcgaagatgtggccagagtggctttgatgcgcctctgggagagccggtcagatatcgggctggtcggcaaccacattgatgtgctcactggcaagtgggtggcccaggacgcaggcatcggggctggcgtggactcctactttgagtacttggtgaaaggagccatcctgcttcaggataagaagctcatggccatgttcctagagtataacaaagccatccggaactacacccgcttcgatgactggtacctgtgggttcagatgtacaaggggactgtgtccatgccagtcttccagtccttggaggcctactggcctggtcttcagagcctcattggagacattgacaatgccatgaggaccttcctcaactactacactgtatggaagcagtttggggggctcccggaattctacaacattcctcagggatacacagtggagaagcgagagggctacccacttcggccagaacttattgaaagcgcaatgtacctctaccgtgccacgggggatcccaccctcctagaactcggaagagatgctgtggaatccattgaaaaaatcagcaaggtggagtgcggatttgcaacaatcaaagatctgcgagaccacaagctggacaaccgcatggagtcgttcttcctggccgagactgtgaaatacctctacctcctgtttgacccaaccaacttcatccacaacaatgggtccaccttcgacgcggtgatcaccccctatggggagtgcatcctgggggctggggggtacatcttcaacacagaagctcaccccatcgaccctgccgccctgcactgctgccagaggctgaaggaagagcagtgggaggtggaggacttgatgagggaattctactctctcaaacggagcaggtcgaaatttcagaaaaacactgttagttcggggccatgggaacctccagcaaggccaggaacactcttctcaccagaaaaccatgaccaggcaagggagaggaagcctgccaaacagaaggtcccacttctcagctgccccagtcagcccttcacctccaagttggcattactgggacaggttttcctagactcctcataaccactggataannnnnnnnnnnnnnnnnnnnngaggctaaactataataaattgcttttggctatcatnnnnnnnnnnnnnnnnnnnctcgagcatctatgtcgggtgcgagaagagtatgagcgcccgttgtcgcgtgggtgtggtggttggttt

SEQ ID NO: 146683 - DNA, 1012 bp, Homo Sapiens
ggaacatgcccatgagcttcttatcttgaagcagatggcttcctttccccaaggtcctcaaaggtaggagtccacgccagcccccgatgccctgcgtcctgggccaccccacttgcccagtgagcacatcaatgtggttgccgcccttagagatcatctggtccaaagtgtgttcaatttccatgggttaatagtacagcccgatatctgaccggctctcccagaggcgcatcaaagccactctggccacatcttcgaacaccgggtcaccagtgaggctgctcagggtggcaaattcaacaatgaaggtcccaatccctgccgtacaggtgacaggggtctctcctgggttcacgccatgaagtaagttcactgttccatatggcatgccagtgggggtctgaaaggctgggaggagttttcgggccgcctcctcagccattctcaggagaggcccggaacagggccatccagcctctacttccaccccagccttcttggagagcagatgagcagacaggagtcctcctaccactcgaatgtttgtttcaaacacagaggcgttcacatcaatatcaaagtccacgctgtcctggagcacttcaaccactctttggaattctgagacattccccaaaatcagcaaggtgtccagtgcatcaattagagtcagagaaaaactgccccaggtgtcgtgcccgtcacaggtgagaggtcgcagctcatcgaagggaaaggcattctccaggtagctgtcgtaggcgtggtagaacatggccttgactcgctccctgtagtgggcgggatctggcgcggagccgtcgggacctggcgcaccatggtgctgaggcagcagcgcgcacaggaggccgagcgggatgagcagccggaaaggcatagagctcgtgtcctctcagcgcccccgcagcagcagcagccactgcaaccagttcatcctgggagctgctgcgggttcctcgtgccgaattcgccacccaggcctcgctacctt

SEQ ID NO: 146684 - DNA, 957 bp, Homo Sapiens
  misc_feature (287)..(287): n is a, c, g, or t
gtttggttaatacttctagggaacatggcccatgagttttcttttccggaaggcaggatgggtccctttcacccaggttattcaaagtaggagtccaccgcagccccggatgcctgcgtctggggccacccacttgccagtgagcacatcaatgtggttgccgaccagccccgatatctgaccggctctcccagaggggcgcatcaaagccacttctggcccccatcttcgaacaccgggtcacccagtgaggctgctcagggtggcaaattcaacaatgaaggtcncaatccctgccgtacaggtgacaggggtctctcctgggttcacgccatgaagtaagttcactgttccatatgggcatgccagtggggggtctgaaagggctgggaggagttttggggccgcctcctcagccattctcaggagaggcccggaacagggccatccagcctctacttccaccccagccttcttggagagcagatgagcagacaggagtcctcctaccactcgaatgtttgtttcaaacacagaggcgttcacatcaatatcaaagtccacgctgtcctggagcacttcaaccactctttggaattctgagacattccccaaaatcagcaaggtgtccagtgcatcaattagagtcagagaaaaactgccccaggtgtcgtgcccgtcacaggtgagaggtcgcagctcatcgaagggaaaggcattctccaggtagctgtcgtaggcgtggtagaacatggccttgactcgctccctgtagtgggcgggatctggcgcggagccgtcgggacctggcgcaccatggtgctgaggcagcagcgcgcacaggaggccgagcgggatgagcagccggaaaggcatagagctcgtgtcctctcagcgcccccgcagcagcagcagccactgcaaccagttcatcctgggagctgctgcgggttcttc

SEQ ID NO: 146685 - DNA, 207 bp, Homo Sapiens
aagtcctcctttagtcttttgggtcgcgtagttgctgaaacctaagtacctgcagcctacaggataaggaagttcacagcttgcggggtgaatgaacccatgtgtgaactgcacagagcaattcatagaaaatgcatagaaatttgtaacactttggtcacatctgtctctagatggtcattgaatttgtttaaagatggatgaaag

SEQ ID NO: 146686 - DNA, 489 bp, Homo Sapiens
tcggttgctcacccatttcctcagttcttaggccaaagtaggagttaattaagtagtgaaaatgggctaccagcacatgcttcttcatgctgtagtacaaagtgtttgaaaagttacattttagacatgtgaaacttatcacatcgctcctagatgatttagtttcacctaaaatattcactgtgtagttctggactttccggacaggtgcatggaacattctgaagtgccttcccacaactttgggctgagatgcaaatacacagtttgggcaagggatcaccagctcttggtcaatttcatcttcatggtagcgatgtaaatgattcttgaatgaagtaagcacctttgtagagtatttacagaggccacaacagtatggctttgttcgatatctcactttctttccagaaggttcccagagagaaacatcaccccatgatgtgttatgaaagtatttctctcctggatcaaagcctttaaggtcct

SEQ ID NO: 146687 - DNA, 537 bp, Homo Sapiens
  misc_feature (311)..(446): n is a, c, g, or t
agttgtttttagtagtaggggtgatttgccacaagctgtttcatttatagctgcaagtggaaatcctttattgtgcatttgttacataagttatagctgtttctttctcaattattgtaacatctaaaaattatgtaacagttactaagtctttttttatgaaaaatttacaattagtccagaatttaaaacaagtttagtattaaatcctagggaatttctcacataactaatttggagaaataatataatactgttcaggcatggtggctcacacttataatcctaataacactttgggaggctcaacnnnnnnnnnnnnnnnnnnnnnnnnnnnnnnnnnnnnnnnnnnnnnnnnnnnnnnnnnnnnnnnnnnnnnnnnnnnnnnnnnnnnnnnnnnnnnnnnnnnnnnnnnnnnnnnnnnnnnnnnnnnnnnnnnnnnnnnngttggcttgaactcaagaagttgaggctgcagtgagctatgatcacaccactgtaccccagtgttggtgacagagtgagaccttttctcta

SEQ ID NO: 146688 - DNA, 951 bp, Homo Sapiens
  misc_feature (818)..(887): n is a, c, g, or t
ttttcttttacaaacgcgattttacttggtgagtcttttggctacatccactatatgctatttcaacctccttatcactgggacaggtattggtgaactcgtccctactgtatgcattagttaggtatctccagatgccagtcatttcttttggaatatcaaagttgcgatattttttggccaccaccttgacaatatgcagtttgggcagcaggttgcaatcagctaatgtcatttcattgccatccagaaatttacgtgtagaaaactttatgtcctccatactattttcatcaatttcatcagggagaggagaattcagatattcatccagtttctgcagggttttcaggagacccctctccagtgcttcattagcctctggccttgaattcttgatatatgcagagaatttggcaaagatgtccattccagcagtatttgattctgggtgttttggtgaaagctttaagtacttgggagggcataagacttcttcaagaaattcctcaatcttatttacatccgttttgacttcactgttgaaagttataaatggtgggtgggtcccgggagccaagttctgcaggtctgctggcttccttttcaggtcaacagtcgtcacactaaatacaactcctttgagccaaagaatcatgaagagcctctgggaaaaggggcagtttcctatgctttcaccatcactgccagccttgacgaagagctcgatgaggggctctttgtcctcctccttcagcccattcagcggcatcgacaacgccatggccggctcggctgcgctccgcgaacggcgaggnnnnnnnnnnnnnnnnnnnnnnnnnnnnnnnnnnnnnnnnnnnnnnnnnnnnnnnnnnnnnnnnnnnnnngactgtccggcgtcgagctggccacggcttcagctcctcagcaccgccccacgccccccgcgcc

SEQ ID NO: 146689 - DNA, 759 bp, Homo Sapiens
  misc_feature (722)..(722): n is a, c, g, or t
tcataggaaaacttaaaacactttattggagtaatctagaaaattttaaaattgttacatctttggtatttataaatgtgatactttactttctgtgggtacttctatagaggcactacaggatcagaaaatgcaaattgaatcattttagcaccttttgatataaatagaaatgcactgatgcagaggtaaaaaatcttataacttttgttgggaaactataaataattggtcctttcccatcagttctgcattggcttctccaactgtcaaggtttaggattatattgttatattgatcacatgtgctttaatttcttggccagaaggaatccatggcaaaaatcaggtttagagtcttaaactctaattcttagttgaatgaatttgatcttttaaatattaatgataaatgtttacaagaggttgctttaataagcaacagttaaaattctgttacctttttaaacttgcaataacaaccttcatttttaaaaatacagtcgtaaagattgaggtatcagcttttcacagaagtctttttgcactacaaaatgttcatcttggatgctcaggaacgtctaatggccaattccttttttactttctttgcctttgcagtcactgttctttagggtccaggttctgattgtaaacatccagtcctccattacattactgtacttactttcttcctgcttggcagtaggggtagactgcangtatcccgctagagtgagatcgttgttctgggagata

SEQ ID NO: 146690 - DNA, 905 bp, Homo Sapiens
  misc_feature (45)..(559): n is a, c, g, or t
ggccccgaggagtttcagggaaacgctgtatcttatgtcctgtcnnnnnnnnnnnnnnnnnnnnnnnnnnnnnnnnnnnnnnnnnnnnnnnnnnnnnnnnnnnnnnnnnnnnnnnnnnnnnnnnnnnnnnnnnnnnnnnnnnnnnnnnnnnnnnnnnnnnnnnnnnnnnnnnnnnnnnnnnnnnnnnnnnnnnnnnnnnnnnnnnnnnnnnnnnnnnnnnnnnnnnnnnnnnnnnnnnnnnnnnnnnnnnnnnnnnnnnnnnnnnnnnnnnnnnnnnnnnnnnnnnnnnnnnnnnnnnnnnnnnnnnnnnnnnnnnnnnnnnnnnnnnnnnnnnnnnnnnnnnnnnnnnnnnnnnnnnnnnnnnnnnnnnnnnnnnnnnnnnnnnnnnnnnnnnnnnnnnnnnnnnnnnnnnnnnnnnnnnnnnnnnnnnnnnnnnnnnnnnnnnnnnnnnnnnnnnnnnnnnnnnnnnnnnnnnnnnnnnnnnnnnnnnnnnnnnnnnnnnnnnnnnnnnnnnnnnnnnnnnnnnnnnnnnnnnnnnnnnnnnnnnnnnnnnnnnnnnaagaattcggcaagaggcaatagagcacaaagataacagtttcaagtacattgtgatacacgttttgacaggaatagatatgcatttagtcatgagggaggctggcagcaaccaccatgcatacattttgcacaaactcttggctccgtcaaccctgaatgagaagtcggcgcctcgtcctggcggggctgggctgcaccctcttgatgccctgtacctagtgtctctaagcagtggtttcctttccttgcctgtgaaaaagagaattttaaatataaagcagtggacgcatcttaagaagatggaccaggagggctggggacagcacccagcagcacggacactc

SEQ ID NO: 146691 - DNA, 422 bp, Homo Sapiens
aaaaataagtgtcctattattgtattatatattgatagaaactgttaaagctattttgaaaatatgagttcttagctttaatcatgaagtctgaagtttgctttcagtaattattttaaaagttgttttggttcattgctttataatatttattattgaatgccaaacctgttcttttttttactgtgtccaatattctttcaagcaaatgcaatggctggaatataattcagaattaactgaaacccagccagaagagggaccacctgtaaagcaagtcctttcaagtttcactgcacatcccaaaccatgttacaaaaagagcaactgctatattcacattatgatatttttctatcttaaatttgtcaaaataaagtatgagtctaactattaaaggatacattgttagaaatttaaaa

SEQ ID NO: 146692 - DNA, 429 bp, Homo Sapiens
ttttcatcttcagcagtctagcatttatttcattagtccttgaggattcattaaatgatctgcaagaaaaccaaatgtccccacatcacaggttctgtgctctactctctgaccacttctctgagctgaggcagcctgcttggagtatgggcaccagcatggcttagctacttttaagataaaaagtggaggaaataaataggtagactaggtaaggcagaagagaaggctggcactttgggccctgacactagtgggcaccctgtggttctgggtgagatggaggacacggatggggtggggtgttgtgtggacacaatgaccagagctctgggtaccaagcacatccccatgtttgagattcaagggcacaaaggcctgctgtgaggcacgtgaacaaatgcaggactgagctccaggaacgcactc

SEQ ID NO: 146693 - DNA, 1240 bp, Homo Sapiens
  misc_feature (425)..(426): n is a, c, g, or t
ctcccaagagtccccaatatggtccccccggggggtttggccacaaaaaaaggcctgtggcacaaattggcccccacccccttggggggccccaaaatttttcccgggggatggggggaaacctcttatgcgttttttccccgcggggggggcccttaaagagggtaaggggccacccccctgttagcggggcccccaaaggtggaccatttaagccccccgggagggcccaacaagggatgcgcgagggcgggctatggcggttgccggcccggaatcgcccctcctcccgtggatcgtcattccctcccttctatcatgaaggaggaggttgtatgtaaatttttttcttccctcctggtccatcggagtcatcctcccccaagatgcacgtttcccacacagcccttggccgcgtgcatagnngaacgccgtaggaggaagacatacgccataccaccccgatcatggccagagaggagaagacgccacacctgttctgccagaaggctgtgtagccagtctccgggtaccaagcagccacacacatccatttgaactcgtcaaactccacggatgaccaaccaaacaggggtggcaggcagccgatgagcgagtgaagccagatgtagacaagtgccatcacagcccggttccctgtgatcttcatggggtacaccatggggtacaggacagcatagtagcggtcgatggcaatgaccccgagggttagcatgctggcagagctgatcagcaggtagaggagggcagagaagttgcaccacactacaccaaagatccattccctgcggatggagctcgtcaccacaaaaggcagcaccaacacggacagcaggaagttggacagagtcaggctgaagacgaacttgttgctgagggtgaggaggtaggacttcttgtacaaggtgaccacgatgaccaggtttcccaggcagacaaaaatggtgatgacaatgatggcgatgaactgggtgatgatgacgcccccttcgccaccctcctcctcagtgagattactcagctccttcctgcagctgagggaggagttgaggctcatggtcagtgcacctcggcgtggggtgggcagagcatgctggacgactcctcttgctgacatttaggtcagttccagttcagcccattctgtcttcctcggaacccaaacagagagctcgcagccctctgaccacacagtgctccttcacctctcagaggacgc

SEQ ID NO: 146694 - DNA, 511 bp, Homo Sapiens
ttttatgttgtgggtgggaggaaaggaaagaagcaacagtcacccatgttagccacaagaagaggttggctgtttatggtttgcacagtgactttgtttttatctgtgctcaggcatgattacagtatctcattttatccggattacagtgacctcatctgatgttagagatttgagaattgttaaatgttcagcaggagaacgccaccgcctagtgtgaatgctaggtcagaagctgctttttcacactgaaaccatttaagtatgtacaaataagttaatagtgtaaatgtaggtgtaaaatacaatgcaaaacaaaataatgaagtaagtgaattaaattattgcaccaaatatggggatatgaaatagggaaagaaaagcattaagttacttatagtccataaagggactacattattttgttactctgataatcccataaaacaaagttttaagaatgtttacagtaaccatgaatggaattagtgaaactattcatatcaatgca

SEQ ID NO: 146695 - DNA, 534 bp, Homo Sapiens
atccctttgaaacagaagaccatggcgtacaatctggtatctgccttcagggttgggataatatctttgttttacaatactcagagtggctggaagaaagctgaggccacaggtcactagcaggttctaaagtctgaaaatccctgggaaaatttgactttttatatgctaataattgagtactgacaactctggagggagctttccaattcttccgtcatgaaagtggactttgtatactaaagaggggttcatggattcatggtaacctacaattcttccttgcggcctgaaccaaaggaatagcagctacagttgggttttcctaaaaggagtaagatagtcccaggcctcccttctcaaataagtgtatcaagcaggtggactctgccagtcgggggtcccggtcaatccctagggccctggggcgccatgggcctcgtgggagggctgcgcatcccaaccatgccttcgtctcctggtggggcaccggcggtacgtccgatcctccagcccgcgtggtcaggcggccgc

SEQ ID NO: 146696 - DNA, 429 bp, Homo Sapiens
cagggcatgtttctgttttggtgtctcactttcctcccagcgtgacttatttggggattcctcagggcctactggaatgtgactgcccactgcccagctgcctcgggtacaagtcctggccctatgtcccagctgtcaggggctcagggaatcctacccagccacctgtcctgggatggagtgtcagcatccaccccttggttgtcatcgaggccgccctcccagtcctgggtgaagatatttgggccaccagggctcccttggccccttcacgtaggaaatagacacgtgctttttaatgcaggacactttgagtgttacaaaatctgtagacctggcagtagggtcatgatgttgggaagggtgtagtgccctaggttggtgacagaagggacagacacttgtgcacaggtgtctttggtgatgggg

SEQ ID NO: 146697 - DNA, 489 bp, Homo Sapiens
ttttttgaaagacgaatacagataaatttattagttaaatactgattttccagccatttcaccttaagacaatgttaacaggtttgtgggttagggagggtatacgagggggcctttggaagaaaacaatgtaaatgatgattaaaacagaatcttggttcaaaggtattctctgctatagccagtaggattttggagtgaggggtctgggcgtgtggggaggcgtagtaatgccacagtcagctacagctctgctgagaaagaggaaggagtctccttgaggtccagcatcaggggcagaaacagcaatgtgcagaggagaacgcggcagatcccggagcagctcagagtcggaggctccctccaggcccccctgccgtgtcttagcagtcgtcttctttccaggaattctgttgtgttgtgtttgtttgcttcgaattcgtgttgcagaatctctggctttttgcctcctggacaaaagacttctgc

SEQ ID NO: 146698 - DNA, 791 bp, Homo Sapiens
gatcgggccaggtggaactgtttggggcagggccccccgaacttcagaaacccccgggggaaaaattaaaaactggttttggatttcggtccctggaaaaatggaggtcccgccaggaatggggaggttcaacagccagcggggcaaatatagacccggttcaggggggcttcctaaaaggtgcttccgggtggtttggcaggtggctcattggttttgatgggtgaggcaaccaggtgtcggactgcacaaatcccctccggtcaattaggctgggaggtaggggggcacagagcacagcacagcagttggtgattattacttttatggctgtaggggttgacagaggcttcaccgcccttcttgctggaccacgagcctttgatgtcttcattagtagtcaggttggaggcgacgaggtacgtgtgaaaccgtgagaggcccagaatggaccagatggagaagaagcagatcaccaactccagcacgcttgctggtgtctccttcagagtggagaggaagttgcttccctgagcgcgcaacgtcaggtgggtgaccacacaggcgaagatgaaggccgtcaggaatgagagggagagaataaacgcgtagaagaagcgatagttccgtctccccacacagttgcccacccaggggcagtgatggtcaaatcgttccacacagttgtcgcagacactgcagtgtgaggttcggggtggccggaacatcttgcaggtgaagcagtcctcgtgccgaattcggcgcgccgtcgacttcatactctctcgccg

SEQ ID NO: 146699 - DNA, 990 bp, Homo Sapiens
gcggccgcctcatgctggccggccacggcggcgtcttcgcgctcacgctgctgctcatcctcaccaccaccggcctcttcttcgtctttgactgtccctacctggctcgcaagctgacccttgccatccccatcatcgctgccatcctcttttttttcgtcatgagctgcctgctgcagacaagcttcaccgaccctgggatcctgccccgggccactgtctgtgaagcagccgccctggagaaacagatcgacaacacaggcagttctacataccggccaccccctcggacccgggaggtgctgatcaacgggcagatggtgaagctgaagtactgcttcacctgcaagatgttccggccaccccgaacctcacactgcagtgtctgcgacaactgtgtggaacgatttgaccatcactgcccctgggtgggcaactgtgtggggagacggaactatcgcttcttctacgcgtttattctctccctctcattcctgacggccttcatcttcgcctgtgtggtcacccacctgacgttgcgcgctcagggaagcaacttcctctccactctgaaggagacaccagcaagcgtgctggagttggtgatctgcttcttcctccatctggtccattctggggcctctcagggtttcacacgtacctcgtcgcctccaacctgactactaatgaagacatcaaaggctcgtggtccagcaagaggggcggtgaggcctctgtcaacccctacagccataaaagtattatcaccaactgctgtgctgtgctctgtggccccctacctcccaggtaagtgagcggggtgcggaagaggggtaacagggccatgcctggccagtgatcaaagtgttcctggatatcagccgacctccccctacaccctagatgccctccgtccactaccccctggagggcatttgtcatgtgacggaattccatggagaattgttatttaatcacgtgctcattgta

SEQ ID NO: 146700 - DNA, 1100 bp, Homo Sapiens
  misc_feature (699)..(699): n is a, c, g, or t
  misc_feature (1019)..(1053): n is a, c, g, or t
tttttattgaataattgttattattttctttcgtaaaatatttcatttctccattttctttttcagtggtcttttgaagaatccaatcttccacagtgctaaaatgagcagcattaacagcaacaatccggcaaaagcactcagcaggatgacccataatggcactctgcccggtagcccatctttggatatttgaatagcaagctctcttttttgattgctgctacttaaaaccagagatgcattttcactccggagttctccccttatagtaagatttaagctggaaaaaatatgattttataaaaatttggtttccacaagataagcgaaacattggacttggctgatgtcagaagaagtgagatttacatgtgatggtagcaaatttacatgtattgcagtccagaattgtgcctcgtttgagatggtcagttgatgtagtcattttctttccagagttgatactgaaaggatcctcaaagatatggggtctgcagtttgcattctcagaagatgacaatccagttgggtacagcacatggtaaccatttgatgtcatattggggaatgaaattgacagcttaagctctggcattgggaaagatccactttttctaatcaagtagaagatattaatttcattttccatgtcctcagtagacttaataacttcagggactgtctcattggcagcantttgaactgtggtattcacttgcagagctgtaaaactgtagtccaacttcatattttaccgggatagaaatgtttactacattatcagaaagggtttcaggaggttcttcgctgtcacttgttgcacttaaataaatggtcacattttccatgagataggatgtgttaaactgaaacatatttggaaagttaccatctctcctcttctccaggaagggatatccaactttacatgtgatattatgattagattcacaactgtctttttgcccggccgtaatggccgaattcccgggcatatgtccggtaccgtcgactgnnnnnnnnnnnnnnnnnnnnnnnnnnnnnnnnnnncgccgcttcctcgctcaaaactcgctgcgctcggtttactggtttcc

SEQ ID NO: 146701 - DNA, 447 bp, Homo Sapiens
caaatcctttctgttttctgagctgcagtgctaaaacagatccctaaaaggtaatagcatcttccagactagtttaattatttcctttataagaatatgacataaatttttattatagaaataatgtcattataattttagtgctagtacttgtgggttttctgtatttgtatcaccttgaaatttgttccatgaatagaaaatacttctttattcatgttttcaatcacttagaattattttaaatttattttgggtttgtgagagataataagattaagaacttcatcatttcagtgactttcctccaactctctgaatctgctacctcttattatatgtcccttagcagtacttttccagttaggttcgttaccctgctcattagctaaacctctttatcttgtgcctcaaaagagcttttacttttcttagaaacatttataa

SEQ ID NO: 146702 - DNA, 531 bp, Homo Sapiens
agcagttaactgcaagtgttaatttctacacatgatacatgagtgttgctacactcaattacaattaaggatgcagtatatcacctaaaaatcccattaaagatgctattgcagtaacagtaaaaatatacagttatattctaccacaatacccatttaaaagttagtttcctacatgctgcctttggcctaaaaagttcaaaacgaattcaaattaatttgttatttacgatttcactaattcaagacttcatttaaaaatattgcttatttagtgtaaaagtctgagataaactgtaaacatatttaataagttacatatggttaacaatcatatttggcacctaaatatacatgtttaattcctaacacatcaagtttatcctgacaaacaaatttacaaaaaacagtaataaagcaaatatctgagagataatactgcatctttaacagtaactgtgtacttctgtttaaatgtagaatgtatagaaaatctgttgtgaatgaagtatgcacagtttatcaattttt

SEQ ID NO: 146703 - DNA, 312 bp, Homo Sapiens
cccataatgttttcatgccctgagaatcagaaaaatactacagaatagaaaaagatttacagtcattggaagatttgtgttttgcaaacagtgttaagtgatattgctagatggtgatatttttttcagcctaaaactctgttgaaatctgtgatcaaaatgttttaaactatccaaaaaaaatttgtatatttgggaaaaatggatttttacatagcttttgtatgcagatataaaactgtaattatgaatatagtgggcgtagataaactcataagcttaaattctaaaaaagaaaaagcttataacaga

SEQ ID NO: 146704 - DNA, 802 bp, Homo Sapiens
ttggaggaccaccactttccactacgcagcgataaagcccgccatctcgtcgagatgcattgctgataacgagcattccacttggaagtttgataactctatcatccagaagaaggggttgtctgttctgttcccacctcacaaatgggaccaaatctgcattaacttcacaattcagaattgcattgttcccagcataaactgaggaaggttctggttggctggtaaatcttggaagacctgctactatgagcttcgctgttctactgataatagttccaagactctcaacagtggccacacactgataataaccttcatcaggtttattgtgtttggaatgcaccacattgctgataaataaagatccatccgggagaagctggcgtcgatcatctgatactaagtttaaaaaagttccatcttttttccattcaatttttggagaaggctcagaatatgctgaacagtttaatataacagaagagcctctaactgagagtgtatccaccggctccaccagaaaataaaatggagtgaacgttcgaatgctggctcctggggactgcggcgcggagccgctcctggcggccgcggcgcccggcgcccggcgcccgagcagcagcaggcagtagagccagaaggagggggtgctgaggagtcgccgggctccccgctccgccgccatctcttccccgagagtgagcggcagcggcggcgacagcgccgcggagcccttgcctccttccctcccgcgcgcctcagccggtccctcgctgcaagctcggctcccgcggccgca

SEQ ID NO: 146705 - DNA, 440 bp, Homo Sapiens
tctttctctcaacccttcctgtttcgctttccttccctggccttaatttctggatgtttggaaactacaggactctgtttggaaacaagatcaagtctgtggctaagagagcattctcggggctggaaggcctggagcacctgtgagtatctcaccagccctgccctgaggcacagcctgctgaatgcggctgccggggagttctgctagcaatttaatcgcatctttgtaaactgagaaacaggctatttggaaacaccagctgcttccttctcattatgtcagcttcagctttggcctttatgttgcctatgccaggaacagttacagaacatatggccagtggatgtgctcccagttaattcagttggtatttggataaataccctacccgctcctgctgcgcagcctaacccctgcactggctccttcatggaccc

SEQ ID NO: 146706 - DNA, 302 bp, Homo Sapiens
  misc_feature (102)..(120): n is a, c, g, or t
ggcaataattgataaatccttgtgactgcacagcctgctgaagttggtctgatcggctgaggaactccttttctgttacaccctgactaatgaacacatggnnnnnnnnnnnnnnnnnnncagctccctgatgagaaggcattctgacattctcaaacgtaaccagtttgcctccaaatgaaaaagaagcaccaacaggccttcgaatccacttgggcggcttcttcagaggcagcactatactatgctgagcagtctgctgtggaatttgtaacggaggaaggggctgtgcggtgcgtgac

SEQ ID NO: 146707 - DNA, 520 bp, Homo Sapiens
tccctgagatttgggtttattcagctccacccaaaactaaaccaaggctatgacatgtcccatgggaccaaaccatacattgtggaccatgcacctttcccttcccccaaggatgctgctacctctggagtggtgggcagctgcccatatcaccttgggaggtagagagggatttgctgggtgctgggtctgtggcaatcagggctcaactatggctgcctcctcctcttcctctggatcaggaggcgcagggagcagggagatgtagacctcattgacctctgtgtccaaatgtcggccaccccggaggtgcttccaggtttaagatgccatcatgggagagagcagctcggactcgccaggggtcgacatcagcaggcaggacataggtgcggcagaactctcgggacacgaagccgtggcggtccaggcgctgggggtgccgggcagacacctccagcaggttatccacagtcctcacagtcacctcgtctggggtaaagtggctcacatccagaaa

SEQ ID NO: 146708 - DNA, 694 bp, Homo Sapiens
  misc_feature (85)..(102): n is a, c, g, or t
tgcctttaaaatcattttataaaaaatggcacaagttggggtttatgtttactcagatgaacccgtccccttagaggacacaatnnnnnnnnnnnnnnnnnnaactccacgactgcccatcattgctgttaatccctcaggggagggttcacagctgtttatgaagccaagagaggttctgggcaagatcacagctggggaaacaggcccaggccctgctccctggtgtcctccatgctggagtcagcggtgcccaatgacggggtgatgtgatcacatctgcttccttctccacaacaagagcagggctggcgggcaggccaggaaagtcctccaggatctgatcttgccctccgactgaccagtgcgagcgacttctgcttctcttgggtcttctagtggtagaagacagctggagctggggtggtatttggatcaccccagacccaagatcagtggactggagcaccatggaaatgtttgggagggtccctcaggattgggactttcccctgaggcctctaggctcctccaagctgtggcctcaaggataagagagattgtgtcaggttcatgtgtctctggaactgcatgattgctgttgagtctgtatgtgtttcacctgtgtatggatatgtgtctctgatcagatttgtgccagcccctaaagtctatctttaaagtgcacataaga

SEQ ID NO: 146709 - DNA, 673 bp, Homo Sapiens
gtggagcgcgtcaagaagatccgcgacctacgccttcgtgcacttcaccagccgcgaggatgccgtgcatgccatgaacaactctcaccggcactgagctggagggctcgtgcctggaggtcacgctggccaagcccgtggacaaggagcagtactcgcgctaccagaaggcagccaggggcggcggcgcggctgaggcagcgcagcagcccagctacgtgtactcctgcgacccctacacactggcctactacggctacccctacaacgcgctcattgggcccaacagggactactttgtgaaagcaggcagcataagaggccgagggcgaggtgcagctggcaacagagccccagggcctaggggttcctacctcgggggatattctgctggccgtggtatatatagccgatatcatgaagggaaaggaaagcagcaagaaaaaggatatgaactggtgccgaatttggaaatccctaccgtcaacccagttgccattaaacctggtacagtagccatccctgccattggggctcagtattccatgtttccagcagctccagcccctaaaatgattgaagatggcaaaatccacacagtggagcacatgatcagccccattgctgtgcagccagacccagccagtgctgctgccgccgcagccgcggccgc

SEQ ID NO: 146710 - DNA, 478 bp, Homo Sapiens
aaaatgaatggtagaatatcacgcaggcaggggtattattttgggtaagggagcctcaaaacatagcacagaggcacagaaactagctcacccttagggttagtcctgagtagagccctggaaggcaccctcccctcccctaatccccaggttgaaaatcgaaggccatttggttgtagctttagagtgagtcaagttggggtcctagactggtccccttctttcctgtgcttgtcccacttcagcgcctcctctgggcagagctggggctgctttctcctctgcagatcactcagccaacaagcccccttcagcctgtggctggctgcctggggtcatgcccagctggcatggcttttggtccaccctggccattccagggcctgtagtgtccatggtgaaggtcagctgcctgggtcagaagctggcttgtgaaaggagtctggcagtcccttggcgtggttgaccaactcatagg

SEQ ID NO: 146711 - DNA, 733 bp, Homo Sapiens
aggaaaattgtgcaaaatggacgggcttggccaaggaatgcagacatgggcgtcatggccttgacctatgaccccaccacagctcttcagaatgggtaaggttttatataatcaagccacctgaaaatgataatggcctgtgtccagacactcaaatgattcatcttgattctctctatttgaaagtcaagggaacgttggctgtgcctatcagttgggacccttcccttgtggtttcctgtgactcagtactgattgaggttccttcccacaggttttacccagccccctataacatcacccccaacaggatgcttgctcagtctgcactctccccatacctttcctctcctgtgtcttcgtatcagggagtgactcagacatctcctctacaagtacctaacccatcctggatgcaccaccattcatacctcatgcagccttcaggttcagttctgacaccagggatggaccatcccatttctctccagcctgcctccatgatgggaccccttacccagcaactgggccaaagaagagtgtctcagatgagagcggcacgtgcaaaggccctgtggtgggaggagcctggtagctctgagaaactccacaaaggcacggtggtggctggaatgcagagatgtgggggcacattgaaaaccttgttaaagtgcttaaaatgattatcataaaggtagaaactaataagtgctaaataaatgttattctcgtc

SEQ ID NO: 146712 - DNA, 1674 bp, Homo Sapiens
  misc_feature (389)..(389): n is a, c, g, or t
ttctgttttggtttgtaaagaaataattacaaattgttttaaaagcattcccaaataattccaatacatcgaaaactttttcatatagatgagaagctacgaccaccatgtctcttcaaggtaggggaaaagtacgttgcagttaaaaacaaaaagctttctttgcaaaagaagaaaagtttttttgatctccttgaatgtagcacacaaaaaaagtgatggttcccccaggctccatcagcaatagtaaagggcaggaacgtagagatttctttttccaggcccaggcctgtgaaaaacgatggctaagtgttagtccttagcagggccgacggatggtctccattcctggttaaccctctggaatctgggagcatgagtatctccanagaattcatttctattcagtaaagatggggagggggaatccccactgtttacttgttgaactggaaagaatagaccccatgctctgagggtgcgtccactgccacttggttctgttggccgctgctctcctcgactgaaacactggaagaaggcacaggggtgtactgggagatgtaagctccttgcatagctgcagccgtcggcatatacgtgcctgtgctgctgagggagagatggcccagttgctgggtaaggggtcccatcatggaggcaggctggagagaaatgggatggtccatccctggtgtcagaactgaacctgaaggctgcatgaggtatgaatggtggtgcatccaggatgggttaggtacttgtagaggagatgtctgagtcactctctgatacgaagacacaggagaggaaaggtatggggagagtgcagactgagcaagcatcctgttgggggtgatgttatagggggctgggttaaaacccattctgaagagctgttggtggggtcataggtcaaggccatgacgcccatgtctgcattccttggccaagcccgtccattttgcacaaattttccttggttctgtcgtttctttggcccgccatcagcaaatttgcaaagcaagggatcggatggggctggtactccagggggtgtcttaatatattttccattaaagtgggtgatgatggcttcacacttctctgtggactccatccttgcaaagccaacacctctgctggtcccactggtatctcgaaggatacgggtggagataacctggccaaagggcttcagcatcccctccagttcctgctcatccattgacagtgggaggtttgagatgtataaatttgtggggtcctgttcctgttgctttgccatctgtgcctgtacaccgctggccttcagtgctgttacagctttctgtgctgctgaagggctgtcaaaatctacaaagccatagcctttacatttgtttgtggtcttgtccagtatggccttagtggaaacaatcttgccatatggctgacacagcttgacaagatcttggtcagtagtgcctggttgcaatcctcggatgtataggttggttttgctcagctggtcatttccattgcttccactactgtctgttaggtgtactgttgcttgggctaggtggtgccatctgctgagccagtgacacatatggcttcttgttgtttcctattgtagccaaaagtcgaaatcccgggcctggaagtcacggatagcagcattttctcttt

SEQ ID NO: 146713 - DNA, 468 bp, Homo Sapiens
tcatgattataccacatttatttgtccatgccactatcactggacatctgggtggtttccattgtgcattttcttcaccgggcagctgcaaggcgtctccgaaagctgggactccatgattttgaccacttccactcccttgccatccgaggtgacatgcccaatcagattgtgcagatcttgacccaggatcatggcatggaattaatatgttgctttggcaacaccagttgggacagaagccttctgctcttcagggcaaaacaaaccatagagactcatccaatccctgaatcacgagatagcaagtggttgagaacaaggttgcatcctttttctgcccagccttccccgcaaaccagtgaggaaacgaccagcactgccgtctgatgagaggagcctgttgctgtaactgttttccagattactggggggacgaccccatcttagttttctctgttctagacg

SEQ ID NO: 146714 - DNA, 324 bp, Homo Sapiens
catgttcttagtaagtgcatttttctactttattttttgaaaagaacattcatttttgaaaagtttatttcaccaaggaccaatcttttgttgatgttcaaatttaaattgttctttcatatctgtctcataggagaaaaacatgaaaaattgcttctgtggtagtttcttctaggttttcaagtactcttatagtagcaactggttcaaaatactgctttgtttcaaagcatacagtttagatgtatcttcactgatgatgggaacattttcattttgttcctgagctgtcaggtcactttcacttgtcagatagtgtaccag

SEQ ID NO: 146715 - DNA, 328 bp, Homo Sapiens
ttctcattcaacaacaaacatttattgagcacctactggtcagggccctggaaccactagactcttagtccagtgctcttcaggaccctggaggaccctctgcaatttggcctgagactccagccagcagctggaaactcctcgtccaggagactgtccaggtgaggagctcagcagtgaggagggcggaccccatcagcccacttgccaacctgcaatgccaccaccatcctgtggtccagagacatagaagtggcaggatgggtctggggtgcagcacccatgggtgaggcaggatgggggtccagtcagctgtgtccatcttaag

SEQ ID NO: 146716 - DNA, 938 bp, Homo Sapiens
ttttttcagggttattttcacagtatttaatgggtttactatataaaaacatcagttacacttcaggcttcataatatttttcaaatttccacttttgatatggcttcactgggtcacaggcagctacttttcaggatcttttgagaaaaatttcctgtccaagcataataattgctgattgtttttcaaaaacaatgtgattcaccagttctggatgaaagactgatgttgatttatgcagccattttagccctttgtttctgttatcacaagggtgcagccttacggctcctttatcagggatgggggctatacaccattctccacatttaataagtcttaaccaggtgtaattaaattgttgaagctctttgctcccatcgcagtcttccagaatgactgtagtgttttcaatggaaatgcatttacccaaagccacattaataagctaatacttttcttcatatagacatcatctctgaagtgttttggaattgttattcttcatttcattattagttgttttcagaattttcctttttatttaaaaataattgatccatgtttttactgtaaaccattttaatctttaaaaaaaataggcagtgtatgaattttaaattatccatgttgtattatttcattttccaatttaggaagtagacattccgcacaatttatgacagaattgttaaacattaggctatttgccagcggtttaatccagtgtaaaaatacattattggtgagattctttcattagcttcaaatgttgtcgtttcaataagaaaatatttcttcttattacaaaaaacccaaactttcactggatttaaatttctgcttgtggaggttgaaaaaagggaaacggagctatagactgtttgcccggccgtaatggccgaattcccgggcatatgtccggtaccgtcgactg

SEQ ID NO: 146717 - DNA, 852 bp, Homo Sapiens
  misc_feature (161)..(218): n is a, c, g, or t
aattcctcttgctgaagtttcaccaaggactctttctcttccaaacgaccttctaattgtgccttttgaacctctagggaggaagccttaatgctcaactcttttcttatctgttctgttctgcttaattcttttctaaggatatcaatggtttcttcctnnnnnnnnnnnnnnnnnnnnnnnnnnnnnnnnnnnnnnnnnnnnnnnnnnnnnnnnnnatgcaaatttgctagcttatgttctctgtctactagctgattctgtacttcttttctctgttcttctttctctattaattgggcaatacttttttcattttgttccttgagtgactcattcaactttttcactgtctcaatttgtttattcagagaatcacatgtgatctgtaaatctttattcttctttttcagtactttccatttctctgaagaagttcccatgtaggattttgtcagtatttcatgttcttcagccacagactctaacttcctattatgttgaaagagatgctcaatatcactgtgcgctctttggtgattcagcttgctgcgccttcagcaacacactaagctcttcattttttctctcaacttctctcaacatactagcaagtgtccgtgcctctgtttcagcttgagttctttgacagcgatgctgagcaatcagtctatcagcctgtgcaagggctagagcttttgtttccaaaagatcttgtagcctgctttctttggaagctaatgtggatagtttcatttcatatacatccattatgtcagatattctcacatcacaaatctgatcctttaccaccattccagactgaagtttctctattaattcttcaatacc

SEQ ID NO: 146718 - DNA, 417 bp, Homo Sapiens
ttttaaaactgcgtttcttatttattcgtaaacatctgggcaaacccagcgaaaccttccaaatcacaattgtttgagaaaccggctgtttttcaactttgtgaaacccaacttttgctgcagccacgaacctacgtgatcccagcggggtcggctttcatttgtctcctctgcccgaaatggatggcccccactttaactcggctgctgcccctcgcttgttctgctgctgccctccagccgtctgttgcttccctcccccgctcccatttttcagcttttcttgaaatctggcaagcgccagaaagggaaataacttccatccaccttaatttaaatcattcaagtgtaggtttctttcttagagggatgtttgctcgttcctttcccaagtgggtgttggggcggtgggggaga

SEQ ID NO: 146719 - DNA, 499 bp, Homo Sapiens
ttttgcctgctcttgtgcagtttatgttaataataacaataatagtaataatagcaataacaatcatagcaaatacatactcagtatgtggcttaccatgtgccacctactgtgttaagtgctctactgtattattaggtaccatcaccccattttacagatgaggaaactgagtcatacagcttaagctatttgcctatggtgacatcactaatcaagcagtagctttagggcccagatacaggcagtctggctctggagctgacacattgaatcactcagcaaacacttcctcgagtgcctcttttatgcccggcccagtggtaggcggtcctggggacacagtcatgacagtgacagcctcaggtctgctatcttggggctcacagtccactggggatgacaaacaagtcccccacggtgatgacccagaatgggcaaggctggagtgggagagcctagtggatgcttggctcatgcttgggggtcagggagggct

SEQ ID NO: 146720 - DNA, 469 bp, Homo Sapiens
tcttttggtaatctttattagtatatgatcatcctcaagggtctcacttgctagccttttaaacaaatttctaaggcaaatttacagttcatttaaaaggtaataaataccacacactcctacaaccttagccactttacaaaacaaaggaaaaatttcttccaaatgttattataattaagagcttttctatattaattcctcttacagtctcccagtgtgtcttagattgccaagtacatcttgattgtgacatgcaaaatggattctgctttagaaatgggttaattggcatgcagatttctgcagagatccataatcccacaaacaagaggggaaatgaacattatagggctgactctgacaacatgtacttggcaggggaaggcggcagggggttggcaacttcacaatggtggatttgggggagggaaacaggacaagagactgaggtacccagaccctcatc

SEQ ID NO: 146721 - DNA, 972 bp, Homo Sapiens
  misc_feature (865)..(865): n is a, c, g, or t
  misc_feature (960)..(960): n is a, c, g, or t
tgaatcgacggcgcgccgaattcggcacgaggccgagagaggcgcgggcgggtggccgggggcgccgccggccccgccatggagctccgggcccgaggctggtggctgctatgtgcggccgcagcgctggtcgcctgcgcccgcggggacccggccagcaagagccggagctgcggcgaggtccgccagatctacggagccaagggcttcagcctgagcgacgtgccccaggcggagatctcgggtgagcacctgcggatctgtccccagggctacacctgctgcaccagcgagatggaggagaacctggccaaccgcagccatgccgagctggagaccgcgctccgggacagcagccgcgtcctgcaggccatgcttgccacccagctgcgcagcttcgatgaccacttccagcacctgctgaacgactcggagcggacgctgcaggccaccttccccggcgccttcggagagctgtacacgcagaacgcgagggccttccgggacctgtactcagagctgcgcctgtactaccgcggtgccaacctgcacctggaggagacgctggccgagttctgggcccgcctgctcgagcgcctcttcaagcagctgcacccccagctgctgctgcctgatgactacctggactgcctgggcaagcaggccgaggcgctgcggcccttcggggaggccccgagagagctgcgcctgcgggccacccgtgccttcgtggctgctcgctcctttgtgcagggcctgggcgtggccagcgacgtggtccggaaagtggctcaagtccccctgggcccggagtgctcgagagctgtcatgaagctggtctactgtgctcactgcctgggagtcnccggcgccaggccctgccctgactattgccgaaatgtgctcaagggctgccttgccaaccaagccgacctggacgccgagtggaggaactcctgnactccatggtgc

SEQ ID NO: 146722 - DNA, 518 bp, Homo Sapiens
  misc_feature (290)..(298): n is a, c, g, or t
tctaattttggaaagaagcgggtcttgcaaagtagctttgttacttgtaacagacgtatacatagaacctttgtacaacctagagtgactttttccaaagactgttacctatttcaaggtagaatcgttggaacttactgaacaacagtggaaaagacaactacacagcctcattgaggggagatgggtactgtatacttactggtaactggacacgggtaaaaggacaaggtctgtcatctctttagggacctgttttatatgccccaaccctgtccccatcttattgnnnnnnnnngaatgtacttaaaaaaggaacaacaaaaaactagggttgtagaattataaaactgcttcaaccttagaaccttaagtaggaggccctcaaatggacttacgttagtccttagggagtcaatgtgtgtgttgctgcttatttaaatacagttcagttggagccccgagagtgccaatgttttccccacacctcttggatgccttcctcttcccaaatccca

SEQ ID NO: 146723 - DNA, 506 bp, Homo Sapiens
ttttttaagacttccaaagataatatcctttattctgctcattttctaggcgttcacagattcccctcctattgtttgattacaaattctactagcaaatgacacctgccacagtggaactgcttagcatcctttactagtaggattatagctcacatttgtggagctctcgtatataccaggcaccatgctaagcagttcacattgataatcctatttcttctgctatgatataaatggggttccactgtgtggcctaatacgggcagcaacaactctgatgacctggaagaactcagccctctcactcttgtctttaggtggcagcttggcaggccccagtgactttctctaaggaccctgaagcaagcttttctcctaaagtaattgtactcgttgatttttttatgtgctgcaaatattttcttccatatctgtcatttgtgttttaaccttgatgttttccatcacacagagactttcgatattttttggttgcgaaatct

SEQ ID NO: 146724 - DNA, 421 bp, Homo Sapiens
  misc_feature (103)..(116): n is a, c, g, or t
ttatttgtctggtagatttttctccatccttttagtttgagacgatgagtgtcattatgtgtgagatgggtctcttgaagacgacataccattgggtctcgcnnnnnnnnnnnnnnaaatctagcttgccactctgtgccttttaagtggggcatttgcccatttacattcaaggctagtatcgatttgtgtagatttgatcttgtcattgtgctgttggctggttattatgttggcttttttgtgtggttgctttatagtgtcaccggtctgtgtgtttaagtatgtttttgcattagcgtgtagtggtctttcctttctatatttagtccttccttcaggaggtcttgcaaggcaggcctggtggtgataaattccctcagcatttgcttgtctgaaaaggatttctccttcactatga

SEQ ID NO: 146725 - DNA, 541 bp, Homo Sapiens
  misc_feature (106)..(106): n is a, c, g, or t
ggatctgctccgagacctcgagggtccgctgttcctcttctcctggcctttcctccgccgggcccgcatttttgctcggaagaactcatagaggccgttctgctcncagccttcactgttcctgggcctgtcgtgggacggggggctgtagaaggcctccactgcagccagcagcctctcgctgggcggcatggggggtgggaggcggatgtctttagggtccaaaggcttgtactcgtgatcttccagcttcacgaggggggccatcagcccagcagggagatcgaagtagggcacattggggaccaggctggggtcatcgtggttgatgtggggcgggccctgtcgccgcatgtgtgggggctgcccgttgaagccatgggggggagggccgaagtcagggtgctggggtccagcccaaggcgggtgctcgttgatgccaggatgaggcatgcggtggccagggtggtggtgagggggccccatttcggcagggaagtccccctgggggtagtcgaagcggtggggatagggcggccgc

SEQ ID NO: 146726 - DNA, 749 bp, Homo Sapiens
acttgagaggtttttcaagagtgccatgaaatcaaatagtgatagacatgcaacttcaaagaggcaaggagtggccatcattactttaaaccagtctgcatgtcattcatatgtggtgtgcatctctcccaacccctgttctcttcctctcttcctccagccacactccaggtaacggtggcactgggaggggacttagaactgaagttttcctctcaccccaccttggtgtgcccactgtactccacatccctaccggttgcaacctagggcttgcttgctctttttcttgtactaggaaaattgcagcagcttttcctctgcaccaaggagggaccttgtcaagctgcaggtgtggaattcaaactccagatgttttcagagggtttcctcgcccggggtgcgttctggtgggactgggttgctcaggggaatctgctgagtgcctcatcttctggccattcagtcccccacaccctctgggggcactgcactgtgctctaggggatacagacacgatacatgttaggatgatagacgtaactgctgcccatgtagcgaggctttgccattgctttcattctttccctacattcggtgaatgcccggggaagcaacaggctccacttttgtggatgcagggtgtgcaccgtgtcagagggtgtgaggagctgggaggagaggatttctaagtggccagttcatgctctaacctcgtgccgattcacacccagcctcgctacctagcc

SEQ ID NO: 146727 - DNA, 1354 bp, Homo Sapiens
gtctgagtgtgtatttgctgtggcgttggtaggctgcgtcctttcgtgtgcgtgtgtatgcgttatgtagttgtatctagtgtgttcgggtgctgtggtggtattgtgatggaattcggtgggggcgtcttgagtcgggtgtcaggtgcaaggctggcgtgtctggtgttcgcctatatttttttctctggcccggtattaagtggttgggagagaaagtcgtgtgccaatgtgtgcagcggcatgcatatgcagctttggtgtaaccagtgtgacaggtgtggaaggtgagggtttcgctgtagagctgtaagtcttgtagggtagggtggtccaagtgatggcacagccacagaagttagggtccgttctaccgagttgcccgagtgtaccgtgttgccagtcatgacgtgtggaaacgacgggcagtgcctagcttataatgcgagtcatgctatagggaccacattgtacaagtgaatcttgttacgtgttaaactttgggccgcctggagggatactgtagagcgcgcgcccgtgtgtttttttgtttaacacatcgctacacatactttatttgcaattcagtaccatgaagaacagtttgctctaagaggtcaatgtaataatcttttattgatataggaactctggcactgaaagcttgaataacccaaggtaatgatgtcgtcaccaagggaggacaagaatagaacccaaatcccttgactcccaagcttgtgttttccattaattgtgctcctttctattcatccaagagcatcaagtgtaaaaggctggagaaaggagtggacacaaatgagccaagtccgcaaggtggagactgcactgaaggtcctaggaatcgccccttggcactttccttttgtgttggctgaggaagatgaaagcagcaacaaccacaaactcctgggaccaagaactggaactaggtactgcttgttgtggtaactctcttcctcattttaggcctttcctttttaacctctccttccggccaagccttcgcgctctcttcccctccctcggtttctatccgctcccgttagctccactccgcacattcctgcaaggtgtcccggttaagaggaggcagctgcgccgcactggctctccaccctccatccggccctggcgcccagtcgtcaggtgttcgagaggttcgtagcgtcacaagcgctctcccaagttagctctgcgtgggtctaggtagctcgtcacgacaaagcaaaatttagacaagcgttgagactttccttctagctccgagtttcacagctccgccatcccctgagcaacctcccactggagggcgccttccggagcgcgcgtg

SEQ ID NO: 146728 - DNA, 380 bp, Homo Sapiens
  misc_feature (284)..(293): n is a, c, g, or t
tttagcacttaaatatattcagattttattaccatcgtctatagaaatttaacactagccatctgtgcaactgtcctctgaggcagaggaacaccatacgcaaatattacacactaagaacagtaccacattcgacaagactctttcttgattcagtaaaccaagcttgacaaaccggccaacccaaggtgaatgattacagttatagggtacaggggaaattatcacctagtgaatattacaaacaatattaaaatgttacacagacttacaaaagttctgcnnnnnnnnnnccctaagactgtatgtatatgtgtgtgtgcgtacacaggttcacaatatggaaacctgtaccttacagcactcttgaggtttcagca

SEQ ID NO: 146729 - DNA, 438 bp, Homo Sapiens
  misc_feature (30)..(30): n is a, c, g, or t
cacttgcggctccgggccatctgctcatanctgtcgcgcgccacgacctggcacttgtgggagatggtctgcacgtcgttctcatcctcgtggcaggactggtacagcgcattcttgccgtcgcactgcctcttgcccagcttggtctcctcagggtggtagaaccacttgaccttgaccaccatgttgctgccccacgactcccacatgctctcgatgcggccgatgtaggggaggttgggccgcccagctgacaggaagacagcacagtccccgacacgcagggtctcctcgccccgcacgatggccttgtagaacagcttccgggccttccccttcatgccacgccgctgtgtgggattccccgaccacttccagagctgccgggcgggcaggaaggctgagatctttggccggttttccacggagggcggccgc

SEQ ID NO: 146730 - DNA, 458 bp, Homo Sapiens
ttcagtaggaattccttcatagaataacatgttatttattggtattgacttcttattagacagagctcatagtatttgttttctgctccgaacacttaaaatttactaagacgtgatagtgaaaatagctttgaaaagaaactacatatggcaaaggtggggaggggggaagatgatgcattctgatcattataaagaatacttttcagggctctatcattttctccctttctctaatcatccagaatatggcgggtgtcccagtgttcaacagtatcatgctaatattccatttgatcggtagtccaagttctttggccagatagtgcaatgttgtgacaccgaccgaagcctttgttctggatctttcttcctattgaaagtggctgctggtggcttcataattttctgttttttttctcacaaagtaaatggtgggcatccatgtttacattgtg

SEQ ID NO: 146731 - DNA, 439 bp, Homo Sapiens
ttaatatattaggctatttattaatatgatattcatagcacaggagctaggggaatggacattgtgagactaactccaaagagtatatttaaaagtaagtcttacataagccagatcattccttttcccattatatttcataatcctcttctgatttcattaacctttccataacaaagacgggcgaactcaatctttcattttgcctttttgacttctgggatatcttctcttttctcctggctcaattcctagcctattgcaccatttagctggatattctagtgcttaggtatctttttcatataccacacgaacaggttaaacagatgcttagaattgggaaaatctcatgatagcaactaggcagtagtacttaatcttttctgctgtgtttttattctcaaaacatattttcacatgcctcattcaaaattaa

SEQ ID NO: 146732 - DNA, 592 bp, Homo Sapiens
tttcaaggctgacaacaatttgacacttgtaaagaagcttatcaaaacacaggtgatagggatactgacctctctctaaaagaacatcagcgaagttcatcactagatttccacctaacccaagatcaggatcctcatctaccttcatagttgattcttcttgatagggttcaaaccaaaccagataaccctgtgtggttgtaccacaccaaattttatagccaattctaataggctttccattcaggaattggtcactatcaaagcattcagacattgacttatcaaagcaatagtattcttccaggggagcatacaagaggaaatttttattcatttgttttatgagaggtctcaactttgtaaacttatctttttgatctaggtggccattatctgcaaagtgcaggtttgagaaaatcaattcaaatctgtcccttctgattgcatctctaaccaggttctgatcggtgtcagagacttcccaatacatttcccttctaggatgcctcataaatccactcaaaagtaagacaccaaacacacacctcatttcctgaactgtgacttccaagctgacatttttctgaga

SEQ ID NO: 146733 - DNA, 364 bp, Homo Sapiens
attttagatagtaagaatcttacactttattagataataaaacataattgatatttgcttaagtaacaaaaaagttaagaaattgggttataagcaaaggaacataagtgtaacatgtgtagaaagataaatattttccaaataaaattctaataaaaggctaaacattctcaaatattttacatacatgaagaataaattatttctggttaacatgtttttgccttagtgccaaaaaagccagaacaaatttgataagctcacattaaaatcaaagttttctagatatgaattctatataccatctctatatttgtttagaattttgcaaaattcttagaagatcgcatgttagggtgggggg

SEQ ID NO: 146734 - DNA, 500 bp, Homo Sapiens
taactgtaaatatatatttattataaaataaagttagtttcatgaagagagtagaaaaataacactatgagctactaaaaaagttgtggaactcagtctccgaggattggggtgagaggctttcacatcactctggaaacccaccaacatgaggctctccgtgctcatgtgggacaggtatagcacagctcgtacagggagcatgtggctcaggtcctgcttgaagcccaaggagcctagatggtccacacgagatgctctggccacggtgatcaaggaggagaacttgaggtcagcaggggactggttctgagaaggggcaggatggtaataaccttgcccctccctatactggagtgtagaagagtctcttgggctgatggtcctggtttagaagatggtacccactggccttatgctgagttgcttgcccaaatgtctgtgctgaagaaaagccacacagcctttctcaggacaacttgccccaccaattctcactg

SEQ ID NO: 146735 - DNA, 644 bp, Homo Sapiens
tttctttttcatgatctttatttatcctcgagacgcttggatccagtaagcgagtgacaatttcaagactgccagccatgcacctctgtatgtttttggcccaagcagcagccgtgggcctagtgccaaccctcacacgctagctacctcctcctgtgcttggagtggaaagtctgtggggttctctgtctggttctgcaagcttttcacaccatctcttcgctgtctgtctctatgctaggggtttcacacaactctacaccattgcattcatgcttgccgtatccctgactttctgcacaagtgcagggcagagatggcccttttgttttggtgagggagagagggaaacacttgggcacaaagaggggaagggactgtgaatcccagggagcaccctggccagatcccagcgggtgttcgaatcccaggaccatcttccatctacagcctagctgcctccttccctggtcaacccttcttgggtgcccatccaccacactgcccaacctcactccccgtcccctcccacaaagagtgacagtggcctggggctcggcctctcctgaccccaggggaggatgggtgatctgggcctcctgctacctgccacctgggcctcctatctccagctgggagccagg

SEQ ID NO: 146736 - DNA, 530 bp, Homo Sapiens
  misc_feature (61)..(85): n is a, c, g, or t
  misc_feature (87)..(124): n is a, c, g, or t
  misc_feature (127)..(140): n is a, c, g, or t
aaaattgtaagctcctcactggtatactatcatcctggaggggtgttgtatggctgagcannnnnnnnnnnnnnnnnnnnnnnnncnnnnnnnnnnnnnnnnnnnnnnnnnnnnnnnnnnnnnnatnnnnnnnnnnnnnnaatgctaaccttgtagcatgtgaagaatgtctgtaccttgatacgatagttacataatcagtatatttggtttctagatcgactgtgcttattttgtttcaatctctgactaaaaatacttaaatttggtttgttaattcttattttagaaattataattttagtttatattaatttcggttatagcttactgaagaaatctttccagttagaaggaggttctaatattcacatgttctaatactttgtttattgtaaaacagctaaatttggagatacgtaaagccttgttttctctgtgtggttcagctactttccatttggtattacacagtcaaatttacatttatctattaaaattgccattttattcaacattttcatgcacag

SEQ ID NO: 146737 - DNA, 676 bp, Homo Sapiens
  misc_feature (441)..(465): n is a, c, g, or t
  misc_feature (467)..(504): n is a, c, g, or t
  misc_feature (507)..(520): n is a, c, g, or t
tgcatgtgaatatagaacacgtggttaaaaaaagcaggctggtacggccggaatcccgggatatcgtcgacccacgcgtccgaaatatacatttgttggtaactaatgttatttttaaaacctggacctttctggaagggcagcatataaaaacatcagtcccgaggaggggacaacaatactacctcactactacatctgtgatgactggttgttcaaacacaatggagtgtgtaaggtatatgttttataattcataaccatagcctcgatcatcaagaaatactttcgaaatttcattttccttcagaatatcttaagagtgctaaatttttaactgcctttttgtcgagtcaaactgtgggattctgatttgtattaaaattgtaagctcctcactggtatactatcatcctggaggggtgttgtatggctgagcannnnnnnnnnnnnnnnnnnnnnnnncnnnnnnnnnnnnnnnnnnnnnnnnnnnnnnnnnnnnnnatnnnnnnnnnnnnnnaatgctaaccttgtagcatgtgaagaatgtctgtaccttgatacgatagttacataatcagtatatgtggtttctagatcactgtgcttattgtgtttcaatctctgactaaaaatacttaaatgtggtgtgttaattcttattttagaaattata

SEQ ID NO: 146738 - DNA, 615 bp, Homo Sapiens
  misc_feature (162)..(458): n is a, c, g, or t
gttaaagaacaccagttttattctaaaaagctctaaatgccctgtgcttggtccctggtcagggagagttctcaagaggttactacctgcacaggggctgaaggtacagggggaaagtcaggtttcagttggttgagtcctaccttatctgtttgttaggcnnnnnnnnnnnnnnnnnnnnnnnnnnnnnnnnnnnnnnnnnnnnnnnnnnnnnnnnnnnnnnnnnnnnnnnnnnnnnnnnnnnnnnnnnnnnnnnnnnnnnnnnnnnnnnnnnnnnnnnnnnnnnnnnnnnnnnnnnnnnnnnnnnnnnnnnnnnnnnnnnnnnnnnnnnnnnnnnnnnnnnnnnnnnnnnnnnnnnnnnnnnnnnnnnnnnnnnnnnnnnnnnnnnnnnnnnnnnnnnnnnnnnnnnnnnnnnnnnnnnnnnnnnnnnnnnnnnnnnnnnnnnnnnnnnnnnnnnnaaggcgggcagggtcacctcctggttatcacctgactcagattcccataggtggctctgcctcagaagccccagggcactgtggtcactgttaggtgtggcagtgtgttctggattctcccctttagtcctgtggcttgacggtaccgagctgatat

SEQ ID NO: 146739 - DNA, 1129 bp, Homo Sapiens
agtcatccaagaagtctttattttcccacttggttactgttctggagcttgtaccctctgagctctgagatggggttggggggacagtgccaaggagggcctgtggggctgtgcagttgcttccctctgggctggctctgagcccagggcaggatcaggcacttgagagccccccaccgagcctcattggcatagacattcgtgcctctcacagggctcatgggagttgtaggtgtgggcaagtccatcccccaaggctgtaaggaaggagcagctcctccataaggccaagcagaacgcattaggggaatcatcctcagttttacgccctgcgtgttcttccaggagagaagtcctgagtgaggaggcccagctgttctccagatccaactcctcggggtttttcacagagagctggtatcaaggcagctgtcaggggcggcgtgccttgtgatgcggcatcttaccttcatcctcatctcagaatgggcaggcagtctcagattcaaggaggaggaatcttgaggtgtggccgttcagtcctgaggtagacctgaggtccctggaaattgtgttgatgctgagatggatgaggggtgctcattctctcaggtagacagtgaggagtcctggttcagccgagcctccatgtctgcatggatggttatgaccctgattgtttttggaaacagccaagctctctaggtgtactcagcaaatgcaaggtatagtgggtcctgcatacccagggtattatttgagccatggaagcaaaacagagactgcttagcctccctaagagtagttggtgggagtggccagcaaccatggaggcaggagcagctcctctttgcctctgagtagtccccacatgttccctcttccagagatttcaactgccaggcctggtcacctctgtagcctactcttatgacacatgggtggaggcaagggtaaccagagtccttgttctttcttttgattggggtcatccagcccttccgatgtgtggtcagggagcagagtcactgataggatgttgagacttggagatcaggaccagacttttccccattcttgcatctggcctgtgcttgggcaggacctcgggtgaaggatgatcttggaa

SEQ ID NO: 146740 - DNA, 730 bp, Homo Sapiens
cggctttcttttttggaggaggggagtcaggtttaatgtcccagtcctcgggcgctgtccagcgcctgccaggccccacggccgtgtcgctcactcgggtggcggccgacccgcctcatcagggccttccgcggaggccgtcccgtcgtcctcgggcaccagctccacgtccagctccagctgccccatgtagaggcccacggcgcacgcccagagcaggctggcggccagcacggcgcccgcgcccacggccgcgccccccagcgtcagctgcatgggtcctcgcagcgccgccaggcccacggcgtacgaggcgctgccccacaccacgcacaggccgcccagcaggaagaagccatatgctgcttcccgacccatgtcactctgcatgaaggagatgaccccgatgcccgatgccaggaggccattgcggaaccaggagaggaaggctgtctcgtgcgcttttcggaggagccaggcgtccgcacgatccagctcggacactgggggcggcgaagccccggcgcggggaccgtggccgggggcgaaggacccccgggcgcccccgctccggggccgctgaggcggcagtagcgacctccggaagcgaagacgggcaaggcgagcggcccgagcccaccaccagccgcctcccatgattcgcactacggcctcgtgccgattcggcacgaggcctcgtgccgaattcgacacccagcctcgcacctag

SEQ ID NO: 146741 - DNA, 1670 bp, Homo Sapiens
  misc_feature (1340)..(1352): n is a, c, g, or t
  misc_feature (1364)..(1365): n is a, c, g, or t
  misc_feature (1400)..(1409): n is a, c, g, or t
gagaatttggggtgttttttactctttttcttgttggcttagaattttctccagaaaagctaagaaaggtgtggaagatttccttacaagggccgtgttacatgacactgttaatgattgcatttggcttgctgtgggggcatctcttgcggatcaaacccacgcagagcgtcttcatttccacgtgtctgtccttgtcaagcacacccctcgtgtccaggttcctcatgggcagtgctcggggtgacaaagaaggcgacattgactacagcaccgtgctcctcggcatgctggtgacgcaggacgtgcagctcgggctcttcatggccgtcatgccgactctcatacaggcgggcgccagtgcatcttctagcattgtcgtggaagttctccgaatcctggttttgattggtcagattcttttttcactagcggcggtttttcttttatgtcttgttataaagaagtatctcattggaccctattatcggaagctgcacatggaaagcaaggggaacaaagaaatcctgatcttgggaatatctgcctttatcttcttaatgttaacggtcacggagctgctggacgtctccatggagctgggctgtttcctggctggagcgctcgtctcctctcagggccccgtggtcaccgaggagatcgccacctccatcgaacccatccgcgacttcctggccatcgttttcttcgcctccatagggctccacgtgttccccacgtttgtggcgtacgagctcacggtgctggtgttcctcaccttgtcagtggtggtgatgaagtttctcctggcggcgctggtcctgtctctcattctgccgaggagcagccagtacatcaagtggatcgtctctgcggggcttgcccaggtcagcgagttttcctttgtcctggggagccgggcgcgaagagcgggcgtcatctctcgggaggtgtacctccttatactgagtgtgaccacgctcagcctcttgctcgccccggtgctgtggagagctgcaatcacgaggtgtgtgcccagaccggagagacggtccagcctctgatggctcggagatgatggaccgtggaagggaagcgtctgtggggagtgagcgcttagatggccagcagctgctccttctgggaagctcgcaccttggcaacagaacagccctctagcagagcgtcagtgcagtcgtgttatcccggcttttacagaatattcttgtcctattttagaattttccggagtagtttatttgcagtctgttgattatgtgcagtagacccgggacactgcgttttaccgatcaccttgaatgtggtgcctggatgtgccnnnnnnnnnnnnnccctgaaattanntataattttctattgggaagtcatcagttcatagnnnnnnnnnnagtaaagaagaaaaattaaaaggccttttaaaaatgtacaaacttccaaaattaataatcctgttagtcaaatattttggtatttaaacattttctggaaataatggaagtttgtaatccctgggccccggagccttggaaaacttaacttttttgattccttaaaggccctatgttttttcttaaaattgagaaccaaattaccgggatggttcctaattcgccccttttttattgggaaaccctttttataaattgaaa

SEQ ID NO: 146742 - DNA, 440 bp, Homo Sapiens
  misc_feature (333)..(333): n is a, c, g, or t
ggtattataaagacatttatttaatctatgaaaataatgtacaataaatactttccccttttcctattattaaagaattttaataaataatctacagtctaaaacataaaaaagaggaaaataggtccctctagttatttttaagaaagtccccctagagtttaattattcctgagatttcattggaaggagtctaccaaacggaatttttctgtgtgaattttaaaagataaccgagtgcccaatattttagaagaagaagaaaggaagtggattaaacgctaattcagtaatacctgaattttagcaaaacacataagtctatgcgactgnagggtggggagaggctcgactttttccaagtagacggccaaggacgcgggggggtccgaaggacggggagggagaaccaggttatggaactgccagggtcgatggca

SEQ ID NO: 146743 - DNA, 563 bp, Homo Sapiens
gcggccgcaggtccgggcgccatggctgcggaggaaaccaggccgctgcaaggctctggcggtccgagcgtgcctagtagctgtgaacccggcgcgaggtcccgggccccgggcgctacgctcatgtaaatttttccataaccttatggagagaaaggactttgagacatggcttgataacatttctgttacatttctttctctgacggacttgcagaaaaatgaaactctggatcacctgattagtctgagtggggcagtccagctcaggcatctctccaataacctagagactctcctcaagcgggacttcctcaaactccttcccctggagctcagtttttatttgttaaaatggctcgatcctcagactttactcacatgctgcctcgtctctaaacagtggaataaggtgataagtgcctgtacagaggtgtggcagactgcatgtaaaaatttgggctggcagatagatgattctgttcaggacgctttgcactggaagaaggtttatttgaaggctattttgagaatgaagcaactggaggaccatgaagcctttg

SEQ ID NO: 146744 - DNA, 943 bp, Homo Sapiens
aactacccttgggtggaccccatcccgttgtgccccggtgagtggtgtttcagggcatgtccccagccagataaaagccccatactttcaccagtgaagtctgcagagcccgctcaccaagatatccagttcatcattgtagtccacgctaaataccgcccccgtgtgcccccgaaagtgctgggtcctggctccggaactccattcccagcaagccacagtgttgtcaaaggagcctgtcacaagcttctgttcatcaaacttcaccgctgcacaagtgtgggtctggatgccataaacgcactgccctgtgctcacctcccacagctttgcagacaagtcatctgaccctgtacagagaagtccatctttgtagtaaagtgcatacactctggcactgtgtccaattaatgacgaggtttcaaaggcttcatggtcctccagttgcttcattctcaaaatagccttcaaagtaaagctttttccagtgcaaagcgtcctgaacagaaatcatctatctgccagcccaaatttttacatgcagtctgccacacctctagtacaggcacttatcaccttattccactgtttagagacgaggcagcatgtgagtaaagtctgaggatcgagccattttaacaaataaaaactgagctccaggggaaggagtttgaggaagtcccgcttgaggagagtctctaggttattggagagatgcctgagctggactgccccactcagactaatcaggtgatccagagtttcatttttctgagcgagcgccccggggcccgggacctcgcgccgggttcacagctactaggcacgctcggaccgccagagccttgcagcggccgggtccgctccgcagccatggcgcccggacctgcggccgctgctcccggtccgccctcgtgccgaattcgccacccaggcctcgctc

SEQ ID NO: 146745 - DNA, 621 bp, Homo Sapiens
  misc_feature (118)..(118): n is a, c, g, or t
  misc_feature (146)..(146): n is a, c, g, or t
gcagtgagatactttgcaggctttaagtgtcagcacctgtaatgacattccatttcagcgagtacgagctggatgtattgccaagtccacagctatgagagaggagctctcgtattantaaagtatgtacacgtgaaaacatgctntacctgtcagcaggagcttcccacatacctaccaatccacctggggctccattggctcacccagaccaggccagtgtgtgcagcttcacccgtagattgctggggccacccttcctggcttgagcccccattgaagaaggtcacccggttgttcattcatcatagttaaggacttccaactgcccagcctcctgctggacaggaaacagaacccacctgaattccgacatcattctgctaaggacatatccagtgacagcttgccctctccactccagcctctttaacaaccaggactggtgtgtcatctactttggaagggctcgttcaccttgctgatatcctctccctgcccccatactttggatatgagtgttgtttgttcccaacaatattctcctttgggagaagtctcggctcagtctcattgcctctttggggtctggcatggaaagcagtcaagagatgtggcctg

SEQ ID NO: 146746 - DNA, 478 bp, Homo Sapiens
taagacggatgtctagcagtgcctgaactgttaagaagcaaacgtgagtaaatgccttagtttcaatagaaaaagaaagttcacagtgggacctcagaagcagaggctgtgagatcacctttcaagaattggaggagaattgcagtaagtgatagagccggacgctgagctgcagcagcctctgggaattggcggggctgtggcttgtcctgtcctgccgccccccgcgtggcctcggaagctgtcagatggtgcctaaggcagagtcgggcaaagaaagaaccagcgttcgtttcctcctggactctctaggtccatggagctggtgggggaacggccctgtcttgcccgaggaggaaattcgagtcgagcccccactcctctccccgcgggactgataaacatgtccctcattcgccccgggaggctggcacccaggcacgacgcgaggacggccagactcgccgacggcggccgc

SEQ ID NO: 146747 - DNA, 688 bp, Homo Sapiens
  misc_feature (24)..(24): n is a, c, g, or t
  misc_feature (38)..(38): n is a, c, g, or t
  misc_feature (101)..(101): n is a, c, g, or t
agatataaagaagtcatcgtgtcntggcctgcattcanacacttctaaaatgacatcaacaactctattgggatccagattaaagcatcctattaaagatntgatatcttctaagattaaatcactagtaatacttccagataaatcttgccccaattcagcaatcagcttggcataaccttcattctcttctcttaacaaattgaatttttgctgcttataaaagagttttgtcttgattttaactgacttttgattgaattgctgtgattgtttgataagccctaatgattccagtgtttctggatccaggcgttcctttagaactgtgtctgaaactaaatacaaacatgctaataccaactgtgtaaaatagtctctcttgcttttttcttctaaacaatttgtctcaatgtctaatatgcagaatacatcagcaagaatggagggcatatcctcacgaaattcactaatgtcactaagaacattagatgcctgttcatgctttagatttcctttaattacatgatatgacaactcatagagagcttgctggaaatctctgtatgttgaactatcatggcttttattttcactgaggatccgacataaatgcaaaaattcgcctctccctgatttctcccagttctttatccactctgcgggaaccaccacagccgcggccgca

SEQ ID NO: 146748 - DNA, 508 bp, Homo Sapiens
ttttctttttttatagagccggtacctggacgcgctcgccggatgcgcgggccccaaccacggcaatttcctagacaatgaccagtggctgagcaccgtctcccagtacgaccgggacaagtactgtaaccgctttcgagacgatgattatttcagaaactggaatcccaacaagccctttgaccaagcccttgacccattcaaggacccctgcctgaaggtaaaatgcagccctcacaaagtgtgtgtgacccaggactaccagaccgtcctgtgtgtcagccgcaagcacctgctccccaggcataagaaggggaacgtggtccagaaacactgggttggaccttcgaatttggtcaagtgcaagccctgttccgtggcacagtcagtcatggtctgcggctcagatggccactcctacacatgcaagtgcaaattggagttccatgcttgttctactggcaaaagcctcgccaccctctgtgatgagccctgttcctgtctccca

SEQ ID NO: 146749 - DNA, 1154 bp, Homo Sapiens
caggatatcacccatttgaatgacagaaataaagaatttagagtcacacataggacatggatgttgttgggaacgctatatttggggcatagagtaaaaaagattgtttccattgtaatgaaaataatcattgacagtgagtgaagcttcagattaagaagacggaattgcctgtacgggtgatggaattgctaggtgcctgcctgaaacgtggagcgaggacagaggcggagctggggagggagggcggtgggaaaggcggatgtgcagcgctagttcttgttaaggatgcttttcaggcttctctccacggcttcgtccagctcttcctccagctcctctttcttggacatggccaacttggactggtaatcccgcaccacctggtcgatgtacggggcactctgagtgccatgcagcatcagggtccactccttcagcacccccttctgcggggcgctgccgacaaatcccagctccagggtccaggtgcctcgggcgtcttccccccacgtgtgagtggtcatgaaaggccacttgtcaaagcccaccttggagtcgtcatcccttggacgccggctcagcaaaatggacttggtgcccataggggaagtcatgttgatgttcaggtctcctcttctggttgcgttgaccgtgatgacagcctggacatgctccaggtagcggacaaaattttccttcccctcacaggcgtcggttgtgagtgtcagcaccaacttgccagtggatggtattttctcagggtcctgcacggagcctcccacacagtggaatctctcaggcacggttttccagtctttagccattttcaccatggcacctgcatcaaggaccccgtagccaaagaggtgattaaattccaggccgaccccattgcgccgccactgatggacctcgtcgtgaagctggttccgtttggaggtgagcacagtcagatgctgcatgtcccgccaggtcagacccaggttagcctccagagccagtgcaaacacaccagctgcctcgggggcagctgcagatgtcccagaatgcctcagagtgcagttgccgtacaaatctgtggttgccacaccggcctcggggttccttttcctcccatcccgggaattccggaccggtaccagcctcttttt

SEQ ID NO: 146750 - DNA, 514 bp, Homo Sapiens
ttgattttccattttttttattctagtactacagtttacagccattagatgataaacaataaaacatcactttttagaaaatccatatccaaagccaacctcaagtacacagtaatttaagttaaatccactttttaaaaaaatttcctaataggtttggtacttaatttttctgttttacacacataactggaacttgtaaatgggcaactaccttcttatatgtggaattatagttttttcttgtcctttcccccaaaccacatatattaaatcatgggacattatatatcaaccctcacctaggctttgggttattctataaggaaaagcctttgtcagagtttggctgtctccttcctttcccattcccacaaaagatgtgtgactaagtggacaaagaactcagcactgggcctgtttaagactctgaccatattctccagaagattctgatggatgttttcttctaaatatcttataactttgcacctatagagaagcatgttttaga

SEQ ID NO: 146751 - DNA, 975 bp, Homo Sapiens
  misc_feature (511)..(524): n is a, c, g, or t
ccccttttacaaacagggccccacaaatttttttctttgaaggcccctttccgtagccgtccacaacttaccctcccaaaaaagcccttgacacccttgaaagggtaatcacccctgcctaacacgatcccttaacctcaacaaaacaatctggtttcaaaaacaattatttggcagaaacaacaccgaatgttctttcaatgatttgactggactccatgcattccatcattgaaattgatgattcccattcacggattagaatgacacatgacacagatagtttacactgtatccgcaggggttgaacctacacaaaggtaatgttctcataaaagtattttaataaatatattaaggcttaaggtaattactggtttgagtggcgggtggtttgctttctagccaccactagtttaccattcggaatccttaaaaatgaaaaccatttgcccatcttaccagtgagtgataacaatcaccattggcttgcccccagtttttgtgttcnnnnnnnnnnnnnncactattcaacatgtcttcgtattatcttccttcctctcgtatctgatagacaaagaatgatataaaattttggttgaaaaaagccagttgattgggatgactagaaatgttaactttttcagtaaaaagctttcaccgaatcactgggcagttagtaatgcagcttacaaataaataaagctgaggcgagaggtttaaacagcaagaaaagctgcagagcatattgaggaagggaagcagtgaaatggtggttttaatacatcccaactggaagcagaaccctaacacaagaggattggaatactctaccatctgtaaggaagtagctagctacagccacctcacacaaacacccctaaggcctttcaccgagcgacgcgtggtcgacgatatcccgggattccgaccgtaccagcctcctttttgtaacaactgttctaatattccatt

SEQ ID NO: 146752 - DNA, 550 bp, Homo Sapiens
tttatttgtccgctgctggtcaccagaatgttctgtggttttagatcgcgatgcactactcggtgtgaatgaagaaagtccagacctcggagaagctgaaacatcatatcctttatggtttcagtgggcactccaggctctggaactttatccaagtaagtggtcaagtcttgatcgacatgttcaaacactaaagttagtttggtttctctgtctgttcgtgacactgtgcacacatcaaacaacctgaccacgttggggtgctcgaaggtctccaggtgcctcagcaccgccacctcgcggatggtggagagcggcatgccctcctcgccggtctgcacccgcacgcgcttcaacgccacgaaacggcctccgttcttcaagtcgcgggccttgaacaccttcccataggcgccctccccgatctccgccacgcattcgtactgctggtcagcgcggcacaggccgtccttctccatgccgcctggacgccgcccgccgcggcgccgctggggcgggcggggggtgcgctcaactagctggcggccgc

SEQ ID NO: 146753 - DNA, 469 bp, Homo Sapiens
tgaaatttaaatacaggcttatttcagactttgacaaactgaacataggtgtctctttggacccgcacagtaaaagggcaagtgccagagaggcagccgggatggagggcctggaagctaaggtgctatgaaggtttcacaaacagacacatgtacatgagggaggtgggtggggactggaaatcgacaggcccagcaaggccatttttttcctccaagagatctgtgggagggcccaactcccttgagaggtgaaggagcttggatctgtgcgtccccacttgatccatggcaatggtagcacctaccgcataggatggctgcaagggtcacacagaacaagtattggcagttgcaggggtgtgtggaagaaagaatcttcctgcccttgagctgttcagcaaaaacagggcctccccacaaagtgggggattactgtctgaccctgccagccctagaagtgtctgag

SEQ ID NO: 146754 - DNA, 140 bp, Homo Sapiens
ctatacggctgcgagaagactacagaagggaataaagcaatacttgtagggaatcacggcaccttaattgtccaatttgggttgtattgtctcttggtctgtcactaggatgagcatctttctatcttttaaagtacctg

SEQ ID NO: 146755 - DNA, 590 bp, Homo Sapiens
agcggtttccaaacttttgtatttttagcagcagaagccatcctccaaacaaatccgtatgcaaaacctcagctacaaaacagatcagtgggctgcttgcccgtgtggggcatgggctgggccccgagctctccctccagcacccagtacttcttccacgaggccctatgtgagctcagtttaaaaccccagggccttggcaggggtcaggtgggcgggagcagggggtggaccttgtagcactggagctaaagcagccagataaggtgggctagttcttaagacctctggagggtgtggctagtctctgagacctggacaacttcattctccaccagggcctggcccccatccccattgagctgtctcatgcgcaggttaatggagccgtaggtcttcctggagcccttgccggggacgaaggtcctccggcggtacagctcgcccttgcacagggagaccatgagcagcaccgacaagagcatgccgcccaccgtgagcagcccgaggcctgcgatgatgcacctgtccaggtgggagcctaggcgggcgtagtacatctccagtcgttccatctcccgcgctgtcac

SEQ ID NO: 146756 - DNA, 537 bp, Homo Sapiens
atattttttgtatattgacagcataatttatttttaatgctgtcattacacttaaagtcacaggaaaaaaatatacatgcttactcatgctttcttaaaaataaatttttatagagatccttgagtaaagacattttgcttaatttcttttttcttattccccacttgtatatcccctaccagtaccgggatctgcacacatctttttgcagttacctcttcatagccatgaaccaaaacgttctatgaggagcatgcaagtaagtcaagcctcctattctgttagtacttattagaggaggagatggttttcattgcatagtgacattttcttagccttaacgttctgatagtagcttactactcacttctctttttcagttttcataataagtattcatttttttgccataatgcttcctgtaaagccaattttatatactaataaaacatgaactgcccactcttcatgcctgccaaacttggggcaattgatgctaaatggtatttttaaaataaatgtttttattctttaaa

SEQ ID NO: 146757 - DNA, 557 bp, Homo Sapiens
tctttttaactcaagaaagggcttttattgtttttaactcacttcctgggaagttaatttttaaaacactcttatagagtttgctcatcgcttgtgctacattcaaaaacaacgatgccaaccaaaaccctcagtgacagggtgagcatcccacctgggcctacccctgagctttccaagggtgggtccgatcaaagtggtccccccagaccagatgctcaagaaacacttggggatcagtgattggctcttaacttgccttccactaactctataaaagtgttcttaaaaacagtaccgagtaactttttaagcctcgggccacactgccttagcccagaggagccggggagaaacgtggacccactgacaatggggcacattcggctcctagccttaaatagacgtagaaactgtattacagatgcatgtaccagtgcaggacatacgagtgagctgtgtgcaacagatgagcacgtgacatgcacccacaggcgcggagatgcagcgggatccgggtttctcccccagccagcctcccttctccaaacaagccc

SEQ ID NO: 146758 - DNA, 886 bp, Homo Sapiens
ttttgtgtttttatatttagatctttaatcttgcaatttatctttgggtgtgggatgaggtaaggatataactttatttttttccaaataaatagatgtctcatatgaactaatttagaatatgatcatctgtccagtcttaaacacttttagccacaccaaatctactccctcgcttccacagtgaccagactggggctcttcctgggtggtctggcctcagttccctgcccagcagcatggatgctgaccaaggcaggggcttggagaactggtctgtgtaccctttaaaggcagctggagatagggtggcggctcagctggatagcaggtcccgcaggtcactgttgcaaggcagcaggtcacatgctagccgtgcctttcggtcccggatggccttcagggctgggctgtgttgcaggaggagggagcagatgtccccgtgacccctctcagcagccttatgcagactggtcatgccgtcgtcatccaccaccctggggttggacccatgtgatagcaggagccgcgcgatttcagtgtgcccgcagtagctggctcggtgcagagcagtggcacccccgtgggtctgggcatcacacttagctccgctttccagcaggaactggcacacagcgtagtgcccattgcggctggcatagtgcagcgcagtgtagccggccgagtcgggctgacttgggtcctcggccttctggattaaatgcttcactcggcccaggtctccattcagggctgccgaccagattcccctctcgaagtccatctcctccagcgtctgctgtacgccgagcaccgcgctgggatgcgagcagcagggcccgtccgcgcagggccgaggcgtcgccatcccggccccggcggccgc

SEQ ID NO: 146759 - DNA, 634 bp, Homo Sapiens
acactgtctaaagcatttaatggtctttctttaacacagccaactcccccgggtttgaaacagtgttaaattctctcttgcttgtggcaaaagaagctgtcaagtccaacactgaaaaattggtaccatttcctggccagtaagcacagaacagaggggctaaatattttatggttttattcatttactgtgttctcatgctgtgtttttcttttctctgtctctccctcctgctcgtgtctgcccagggctgattgttgtgacattggccgtatgctggatgcccaaccagattcggaggatcatggctgcggcccaacccaagcacgactggacgaggtcctacttccgggcgtacatgatcctcctccccttctcggagacgtttttctacctcagctcggtcatcaacccgctcctgtacacggtgtcctcgcagcagtttcggcgggtgttcgtgcaggtgctgtgctgccgcctgtcgctgcagcacgccaaccacgagaagcgcctgcgcgtacatgcgcactccaccaccgacagcgcccgctttgtgcagcgcccgttgctcttcgcgtcccggcgccagtcctctgcaaggagaactgagaagattttcttaagcacttttcag

SEQ ID NO: 146760 - DNA, 115 bp, Homo Sapiens
cctgctcctagtgacacaggagatagaagttatttaggcagatagtgagggtacgagttcttggcaaggcttcccttctgtcgtcttctcgcagccgtatagtagtaggcggccg

SEQ ID NO: 146761 - DNA, 561 bp, Homo Sapiens
  misc_feature (220)..(250): n is a, c, g, or t
tttagtatctttagtatagtatatttataggaatgcataacatgtgagatgtacattttgaagtttcatccataacttataacatttactgtagcagtaacaagacagcaggtcatcactttacaacattacacatgagtgattttgacttacaaataaaatatttacaacctacctttacaaaacgacattgtgtgcatacaaaatgaacaacagcagnnnnnnnnnnnnnnnnnnnnnnnnnnnnnnncccagaagatacacttaaggcagaccagcaagacactgaaataattaaggctgtggaattcttctgcaccttgaaaatatagagctatttatcaatactgtggagtgattttaaatcaattgttacaagcctgatggaagtatgtacttatatgtatatgtgcgatggtccctatggggaaacctgtccacttatgaataaggccctttgtctgaatggccagtgaagcccactccaaattctcaaaagacttgaggggggcaggggtcactcaaaaccaagagatgccaatacagtttgcaaatcaacta

SEQ ID NO: 146762 - DNA, 776 bp, Homo Sapiens
  misc_feature (66)..(85): n is a, c, g, or t
  misc_feature (138)..(146): n is a, c, g, or t
  misc_feature (229)..(237): n is a, c, g, or t
  misc_feature (309)..(317): n is a, c, g, or t
  misc_feature (343)..(352): n is a, c, g, or t
  misc_feature (463)..(580): n is a, c, g, or t
ctttccgcgcgcgcgggtgtttctcctcccagtggggcggagaaattcctcttcttccccctaaannnnnnnnnnnnnnnnnnnncggaagggcccccctaacccatttcaaggggtttccgcattcccccttttttnnnnnnnnntttccccagttggcgcaaaaaaggctttaaaggaattgtcgacccatttttttggagagaggtgttctctggggcgggcgggnnnnnnnnnatttggaggtttcccctggcccctcttttttataagaattccttttaaggccctccggatttccccccgggnnnnnnnnnaaaggggtcggtttccgccccggggnnnnnnnnnnggtttaatttccaggcccttgttctgggccccgaattttcttgggaacccctttttgcccagttctttttccttaaggggttctcggggcaaaagtaattgttttaaaaannnnnnnnnnnnnnnnnnnnnnnnnnnnnnnnnnnnnnnnnnnnnnnnnnnnnnnnnnnnnnnnnnnnnnnnnnnnnnnnnnnnnnnnnnnnnnnnnnnnnnnnnnnnnnnnnnnnnncgtgtacattcagaatttttattttaaaacaaagaaccagagtaacaatagaaaatccatatggaaatattcacaatcttctcagtgagaaatgggaccctgccttactgccaacctactgtttgaggagccagaagttgacatgaagttgcaaggtcaccttttcaagctaaagcacactcgatagctatgtgca

SEQ ID NO: 146763 - DNA, 471 bp, Homo Sapiens
tccctttcgctttcatttagtttcatttttgcctttccttagctctatctttgactccctgacacttctcttcctgcctcttttcacgcttatggacctcaggtgcccagagtgagatgaatgacaatcccatgggcagctccttcctggctgtgccaggcatttccatttctaattcagtcgttcatgtgtccattcattctttctgtcattctttcatttcaatacttattcttttatttatggacctcaggtgcacagaattggattaaccataatctgcggttcccggagccttctgcacactggtccgtgtggggctgtcttttgtttgttaatttctccccctggggatttggtgcaggatttatttaactatctcaggaacccagttttgaattagtcataattcttgctgccttctctcctctttttgtccttgcgtggtccactctcccacatatttatgtc

SEQ ID NO: 146764 - DNA, 427 bp, Homo Sapiens
  misc_feature (394)..(394): n is a, c, g, or t
ggctgcaaagcccgctttattgatagagccatcggacacaaacttcatccacagtctgttggagctcgatttcacatcctccggcttctcatagccacaaaagtggccgatcagggcactctcttccgtggggccatcccggacttccaggtagtcatatgcacagctgtcgtgcctttcaatctcaaaagcttggaaggtaagtcccacgtgaaacccctctgaaaccgtaatcctccagacacattccttggaaggtctgtagtcatccggatagttgggagattgaatctgaccggcatctttgttcatgtctcccccgcaggtagcttcgtacgctgcaaagaagcccttgcccaagatgttgctgctgctgcggaactccacccagagnccggctgtccgtggagaccgaggggctccggga

SEQ ID NO: 146765 - DNA, 345 bp, Homo Sapiens
  misc_feature (211)..(250): n is a, c, g, or t
tttttaggagaaaaataatttatttatttaatttaaaacagcaagacttcagcttccacccagtcagggcttgcattacaattttgcaggtgcaaaaactcacacttttgatgccacaactagaagtttgtaaaaactatttttcttgtcgtggacacgtgaagagttctgtttgcaccctcagcctgggccaaataatcatctttatttnnnnnnnnnnnnnnnnnnnnnnnnnnnnnnnnnnnnnnnngcacaaagaggcagaaagcggctggtaaacctggttaaaagaccaaagttcagaaagtccatgggagagggacgctgagctgcggacaccgttcc

SEQ ID NO: 146766 - DNA, 499 bp, Homo Sapiens
  misc_feature (203)..(242): n is a, c, g, or t
aaaaaaataatttatttatttaatttgaaacagcaagacttcagcttccacccagtcagggcttgcattacaattttgcaggtgcaaaaactcacacttttgatgccacaactagaagtttgtaaaaactatttttcttgtcgtggacacgtgaagagttctgtttgcaccctcagcctgggccaaataatcatctttatttnnnnnnnnnnnnnnnnnnnnnnnnnnnnnnnnnnnnnnnngcacaaagaggcagaaagcggctggtaaacctggttaaaagaccaaagttcagacggtgcatgggagagggacgctgagctgcggacaccgttccggctgcagtacgtgttatggctgaggttacacttgggtgactcagggatgcaggcagatgaacattaaccacactaacagaggagaaagaagcccactggggctgtgcaaagtgtccaaggagcacagccccttttgccctgatcagatgtaacagcccctc

SEQ ID NO: 146767 - DNA, 194 bp, Homo Sapiens
tttttttgacaaagcacacttttatttttggatctggtcttcgtgtgaactgtttggataaggcctgacacataagagcttactaactgttggctgggattatttctcttaaccagaaaacttgattacctacaagttttcaaatctagtttggggcagagggctgacattaacaagagatatccaagatgcac

SEQ ID NO: 146768 - DNA, 275 bp, Homo Sapiens
tttgttaagctggatccttcagtttaaactccaaatgtttctctctgtagaaactcgccatctcctatgagcttagaactgctggggctctagaaagggtataatgggcaaaccggggactcacatcttcatttacacagtctgcactggaagatctgcagatacaccaagagactctacaaaatgactacaaatcgaaatttactcagcattcattgctcaaacatttcaggagaataaacccaactctgttttatgcaggaatgctatactgt

SEQ ID NO: 146769 - DNA, 569 bp, Homo Sapiens
tttctcttcaccataacatttttattaaataaagggaaatattaggagacgatgtctgctaagataggaggttaattctttacatggtgagtgggtcacagagacaagacatcaatcgtctgttagcagcgagagagacactttaagttgccccaagagtacaaatcccatctatgagacagcagtgctggcttcttaaaaacagtaaaaccaatcaaaaagaaaagatttagaggttcagacattagaacaaatgtggccagagataccacagagcccttgaagggaaaggcctcactgctggctccgtagcaatgttgacccaaaaacagggcaggccagggagtggcagggcgcggaggggtggaaaggagggaggagaaaaaagacccctcaccagacctgcggcaaggccactatgggattctgaagttagcgtcgccctccaattgcgggaaggggactgcctggccaacagggcaaatgtagagggccgggatgtctcagccagttaaggccccacaagatgctcagtgccaagtggaaggtcccaagcccctaaggagcgt

SEQ ID NO: 146770 - DNA, 620 bp, Homo Sapiens
ttttttaaaagggtaagaatgggagctttatttatgcgttatatgtttaatacaaattcaatgtattttgttgtgttcaatacagttaatatctggagtgaacaaggtcggtctcatacatttatctttcctttcttcttcctcacgttgtacataagggaaggaggcttcttggttttataggccacacttttcttgatgcgctgtcctttgatgttaacaatatatggcaagagagggggccggacggtcaaaactgttccttcaggtgtatagcctcggagatgcagtctgtccttaaaattaggtgttactgaaacccaacctgcagaggaaaacttgatgtcggccactgcttcagatgcccccagtccttcttttaacataatgtcttcagcaacaagaggaggaaatcctgccattcgttcttttccacccattggaatctggagtaacgtatgacctgcatgcttctgatacagagcgtctgccctgtccaaggaggtgatatgcacagggaggatgttggaagccacgactgtaaaccaagctgactgatttccctgcaggaaatctatgcgggctatagcacccaaaaacagaaccgtttcctggtttaa

SEQ ID NO: 146771 - DNA, 799 bp, Homo Sapiens
cactggatgtaaataataaagaaaagtgatgttgtacaaagtgtaatgcatgatcaaacaaactggtggagccatagctatctgatatagataataactgtaaacaattgacaagattaatactttttattaaaaagtcactgcaagctttggataggaaggaaacttgaagaaatgatgacaactggaagaacatttccacattatcatctgttatttttgtttttccagtataggcataatcgagaaatgcttttactgccttggaggacaaattagtaatggtaacacttccatcatctctttctttcatgtttacttcaaacatagccctgaaaaagtcactgcatgctgctaacacacaacgatgacacgggattatttcatctttcataattattttgaaatcataaaagacattttgttctctaaaattctgtagtacacttaagattttttgtccatgatcttctgatacaaggaagttgtttttcttctcagatggaattccattacatgtgcttcgttgattgaaagcatatgaattatccatagccaattccatatgtccttagaacgctggcctttggctgatatttccgggcagtcagaggaagaaggaaatcggctgaatcccgcagtaccgcactttaatcgacctccaggtagtcatttacagtcatctgcagagaccaacttttcctggaccaaaacctgcagggcacttggatcgcgtgggctttcatacgagagtcaacaacagcctacacggaacaactgcaactgcagtctccgaagt

SEQ ID NO: 146772 - DNA, 574 bp, Homo Sapiens
  misc_feature (369)..(443): n is a, c, g, or t
tttttctccccacagttagaataacctttattctgatccactataaagccagatgatttttaggtggcagtagctggcattgaagagttcttggcttcaagcggctgttgagtctttttggtcttgttttaactccctaattaaataaataagatccaactctttctgttgtattcactcctggacatatagaaattcacttcacacccacctaaaatacgagcagaacttctgaggcccaatgaacccatctactatttgattttgttatcccttctggagcgtgtctctaccaagagcttcacaaagcaatctagtcattgctctttctttgtctaaaaccagagtacccatcctgtaacttccatnnnnnnnnnnnnnnnnnnnnnnnnnnnnnnnnnnnnnnnnnnnnnnnnnnnnnnnnnnnnnnnnnnnnnnnnnnngaacaattctagttctgacttttaaagctatatagaataaagttgcttccttgtgtgggccaaatcattctcccatcctacttagatcttctttttttccaggatcaatactgaaactttcttcacctagc

SEQ ID NO: 146773 - DNA, 484 bp, Homo Sapiens
  misc_feature (364)..(438): n is a, c, g, or t
ctccccacagttagaataacctttattctgatccactataaagccagatgatttttaggtggcagtagctggcattgaagagttcttggcttcaagcggctgttgagtctttttggtcttgttttaactccctaattaaataaataagatccaactctttctgttgtattcactcctggacatatagaaattcacttcacacccacctaaaatacgagcagaacttctgaggcccaatgaacccatctactatttgattttgttatcccttctggagcgtgtctctaccaagagcttcacaaagcaatctagtcattgctctttcttgtactaaaaccagagtacccatcctgtaacttccatnnnnnnnnnnnnnnnnnnnnnnnnnnnnnnnnnnnnnnnnnnnnnnnnnnnnnnnnnnnnnnnnnnnnnnnnnnngaacaattctagttctgacttttaaagctatatagaataaagttgc

SEQ ID NO: 146774 - DNA, 832 bp, Homo Sapiens
  misc_feature (185)..(467): n is a, c, g, or t
gttgctggatctgccggcggtaccgtccggagttgttcttagagtcccaacatcagtgagacagtacagagccaaagttatgcttcccaataggtgttttaagatatattcagactttcaagccagaggcagtcacatgtcagaggtcatttttaccatgactatgttttattttatttatttgnnnnnnnnnnnnnnnnnnnnnnnnnnnnnnnnnnnnnnnnnnnnnnnnnnnnnnnnnnnnnnnnnnnnnnnnnnnnnnnnnnnnnnnnnnnnnnnnnnnnnnnnnnnnnnnnnnnnnnnnnnnnnnnnnnnnnnnnnnnnnnnnnnnnnnnnnnnnnnnnnnnnnnnnnnnnnnnnnnnnnnnnnnnnnnnnnnnnnnnnnnnnnnnnnnnnnnnnnnnnnnnnnnnnnnnnnnnnnnnnnnnnnnnnnnnnnnnnnnnnnnnnnnnnnnnnnnnnnnnnnnntacaaccaatgttgttttataccacaatgaacactctgccttcataaggtttctatgacaagttaaagttaacacaaagtgaagtttgttcatagataaggacaaggggttggttaaatctttactcacagtaatttaccaagaacttcaaatactgggtgtccacgctaaaaaatttttccagtgggtgtttgatcaaaaaattttatagactcttgttctagagaaattcagtttcaagtggcttatgagattgtttcatctgttaatttggttttttgtggaattcttctgaagatcaccactgaattatccgttttatcatctcttccctcgtgccgattaaccgggcctcgtacctagcc

SEQ ID NO: 146775 - DNA, 823 bp, Homo Sapiens
  misc_feature (158)..(158): n is a, c, g, or t
atgatagggattttcaaaagaaggaaagacggcatgagggagcctgtccatggctctcctcccaagccccggtcagggctgtgtgtctgaagagcccctgcccagctcacttctaggacctgcaggcaccgcgtggtccccatcaaccccaggctgcntcagctctgcaggggcagagggccggccaggtggggccgggaaaggaaacagagggtgtctaggggatgggctgacacagagtacggagttaggactggctatgtgttagtgccgagaatcctcttctgatactaagaaaacataaataatttgtgtcaacatctgtccccaccgccccagggcccagcggcagacccagcctgggaactggtctggagaggccagccggcgtagcttttctgtgtccatgccgccaggtggggctggggacgctcagtctcctcatcactttgctctctgggatacaggtgtgtcctggacgttcattttcccagagagaagaaagagaacttgccgggccccgtcggggagcaccaagacccctggccttgctctctgggtgggtcacgggtgctgttctgccgcaggaggtgatgggaggaggtggcaggaaggagccccagggaggcgggcagagggcgtgggccccggccggtgccctcctgcacctggagctccccgcttctgcacccgtctatgtctgctgctggcagcaccaaggcagggaaggtgaggagtggatgtgcaaaatgccgccgggttccagggagggaacgaaggactcctggaacctgaccctcgtgccgaattcgccacccaggcc

SEQ ID NO: 146776 - DNA, 490 bp, Homo Sapiens
ttttttcaaaactatatatatgagatttatttcacattttctacctactcagtcatgtgagctgttgctacatttgtgaactttctgaaaccaagtgacaaatatccacaaaagatcatttacaatgtagacatcactaaagtctagatttaaaagtccagtgaaaatggcacacagttggcttacagaaataaaaaagtacaatatatttgaaatagtagggtttttgttttccatttatgcctacatcatggtgttacctgtggatatgttatcaacgatattgatatcagatactatgacccatgacatttagtatttttagcaataagaagcacacttaaatctatttcaaaaatatgacatgttaaattcttaggaaagtatcaactttacaaagtatcatacacctagaaaagtaaacatgaatttctcagtctaggttagaaaaaaagtgttttaagatttttattaaaaaaatttaaacaaa

SEQ ID NO: 146777 - DNA, 170 bp, Homo Sapiens
ttgccaggcaggcctgagcaatctttattctgcagagggacaatgaccacagatccatacaccacgtggagaccgaggggcggggagccaggggccagtctttcaggggtgggcaggtccaggcggtgggcagagcctcgggtgggtgaggggcagatgggcaggggcct

SEQ ID NO: 146778 - DNA, 623 bp, Homo Sapiens
ttttcctcaaatacatgtacattgcaattataatgtaactaagagaaattttactggacattgcatgggccgaaaaatttggagcttgggtttcacatacagtgtatagtagattatagcataccattttctgttcagtgcatatgtattgatttccaagttcccactatcaattccaattaagccattctctttcaggctgtgccccctgatatttccagtcatcaatgcctgctgatacaatgatgatgagtcaccttcctcctaactaccacctctgctccttctatcaaaattagcccaccatccctcagagttagtgatggcaggctactctgggaatcaactttatcttaacacactaaagagagaagactgtggtgcacatcgtgctttgccccaggtattacttctgtttttaggtcaagcatgttcagtctagattgtacacagccctgcaaatatagagacttggacgtgaagacatagacaattttaagggacttaaattcaggtgctatttcctaaaactaatatgtttgaaaaagatcttgcaattaggcttcatgctatctatgtctgccttttaacttttcttttaaagtacttccataaccaaattg

SEQ ID NO: 146779 - DNA, 498 bp, Homo Sapiens
aacagcttcttgtccagctttattgggagggcagcatgcctggaggggggccaggcatgaggtggggtaggagagcactgagaatactgtcccttttaagcaacctacaggggcagccctggagattgcaggacccaaggagctggcaggatggataggcaggtggacttggggtattgaggtctcatgcatccacggctgaagttggtctgacctcatggtccaaatcccagaactgagagaactatgtccttaacggtgctccagtagtctttcatggaactgaagccatcggtcacccatcccctgcgctgctgggcacactgggactcctgcacgctgctcagtgcatccttggcggtcttggtggcgtgcttcatgtagccctgcatgaagctgagaagggaggcacctcggcctctgaagctcgggcagaggctaggagcgccaggagaggaacaacaaggagtaccggggctgcatggcactctgttcctg

SEQ ID NO: 146780 - DNA, 582 bp, Homo Sapiens
gaatttgggggttaagtggaaaagagataattatcttatttggaattaacttgctaactcaggtgaaaattcccttacccctgccaccaaataagacagtattctattatgtctccctttgactcctaacacccaactaagaaggactaactctgaatgtccttcctttttaatcaatacctaaggactcactgctccttccccaagaaaagaacagtgaaggcctgacaggcaataaccccgaataccctcaaaagtgtgggccttcgagcagcactgctcttgggatccagttaccacctttcccctttcccccaacccacttcccgggttttctcatgctcggcctgctccctccccaccccacagccacatttccagctgcggccaccgcctcgggttctcttgtgagcttccatccctccgaggagttgccccctgtccatcacctccccaaaccatgttccaccccagaccacccgcccgcgagaccgtccatcctagcgctctgggaggggaggggaaggcggcggaaggaggaggggaacactgctgcttcctcacaggcagaagggcggccgc

SEQ ID NO: 146781 - DNA, 477 bp, Homo Sapiens
attcctagtaagattggcatttttttagactatgaaatgaatgaagtttccttttataatttgaatgatagatctcttctctatacttttaatgataattttacaggagcactttggccttatttttatactggaactgactcaaaacctcttaaaatttctacagtaacagattctgaatgaattattagaagactcagtttctttcacctagtagacataactgagccagtgaatctagttttggctattctgtattttgtccagtttttcccataagaaagcaatatttttttatctcagtttcagcaacttccaaaaaatgtgattatgggacctactttatattaaattatggggtcagtgacaaggtactttagaaattctacagtaaaatacttgaaacatatattactgaagaaatgtattatgtaagaaaatctattacttttgtaattgccaataaaagcccagtaa

SEQ ID NO: 146782 - DNA, 233 bp, Homo Sapiens
cttttacatgcttttaactcatttgatcctcacaacaaactctgtgaggtgggttcttatttttcctactttataaatgtgataactggggcgtacagaagttaagtaatttgccaaatcctagaggcttccagagctctctgtcttaatcactaaggctatgctgtagggtctggagggtgaaagcagtacccagcttcaggactgcaacagtgttgcagaggatccagtct

SEQ ID NO: 146783 - DNA, 435 bp, Homo Sapiens
  misc_feature (179)..(287): n is a, c, g, or t
  misc_feature (318)..(373): n is a, c, g, or t
tcttaattgttgcaatttatttagaattaaacattaattaggctctgaagaaccttgctgattgttaactggatgattgtttcattacctattctttgattttatcaccactggcccgttatccaccctgctggttgccaactcagaggtatgtctttgttgagtgcaaaacagttgannnnnnnnnnnnnnnnnnnnnnnnnnnnnnnnnnnnnnnnnnnnnnnnnnnnnnnnnnnnnnnnnnnnnnnnnnnnnnnnnnnnnnnnnnnnnnnnnnnnnnnnnnnnnaaattcttaattcttcgtcacactagacacnnnnnnnnnnnnnnnnnnnnnnnnnnnnnnnnnnnnnnnnnnnnnnnnnnnnnnnnctatagaacatttccattacaataggaagttcgattcggcagtttagaccttgaggagttct

SEQ ID NO: 146784 - DNA, 382 bp, Homo Sapiens
  misc_feature (134)..(159): n is a, c, g, or t
ttgtgttctcagagctgttttgctttatttgcagacactgttgcttttcatctttcccatgtacaaagctgaacaattaataaaaaggcacctggagacagcaaagacgcattcatttcatgtgacatagtttnnnnnnnnnnnnnnnnnnnnnnnnnntactctggttaacaatgcacgcttcctacgtaacaagcaattctggagatgccgtcccgtgtcctcgtgtcccgcggagttgaccgtgtgctgtgttcggggaaggagagggccagcgtggtggcttccagccctaagaggcttccctctccctcgctgtcaggtgagaaggaagggggaaagacaggcagaaaagcctgaggaccgcaccactgcagtgaca

SEQ ID NO: 146785 - DNA, 538 bp, Homo Sapiens
agaagagaaagagatttattttaaggttatttaaatttaaacaatattaaccttaaatctgctaaatccatgtttctttattaactggggtaatatagtgattctacttagaaacagacccacatagcatctatggcaagaaaccctcaccataagagttagcagattaagtgtgtaagttttgatcttggaattatcgtcactcacacgttgcatgattctagcacttctctttccccccagggatgccgaactctgccaattcgccctttagtggaatgagtactgggggagaaaaagtaaggtttctctttgatcatccccaatcactggcattaatcctgtttttcacacagctgggttttgtctataaagtttgatccctccttttctcatccaaatcatgtgaaccattacacatcgaaataaaagaaaggtggcagacttgcccaacgccaggctgacatgtgctgcagggttgttgttttttaattattattgttagaaacgtcacccacagtccctgttaatttgtatg

SEQ ID NO: 146786 - DNA, 402 bp, Homo Sapiens
gttgataatctgatgttttatttaacatatagaggtggatgtatatgttaaaagcttgattctgtgtctatgaatatgactatgaactctgaactattttatccattggaaggtaaaggaaaggtcctacattgtgggaggaagaactgatgagaaccccatcttgcttgctgcttgcttggtggtgggcaggccgagggtagcggcaggctctgggctgtctgcgaggattctggaagctctcccaggtgcccagcagccgggcatgggaacggcatgtggcagcagagagtcgggtttggctcttccacgtggcaggcggtttcccagactggccagtccttcacattaatcagatcaaattcagtctgtttctgagcttctggctgccctctgatgggt

SEQ ID NO: 146787 - DNA, 508 bp, Homo Sapiens
agaatttccaaaaggagtctatggtgaagtctctgaggatgcaaagaagacaaggagaatgaaaatccaatgaaagcctgattgtatttgttgaccttaaggaaagtgattttatggtacagccctctctggaagggagggtgtgttcgctcacagaatgcaaataccctttgaccccctaatctttcttctaggagtttctcctacagataaacttagaagggtgctcaaataagtaagttcaaggatatcctctgaagcattgccgtagtataaaaaaagcacagataccctcaaaggacatcattaggggcctggtaaaataaattccacacagtggaacaccgtgtagctctttagagaataaacagctctctatatgtgatctggaacaatctccaagctatattgtgaagtgaaaattacaaacccttactgaaaagcactaaagaaaatccaaagaaatggaaaagcaaagcgtggtcttagatagaagactcaatatcat

SEQ ID NO: 146788 - DNA, 661 bp, Homo Sapiens
  misc_feature (60)..(118): n is a, c, g, or t
cgaggagctcggcgggctgactggggtccgtgccgtcccggcagggcagtgcctccggannnnnnnnnnnnnnnnnnnnnnnnnnnnnnnnnnnnnnnnnnnnnnnnnnnnnnnnnnnttgcggctgcatctggaagccgcgcccgccgcccgccccgggcgagcccatcgcgccgtagtacacgtgaagggcgctgggtggcgccaggaggcccggaatcgagggacccgcgggctctgggccgagtcgggggtgcatgggaccggcgggaggctccggggggccagcgtagtccgagacctgcgcgtagctgtaggtgccggccgccgggcagtccccgggcatcggggcggcgaagaaagccgggtcggggtccacgccgtccagcggggacgtgtcgggcgtgggcaacgggtagccgtcgagcggaggcgcgcccagactctggcagtcgcggtagtggccgcccatgtgcggaggcagcagcggcgggccggcggggaagccctgctcggggaactggaggcccaggccgtccatggccacgcggccgccctcggggcccagcgcggccgcctgcggctcagccaggccgtgcaggaagccgccccccggccgtaatggccgaattcccgggcatatgtccggtaccgtcgactg

SEQ ID NO: 146789 - DNA, 762 bp, Homo Sapiens
ccaactgtaatatttgttctgtatagattttagacatggatgttaagattcaactaggaatggtactacagcaaaacaaaatatgcataaatccataatctcttggcatgattatgactgacatattctaatcatttacaaagtggtagaataaattatctaacctactcagatgttttttcaacttgtaaaactaaaagacaactataaagaatggataatctgttcttgcccatgagtggccagacacaatcaacagggttaggacattcacaatcagctcagccagtggaatcagatataaaaagcatgcaacttgaaagactgggagaagtgaacctgtctattccaatagacaggctcccttacagggaaactaaatcattccagaaagcctcatctaaaacctctgtaattgacaacagtatctaacaattgtgatcttgataagtaaactatttgctctaacctaaagaagcatttgtttatcatgtacaaatatttagaatgccaatcctgcattctctgcctagaattcaaaagaatttacattctaaggctgcacccagcacagatcaatcatatgggattggatgacacatgcacttttaaaaaacacaatttgcttttagaaaacttgttaaagtttcaccttctggctttggaagatgggggtagctaggcatatttacttttagacaaggactgagtccccggccgtaatggccgaattcccgggcatatgtccggtaccgtcgactg

SEQ ID NO: 146790 - DNA, 409 bp, Homo Sapiens
aactttcctttaatgcttttctagcatattttgtgttttaaattgttttttaaaggaagcattctgccttaactgtaggtttccagtggtagcaatgggtgtgctgaagtgggtggattggactgtatcagaaccaaggtactttcagctgcagactgaccatacccctgtccacctggcgttgctggatgaggtaagagggcggagagctgttcacagcctacacagtgtctgtctcatgctgtttacgttggcattaacattgcatctattcagtgagtttagaggatactcttctcaaaaatagttatttctgtcctgaggattttcctcttaaggacctagcttcattgactgcagaaatttcttaacctcagtcaagtgttactggaagctgatggccctggct

SEQ ID NO: 146791 - DNA, 497 bp, Homo Sapiens
  misc_feature (440)..(453): n is a, c, g, or t
  misc_feature (456)..(456): n is a, c, g, or t
gaaagagaaagagaatggtaactttattcatggtcacagaatacccccgggaaggggaaggacctggcagcagggagtaaccacgactggtcagttgaagaaggtgaggatgctggccccgaggtgtacaggaagggggaaaatgtgcgagggcctttacggtgggcagtgccagctatggccccccagcagacaacaaggcacagtggggcttggggactgggggaggccagccctgtccgcctgtccttgacatcaggaggcttgtgagtggagtcctgcaacccccacccaacccctgtacaacgggggttccatttctgagacccccaaagtatggggcatcttagaggcccgccccacagctgagcatcatctcaaggaccttcccccatgacgggatcctcagaaagagccaagggcagcggagacaaccagtnnnnnnnnnnnnnnctngttttggcctcttctcgcccaggccctaacatggaaggggg

SEQ ID NO: 146792 - DNA, 511 bp, Homo Sapiens
gggtgagccactgagcccagccaggggtgggggatttaaaacagaaaactacactcccaggaggccaacttcttccagccaagaaaaggacaggagaaaggtcagggtgagggatgaggagacgcctaatgccagtataggagcatatttgtgtgtgcacaactaaatgcatacacacaatacctggacaccctttttctggagtccaggctggtgccataagtgtgtgtgtgtcgctgatgggaagcccagagggtggggcccctacctataataggaactcagacccaagaagggacactgctgcgtggtgactctgcttcctgtctggggcagctggaagggacagtgacccacaactgccccaggagacagtggagcagatcctctaaaagctgggatggggagtaggctgggagggctgaggaaggggatgtcaaccaagagtatttgcacttcccagaggtgagagggagcaaagtggctggggcgtggcctggcggggagctcg

SEQ ID NO: 146793 - DNA, 1251 bp, Homo Sapiens
ttttaaatatgaaattttactcgacaacagaaaaggagaaacaggaaaaaaggtgcctcgagcaaagtcaatgacttggtggtggcagagattgtttcctccaaaacgagaatggtagtaactagggcaaatttcacaggcctaccaccaatctcaccagtccaggaattatataggaatggtcacattcctaatgatggtgaagcagaaagccctccccacagagagacagcccactggggacccagctcaagctcttcaaaacgtggcagctacaggtcacaagactttggcagagatgtccgaaattcttcaaggaaggcgtcacgatcagagggacggatccagctcaaatagctttctaggtacagggggagagaccacagagcatcttcatgtgaccccttagtttgggcctccagcctccaccagagtgcagtggcctcatccctccgatctagcctcttcagagtctgaagcaggtgaaagtaagtttctcgattaccgtgggcacatcttgcacactgaggaggaagtcctgtaaggctttggtatccttgccgctggctacccattccagtccacgactaattagggcggctgcccgaagctgctgcagtgccgcatctgacttacatccctgctcacagttgaaagctgccccttgttctttttcctcaggtgtggcccggaagagcagctcgaggcacctgctaaattcactaattgccactttttgggcacccagttgaacccaggcctggccctgaagcaggtgggtggcagagacccagagtgggcagtatggcagttccttggttccttttctggcatcttcccacagccgggacatcttgggtagcagagatgatgtgcggctgagcaactcctcacatagagtcaaggcatcttgggctctgcctgcctggatcagtgctaccgctgcctccaaaaacacctcaggcatacagggccctggaggggaggggggtggggagaaccttggctccgagctatccagcaacagggccagcaggtccaagtaatgctctgcagcgtctcctgccctccccgtctgtaggcacctgcttgctagtatgtgcttggtgacagtcagctcccagggaagaacaggaacagctgcagggagcccttgcagactatggaggagccctctgagcccttccagtgcatcctgagccaactgctatcgccctcagagtccctcggccgattcgacacccgggggcc

SEQ ID NO: 146794 - DNA, 958 bp, Homo Sapiens
gggcatcctgcagggtcaatggagcatctaattcctcagctgggggactccaagttttcagaagtaacagcagatccttagaggctccactctggctgccattcagggtctctagtaacaaggccaggtccccaagacggtcagcactcaaccagagggcagcctgcaggccaaccaggcggtgcagggcagacagcagctccggcagaaggcaggaagcacgaaggacagagtcccacagctccctgagcccctgttccaacctgggcccctgctgctcctgtgtctccagcactctctctaggctccgctggatatcctgggcctgatcctctgtgaaaccctgggccaagcttgccctcaggataatgaagttgcaggtgacagtcagctccaagggaagaacaggaacagctgcagggagcccttgcagactatggaggagccctctgagcccttccagtgcatcctgagccaactgctgtcgcctcagagtcagaccggagttctgagccaccttggcctgtcgaacgagccggtcattcttttccctccacaggtccaggcagctggagcccacagaggtggtctggcgggacatggtggccgaggctcgcctctggttggccgggtctgcgaagctctgggctgcggttggtcctcttgaagagttagttcccgcgggaaactcggggaggaaacgagtcagcaaccccaaacaggcttaggcgggctagaagccggggtcgtgtctgactggggcagtcgcacggccggcggtgcggcccgctcggctctcgcggaggccacagcctcgagaaagggtgggcgggagcgagtttcggccccacagtccgtggctcggcccttcctcgctgccacacccccaggtcctcctgggttcccgcttccaccgagcctcgtgccgaattaacacccagcctcgtacctagccttt

SEQ ID NO: 146795 - DNA, 1141 bp, Homo Sapiens
ctggagaccttgcggtagccaaatgcttgtcaggaggacatccgttcaattccctgggcatcctgcagggtcaatggagcatctaattcctcagctgggggactccaagttttcagaagttaacagcagatccttagaggctccactctggctgccattcagggtctctagtaacaaggccaggtccccaagacggtcagcactcaaccagagggcagcctgcaggccaaccaggcggtgcagggcaagacagcagctccggcagaaggcaggaagcacgaaggacagagtcccacagctccctgagcccctgttccaacctgggcccctgctgctcctgtgtctccagcactctctctaggctccgctggatatcctgggcctgatcctctgtgaaaccctgggccaagcttgccctcaggataatgaagttgcaggtgacagtcagctccaagggaagaacaggaacagctgcagggagcccttgcagactatggaggagccctctgagcccttccagtgcatcctgagccaactgctgtcgcctcagagtcagaccggagttctgagccaccttggcctgtcgaacgagccggtcattcttttccctccacaggtccaggcagctggagcccacagaggtggtctggcgggacatggtggccgaggctgggcccggagaccagaagcggacttaggaagggtgaagctggcctgcccaagctcccaaccccagcggggaggggcctgggcacttctgcaccccgccgagctcccctgcttctctcggggtcccaatccacccgcccaggctttccaggacagatgggacgctctctccccgcggcccgccgggctctcaacctcgcctctggttggccgggtctgcgaagctctgggctgcggttggtcctcttgaagagttagttcccgcgggaaactcggggaggaaacgagtcagcaaccccaaacaggcttaggcgggctagaagccggggtcgtgtctgactggggcagtcgcacggccggcggtgcggcccgctcggctctcgcggaggccacagcctcgagaaagggtggccgggagcgagtttcaggccccacagtccgtggctcggcccttcctcgctgccacaccccc

SEQ ID NO: 146796 - DNA, 900 bp, Homo Sapiens
tgtcctagaaagggtgggcctaggagccccaaaccccagaaagagggagggtgttgggtgccctgcatccagactcagggagacgtgacaattctgtggccctcagagaccctggttccaggaggaagctggtgcctctgttatcagtggctccatcggggactggacccagcccagacttcttggtctgacaattgcccacagatcagccagggtatagtcagtcctcttactacctaggagtgtctgaagatgagccccagccctgcctgtgcccggcaactcgccaaaagtagccgttccattgacctaagtagggacccaccagtcccgcaggcctaaccagccaaagcttcctagagcccctcctctcagagtggctgaagcccatcagccagaacataggctcaggtgcccagtcctggagcggcttccagggcgcggaagctgcccccgggggcgcccagagcccgggaaccagcgccgcctatgagcaggtcttcctcctcctcatcctcaaaggcccgcgctgggcgccggggcggaggccggggcgtgggctcgtcgcgctccgccatgcgctcgacggcgccctcgcccacgaggaacacggtgtccgcgacgcgcgggggcccggtgacggggttgtggtcgtaggagaagacgcgcagcgcgcgcagcgggtgcaggtcggggaagccgcccaggcggttgcggtcgaggtcgaggatgtgcaggcggcccatgcgcagcagcgcgggcgggaactcctcgaagcggttgccgtagagccagaggccgcgcaagcccgtcatgcgcggcagctcggccggcagcgcgcgcagccggttgtcgcccatctggagcgactgcagcgccaccaggcgcagcagcggccgc

SEQ ID NO: 146797 - DNA, 378 bp, Homo Sapiens
tttttgccgctccatcacactgaacaagcattttattccagggattcccaacatgtgagcagggtggaagcctctgacaaggtgggccagaacctttggatttggtttgggggccaaaatcaactaaggctcagagaacatacaaagcctgcgtgaaggtggtgagctgctcccaccttcacaggtctgggggtcctaaacccctggagccatggtcagtcctgtgcccaagcctcttcttttgcaggccctgaaactttcactacagctcagacactgctgcacgggccggggaggggatgggtgcttccggcaactgttcacagccccttcactcagcctccgggaacttggctgcagaggcaggggcgaggcagc

SEQ ID NO: 146798 - DNA, 646 bp, Homo Sapiens
agggacaatcaacttctctattaaagtctacaaaaatacatttcccagaatggttcaatagccaatcaaaggaaaccatgaacacaattagcagcaccaggcgtccagacacaaagatttttgtttgtaggaattactgaaaatgctgctgttttcagcccagaggtcattccttcttcctggtacctgtgtgtctaattgtcaaaggaaggatacatcattgtaaaataatggccaagttgtcttaaaagtatcttctatcttttaaaaagattaggtttgggatacattagaataaagctcaaagggcagggagaaataattaattaacaaactcaatgtaattcgctgggagcattcctgttctccctgttctctgcactgtgccgtacatccagccatcgtcaataggctgcacgttgacgatgtagtcgccgtctctaaaggagacctcgtcttcatcctgggcactgtaatcgtacatggctcggtaggtccttagatttggtgaatgctgcattgatctcatggatgacacactggtctggtgcatgtagccatagccttgggaatggctttgctgataggctccgggaagaacaggtgctccttcatcagacggtcttgttacctcactgcagcatga

SEQ ID NO: 146799 - DNA, 705 bp, Homo Sapiens
acgccaccaaatattcagtgccaccaatatcttgtaacctggaatattcttagagaaccacatatgtttaacttacatcctcttgatctcaatcgccttcttcataaatccatatatgtatccagtgcatatttattagtttacatgcccatatttactatgaatgagtcaatcattttaggttcttcaagtgaaagtgcttctgacaacaaactattcctataatagccctaaatccccaaaaaagttgttttaaacctgtgtagaacgatgcatagctatttctaaaaagtaagactacacaccaaaacatgctttgtcaggaaaactaatccatgcacttgaatataccccaaatatcttatttttaataaaggtagaccaacttaaacattgtctagaattaagctatactattaaattacttgattccacgaaagcgtccaaaatcatttggcagaaacttaagacaagaaaatacttactccttgtcccttacttcaaaaaaggactggttggaccatgtgatcaatatatactgcatatatgattaatctaccttaacatttccatcgacttagcacttgatcgttacaagccttgtatgccattttcttgcaaagcgacgcgtgggtcgacgatatcccgggattccgaccgtaccagcctgctttttgtaaccactggttctatatgtcactatgc

SEQ ID NO: 146800 - DNA, 553 bp, Homo Sapiens
tttatgtatgcagcacaatttattatctggccatagtatttgggtacattatcaggtaccgatttaacaccatgtaacctctcttgacacagagcaacccaaaaagaaaactttaaaatgtgcaacagcaataaatatcaagctttgtcatctaaaatgtataaatataaaatatcagtcatttctggaaacatcttaagaaaatccggcaaccacatgtccatgagtaggtgtctgatgttgacggtgcttacattcagaacatatcacctcagatccaacacaattatttttatgtcttttaccaacacatgtttgcatatactgaacagcctgggctccttggtgtgtggatgaaagcccttttttttacaagcagaaacctcaagcatgccagcattggtgagcctgaagatgccagtgtctttatgctttggtgagcaaacaatggcaatggcctctggcaacatgagttgataggaacagtgagtgtgagatcaacgctggataaaaatgcaggttgagttggatgtggatgatccatcctagagtg

SEQ ID NO: 146801 - DNA, 443 bp, Homo Sapiens
ttttagtataagcatatcccatgcaatttttggaacatatactgaaaaattatactgaaagtcaaatcaaactgatctggcaaccctatctagttacctacaatctaccgtgttcccataaaggctttaagtaatttggaatccgttaacacatttagcttattctttccccattggttccctgggcttagagcagacagcaagcctttctttcacttggccaagaaggcacctccttttcccatctaacaggttgggatcacagctagttggtggcaaagccatccacatgcatgttgtttatctttttaaggatatggtcatagtttccacccctccttacctctcctgactcaccatctctaagccttcccacacaggccctgctgcagccgccggagaactgaccgtgcttgtgggtccactcactcctcccacatctt

SEQ ID NO: 146802 - DNA, 448 bp, Homo Sapiens
gggacctcaacagcatttattatctcactgcctctgtaggtcaggaatctgggcacaatttcgctgagtcctctggttcagggtccttcacaggcagcaatcaagttgtcagccagggctacagtcatctcaaggatccactgcagaaagatccacttccagcttcacttgggcaactgtcagcaggattcagtttttttcaggatattgtatcctgggcctcagctcttgtctgttcagggggcttctcattttcttgccatgtggggctctccaccggagagctcacaacagggcagcttgctcctgctttgcaaaagatctataacttccccattgatataatgctcagaataccttcttgctataccatcagcattccttgagtagaggccaagcaaactatcgagcccgtccaaaacgccatatttgtatctgacgtcatcct

SEQ ID NO: 146803 - DNA, 517 bp, Homo Sapiens
tcaaagaatcttcgttctgtttatttatgaacacagaaagatatgcttttaaaactctcaaattttaaaattgatttaagcccagtagcagaaaatactcttgacattggcagaagtgaatattgttaatatttagattaatcattcaggattcagatatatccagatatgacataatatctaaacaaagatttctcctgacatctgctgtattaaattattatagaatgaaataaacaactagattcaagtagtagattacaacactggagcccacagcagccttgagagcagattatctcctcttttctagaagtctggttgattactgctggcaccagcttttgaggaaaataaggatggaagtagagatcccttgacttgtgcacattctgggagagagagtggccctgggccaggctggctgcatgggtcccaatcagtggggctgcactccatcatggtgtgcccaggatgaggaataagtgacacttcagctgtcgtgacactgctgagg

SEQ ID NO: 146804 - DNA, 555 bp, Homo Sapiens
  misc_feature (42)..(105): n is a, c, g, or t
  misc_feature (536)..(536): n is a, c, g, or t
gattcttgcagacttgcccagatttttttgactccacacggnnnnnnnnnnnnnnnnnnnnnnnnnnnnnnnnnnnnnnnnnnnnnnnnnnnnnnnnnnnnnnnngagcctcttgcactggttcctgagcaggagctggggctggaacttcttctggcatttgctgttcattcacaactgccatattaggagcttcagccatcagttgttgaaatggaaacgtataaaaagcttgagcttgctgaagggaatagctgcccgcgttctccgcttccattccccgaggccgctgatgcgggcggctccacctgccgggcacacgggcagccggtctctgtagtaccgcgtggtactcactgcggtaagacaaccccagagacctgggcccgatggctggcagtacccagacagtggctggactcaagctcctcctccaggcttctactgtcccccaccgacgcgtgggtcgacgatatcccgggaattccggaccgtaccagcctgctttttgatacaacgtgttctatagggtgtcncccatacaaattgcgcctg

SEQ ID NO: 146805 - DNA, 348 bp, Homo Sapiens
caacctttctgcatccaaaggagtatttgccaataactggggaagggccacggcaaaaagcccagtgatttttgtcctatcatccaactgtgtcttcttctcctttgctgtaagcaccctttttcctgtccctcttcccacgggaggatgacattcagccgcttgtctaatggtacaaagcattatttcaatcagagcattttcttgcctatctgttagtgcttcttttccattaagtggctcttccagtaacaagctattcatacattcccagtctttcagcagctcagtagcacagtcccacatgctatccacaaggtatgctgcatgctcatgtaactcactttc

SEQ ID NO: 146806 - DNA, 513 bp, Homo Sapiens
ttttaagtttttaagagagtttattggctcattcaacggataagtccagtggtaaaactagttttcaggcatgtctggatctctgggttcaaacaatgtcatcaggacttggtctctctgtcttccagcttagcttctttagcttcaatatcagacaaacctccatgtggttgcaaaggtggcctgtctgctctgtgtctgtatgttctttagcacattctctgttttccttgacagccaaacttcttgaaagaattgtcttcacatgctgtgtccacttcatcctgtcttttcaattcaattttctaaaaggaggcagaaaactagagaagcgacagtgaggagccactgggccacacttcatttcaccttaagactgactcagagaaaaacaagagggtacgactcagatccccggggccagcagcagggccgcggggcacgactggataaccgcttgtgaagaaaattttaagagagccctcacgaccctttagcgcatcctaaaagccc

SEQ ID NO: 146807 - DNA, 850 bp, Homo Sapiens
ggctcccccaggaacccttggagaggtaccccccgggcttgtttgtggcctttccacacgtgggtaccccaacccttttcccagaatttcccccctgagggtcggatttgtgcttaaggatggtccaaataaaagaattgattgtccaatggggcaaaaccacagttctgcatgctcaattaagttcctttcattgcccaagatgctattataaggtgaggttatgacatcatcctcaccagaaggataaatggaagtcacaaatctgtatacttctgggaattcgtcttcaagcacctttaaaagaaatgtgccaagtccagatcctgttcctcctcccatggaatgtattataaagaaacactgcaagcaatcacagtgctctgccgactttctgaatttctctaaaatctggtcttggtaaagactgccgaaaactttgtgacccacggcccaattatttcctgagccagaaatatcagtgatgagctgtttcgtatcaaatacatctctcagtggtccctgcagaatttcattcactaccccttcttccatatcaatcaagactgctcgtgcttttaaagaacatatttttcccttggaaatacttccaccatcaccaaccactctggtgtccacatttctaaagaagctgcttattgcctcatcataaattcctttctggttgaccgcggcgtgctcccttagtgccaggtcccagaagcagcagccgatctggtttccgcactggccgacctgtacgaccaccgactgggtcatggtggtgcgccgccggctccgggagcttgctagcccgcggccgcttctgcattcccccagcaacggcccc

SEQ ID NO: 146808 - DNA, 923 bp, Homo Sapiens
cgcgaggagggttgctagtggagaagcaaccttggccatggaccagccggctggcctgcaggtggactacgtcttccggggtgtggagcatgccgtgcgggtgatggtttctgggcaggtgctggagctggaggtggaggaccggatgacggctgaccagtggcggggcgagttcgatgctggctagtagtgagtcagtcaccctggacctgctgacctacacagacctggagtccctgcggaaccgcaagatggggggccgcccaggctccttggcccccaggtcggcccagctcaactccaagctgctacctgatcctcatctactccgtggagtttgacaggattcactacccgctgcccctcccgtaccagggcaagccagaccccgtggttctgcaggtcatcatccggtcactgaatggaggaactggtgccgcctgcaagggctggatggccagaacactcgggacaccggggagaatgagatctggcacctgcgggagcaggtgtcgcgcctggcgtccgagaagcgggagctggaggcgcagctgggccgatcgcgcgaggaggcgctggccgggcgcgcggcacgccaggaggccgaggcgctgcgcgggctggtgcgcgggctggagctggagctgcggcaggagcgcggcctcgggcacagggtggccggccgtcgcggccaggactgccgccgtctggccaaggagctcgaggaggcgaaggcatcggagcggagcctgcgcgcccggctgaagacgctgaccagcgagctggcattgtacaagagggggaggcggactccgccggtgcagccgcccccgacgcgggaggaccgggcctcatcgtcccgggagcgctccgcgtcgcgaggccgcggcgccgcgcgctcctcatcccgggagagcggccgc

SEQ ID NO: 146809 - DNA, 785 bp, Homo Sapiens
tttgtgaaaatagactttattataataaaatgtctttttaaacaaattcccccaccattccacacccctggagaccaaggtcaaggtgggggttcagtcaaactatctcccaccacagcaaaggtaacatgcaaagacacactcacccctcagagggtgggggatggagtggatcgggtaacggcggataacccctaccccactctgaacagggaatgtatgaaaatagctgcataaatctgtccttttctccagcccctggactccaacaggggttagaagaaaactatgcaaaagaacttgaatccaatgagcaagatagggcaaacccaactccgctttcggccccgctggccccagggtctttgggggcgggaccttacaggggccagcaggccccggcagggaaggatggagcacgacgggggcagggtggggcccactttggcttggcctttctccttcctgggcctgtgcagtggaagcgaggtggaggaagctgaactgaggcactgagtatatacatatatacaggctccgcccgcctgcccgctggggagatggggctccaataaaatccagtgcaaactttccttcaggggagggaagacaggatcaggacagccagagccatcagggggcacaggctcctttctccctccagggcccgtcctggggctgggaagggtggcagaagggactagcgcagcactgtgggacactagtagacgaggtgggtggaccaggacgcgagggtcctgggtccaggataacacgttcgcgag

SEQ ID NO: 146810 - DNA, 475 bp, Homo Sapiens
tttttaagttaaacaaggaaggatttattaaacatgtaacttcgttggaaccaacaaagctactttcatgtttttatgttgttctttttagatatttagattaaccagataatcttaaattatcttagaaattagaaagtttctgcagtattgttacatttgttccaagtatacaagttgtttctatgcactaccttctcaatcctgtgaaagaagtctattaccaaagcaatttctaacacattgctcaaaagacacagtaacgttgtgaaaggcattttgttggatttagtcccattttagtatccccttaaaaagtttgactgatgactctggatattcagccaacagtgttgtgtcaaaaacttgcttgaatttatctaaaaattcatagtcggtgctgaacctgaatttgtttgcccaaagcagcaccgtccctggctgggaaaggtacaccatggtggtgagcagcttg

SEQ ID NO: 146811 - DNA, 613 bp, Homo Sapiens
  misc_feature (513)..(559): n is a, c, g, or t
  misc_feature (571)..(571): n is a, c, g, or t
tttttcaaaaacagattctaacaagtacaaagaaataattaacaaaagctcatgtgtgcccaaaataaagatagagatgtaggcataaactctataccatggacaccttctatgagtcacgaaaatatcagtcatatatatactggcacttagtctggtacatgcaaatttcaaggcaattcctctccatctgagaacgaggaattgtgtcattttaaggccaaattgcagtccaattgccacaagtgcaaaaccaccccacataaccacctatttgtaatcatggaatgatagcctcaaccaaccaattgtgccatacatcattgttaagacttctttggctcattttagtatagacttaaaagtaaaaattgcaaaagatgataaacatctattattttgtaaaagttacaagctcccattccaggtgtcagccctgtagtggttctccagcctagctgcacataagaagcatcaccaggacagccaggatgattcaaccgaagattccgnnnnnnnnnnnnnnnnnnnnnnnnnnnnnnnnnnnnnnnnnnnnnnnacgtgtgagggnacagatgtcaactatcagctgaatgtagctcttcaatctgag

SEQ ID NO: 146812 - DNA, 1030 bp, Homo Sapiens
  misc_feature (748)..(786): n is a, c, g, or t
  misc_feature (881)..(966): n is a, c, g, or t
ccccattcccaatttttacccccccaaaacgtcccctctgagaccatctctgaagtgccaacctgcctctccttcctccttcttgcaccttaaacctggagtcatactgcgatgcacatgaccgatgctgaacacgttcctgtaaccaccatgtaggtttccacaccatccacggtcaggcggtacatgcccaggaactgtggcacaaagcgtgttgccatgacactccactataaactggtggtatttctttaagatgtttgtgcatctccgccacgtcctcgctggacacagtcttgatgacaaagcgccggtcgtaggtggtgaggaaacgcgtgccacaccgaccctggctgtcactgttgatgggggcgctgcgcgtcactgaattctggtaatcctgatcatcaattccaacctctcccgaaggtttcggaacaccatggggcaatactccttaaacttaaagcggctgggcaggttctccttattgaagagatgattgtccaccttgatcttgctgtaggctttgaagtcatctggcattagcatgacaggaacaggaacattgctcagctcattgatcgtgtggttcaccccccacatcaggacgctgaggatcggctcgctggcccggaatagcttcactttctggcacacgaaatgcttcttcttggtcttggtcttgctggcgctgagcggcgccaccgccaccgccgtggtgctggtgcagttggacgacatgccnnnnnnnnnnnnnnnnnnnnnnnnnnnnnnnnnnnnnnnagacagcgcacaagccagcggcctcaggcctcccccggaccgatccccacccccgctccctcaccgcgccatggtcgcgcccgtcccgttacctnnnnnnnnnnnnnnnnnnnnnnnnnnnnnnnnnnnnnnnnnnnnnnnnnnnnnnnnnnnnnnnnnnnnnnnnnnnnnnnnnnnnnncccccgggcggtgcagccgccctgcagtcccctggccccgtcctccccgtccgcatggtacggc

SEQ ID NO: 146813 - DNA, 447 bp, Homo Sapiens
gagggcgaggagcgctgcgctgcagcaggaggacaaggacatccagatgaaggcatcatcagcaggttgatgtccgtggaggaagaactgaagaaggaccacgcagagatgcaagcggctgtggactccaaacagaagatcattgatgcccaggagaagcgcattgcctcgttggatgccgccaatgcccgcctcatgagtgccctgacccagctgaaagagaggtacagcatgcaagcccgtaacggcatctcccccaccaaccccaccaaattgcagattactgagaacggcgagttcagaaacagcagcaattgttaacctgcctgaggagggaggaagctacccaaggagagggggactatggtggccaagggcagggtctcggcctggggaggcacccacggttgcagccccagcgcgggtgtcaggaggccgagcctcccc

SEQ ID NO: 146814 - DNA, 325 bp, Homo Sapiens
tgaaaagagccagaactgggaactacacccgctcatcgacggagctcggacaaacccacctccacccccaccatacccagcccatacatgagcccctgggctgagctgcgcggccccggccaggcagacaggccagggcactgctgtgcacaatgcagcggtttagctgaatgtgattgctcaggcagctagccagtcaggccccactgcggagtcccgcgtgggcatctcggccgggcgcccagccaggagccagccggtggcccaccagccagcatgggccctgggccgccgtagttaaatcttgagctctgtttgaccaagc

SEQ ID NO: 146815 - DNA, 1056 bp, Homo Sapiens
gagcacaggtaaagtgtctctttccttttaatggctcaccatggagctgtagctaaatttctgtgctcttacccctttattcatgtagttcctcctatcaggaatatcctgcccactctctgcttaactatgacaagaggtcatctgtccaaagagaaagaagagagtttgtggatttaggagaaaagaaaagactccaaatactgctatgggcatttatttaaaaagagaaatgaccaaagaggttaacaagtatttagatgaagctgggcagttgtagtctgtggtgctcttggtctgcacaaatcttcctcttcctccagcagtgctgtatggatgttgttgaatgttgaggtctgtctgcattttctcattttcatgccaagtcaatcactggatctggctgtcttcctttctgtcctacctatctttgcttgttttctctctctttcctttgcagtgttaaataaaaatttattcccccaaaatttggtgttctcattttgtttgacttattttactatgttgatgaagagggaggaaaagtttttctggggtacaaaaacgcatatatttatccgatatttgaggactatactacccactttggtgaaagctgttctgtttatttactggagcttaggagggaagaaggcaagtttgccctgatggtgaggagcaaagtcaaggattacactgatttgccccagcttatatttccacagattcttggtatatttagcatctcttcccctgtgccctgttgcattcttctctgtgcctattgtaatgagaaagatactaagccatagtcagactcatcttgctgtagctgttttaaaagtttcttttggcacaaggcttacaaagcttgaagggccacaaggctggtgaccagcattacccagaccttttcttgtaggaagcctgaactgagagtgccttcattatggctgaactcaaggtgttgtctttgtttcaatcccgtcactgtgtagttccctgtctccctcagcctcttctttcttatgccatacagtacagattaagtttagt

SEQ ID NO: 146816 - DNA, 556 bp, Homo Sapiens
  misc_feature (459)..(459): n is a, c, g, or t
  misc_feature (522)..(522): n is a, c, g, or t
tcccagtaatcatttcacattaggttcctcggagagtcatcttgccttgattctgtgcttgattttgaatgtttttcatttttctttttgctcacaagctctctgaatccctgaattattttttaggtgggattgctggagggattccgtttgcccctccagattctctgctctctgccccaggggacttggtataaaccaaggcgatggcctttcatgccctctggcctttggttgggtttgattcatggggagccctagcaggagagcagagagaggagcggagaaggttccgagtgcgtcctccccagcccccttccctgcaaagctgcctccaactggctgcatggcctgactgacagaaggtcactgctcctctggggctgactttacccaactctccttctaggctccagaaacacttggatgcccacatgggaaagagcagtgacagttctngctgctgcaccccaggtgcccactggcccttgtattaatagctcccctagactccactcacancctctgcagtgtaaataataaataacccctccct

SEQ ID NO: 146817 - DNA, 452 bp, Homo Sapiens
  misc_feature (441)..(441): n is a, c, g, or t
acttatatattagcttatttaatcctcacaacgatcctaatagtcagtactattactattcccattttacagatgagaaaatattgagctgtaatgtgcccaggatcacagacagtcagctgtagagctgggttttgaacccaggagtctgactccacagtccatgctcttaacctccacttcaggtgtcagcaaagtttttctgggacatggctttaggttcaattcctgtccccacagcctccagcttcttgtttctctcctggggaagagcagtgtccctggaaggcagagctctgtgcccaggccccgtaggggccgctcctcgctggcctttggatgcgaggccattccttgagcgcggccttccccgggcagggagggccaaggtggctggagtccctacagtcgggcctcggcccgcccggggctttgtgcggngggcgcctcta

SEQ ID NO: 146818 - DNA, 455 bp, Homo Sapiens
gttcaattacagctttggcaacaggtgaaacaaaacattcatgggcatcccctcgcaccagcttcctcaggtttatgtctgttactccatccacatctttttctggtttcaaggcattgaggactttgttgctaaacaagttctcagagatctgaagggcaaggccatgtactctggtatcttcattgatctttaagatttcatctataatctcggcttcactgctatctggagggaggcaaatgtgagtgatgttcagaccagcctcctcagccaaattctggttgatttcctgcatcaagttgtcgtcacctgcctggataattgcaagaaccggcttgaaggcagggtttttttcttgcaataaacttagaacttcttttgaattctgaatgacttctctgacgatggagtcccgcgccgcgggcgttcggccgccggggctgcagctgctc

SEQ ID NO: 146819 - DNA, 1464 bp, Homo Sapiens
  misc_feature (75)..(75): n is a, c, g, or t
  misc_feature (86)..(86): n is a, c, g, or t
  misc_feature (175)..(175): n is a, c, g, or t
  misc_feature (192)..(192): n is a, c, g, or t
  misc_feature (194)..(194): n is a, c, g, or t
  misc_feature (196)..(198): n is a, c, g, or t
tggggtagaaattcccaaagccacctaggtccatggccccagggattcttccctaaggaaaaccaggctaatganccatgtttcancttatcctactgggggccccgcggcgcccaacacgaattggtctacgaaaggcttctcgtagggcccgaggtcgggccgacatgttaangtttttcaatgaagtcncncnnntgcatgcacataatttaaaaaaaatatattcaagacaccgaaatcagttaacaaatataagaactaaacattaattagtgacagtaaaatggcagaagcaaatataaaatacaaaaaacagctttactcagactttttgactgccatgtcctcctttagaaggactacagtttggctacttggtctcttctggggcagatgtggcatcctgaggtgtgttagcttctgccggtgcagatacagctcctaccacagtaggggtggtctcagataaagcagggatggcttctggagtggaagtggctcctgtctcactgggggtggtgtcagtttgaaaggctggagtttcttgacggcagctggtgtctgttggactgggtatgatgtcagcttgaacagtcatggcctcttcttctgtttccaattctgtttcttgattttgaacttcctcaccctcttctaccatagcaggtggtagttgtaataaagtctgatgataatgatgtgtagtctgtatcaaatgcatgtacatgttgtatacaaagtttgccatctggggcatattttttattatttggtacttcatgagatggtctctctccattctttctagtagttgggaaaggttctgttggaattatatgcaaatgaagggggcgagctgtgagctgactgaaagctggagtcagttcaaaacagttttggaagagggatactctggcgaagatataaagtccaagtctggctctagacatggccactaccaagcgacggacatccctcagatggcccactgcctggttcgtaccagagaaagaagaatatagtcattctgttgaccttgaaatctatcacagttgtcaccttgtttggtcttccatcaatggattgtttccacatcgtctattgatgatgtcgcgaataagatgcttttggccattatatgttgttagaatactgattttgtcagcagggtaaccaagtaaacacatgtacataaaaagtgctactacatattctgcctctccaagattctgatagaagtaaggattaggttcagattctcccactccttgaaaatcttcaacattaatgagctggaagtcatacagtaagccagcatttgctgtactaaactctggcagagctgcacatggggtaagtttcctagattcttgtatcgccagttgtagagcggacgcgtgggtcgacgatatcccggattccgaccgtaccactgctttttgtaccctgtcatagtccatg

SEQ ID NO: 146820 - DNA, 469 bp, Homo Sapiens
tttgcaaggaacattttattccataactgtctccaccgaagccgcagaagcaaagccaggagcagaatccattctgccagcgctgggctctggggagacatctgtgccctcaccatggaggacagaaggcaggggcctcccgactccttggtcctgcctggggtgctcctgtccctctttcttgctgggggacctaccccaccctccccctcccacctcagccacagaggaacaagggagacaaactgagggctctgcagtccccgttcaaggccaacataatagtcgtgtggccccagcccagctaggcgcatcctctgcggcatggcagcggtgaccaagcacagccaacgtcagctccgctccctgccgtctgagagctgaccacaggcagatgagatgcccactccctgttgccataacacaggaaaggcgttggcggccaccctcccaagaaggcatggagcct

SEQ ID NO: 146821 - DNA, 1231 bp, Homo Sapiens
  misc_feature (1143)..(1178): n is a, c, g, or t
acagtaactctagcggttctaaggtagcgaggcctgggtggcgaattcggcacgaggggaagacgcgactcagaagtgggcccaggagtgaaggccaagaagcccatccagactaagttccgaatgccactcttgaactgggtggcatagaaacccagccagatcaccggcactgtcttcacagagctcaaggatgagaaggtgctgcaggagctagacatgagtgattttgaggaacagttcaagaccaagtcccaaggccccagcctggacctcagcgctctcaagagtaaggcagcccagaaggcccccagcaaggcgacactcatcgaggccaaccgggccaagaacttggccatcaccctgcggaagggcaacctgggggccgagcgcttttgccacgccattgaggcgtacgacctgcaggctctgggcctggacttcctggagctgctgatgcgcttcctgcccacagagtatgagcgcagcctcatcacccgcttggagcgggagcagcggccaatggaggagcctgtcagaggaggaccgcttcatgctatgcttcagaccgcatcccgcgacctgccggagcgcatgaccacactcaccttcctgggcaacttcccggacacagcccagctgctcatgccgcaactgaatgccatcattgcagcctcaatgtccatcaagtcctctgacaaactccgccagatcctggagattgtcctggcctttggcaactacatgaacagtagcaagcgtggggcagcctatggcttccggctccagagcctggatgcgctgttggagatgaagtcgactgatcgcaagcagacgctgctgcactacctggtgaaggtcattgctgagaagtacccgcaactcacaggcttccacagcgacctgcactttctggacaaggcgggctcagtgtccctggacagtgtcctggcggacgtgcgctccctgcagcgaggcctagagttgacacagagagagtttgtgcggcaggatgactgcatggtgctcaaggagttcctgagggccaactcgcccaccatggacaagctgctggcagacagcaagacggcttcaggaggccttttgagtcttgggtgggagtaccttccggagagaaccccnnnnnnnnnnnnnnnnnnnnnnnnnnnnnnnnnnnntcttttaaccgctttctttaagggccctagcaggacaactggaccagggaggc

SEQ ID NO: 146822 - DNA, 731 bp, Homo Sapiens
gcaaacatctttattaatctcatataaaaataaggtccatggacggttcctcggggctggggctttgcgggggcgaggtgcactttataagttacaggccaggctcctgctgaggctaagtatggctatttggagggggctttagggtgggtgctgcaagcagcatttgggggaaggggcgggcgatgctgccctctgtggccaagaggaggatgcaccagcccgtttgaggcgggccacagcggaggaggggctgcccggccagccgagctgaggaccaccttccttgagcctcagcctgtccacggccccacacccctgcagaatccacctgcagaaatagcggctacagcgagaggtcggaggtgacctgcagtggggggcccgggggacgccgacgggcactgcggcggcctgtgtctgcgcggatgtagggctggttccgcagatctgtgatgatgtcttcaatggccccatcacggtcgctctcataaatgagtggctccttctgctgcctccgtttcagctcagagatgaggtccatctgtggccgccgggcctttggcggtgacttgggtgctgggggctcccctttgcccggggtatcagcgcctgcctcctgggcagcggcttcttttttccactgttccaccgacgcgtgggtcgacgatatcccgggattccgaccgtaccagcctgctttttttaaccacgtgttctatgttccatgg

SEQ ID NO: 146823 - DNA, 456 bp, Homo Sapiens
  misc_feature (142)..(160): n is a, c, g, or t
  misc_feature (173)..(229): n is a, c, g, or t
tcagaggtcaaatcacttttattctttaaggattcagtgtaacatccttttctttaataaaataattaaacactggcagaaattaacttattcaaaaagtcatactaatactttgttatgactttttatagaaaaacaaacnnnnnnnnnnnnnnnnnnngagatggagtctnnnnnnnnnnnnnnnnnnnnnnnnnnnnnnnnnnnnnnnnnnnnnnnnnnnnnnnnngaaacttgctttcaaggatgtgtaaaatccatgttaaaaggctatagtctcgtatgatttcatacgcagatctggcaacctgggcagcattctgtagaatttccagaatccaattctgtgctgcctcgtcacacagcgggctgtggaagaaggacaggatgatgtggaagatgccacgccgggcacacagttcgtagcactgcttgtcacggatcccctgccgcaga

SEQ ID NO: 146824 - DNA, 1147 bp, Homo Sapiens
  misc_feature (1092)..(1092): n is a, c, g, or t
  misc_feature (1098)..(1098): n is a, c, g, or t
cagtcgacggtaccggacatatgcccgggaattcggccattacggccggggtgggaaaagcttcagagttagctctgatcttattaaacaccacagaattcacactggagagaaaccctataaatgtcaacaatgtgacaggaggtttagatggagttcagatcttaataagcacttcatgacccatcaaggaataaaaccatatagatgctcatggtgtgggaaaagctttagtcataacacaaatctacacacacaccaaagaattcacacaggagagaagccctttaaatgtgatgaatgtggaaaaagattcattcagaactcccaccttattaaacaccagagaactcacacaggtgagcagccttatacatgtagcttatgcaagagaaactttagtaggcgatcgagccttcttagacaccagaaactccacagaagaagggaagcatgtctagtgtctccaaactgaggaaagttgccatgtagagcttgactttagaagtggtgaaagaatacaaaattatgaggcacccaatgataggaatctgtgattaataaaacatttgggaagggtacatgttacacttcacaaaaaggaatctaagctgtctgttttattcagcattgcatcttctgtgcctagcacaagagttggatacataaggagtactttataaataacaaaatgaaagtgtagtgatgagattcctttagcgtatctatctatatgtatatatctggttattcaaaggttccccacccccagtcatctaaatttttcaggtatcaagtgctcaacagacatatgatagtcaaggctcttagtctcattttttactctttgtcaagagaaatggaaaataagagtacttgggccctcttaagggagctcagagagaattactaaattagggacagtttcaatagttatcattctgtctacatgaacaatcaagaccaggactcagggaactttactctgtaacagaaagagaggattcagtgtttgccctgggagaattgtcccattcttgttgcttctctcctgagtacccactaccacaatgtcttctgtcagggattacnagtagncaagggaaggtctgaatgtaaagacaggcctagggaccttggcagcact

SEQ ID NO: 146825 - DNA, 510 bp, Homo Sapiens
  misc_feature (420)..(434): n is a, c, g, or t
cctgatttagtggaggcaactatttattccctcccttgttccaggaaaaatgtaaggtggcttagaagatagactcagaatatactagaaagtataattataggttaaataaaaaagaaaatagagaaagcagaatttgggggaatagcacatgaagccatttaagaaaaggtcaggaaatatatcctaaagtatattaccattattctcccacagtgattttctggaaatattgccaaataccattaatttgtaagaaaactaatattaaagtactggtaaactagagatgctgatccaatttgttaaattatttatttaccctgatgaagcagatgattataaaaatgtgtgtgcttttctttgtgcttggataaaagaagttttcctaaataccatatattggtagagtataggtgnnnnnnnnnnnnnnntttgggcacccttactgaatttctaccccggccgtaatggccgaattcccgggcatatgtccggtaccgtcgactg

SEQ ID NO: 146826 - DNA, 913 bp, Homo Sapiens
ctgttggcgccctattattctctgttacttgggagtctatgccaggtgtattggtgttgtactttggagtgctgattcttgcattgtagccgatgttcgagcccagtgcacttcagtcctgggtgatcagacctgagacttccgtcttctgtttgtcccgtttgttatctttttcttacccgttacatttgtagaaaaatgccaattctctggtcacaaactccactaagtttagcacttaaggtctctgcacgtgttataaacgtaatttaaaatactgttaattctataattccattggtaaaataatgtgacttggaatatggcagtcttcatgttgagggcaatgatccacagttttgttctgtctgtttaatttcttaggcgtgaacagttatccagaagaacagcaccctccaccactggtctgggcttgaggttcatcatcaataatctgtacacctcgccttgcagttcccggctgactagagccattgccttttgctctctcatccacttgtgctgtttctatcatccttttacaaaggtcaagaaagagttcctcaattcctttgttctgtttggctgaagtatgataatgttttgctcccacagattctgcatacgactctgcttcttgaatggaaacatgtctctccttttccaagtctattttattaccaactatacataaacagatttcatttcccaacattttccgtaattctttgacccagttttttaccttctgaaaagaatcttcatctgttatgtcataaactaaaatcgctccatttgaatctctgtagtaaattggacccaatgcatggaatctctcttgacctgccgtatcccatatggcaaggtttctctttcctcgtgcggaattcgccacccaggcctcgctaccttg

SEQ ID NO: 146827 - DNA, 906 bp, Homo Sapiens
gtccattgattgtacctgtagataatacagcgcagttaatgtagaatgtgtaacttgagtaattttcccttattatacgatacatccctttatgacgaggtccaaaaagcaccaaaaaatggcagcaatctcaaagtgtgcagtaaattttaatataccaattttggttgcaagacttatttgtagccatatatcttgctttatatgtatccagacaataaacgctttttttggcatagaggcttcaacctggttcttaagaataatctcagcagacccaactgaacttgatgcaacaacatattttatgttttattattgctgaggcaaaatcacaccaccataaaatgcaaggaaaacccatgtttaaaaggcagaatttctcttttcttgaggctttgttaatacaaaggtcaaaatttcacctttgaactaaaaaaagaaataaagaataggcagtgtaagtaacaaaattgtcatcatgaatatatttctaaatttttatttatttataagtcaacattagcccaaaatatttagataactaatacggcccttgaaaacttaaatttcttaaagagaaaagcaaattttcaaaaaatcatcaggtcacaagaacacaattaattgtacagttatacattttatttaacccctatgaccatgtaaactaagactcaaagtttaaattagcattacagaacagaaaaggaaggttttctgtcactcttgaggtatttactattttttaaagaatacacatttaagaatgaatcaatgttttttagaaaatcaaataatggcatttctgcagctatcaattttttgatacttttgaaaaagtcaagtaatgtatcccggccgtaatggccgaattcccgggcatatgtccggtaccgtcgactg

SEQ ID NO: 146828 - DNA, 1035 bp, Homo Sapiens
  misc_feature (138)..(138): n is a, c, g, or t
  misc_feature (925)..(959): n is a, c, g, or t
agctttctcaagcattcccagaaagatgcaagcaacaatcaaaaactgaattctcaggagatctctccagtagcaggcagaccatgccagccacagaacaccaaacaggacatatacaatacacatcaccatgaaaanaatcatcaagggatagtcttcaagtgtgaggtattcatagggaccccttcacttcaacagtcatggtaaaaagattactcagtgaattttcttttgatgattcctttgaggatgaaatgccaatatgtacaataaaaatgtatggtgcatcttgccaagtttgcaatggttcatgcattgcggttttgtctccaataaaggtaaggtttgttccattctccttagcctcctgtttttctcctaaaagaggcagtcgatgcataaaatctccagaaaaggtctgtgttttaaagagttcactgcagttctggaacaattttgatgatgtttgatatttcccagacaagcctcttttttccttaagtttttccaaatacaactctacttcttctgccttgaagttatagatttcattgtaacaatcagcgcttttcagataccaggttatattcaaagacaggtcacaaggttctccatcaaacttcaggaagatagtggtatttctgaagaggatctttcccaaactaaaataatttttccccgacggtatcggaatgtgccatttggaccggtcggcagcagctacggttgccggtcccgcactgaaaaacgacagtggtgacgggtgagctcccagaagcagaagaatgacaggcaacacctgaagccacgcagcagccgccatcttcacagccgtggagtgcctaccgaaagcatttcaccctcttccggttcccccggccgtaatggccgaattcccgggcatatgtccggtaccgtcgactgnnnnnnnnnnnnnnnnnnnnnnnnnnnnnnnnnnncggccgcttcctcgctcactgacttcgctgcgctcgtcgttcgctctcagagctaggccctatagtgattatacaa

SEQ ID NO: 146829 - DNA, 1108 bp, Homo Sapiens
aagaaatggctccccccgttgcaaaggccccagatccggtttcgcccttttaataggtcaaaaacttcactttgggaatccagttcggctgggtattgggtctttttctttccataacacccattaacatgttcactataaagcacgtactcatgtacaccaggaggcagggcctctgagagtcccagacatccgtttttcagtggctttacagcatctgtcaatgcagctggcaacatcctttagagtatccacccagatcctcttctgacgctgaccacagaatatgaattgggccatattctttcatttcatcaaaatattccctttcttccttataaattctctgagatattttatctatcaaatttattttctggctaaatagttcaataaagttattcatttccatgaactcctctgggcggtttttaactcctctcattgaggacgcaacagctctgacggtttgccccatcctgcttagcaagccaggaccttgcttcttgtgagaagagagttcccaagcttgtgcagtgagaaaaattttgaagtcttcattaaatgttaaagttggatgatcagcaattcggttcaaaaatttatgtaaagccttcctgcgtgtctcaatgaagtcatcgttaaagcgttccaccattccttttactataaacttttctggcaatggtggaataatcagagtggggtgtgcttcttccagttttcccttcaaccaaaggaaatcttgatatcgtctcctaacttcaaattcactggagtcaaattccccacgagatgtcttagtaataatcctatacgtaatgaaagtttctattgtagtaacatgactttcaggttcatcaactgtgatgaagagatcctttaaatctggttcatcctcaaacttgatttggtttatcattgataaaggggatgttggcatcatagggctgaaggagttcatgtccatcaatgaggcatccttgctgaacacctcccaggtcgtcctcgtcctcgtccagatccagcacctccgcctgcagcagggcggaagagccgctgccgcacggcgtgggtcgacgatatcccggataccggacgtgaccag

SEQ ID NO: 146830 - DNA, 542 bp, Homo Sapiens
taaattactcaaacttaatcagcttaaactttaccctataattgtggaaaagtaatttttagaaaaacctgtaattgtgttccatcttttgtcagttcttttctctaatctagtagttttcaagtggattttgcccatcagcagatattgtatgtggcaatgcctacagacatttttgtttatcacaactgaaggtggggcagtgcaactggcatctagtgggtagaaaccaatgatgctgctaaacatcttgcaatgcactggagagtcccttgcaacaatcatctggcccaaaacgtcatagtgctgaggttgagaaactcctttaatgccatcgttctgaatgttaactcattactaagatacagcaatggaaagttgtccattgttgacttaagagcccctcattctccaggtatatgggttcttaaggtgtggcctagggaaccctggggtgacgcaaaaaaaatatgaataaaaacacagatgagaacccaactattctcttaaattagctatgaagagatgtactactcttctca

SEQ ID NO: 146831 - DNA, 1070 bp, Homo Sapiens
  misc_feature (962)..(996): n is a, c, g, or t
gggcgggggccccgtaaacgccacaactcggggggctaggccgggaaaatggcgtgaacccgggaggtggagggttcactggagcccggagttgggccacgcaatccagccctgggcgacaagaagcggagactttttccaaaagaaaagcaaaaaaggaacggaatgtactggagatgtatttgataaccaagtttttaggtaaattttcaccagtattagttctatttgcaaactgaaaaatgttgtaggcttaatataaaataaccacattagtgaacattatatctcttagaagaaaggccatattttgctcctgcttctgtaaaaatattatttgtttgaaggggaaataatggtagtgtgacctttcacttaattcctactcccttaatgtgagagagacaaaatgagctgaagaaggaaaattctggagttacactccacaaccttgaacatactgacggacatctctgttttgacaacgatttctccatgccacccatgctctaatgccttgtggatcacggacaaccctctttgcacaagctacagcatcagcgatgttatcttgcagcaaagcactgcaggataaatgacaggcattaactgctcctggggttttgccatcattacaccagtagcggctattgatctgaaatatcccataatcagtgcttctgtctccagcattgtagtttgtagctcgtgtgttgtaaccactctcccatttggccaaacacatccagtttgctaggctgattcccctgtagccatccattcccaatcttttcagagttctggccaactcacacctttcaaagaccttgcctggaccgtaacagaaaggaggacaagccccagaacaatgagagccttcatgttgactgctaggtcagagtgctaggctccccggccgtaatggccgaattcccgggcatatgtccggtaccgtcgactgnnnnnnnnnnnnnnnnnnnnnnnnnnnnnnnnnnncgccgcttcctcgctcaatgactcgctgcgctcgtcgttcggcgtaagcgggcgccctatatgatcatcattct

SEQ ID NO: 146832 - DNA, 537 bp, Homo Sapiens
  misc_feature (73)..(73): n is a, c, g, or t
atcctctgcccgtcatgtgcaatttcatgtcggtatctctcttctggtagatcacaggataggttgtttggtntcagttgtgtccactctctggtattgagatctactttgtgcaggtctgtgctgtaaatatagccggttgtacctccaaagacataaagggagccattgatgatggccatagcctgtccatatatacgactgggtttcttcccccgacagctgagcaaagcccatctcttatacttcacattacacacatggacgtcattgccgttgctctctccaaatgggatgcccgtatctccaaatactaacaggttgtttccatgcagcacaagtgacatagatgccaattcccggggcatgtagccatctgtgcccatctggtgccatactcctgtagcaaaatgatacctccagagttccctgaagagaggatagtcttcattatcaggccctcccgattcatcataatctgggttataacctccaaacacatatagagaaaggtaccctctgccacacagcgatgtc

SEQ ID NO: 146833 - DNA, 1355 bp, Homo Sapiens
  misc_feature (123)..(123): n is a, c, g, or t
  misc_feature (260)..(260): n is a, c, g, or t
  misc_feature (1296)..(1308): n is a, c, g, or t
ttttcaattgcttggggagggagaacttttcaggaagaacctggagggcttcggaattctggacttagtgggcttgggatgggacaggcctgttgaaacttcactctttaacttgggagtccncgggagtcattttcggcaggggtggaacggactgcccaggctattctcatttgcagaaatcttttccccttcctgatgggtgatgcagacctcaggacctgggggcacattctccttttgctccattttatgaattntgatttcgccaccactggctttcagctcatttgtatagttgggttgagctgctttgtttgggacacagcttgccctggtacttggcccattcgatcctttatagaggtttctgagagggcgtggaagttccagatttcgtctactctcatttttctccgagtcaaatgtagaagatgacaactgacctgggcctatttccaggtcatctagagaatagctgttttcagagatcttccttccacttgcacttcggctttgggcccggagaatcttagtttgagttggttcacctttctcaaacatcatcttaagcctgttcagcggaacattatatttctctattttgcccgaagcatctgtgttttcactgatttctgatttttctacttcatgcctggattctcctagacaattttccatttttttactttctgttgagtggtctttaagatcctcaccgtccttgatgtggggatatcgaccctgaacgagggcttcaggaggtgacctgagtctagatctggggtggatttgttcttcttggtcagctttggctccagaagcagcgtggcttgtcacttcagcaggaggatggtctgctctgtgcctaatctcagtgctgctgttccgtagagagtctgtgtgagactctgctcccagccctgggttctcccacttcttctttaacacagtcagggtcccctttctaaagtgctgggagagattttcggtgttacttctcttcttctccatgtttgtttcttcagctgctttctggtacttggagaatatttccaccatagccgatgacttgttcttgttgacaagagaaagttctttggctgttaccctcaatgatagtgaggtccattgccgtctattaaatggagatgattccatcttgtctacagacactgaaatacctggctaaaagccgcctttcctctgcgctgctaccagccctgtcacaggtcccggcgctctacctagcgcacctgtcgcgaccaagctgctaacacctactgctcctgcggnnnnnnnnnnnnnggccgtaatggccgaattcccgggcatatgtccggtaccgtcgactg

SEQ ID NO: 146834 - DNA, 946 bp, Homo Sapiens
  misc_feature (821)..(855): n is a, c, g, or t
  misc_feature (859)..(904): n is a, c, g, or t
tgaccacatgagatttgtcacattttggcgcttgtctgtgtccacttctcgtcggggtttgcaggtaatgatggccgtggccctgcagcagaaaaccttccctacatttgatggacacattctgatcaacataaaactccttttcagacagcagagcattctcgggaatcacaaaaggaacagggcatggatttggtttgcagagagggactgggttggctccaggttccattttctgtgcagtgtgcctcagatggcccttcaagactgtagcctctgttgcaggaatataccacgttgggtccagtcgtcctgttttcaatgtcagctttcccattgagaaattcaagtggagtttcacacctggtctctttgcatattgccacccctccactccactgtctgttctcctggcagacacgttccctgttcccctctagttcatagccaggctcacactgataaataattgtgctttcaaaggtgtatttactgccaaccacaaatccatgttctggactttcaggtttcccacaagaaactggactgcaagattcatcggagaatggtggctcccaggttccatcaagctgacatactgatatgttaactccctcaaaggtatacccttctgcacatgacacagaaacttgcctattcacactgaaatcgtccccatgaacaagtatatgtgttatgttttccgggagaggacattttttaggactgcaggagattctctcagggaaccagcgaccatctttctgacacccggccgtaatggccgaattcccgggcatatgtccggtaccgtcgactgnnnnnnnnnnnnnnnnnnnnnnnnnnnnnnnnnnncggnnnnnnnnnnnnnnnnnnnnnnnnnnnnnnnnnnnnnnnnnnnnnntaagcgtgccccctatagtgagtcgatacaagggttcttttt

SEQ ID NO: 146835 - DNA, 1339 bp, Homo Sapiens
tcttgctgtgttgttaagatctcatcaatccctcctgttctggaagccatatcaccctatggatcccatcactcatcaactacaccatccgataccacatgggtcacctactctcaggcttccacattctttttcactgaataatagatccccaaaagtggagaccacttgtaccatgtccctctcagaaggatcacacaggcggtagctcttcagggtgtcccagtggctgtttcctgtctatgactccagtgtctgggtccaccgtttgctcaatatacacctggggcatgccattaccttttctcacttcctacagctacccattaggagttcatcccaggtatcctcctcaaaagcatcacagccggtcacctacaatatttgagcctgaaattcgtccatttatcattctttcttctccatcctggtattcaaaatctaccagggaggctatcatgtcatgatcaggagctgggcagtagtctgggtaggccacctggaaattctgtatcacagagtggggagaagttttcttgatgttcttcccttcatgtttgtctcaaattgaacccatctatacagcttccagttttccagaagttggtgaaccacattagctgccatcattgccaacgagtctctgcctttaatgtcaaggccaaatatcctgcagttgtggagtttgtttgaggaaggctgcttgctaggcataaccagctggtccatgtctggagccctgaagatcaggcagttattctcattaatgatggagatgagcacgaggcgaggctcctgtcggacaagtgaccatgtgtccatcttgccttaatcaccagcctaaacctgtcccgcaggttgccgctgcgcagccccatggcccgtgcactccgcctcgctcaccggcacccctttgcaggatttcaccgggtagatccagagcttcgccactgtgcccacctgctgcagcagccgccggcgccgcgtgggccatgcgcggcgccaggcgacagcccccagcgccaccgcggtcaggcccagcgcggcaaccccgagccacccgggccgggattgcgcgaggaggacaaagcgcgccagcgcggaggagccggcaggcgcccatggctggcgttctccgcgaggtggcggcaggcaaggccggagcgcagctggtcgccacggggccgctgggggaaggtgcggcctttggccccgagcccaaaggctgggcagctcctgaacccttccgggcacaatcagagcagtgcgtccttctgggggcggcagcggggagtgggaggtggtggctcagcttccacttggtcggcgccccactgcc

SEQ ID NO: 146836 - DNA, 1230 bp, Homo Sapiens
taaataagggggttttgttcgcgcaaaaaagtttaatttagggagaatagttctttgacgccgcctttagaggctgggtttgtatacctgagagaggggaagagggggttttaatgggtctaggttatgagggccacctttgttttaaaaaaggttccgagagaaaaaaagatcccattttgtttctttggtaagaaaatattactaaagcctcctgttgggtagataacaaggtgatgcccttttttcagttaccgggagggcttcgttccggggggtgcggtaggctcctagccaggtgtaacttccctttaagagggtttgcccagggtaccaggacccaagtgaatgcggacaggggaattattttcctgtgttgataattcatgaagtaggaacagtataatcaagatcaattgtatcatcattagttttccactgcctcacactagtgggctgttccaaagtagtagtgtgacacctggtgttgtcatttccccacatcacgtaggagcttccaaggaaagccaaatcccagatgagtctcaagagagggatcaatagtgtccatgattatcaggtatgctgactatttccaaggggtttttcagttgcgttcatttgcttgtaaagcaggtaatcctctgtgttgtcttcttctttttctcgatgagccgtgtacaagttacattgatagttggtctgggtttctgatttcttgagaaacactcgagcagaacattttccccaaacgtccctcaccttcctgaagtaaagactctgggttgtagcgctctgtggtgaagaccacgtgaactttacatccctcgttttggattaatccacgcgcggccctcctgcacctcggccagcactcgtagcgcgctgggcgagccggaccggaagttgaagaagtgaagcgccgcgcgcgccgcctgctgcaggagcctgcgcgggaccccagcatcctgaggctgcccagggtcgtcggggtccccggaccccgcgggctccgccaccgggagcgacgcaacagcagcatgcagcgagcagacgggtcgctggaggactacgggcccactggcgcctcggacccaggggaggcagtgcagccgtctgcccgcacggggtctgcatggacgcaggaaagttggctcggcacccgacagacacgggctcccccggccgtaatggccgaattcccgggcatatgtccggtaccgtcgactg

SEQ ID NO: 146837 - DNA, 1149 bp, Homo Sapiens
  misc_feature (147)..(147): n is a, c, g, or t
gtccattctcattctgaatctgttgactggagtgaattcagtggtcacaatcccaccatcaaataagaatcactttcctcagagtaaggagctgttccgatcttctcaatagttcacacaggtctctcagatataggcaccatgttntaagtctcacacaaaatgtctgtgtcacttaaattacacaatatggcagtgtttgtcttatggggacatactgaaaggggcaaagtagaaaacaacctgtttgcatgttatatgtgagtacattattgtactgtgcatgggtatgagggcattgcagcccttgttaaagaggaattccaccaattgaagcctatgtcagttcccagctgctcttggtgctgagagtatctactcatataaccttattttgttagatcagagccctcttcatctacagtttggctcaaatggtttgaactgagtttggtcgaactgagtttggtcgtttatctcttccatctgagctttatttctcagcctcaggatatgtggggtacttgaccgtttctatcttctctcgaactttgtaggagggatataggcccgtccttcccaattttcctgttgacacctttagaatagccatcccaatgatttccagccacaccaatgatatctccaggttccatgggaatttcatctgcagttcggggttggtgagcataaatggcaatttgattgtgggcattctggcccccaaaatagtagatgtcatctaaagaatggaagtttgcagaggcatcaggatgtagtgtttgcataatttcataagcaactcgacagaccttgggaaagaatttaaaagaaattgttagtatataaacactctccttcacagcatctaaaagcccttggccaaaaggatgggctctaggagtaagaggttgaaaagtagtggattctagtcacaagctttcagtccatttgttctcagaagatggtacaagtcattcttcatctctgtgtctggatcctttttcaaataaagaagaaaaactcacgaaagattattacaattaaaatctctctatctctatatagtacaaaagaatttaagaatatgaattagttacccggccgtaatggccgaattcccgggcatatgtccggtaccgtcgactg

SEQ ID NO: 146838 - DNA, 1038 bp, Homo Sapiens
  misc_feature (35)..(35): n is a, c, g, or t
acaagtatttttatataatttcagttccattcagngtataaacaaaattgcccaggtttatttgccacctccgcctcctccctgcctgctgctgtgtgcccttccacatgcagtcaggggagggcttctctggcctcctcagctgtaatctcctgggagtagaggtcagtgaagagagctggcagccagtagtgggcctcccctggggcctgtaagtccagccacgccaacccttcctttagcaggtgttccagcacttgccgcgctcgctcggtctcccatttaagactggctttgatctcactgacagtcacgtagccattcttctctgccagctgcagcaccacggtgtgatccatattgagctcagctggaacagactgaatgaggtaagtgccgcccacagggatgatgccgaagccagtgccaagtgcctttagtttcttgatggctctgatcaggtcatcttgactgacatcctgggcgaacttgccccttcccttcaacacctgttgatgtagttcctccaaagttatcagacctccattccgatgcttcagcgccaggcacacttcgataatttggacacctagttcgtaatagaagtcccccacgcccagcatctcagaccaaaatccttttccagaggccagcggatccacgccaatggttgcacacatgtcctggaactgcacacggaactcaggattcttccggatctcctgcttgtgtttgctggcaaattcctccaggttggtcttgaacatgtccaactgctttgacatctgggctagctggtcctcagccaagaccgtccctcgctccttatacttggcctctgcaagtttcttcttggcgatggcgccagctcccaccccgcggcggtgcatccccaccctgggcccgcgggccgcccggctgccgggaccccgggtctccacgtcccggactccgccgccggctccccaaggcggaagcccgagccgcccccggccgtaatggccgaattcccgggcatatgtccggtaccgtcgactg

SEQ ID NO: 146839 - DNA, 676 bp, Homo Sapiens
  misc_feature (18)..(18): n is a, c, g, or t
  misc_feature (25)..(25): n is a, c, g, or t
ccacctccgcctcctccntgcctgntgctgtgtcccttccacatgcagtcaggggagggcttctctggcctcctcagctgtaatctcctgggagtagaggtcagtgaagagagctggcagccagtagtgggcctcccctggggcctgtaagtccagccacgccaacccttccttcagcaggtgttccagcacttgccgcgctcgctcggtctcccatttaagactggctttgatctcactgacagtcacgtagccattcttctctgccagctgcagcaccacggtgtgatccatattgagctcagctggaacagactgaatgaggtaagtgccgcccacagggatgatgccgaagccagtgccaagtgcctttagtttcttgatggctctgatcaggtcatcttgactgacatcctgggcgaacttgccccttcccttcaacacctgttgatgtagttcctccaaagttatcagacccttggccatggagacttgccatggattcaactgcatgaaacagctaagatgtctctcaagtccttagaggcctgtagactgcaggatggaaacgataatcttttacggttttctccctctcagagaagtccagagtccagttcacaggacctagccaccctcacctccattccgatgcttcagcgccaggcacacttcg

SEQ ID NO: 146840 - DNA, 847 bp, Homo Sapiens
ccatgattgaaagaatcattccagaaatggcagcaaagaggctcaatgaattcattatcatttttcctttgaccttacacttcctggagtttttctccgttgctgccaggagtgatcccggaaatcatatacataatgcctccccaagagagggtacccacacagtcacacagatgggtgcatagatccctgctgggatcatcagaagaccccccagggcaatgtggaagagcccattcataatctggacagccccctaagtctttagattccctcatgaagaagctttgcgtggggcccaaccagtgaagacatcctcctgaagagtggttttggaccaagattgcatagccatagggcctttcattggctctgccgggaaagtcccatttactgaatttctgggtgttgtcattttgctctcataactcctaaaaataagacaaataaccaaatgaggagagcaagaacaagatttttggcagtcttaccttgtgtcatgcatctgaatgcttctctcagcatttcctccatgagtgtcattgagggtagacatggcctcttccgagtgaccttggatctgaggcaaggcctactgctgagttcttatttatttaattgcttattgtcagtctcttccccacagaatggaagttccatccaagtagagatctttgttctctacttgttcaggatctgagtctccaaggcctctaatctcaagggctgatttggatgcttaggtgcggagttcagtgggtgcagtttgtttctcaagcacactgggagggtgagtccccggccgtaatggccgaattcccgggcatatgtccggtaccgtcgactg

SEQ ID NO: 146841 - DNA, 808 bp, Homo Sapiens
  misc_feature (115)..(115): n is a, c, g, or t
ggctgccgggagaacctatgttagatttgggtctggagccacgttcttttccatcaattctacagggatgccaggttaataccaggttctgggaggaagccaaagatcagcatcnctgacaaaatgcccaagaacagagattgtatgctgtaacagtattggtaggatggggagtttttctcagagggattagctgggtccacagttgtatatgttaatatatgggtgtgagctctaataaaatccagactctccatttttaaaaaatgggaaatttttaatattaagtatgtccatgattgaaagaatcattccagaaatggcagcaaagaggctcaatgaattcattatcatttttcctttgaccaaacacttcctggagtttttctccgttgctgccaggagtgatccggaaataatatacataatgcctccccagagagggtaccacacagtcacacagatgggtgcatagatccctgctgggatcatcagaagaccccccagggcaatgtggaagatcccattcataatctggacagcccccaaagtcttagattccctcatgaagaagctttgcgtggggcccaccagtgaagacatcctcctgaagagtggttttggaccagattgcatagcaatagggcctttcattggctctgccgggaaagtctcatttactgaatttctgggtgttgtcattttgctctcaaaactcctgagtctccaaggcctcaaatctcaagggctgatttggatgctagctgcggagttcagtgggtgcagtttgtttctcaagcacactccc

SEQ ID NO: 146842 - DNA, 1097 bp, Homo Sapiens
ttttttgtttgcgttcgtcgttggcgttgtgatcctcgtgggcggtgctcccgcctgcgtgtcccttttttgctggagtgtgttgccattgtatgtctctttcaacgccgtattctgtcctctaccaggccccttgttgtggttggatttcccgctgttgtccgaaggttgtccctccgtgtcccgactatgccattggatgtcccgaggtcgtccgttaagtaggcgtgtgtgttcccttgccgtacctcttcctggatatttcttatttatgctcctattttcccattatgccctgcagcctgagtatgctccagagcctcaccctattacttcctgagcttctaatgtattattgctatctttttactaatgtgtatctgtttcttaaacctactcctaagcattacaagccatctccctctttttaaaacgtgaaaatgtgggtatcacctgttaattaaatagttgtgaaatttctctctccaattcagatttatctatgtgtgggattttagatagtcccaagacttttgctaatacagtatttccgatttaatcttaagtagaaaaatgtatgtaattaagagatttatgtataaaacatttggcacaagaaggaaagaaaacagtaactatgtaggtagtttttattagattgctataggagtaatagggaatttttagaggactagtttccaaattacacacctgcagaagttttcattcttctacctactgtgaggtatggtattaccaactaagaagcattaatggagaataactaaagggtctcataactgagttgtatataatattgctatcttgctattgttaaagatagccctgattttaggatgtagctattttagagagtcaaatggaaataacacattgtccacatagctactgtgaaagctgtaatacagagttatcctttattttgacacatttttaaaaaactgtgaatataactttgtaactaataagggatgttcacatgaagcagttcttaagccttctaacttcttaagggatctcttaacccccggccgtaatggccgaattcccgggcatatgtccggtaccgtcgactg

SEQ ID NO: 146843 - DNA, 843 bp, Homo Sapiens
  misc_feature (736)..(774): n is a, c, g, or t
tactcacaaagcagataaagcccgataatcacataaaaagtcaaataattaccatcaaaaaattccaaattaaaaaccatgagataccctacacactcatcccgtatggcacaaacagtgacaagatacaccattgaagtgttcagcaaggatgtagcccaactgcaactctgcacacattgttgataggaatataaaaatggtacaacccacattgcaaaaagttgatggaagtttctttgagaactaaacatataattccactcttaagtatttacccaagagaaagaattagcacatgtctacgtgaaatttgtacaaaaatatctatgaaagctttatttataatagccgaaaacgaaaaacagcccaagtgtccatcaaacagtgaatggtaaaataaactatagtatattcacatggtatattcatacagtgtatgtagcaatgaaaaggaaagaacgactgctacatgcaacaacatagataaataccaaacacactatgcttaatgaaagaagccttttatacatattgagtgtttccatttatatgaaattctagaatcagcaaaactaaacctacagttttaaggaacttcagaacagtgttttctcgcggggaggcaggcaggtgaaaggggaatgactagaaaggggcataagaaactatctcagatgttaatcccggccgtaatggccgaattcccgggcatatgtccggtaccgtcgactgnnnnnnnnnnnnnnnnnnnnnnnnnnnnnnnnnnnnnnncgcttcctcgctcactactcgctgcgctcgtcgttcggctcaagagctagcgccctatagtgagttatt

SEQ ID NO: 146844 - DNA, 789 bp, Homo Sapiens
  misc_feature (83)..(117): n is a, c, g, or t
aaatgatagatcactatagggcgctagcgcttttttgtcagaacgaccgagcgcagcgagtcatgcgagcgaggaagcggcgnnnnnnnnnnnnnnnnnnnnnnnnnnnnnnnnnnncagtcgacggtaccggacatatgcccgggaattcggccattacggccgggcaactcctgggttaggaaagcaagatgagggaataagtgtcctaagaaactcccatcccaagccagacagatgcctacccgtggcctggcaaaggtcctgggatctcaagctgatgcaagcaatttgtgtacaccaaggcaagggttctcaatcctgcagagaaacccatgagatgaggcagacagcagattttcacttgatcaaacacttgctgctctcaacccctctttgttttcccatccaaaatctggacctctgtttaggcgcaagacagtgagtaagagcagctccaaaagatgacgtatgcaaggggaactcttctgttcaatcctgtaatgttttctgttagagacagcataggctacctatcctaatcctgcaccccaactgttaagacagaagggaaaagtacaatgttcatcaatcatagctctgggatgctgcagctccctgacctgggcccctacttgagctaggagaagaacacctcatgaaaacagtctacctatagtcaggacttccccaaggcagactttattttttggtccatcgatcttggctctcactgttctcctgcttcccacccccacctgcctctgcatgtgggttctctgatcatct

SEQ ID NO: 146845 - DNA, 570 bp, Homo Sapiens
gatttttatccattcattattctgcaggctttttcactgattctggggagtcaaatctgactgttccacagccttttgactttccattctccatttttatttctgcaaacattacatgaccacactgactgaatttctcttttagtttctgccaagtcaagtcaaaaggtagatttctgacaaatatctggttgcctttggagcctattctctctctcattccgcttcccattggacccgataaaaatcctcgatccatatcgatgctcctttccagtatagctcctatacctggtcccattctatcaaagctggaactcatccggtccagtcccatccccattcctccagtcacactgttcatgctacccattccaccaccaagtctaccaaaggaatctccaaagcctcgatttattccaatatcaccacgtccaaaatctcgctccatgctactagtcatcgcaccacgcatgaagcagggtggtcgtcattctgatctacgtacgctcccaatggaccggcccgtgatggccgaattcccgggcatatgtccggtaccgtcgactg

SEQ ID NO: 146846 - DNA, 1337 bp, Homo Sapiens
  misc_feature (181)..(209): n is a, c, g, or t
attggggggaaaaaatttcccaaagccccttaggttccctgggcccccggggattccccctaggggaaaaccaggtttttggccccatgtttccactttacccttcctgggggccggggcggcccaaaaggaatggttcttagaaagctttctcaaggggccgaaggcggccgaccaaggnnnnnnnnnnnnnnnnnnnnnnnnnnnnncagttaattgataattatatcaaatgtttattttaaaaaataataaaacattcacataatgttgtcacaattttgggtgggaaaaaagcatgtgtatctctatatctctgtgtactagaaaacaacaaagggatataaaattaaataataaccagtatttaaaagttaacttgaaaatcctcgttgataattcagcagcatgcttctggtcagcctatacagtctctgtcctggtgaggagcatgatcaccaacaggcaagatcttctggccttgaagtttcgcttgagttaaaagagctcatctcaggtaagtaacaggccaagaatgggtgggcaccgtgaccactagccaacttgcaatccattctactccaaaggaccgggccagggtacagggtggactgaggcagaccgtgccattcttgctgctcacagaattgctgacttggcaagtataacacctggagtaattatgtggcataagggtggtttcaagcacactgttctggagctcctttgggaagggccttttgtccccataccaggtgtagtttacagactcgccaggtatcacacatgacagtttcagataacagttgtcatccatgtcttctatcttctcaattttgatgacaggcttgggtacagggtcaagcacttgcagcttgatcttccattcttgctcattcccagtctttttcaacaccctcatgatgtaggtgctgttgtcctctttctggaccttagagatgtacagtgcgccactctgaggatcaagtctgaccctgcctttaaatttggattcaaagtacttagattttctggaatcccattctacaatcttctggtcgaaagtataaaaccaggttagttgtttgtagttctcaggcaggctctcagagatgttcagagtcacgttgctgccggagaccacggtcatatgtaccaagtgaccttgaatgctggtcaccaggagtgacagaggcagcagtagcaattccagagccagacacgaatcccaacctctggagcacatgcttccttccagaacttcccagcaacgcaggagacagttgagagcctggctagaaaaaggccggggctaaaaacggaacttaccaaacccc

SEQ ID NO: 146847 - DNA, 1183 bp, Homo Sapiens
  misc_feature (1127)..(1127): n is a, c, g, or t
  misc_feature (1136)..(1136): n is a, c, g, or t
  misc_feature (1171)..(1171): n is a, c, g, or t
cactttctctgttaggctgatcatatttctccacctcccgaacttcctatgtagatcttaagctgtgaatcagttagttgtctattctttgccagttgatccctcagtggtactaacacagctcctctgtctgagtacatagtggcatgttacagtaactcttcagttttctggtaccacatcagcataattactggtggctggatttatgctctttttatcacttggatataattatcctttacttcatggaatgaaaacttgtcataacgttgtatttgatcacaatgatgtcagcgcccccaattagatttcgagaagtgtaccaatcactgtcaaatatgtcccagacgggacagtcgtggaccaccagcttgacattccctaacgcactggcctgatactcggtgaacaccggacgcgcgaccgtgctggccgcgttcagcaacaagctgctctcgtccccggagaccagagggcttctccccaggtaagtgcggataagccccgacggccggttgtcctggtggaatgtgtccccctcgttccccagcgccacgatgtggatggacatgatctcaaatccaagggcagggcggcgactcggagaaaagcagcggctcacggcttcgcggggcccccgggcggcgagttcacccgcaatccgctcatccccggccgcgtccccctcgcgcgcctccaccgcggcggggccgacgcagagcggggccggggccgcgccagccagcgagcgagccggggaccagggcgggctagcgggcgggggataagctgccgctactcagggagtgcccgggaacatcgccgggcgcgggaccgccgcacagccccaagtggacgcagctgaccgcagtcccctctccgccgcgcctcctcggctggcagctgtcgcctcctgctgccgctgccgctgctcctcctcctctaagcagagaaggggggtcggggagatcggggcctccgccccctcagcggaccgggcgcagcacgtgccagccccgggggtcgggcggatgcgggggacgcgctccccgcggaggccccgggagctccggtggcggcggctggacacaaaggagccgcccgcgcggggcgccgcggaatantaataatanatacaacgccccagcccgagagctcccagcgccantccgcctgcagc

SEQ ID NO: 146848 - DNA, 945 bp, Homo Sapiens
gttttgacgcaagatctttctcgtagggccggcaggtccgcagaacacacactgctcttcgttgttatactcgatgctgcagctcgtctgggtccgaccaagtggtcactcaccacgtgtatgtggaaattaccaaaattgtcttcaaggccattcccaatcccgtagaccctagtaaaagggtgttttgccttgagaaggttgaattaaacgggaaggccttgggccctgccttgtcgctttccctgctcccaatatcacacctgtcaggtgatgttcaatacacccccacgactctcaatgctgaaccattttcagtgcccaggaaagaggtagaaatatctggtcatggacactcgttctatggtgggcatttggactgttgcctccgactttcaaatgcttgctgaaccttccaggatacttcctctaggtgcagcgccaggatatctctggaagcatgcgatgagttgtgtgatgaagatggagccccttgtgctgtctctcctggacacgttatatgaggttgaagagcagagaacgatggaagtccttctctggtatgtcttgcaaactgcatcctccaggttcttagggtgactgtgaagacatgactcccaaagatgctggacagtctctgacccactgttccccatggtttgcctggctgtcagattctcttcgtacatccacactgtaacccagatcctcaagcagcttcttcatctccatgatggcaaagtcagccccatttcttggaggcagatggtcaaactctttattgcatatgatgagaaccaggcgtatgcggtcctttctctcctttattggatagatctgccatagataacagcctccgtcctttcttacagcactgaaaaaaggctcagactcccccggccgtaatggccgaattcccgggcatatgtccggtaccgtcgactg

SEQ ID NO: 146849 - DNA, 672 bp, Homo Sapiens
tttaatattggtacaaggctaggtcttttattatgcatcataaaggctctgagaataacaatgtaacctccaaaagggctggggctttgaagaatctcaggcaactcgcttcgttctgctcagtgactcccctggagcaaagcaaagcaaggaaacacttagagccaagcttgagttttgaatttcaaacacagggagtccatctctttctacccaattgttccctagaatcagtaactatctccttccccttaacggcacgtacttcctaccaaagcacaagcacgatgggctgtccatgagcctcccccaaatatgtgcaccttgtgacataaattctgtcagccaaagacaccagacaaaatgcaaaaccaaagtggagcctttccttgaattataggttctaaagagttttgggctctctacaaaacccaagagttaggaattgcctgtaagaagcaccagcccttgttttaaagaggcaatttaagaataatagccacgctgatgccacactacgataagggagaataattaacctaataaaactagcgattttccaattacttttgctgctggaaacactgattatgctaattaaagggtagaatagtaaatactgactcttttgcatccaattaagtgttcagattatttctcagaagtgtttgt

SEQ ID NO: 146850 - DNA, 439 bp, Homo Sapiens
ctgggcagacagaaggctttgttactgccaccgggcaggagacacagggtcagggttccagggccaagttatccactcccttgggtctttccttcctggggctttccctgcggggcccgggggagctgcagcagcagcagtgggcgacgaccagcagcagcaggagcagcaccggtgcccatgaaggtgaggaatacaatgaacggcgaacagtgtcccatgtcggactggaaaaactggtgggctctgtgcagtcctccccaggacttcgctgaaccgtggcctccagctcctctgtggacacagccatcttggcgtgcaccgtgccacctcctagaagcctccaattcccccaaccaggcaggtcctggggagcacaggctgcttcccccggccgtaatggccgaattcccgggcatatgtccggtaccgtcgactg

SEQ ID NO: 146851 - DNA, 279 bp, Homo Sapiens
ctctaagggataacctctcatttgtgtgagcctgcctcttgttcaactcttgtttgcaagtacactgattttgcacagtgagtgtgttctgtgtgactcctcactaaatgcaagctctgtgagggcagtgattttgctcttctgttctcagcgatgtgtacagggcctgacccccagcaaataataaatatcgttgatcattctcacaggtgaaccactgtacacgtcccccggccgtaatggccgaattcccgggcatatgtccggtaccgtcgactg

SEQ ID NO: 146852 - DNA, 1977 bp, Homo Sapiens
  misc_feature (22)..(22): n is a, c, g, or t
  misc_feature (273)..(273): n is a, c, g, or t
  misc_feature (376)..(376): n is a, c, g, or t
  misc_feature (468)..(468): n is a, c, g, or t
gccggcgctgccctatggcggnccacccggccgtgaccgcacggacgacattggtggtacggtagagaagcggggggcttcgctggagcgcggggtctcggctatcccaggcccgaactcccgcgctatcgcgcagctaggtccacgagtccagagttaggctgatagggaacggcaaaggccacggggcaatcgagggcggtgcgggcttgccggtcccccacgcagtgtgcatgtccctgccccgcgggcggggcgggcgtgggatcatanactcagatgagaacccgcggccgcccgtggggggccgcgctggaacaacagcgggggcggggtggcgctcgagcgggggcgtgggcaggtcgttgcaagtggnccttgttgtttccccggcacaaaaaaacgcgggacgatgacgagacgcgggcgtgacaagcgcccgcggccgccccccacggaggaaaaggncccgcgggggacctaaatgcggggcacgcgcagcagggggccccccgtccggggcgcggcggtgttgttttttgtctgcaccattgtggaacatcgggagagcgccgaccaccgcgcggtaccatcggtcagaggggcatttatattggcgatgtcctgcggccgcgccgagagaagaggtgcgaaaagctccgtgtcgacgccggggagattggaacccgctgtctgcgaggcgcgattcccacatccagtgttctttggacaaggaccgtgtgctcccacgacccgtttgggaggaaagcgccccgggggccattagcaggccggggggttgggaaagagaccaattgggagccatatcccaggtcgtcatggaacagcagtggccgggcccccaaagcccattcgggagcccccagggggcaaagccccccaagggttccactggtgggagggtcagtgtgctggtggacaggacattgtggtttatctgcccgtatgcaggggtccaggtagagctcaggcaagatgatccctttgcctggtgccagatgccgcagagcaaccaagtggtcggtcaaagcctgggcccattgctgcttctttggtcagctggccatggtacttggagcactcaaccatcatgtgttgaagctcaccagcactgtgcctggagggctcctgacaaaggcctcagagcacctctttgtatagacggaggccgggcggatggtctcagtgcgccgtgcttgaatgcggcagtgctacaggactcgtaggtggccactgtctgcccgtactgccgcaggaaggccatctggaatgccagctgggcaactgcgtcagggctcagcttttgcttcttcaggaattctttgcctcctctctgacaacctggacgcagtcaatagtgagggttttcatggtggcaatcaaacttttccttagcagctgtcgatgcccagtctttaaggcatcagtcagctcgaagttgagtttctgcaccgtgacagtagagtcagtggtagctggctggctctgtggagtgacggcaggggtctgagtgctgtctttaaatacttcattcaaaaatctgagcactgccacaccatcaccccatagagtgctcaaagtggacggcagtagagccatccttggcgataatgaggttacaaggattctatcaaaccagcggctttgtgccatccccactgcagcatattgtgggacaagtggacaaggtccttaatggggaacgtcatctaggcagagacagaacacctgccgagtccactttcctcaggctctcctcattgccactactcatcagcttctgcctgagctctgcccagatgtctcggttctcactaggtcaggtatcgccacggggaaactcgggggcggggctgctgtctgagagaatgtacttcagatgtgcctggatttccgaggggctcaccccggccgtaatggccgaattcccgggcatatgtccggtaccgtcgactg

SEQ ID NO: 146853 - DNA, 574 bp, Homo Sapiens
cagacttttagttttattgtagtttttgagtccatagctgtcttcctgtactgtcttgactctttgactaaactgatttcacatctttaaaattatgctttccttttaggctcatttttagctcagctgttgacagctatttttaaatgtaacatgacataatatatttcctaaataatttaaaataatctagcttgagctgctctgaaggttagtcagttggtggtgtgcatagaggtagagccttcccccactctcaaggatgctgtgaggggtattcctaccatgtggtgagttgggaggttttcctgaggtccttttccatcctgagactctggttttccattttgtttctcacaggccagggctttgaccgacacttgtttgctctgcggcatctggcagcagcaaagggatcatcttgcctgagctctacctggaccctgcatacgggcagataaaccacaatgtcctgtccacgagcacactgagcagcccagcagtgaaccttgggggctttcgtgctcggtctctgatggctttggtgttgggtatgtgtcatgacactggatag

SEQ ID NO: 146854 - DNA, 855 bp, Homo Sapiens
ttgtaatctcaattgttagaatttttttcctcagatcttttaactccttccatcaccgtttacctcttttcgagaattcttcatcccgtttggtaccaccctcctatatatctcttcacagtgatactcttaacttccatggattaactggaaggaatcttgttcgaacggcgggatggccccacagaattccctgtctcttggatatccattcatgctgaaaccaaaggcactaaaaggatcaccatctattgccatttgcttcagaatctgctaccaccacccatgtcgtcttccaaagaaaagttcaaaggggttgaccctccgaaaatgcagcaaatgtagcatgaggatcgccatgaaaggtgtaccggaaggtacctccttgtccatcagtacctcctgctcctcctttcaacccttcctccccaaactgatcatatatttctctctttttaggatcactcaatacttcataagcttctgcgacctctttaaatttttcctctgcctgaggagatttgttcttgtccggatgaaatttgagggcttgttttcggtaagcctttttaatatcttcatctgaagctcctttctcgattcccgaaatgcaataatagtctttccccatttcgaatgccttgaaattaacttagatttccctttgtaaaagaaaacagcgtccccagtcttagcaacagattctaagaaaaataaaccaagctgggtattttaaaagttaatcagcaattcagctagctgtcttaaggcagcaagcagacagcgtctctgtatgcaatcctcccccggccgtaatggccgaattcccgggcatatgtccggtaccgtcgactg

SEQ ID NO: 146855 - DNA, 960 bp, Homo Sapiens
gagatcattcattcattgtccaaccagccgctgccagagccagaacattgtgattatgctcatggtatgcccttgccaagccaaagggaccttcccctgttggaaacccacagcattggaaggaccacagagagtcctacccaacacatctgtcttcttcttccccgccacccatggcactttgcttcacacattcatttatagacgtaagtcaggaccagtcattttgtcaaagcagctgaaatagcccaccactcttacttggcaaagatgatacagtttcaaagagttaaatgaaaggtggactacttggagacatcgaaagctaagtttccaggagcactgaggtacaatgtgtagaaacataacatggaaacagtgtaccttaaactgagcatccttgatttcccccatggacctcaatttccagtgactagcaggcctgaagaggccaacacaaaaagccagacttggcgccctgccaggaccaaggggcatgtgcactctccagggtgctaggagcagggtcagggaggatgaggaggaaggctgagtctccctcccaggagcccctcccaatgtgcaggtggagacctgcaccaggagtgctcagtgtcaagttccttttcaattgcttccctcgcaccaagggcactgtctatattctcaccccataagaacaaaaatgtttctgttccccttacaagtgactaccacgtcaccatccatgaagggctggtccctttatttctggtcaccatccagggctgctaaggctcttagaacccatcatcaaaatccccttgtggagaggtaggctggggacactaccaagtggtcccagagggcagccgctgcaggtgccatctggctgtctccctttccatgtctctcctttttcatctcaagccccggccgtaatggccgaattcccgggcatatgtccggtaccgtcgactg

SEQ ID NO: 146856 - DNA, 1038 bp, Homo Sapiens
  misc_feature (918)..(952): n is a, c, g, or t
  misc_feature (955)..(997): n is a, c, g, or t
ataggggcccacacgagaaaaagcctgctgccaccaaaggagaggacccgttagggacgaccgggacttaagcaagctttgcttgtggatccttggtggcaataaagcccataactgacagcaacgatggacatggtgcgctgaagccaatgatgaaaccggatgatgcctctcaccgtcaaccatggcaacggccacctttagtcctctcttttaggtcgttggtccagggcgaaaaagttaaaagtgcaaggctactgtaccccgttttaccaggtactgtagtcacacgaatgataactggcaatgtgaggagcagagccatcacccagggcccaatgatcaccttcttggccaggctcacggtgcggtggttctgggtccagactggatgcaggacgcaaacacagcggtccagagcaatgagggcgatcaggaagacacttccgaacaagttgatgtccactatggtaaagacgaatttgcacaggaaccagccgaaaggccaatgtcctcccatggccttcctgaccatgaagaatggcaaagtggaggtgaaacagaagtcagccacggccaggttcaggtaactgatggtggtgactgtgtgtgtcatccggaatccagccacccagatcacaagcccgttgcccaggaccccgaggacaaaggtgactgcaaataccagataagtgatgatatccaggaagagatagccagcagatacagcaggtgtccctccagaggtgttcgtggggagagaggaatttgtctccatcttgtctgctcctggactgttcaccagctgtggtcttgctctgggtagttctaggtctgggtctcctggggagagtgactcaggctctccccggccgtaatggccgaattcccgggcatatgtccggtaccgtcgactgnnnnnnnnnnnnnnnnnnnnnnnnnnnnnnnnnnncgnnnnnnnnnnnnnnnnnnnnnnnnnnnnnnnnnnnnnnnnnnnacaacggagtagcgccctatatgagtcgatcatcccccttt

SEQ ID NO: 146857 - DNA, 969 bp, Homo Sapiens
  misc_feature (267)..(267): n is a, c, g, or t
gaggaatggtccaaaggatttttggtaactttggcccattgggaacaaacttctttttttgaaggccaggacgggtgccccagaaagggccaaaccagtggaaaaggggaaacccaaccagatgaaggaaagaaggccccccacaggcagtgaggacccgtaaagggacggctggattttaatcatgccctttttgtggatcttggctgcaatgagcccatagcagatggcaacaatggacatcggcaagctaaagccaatgacaanccggataatccctctggctgtcagcatggtaatggccaccttcagcctctcctcaggggtgccactgcaggatgcggagttgttagtgcagtatgtgtccccatttggagtagttactgtagtctgagtagaggtatttactggcaaggtaaggactagagcaagaatccaaggtccgacgatcaccttcatggccagactcacagtgcggtggttctgggcccagactggatgcaggacacatatgcagcggtccagtgcaatgataagcctatcaagaagacacttccaaagaggttgatgtccaccacgatgtgaattaacttacacaggaaccagcctaaaggccatttttctcccatggccatggagacaatgaggaatggtaatgtggccgtgaaagaaaagtcagccagggccaggttcaggtaacagatggtggtgactgtgcgtgtcatccggaatccagccacccagatcacaagcccattgcccaggaccccgaggacaaaggtgaccccaagcaccaccaatgggaggatccgcagaacagtgtagccagcagactcataggacacttcttcatattcattcagaggagtggagaagttggtttccatcttgccagcagcaccagcagctaagctccttttcctgtgtgcttctggcttcctgggatcccgggaatccggaccggtccag

SEQ ID NO: 146858 - DNA, 887 bp, Homo Sapiens
  misc_feature (41)..(75): n is a, c, g, or t
  misc_feature (462)..(477): n is a, c, g, or t
tacgacgagcgcagcgagtcagttagcgaggaagcggccgnnnnnnnnnnnnnnnnnnnnnnnnnnnnnnnnnnncagtcgacggtaccggacatatgcccgggaattcggccattacggccgggtagtatgtatcaaaatttccttccttttttaaggccaaataatattcagttgtatgtatatagcacattttgtttacctatctgtcagtggacacttgggttgcttgtgcctttgggtaactgtgaataatgctgctgtgaatatgggtatacagatacctctgtgaccctgctttcagttcttgtgggtatatacccataagtggaattgctggagcacacagttattctaattttttcaggatcagccgtactgttttccacagcagccatactagtctacagtaacagcacacaaggatttcaacttttccacattcttgcctatacttgttannnnnnnnnnnnnnnnaaatagtggccatcctaataggtgtgaagtatctcagtgtggttttaatttgcatcttcctaatgattagtggtgaacataatttcatgtacttgttggccatttgtatatctctttggagagatgtctcaagtcattttgaatgagttaaatcattcaaatgggttaaactcccttaaaatggttaaggtggtagatggcgtattaaaaaaatagggtgttgctcttttatgttgaagttccttgtatattctggatgttaacctcttatcagatgcatgatttgcaaatatttttctcccattctgtagggctgccttttgttatattttataaatgcccaggggtttcgcattcggggatagcctaagtgggcaacttggttggccgtggcttgggggtaataccag

SEQ ID NO: 146859 - DNA, 975 bp, Homo Sapiens
  misc_feature (21)..(21): n is a, c, g, or t
  misc_feature (47)..(94): n is a, c, g, or t
  misc_feature (98)..(132): n is a, c, g, or t
  misc_feature (176)..(274): n is a, c, g, or t
aaaagacccctttggaaattnacactacaatgggcgctagctcgtannnnnnnnnnnnnnnnnnnnnnnnnnnnnnnnnnnnnnnnnnnnnnnnccgnnnnnnnnnnnnnnnnnnnnnnnnnnnnnnnnnnncagtcgacggtaccggacatatgcccgggaattcggccattacnnnnnnnnnnnnnnnnnnnnnnnnnnnnnnnnnnnnnnnnnnnnnnnnnnnnnnnnnnnnnnnnnnnnnnnnnnnnnnnnnnnnnnnnnnnnnnnnnnnatctcactttctctttgaaatgttctcagacaaccccctctcaccacaccctgtatgactagatgctcctttctctgtgttccttagccctgtgtaaattcctctatcttagcatgtgtccatcacatttgattgtgtcttagcctgtacatttctggacaataagggctttgcctcgttcattgctgtgtcctggcacttctcagtctctcacggaatgtgccttggataaatgagtgaagcaaagtcatcccttgatgattttatatccatgccatcatacactattctgaacatgcagttaaattaagaatggtttgaaattgagattagttccgtaagtcccatgatttttatgtgcacacatttatacacacatatttaagattaaggcatgaaaataaattaccaaagggatttccccaggagtcagtgttttcagacctattgcctgaagccatctacagatcttacagctaagtttaactcctttacattatcactgttccacttcagcaaatccattttatataaacctttttctgataattatcactgtagtacacatttatggtacagatttagaagatgctaaaaaagtatacattagaaggccaaacccctcaaaatcccttgttccttagtccttggtattctttagggaaatcactaagttacatccttgtagttctggtatagtg

SEQ ID NO: 146860 - DNA, 947 bp, Homo Sapiens
  misc_feature (81)..(115): n is a, c, g, or t
aaaactatctacctactatgggcgcccgccgtagagccgaacgacgagcgcagcgaagtcagtgagcgaggaagcggccgnnnnnnnnnnnnnnnnnnnnnnnnnnnnnnnnnnncagtcgacggtaccggacatatgcccgggaattcggccattacggccggggagactcaacaagagctccagcaaagactttcactgtagcttgacttgacctgagattaactagggaatcttgagaataaagatgagctctgaaaattgtttcgtagcagagaacagctctttgcatccggagagtggacaagaaaatgatgccaccagtccccatttctcaacacgtcatgaagggtccttccaagttcctgtcctgtgtgctgtaatgaatgtggtcttcatcaccattttaatcatagctctcattgccttatcagtgggccaatacaattgtccaggccaatacacattctcaatgccatcagacagccatgtttcttcatgctctgaggactgggttggctaccagaggaaatgctactttatttctactgtgaagaggagctggacttcagcccaaaatgcttgttctgaacatggtgctactcttgctgtcattgattctgaaaaggacatgaactttctaaaacgatacgcaggtagagaggaacactgggttggactgaaaaaggaacctggtcacccatggaagtggtcaaatggcaaagaatttaacaactggttcaacgttacagggtctgacaagtgtgtttttctgaaaaacacagaggtcagcagcatggaatgtgagaagaatttatactggatatggtaacaaaccttacaaataattacggaaacgtgttcactttattgactattattagaatggaactcaaggacatctgtgtcagtggatgctgctctgtggtccgaagtcttccatagag

SEQ ID NO: 146861 - DNA, 990 bp, Homo Sapiens
  misc_feature (876)..(910): n is a, c, g, or t
gtggtgctacaacacttttaactcccgatatcattagaattccattgcactattcacagattccagcaaggatggaaattctgtccgcaagatccaagcatttgcccaccatggccgctcctcgcgacattggcgattaccatttccacgatgagattttgggtgggactcaaccccgatccatattagggagcacctttctcaaagggaaattcattccccctgcttttaggcagataaggggaaggcagagaactgtttctacatctgttggttctcaatttcctgcaggtcaaaataatccttctggccaaagtgtcacattttggggtgtcatattctgatcttcttcaagggtcaaagcaagaaaggaatgaaagggtggtaacatgtggtaacagacaggacttgtcagtgcttcctgggaatcacagtgggggcagataagtggagactatagggaagaaaaacctgtaaacattttctacatctaggagaccaaattgacaggactgggtgaaattctgatgtggctaagcagagaaagagggccaagctctctggtttgagttatttgcagtttcctcaatggaggtggagcaatactgggatctatagcccaaagttccagaagaaagtgtgctgggtgtaaagagggactacgcgtagctcagcatgagtgttggcaaccagaggccaaaattccatccagggtgtgggtcaagaattgttgtgagttccaggggtgcagcatggaggcatggcttcttatgcatctcacatgacaggataatctctttttcctcaatattttcaatcctttctcccggccgtaatggccgaattcccgggcatatgtccggtaccgtcgactgnnnnnnnnnnnnnnnnnnnnnnnnnnnnnnnnnnncggccgcttcctcgctcactagctcgctgcgctcgtcgttcgctgaaaagcgaggcccatatgaggtgtatagtatccgc

SEQ ID NO: 146862 - DNA, 899 bp, Homo Sapiens
  misc_feature (791)..(825): n is a, c, g, or t
acatctgataatataactcagaaaggagatttctcaagggtgaagaatgagtcttacctgacacacattagataatgaacaagctcaagtcttaaaatcctgatttattttaaactagtgcttagacatgactgtggttcaagtttggcagacaggtttaaatgtcaaatccaacactagagacaataccatttatttcagttaaggaatatagactttgccaccaaataattacatatttttcattcctgtatgacatggatgcctctatttgcatgacctctgagtatgaagtaataatatattaattttcaacaactgatctgtctgaaaaatacaaagaaacagcaaaatggtgatattaaaactgactcaccactgtcctctgtttgttgggcaggaagactctaacgataggtttttgtggtgacttggggttgctccgtgccacatctgtgggattttgaaaaactgaaagagatgaaggtagcactgaaaggctagaagaggaagaagatgtaacggtatccattgatgcagagctagaaacagaaaaatcagttccgttccccagagattccaataactgttgttctctttgttggagtgcatctagcttgctggtgtattcttcataggcctataaaataaagcagacttatattcaatccggactttgtcctgacattaacaaaagagaatataaaattttagcctttgattataatcttttcaccagtcccggccgtaatggccgaattcccgggcatatgtccggtaccgtcgactgnnnnnnnnnnnnnnnnnnnnnnnnnnnnnnnnnnncgccgcttcctcgctcactacttcgctgcgctcgtcgttcgctagaggccgagtagcgccctatatgatctata

SEQ ID NO: 146863 - DNA, 1246 bp, Homo Sapiens
  misc_feature (1147)..(1181): n is a, c, g, or t
agctttaggagcaatcagtgcggtactgagatgtgtagtcagtgcgtgaaggttgaggcaggattaggagtatccaatctgttaggaatgtaatagtgctcgagaatgagaatttacggaggccagttgagaattgtcgaacgcaaggcagtcaaatggttaagtgtccagtggtccttgatgatcatctgtagagttctttggggtttactgtgttgcggctgtttgtatcaagtattggcagtgattacgggttatcatccagagcagctcaagacacggccaatggggatacccgcaggaagaaaattgtgtttttccaagtcttaggagtatgaagatattgtatccaagagtaagtcggcaagcctcccagactcaggacactttatgtgaaatgctcatcagatgagatctttttcagtggagggttcacaagctggtttgtttagaggctctcactaagaaataggacacttgcccatctctctggaacacctttttacccacgtggggcccactggttcccccaatgcttctctgcactgatggtggcacctgatatacctcttgttcttgggtgccgtggccagtggggacttggtaaattccctgattttggtaggaaggtggcacttggtagatggtgtctcggggagcagcctgtgggtttggcacttgatagagcttctgttggccaaaggtctgctgcatcagtccagaggcaggctgctcgtgactggaggcagtctcctgcatgggaccaatcagaagcttcacccggttgcctgggacaatgccttgccgaccgtgtaacgagcacagccaccatccttccagtccccctgtgttctgctctatgacggtcaggatgtctcccttgcgaaaggccagttcctcggcacactctgggacattgtcatataaggcccttgccataagattcttatacttcatttcggcagcggtgggttgagccgttttcctacactagttaagacagcattaagcactgcggtgcccgcccctccattgagtgcagcgctagatgaaagcgagaaggtcccgggcagagccgcttgtcagtcgcagcgcccccggccgtaatggccgaattcccgggcatatgtccggtaccgtcgactgnnnnnnnnnnnnnnnnnnnnnnnnnnnnnnnnnnncggccgcttcctcgctcactacttcgctgcgctcggtcgttcgtctgcgacgagctaggcccata

SEQ ID NO: 146864 - DNA, 1200 bp, Homo Sapiens
  misc_feature (1035)..(1035): n is a, c, g, or t
ggaagagtatgaagtcgaggcgcgccaattcggcacgaggatagagcagaacacagggggactggaaggatggtggctgtgctcgttacacggtcggcaaggcattgtcccaggcaaccgggtgaagcttctgattggtcccatgcaggagactgcctccagtcacgagcagcctgcctctggactgatgcagcagacctttggccaacagaagctctatcaagtgccaaacccacaggctgctccccgagacaccatctaccaagtgccaccttcctaccaaaatcagggaatttaccaagtccccactggccacggcacccaagaacaagaggtatatcaggtgccaccatcagtgcagagaagcattgggggaaccagtgggccccacgtgggtaaaaaggtgataacccccgtgaggacaggccatggctacgtatacgagtacccatccagataccaaaaggatgtctatgatatccctccttctcataccactcaaggggtatacgacatccctccctcatcagcaaaaggccctgtgttttcagttccagtgggagagataaaacctcaaggggtgtatgacatcccgcctacaaaaggggtatatgccattccgccctctgcttgccgggatgaagcagggcttagggaaaaagactatgacttcccccctcccatgagacaagctggaaggccggacctcagaccggagggggtttatgacattcctccaacctgcaccaagccagcagggaaggaccttcatgtaaaatacaactgtgacattccaggagctgcagaaccggtggctcgaaggcaccagagcctgtccccgaatcacccacccccgcaactcggacagtcagtgggctctcagaacgacgcatatgatgtcccccgaggcgttcagtttcttgagccaccagcagaaaccagtgagaaagcaaacccccaggaaagggatggtgtttatgatgtccctctgcataacccgccagatgctaaggctctcgggacttggtgatgggnatcacgattgctttctcagtacagcagcaccggagtacatgtcacgtcttcactcctcaggagtctcatgtcagctccactcagaaagctctctgatcaaccactatgaagatcacgctcacgcctgaatgtgtccgcatgctgtctacatgcggtagattgaaa

SEQ ID NO: 146865 - DNA, 1478 bp, Homo Sapiens
cgagggggcgagcaggtgcggcggcggcggggcgctccggggaggccaggacagctgatggttgtggcagaaacatctcaaggtagctggtccgcccccacttccccatctacctcttgtcctccccgccaacacgcaaccgaccaccctggcgtcccctcccgtcatgaccgcgctggatcctcctggctgtcagacctgtcgagcgttctccaatcactggcatatggactgtgtatgccatggctgtgatgaagcaccatgtatgccctgtggagaactggtatgaaggactctgcagacaaccttgctctaaagcttccttcatctctgtcccctcttgggcctgaggctgccacgagccagactgcaaccctgagcctcactgctcttctctgaaataggtccccaggcatggcttcttgccacctacccacttcccactatccctttgcccctttggttactgcttcaggcgggcactggggagtgggatcttctgtccctgtaggggaggtctgggagagagtcctctttgaggcctgaggctataggccaagggcctggtgggcagtcccttcccccagtctactccctgtcctgcctgccaggtcctacaacgagtcctgccctcctgaccctgctgagcaagggggtcccaagacctgctgcaccctggaccgatgtccccctcatcagcaagtgtggcgtcctatcccccagaaagctgcctcttcagcctcattggcaacatgggtgctttcatggtggccctgatctgcctcctgcgctacgggcagctcctggagcagagtcggcactcttgggttaacaccacggcactcatcacaggctgcaccaacgctgcgggcctcttggtggttggcaactttcaggtggatcatgccaggtctctgcactacgtcggagctggcgtggccttccctgcggggctgctctttgtttgcctgcactgtgctctctcctaccaaggggccaccgccccgcctggacctggctgtggcctatctgcgacagtgtgctggctgtcatcgcctttatcaccctggtcctcagtggagtcttctttgtccatgcagagttctcagctgccacatggggcagccctgtgtgagtgggtgtgtgtcatcgatatcctcatttccctatggcaccttccgctacgagctctggcgccgcctcctcagacacactggtggctgccctgcagcctacccctgcgcgcggcctgcccgtcctccgggaccacgcagcacctccaccccacctccaccagtgcccccgacgagcctcgacatgatctacggcctgcggcgaggcgtcggtggcccgggccatccacagccaccccacaccacatatcttcctcctccaatccatcctcggtaccgaccacacactctgacaacagtacatcctgtcggcgatcatgcgcgttcctcaacttcgtggatgaa

SEQ ID NO: 146866 - DNA, 629 bp, Homo Sapiens
  misc_feature (609)..(609): n is a, c, g, or t
aaaaaatctgtctaagtacgaggctggcgtggcttattcggcacgagggacagtcaatgattgcgggtagcagctacccaggcttccctgtgagtcggccccacggatcatgcggctggtggcctgaatgcagcctgctccagtggcccggtgcaggcgagctgtggctgcctgcatggtgacagtggccactcctgtgttcatgccagtggtgcacgcaggccaccatgaagggcatcacgacctgaacatgctggactgctctggtgttgccgcatctgcctgggcaatacctaccatctgggtctaagtgccggttgaccctgagctgatccagaaagccaactggtctccactggcttcattgaatttggcctcataatctgctaacggtgacggaggagggcgtccgcttccgctccccctacgacggcaatgagaccctgctgagcccggagaaatccgtgcagatccagaatgcgctgggctcggacatcatcatgcagctggacgacgtggttagcagtactgtgactgggccacgtgtggaggaggccatgtacaggtcaatccgctggctggaccggtgcattgcagcccatcagcggncggacaagcagaacctcttc

SEQ ID NO: 146867 - DNA, 1021 bp, Homo Sapiens
tcgtgcgcaaatgatttgggtgccctctttctcagtaaagcccgcttttcgggggtccccccgtttggccaattcttcaaccttcctaacggcgtcacggcaccagggcgaccaaagccctgtcgtgggggaaacccagcgacatgcacatccaagaccacccagactaccagatcagtgcatacgccaccccccatcaaatatcggggctgtccttcggcaccccgagaggtgctcagcgccaccatccgccagaactgcgacttgctctcacccccgctcaggcccccgatggcgaagccaggcacgtctcgcttggtcatctcttcaaggcaggtggcccggagatctgcgtccagcccaccctggataatggcgaagaggttctgcttgtccggccgctgatgggctgcaatgcaccggtccagccagcggattgacctgtacatggcctcctccacacgtggcccagtcacagtactgctaaccacgtcgtccagctgcatgatgatgtccgagcccagcgcattctggatctgcacggatttctccgggctcagcagggtctcattgccgtcgtagggggagcggaagcggacgccctcctccgtcacctcggacagagacaccagcgacaccatctggaaaccgccgctgtccgttagcagattatgaggccaattcatgaagccgtggagaccgttggctttctggatcagctcgggtcccggccttagacccagatggtaggtattgcccaggcagatgcggcaacccagagcgtccagctgttcggtcgtgatgcccttcatggtggcctgcgtgcccactggcatgaacacaggagtggccactgtcccatgcggcagccacagctcgcctgcccgggcctggagcggctgcattcggccaccagccgcatgatccgtggggccgactccagggaagcctgggtagctgctcccgccatcttgactgtccctcgtgccgaattcgcacacccagcctcgtactagcctat

SEQ ID NO: 146868 - DNA, 867 bp, Homo Sapiens
  misc_feature (773)..(807): n is a, c, g, or t
gtgttttacaaggtttgcttcacttacacgtagtaaataatgaaaaacatagcatcctaatgactctgaaagttaacgccaagagtgctatggggttagggattttaaaagtggagccaaataaagactgcgaaacaatacgtgtgtcgaaaccaatgttcaaaccaaaaagatgtaatattcaatttgccatgagtgacaacgttcggctgataacccacatagcccagggaaatcccttgccaaatgttggacgaagaagagggaaggaagaggggtcaaggcgcagaaggcagtacccaggcctgggaaatcacgaagagacacagtcgggaaagtgggcctccagaacagagaacatactcacttttccaggccccacccatgtctattacccagttaggaggaatgagctcatttctgtgaacgtgagatgaccctcgaccccgtgctcctatcacacgccattagctttgtcccacatcctgttcaatccgctcctctaagcgcggtcctgagctttggtcccagacgcgcagaaggaagcggcctgaatcttacccagtcctcgacgcgcccagcgtcgttgactgcagaggacgaagcggccgcatctcccgacaaacacgtgtgaagcagcggtgccgccattgggccgaactaacgcgaccgctgcgcctcaggccggatgcccagctccttccagccacagcctctgtccccccggccgtaatggccgaattcccgggcatatgtccggtaccgtcgactgnnnnnnnnnnnnnnnnnnnnnnnnnnnnnnnnnnncggccgcttcctcgctcactactcgctgcgctcgtcgttcgtcggcagggagcccataag

SEQ ID NO: 146869 - DNA, 541 bp, Homo Sapiens
ttttttgagggtattagctgtttactgacaaaagagacatttcaggacctcagaaggccagacactcccataggttggatggccctttggggagtctgagcccatttccacaaaatgcattcgttagacccacacacagtgcttgagccccctagacacagaatagtcttgtcctgttcttcaagtgactgggctatcatctgaggaatagtcagcttccccccaatactgggggtgacgggagacttttaagggtcatccccaggtttgtatggcattcttggggcaaacagcagaagggatgactgccctgatgcctcctcatctctggcagcattgcctagtgcaacagctctggccagaacccagcctggtctacagccataccatcctgaacatgccagatcttgtctgacctctgaagctaagcagggtcaagcctggttagtacttgggagaagctggtgtggctagaccgtgacctgaggaccccagttatttcacccatcctttgtggatgacagcacctggcctgtgagag

SEQ ID NO: 146870 - DNA, 339 bp, Homo Sapiens
gggctcagcccctggagcccacctggagcctccttatgacccagggacacaccacctccccagtggggacttcgctcaatgtacttctccagttcctacccttcctcaagtggggaactcaggagaccaagcaggggcaactgtacttcggatggtcaggccccaggatactgtggcatatgaggacctatctgtagactacactcagaagaaatggaaaagtctcacactcagtcctgagagccctgcagtggaacatgatgccagaaaatcaccatagcatggcctccttgggtaatgattctgtttcctagtcacttaaagtctgcatgctgcaaa

SEQ ID NO: 146871 - DNA, 777 bp, Homo Sapiens
  misc_feature (87)..(95): n is a, c, g, or t
aggcagcaggcaagcaggaatttttcgtattgcagacagcccctggtggtcatcatctatacatcggatctctaaggacgtgccggnnnnnnnnntctgtgaacacaatcttcccatgctgtattcacatgctctattcacatctttagtttacccaggttgttagagaccttgggtaagatgattaaaggcttcacgatggaaatttctcaaaatattgttttctcaatttctggatttttccccattgttcgttgttcataacaacatataatacaagtttcaaatccgctgatatcttttagagttttcagcaatggctccaaagactcttcatagtatatgcagtcggccatcagtatgaagtcgggtggagaaggaaagccttctatttcttccccccatttcagtaccttggcttgaacagaaccagtgacaagatgcttgttcatattaatattcatcttcagcaagtcttgcaattcctcaagatcggtgactacaacatcagccccgagggtagcagccatgagccccacggccccggtgcccgaacccagctccagcaccgaccgccggctcagcgcgtgggccccgtcgccagaaaactcgggcgtttccaggtatttagaaaggacaatggcagcgtcccacacaacgcaacccacgccaccggagctatactgctgtagtcgtagcactgtaccatcccgcttctccaaaactcgcacaaagctccgcagtgggtcctccagcgaggactccagcgtatccgcc

SEQ ID NO: 146872 - DNA, 701 bp, Homo Sapiens
  misc_feature (20)..(20): n is a, c, g, or t
agtggtgtagctaacaaagnttattttgggaagaagtgcaagagggaacacaatgccaacacatatgattattagtagtgtttgtccatcaagataccaatatctactatagtctccagtcaaaaattctgcaatagcagcaggaagctctgttttaataattaaaagataagatgacatagctccaatattctgaattattatggtgcctgccaccaccaactttccaggtaatccaaatgcaaagagtccaagatcttcataagatgttacagctgtctgaatacacatactaagcagaagatggactgagtaagaagccaggagagcaactgtcagcagcaagaagctaaatccaaagacaccggtattagccataacataagctaagccaaggatgccacttcccatgatggcattcatcaaattaaacactgataaaccaaatgaaacacctggggatcgctgtctgtgaagttcgttgcttagcaacggactcaactcttcggcctccgcttcttcaggctgctggacagagacataccagccccgctcagcgttgaagctcccccaggacgcctccatgctgctctccagctgactaccagttccatctacgagcctctacccctgccctgcgctccagtcgtcggtcgcgccagaggcggagctttgagcccggcccttccggcattccgtac

SEQ ID NO: 146873 - DNA, 1205 bp, Homo Sapiens
  misc_feature (1091)..(1125): n is a, c, g, or t
cacaaccctggccagcttgtttagcagccgagtcggcgcgggagcctgagtgcactaccacggagattcaaccgcttcttctggtggcgccagctaggtgtggatcactgggggcacggtcgttgaggacacgtttctgggaccatacatggtgggagatgccagccgtgtggtggtgctggtagtactacagcattttttcagtggactatgtggtgggcagtcatacggatgttgtgtgctcgcggtttcagggggttctttcgcgacggaatggtgtgctttgagcccgtgagtgtgcgaagtgttctccgacgtattcggcacgtataggaaggtactggtgtggggttctcatagtggtgatgcgccagttgtagagtggtaatgtaaagtcagaaagggtgggcccctaggccgcgcgtgatgccctgggggaaattgctagaacccactgtatcttggacctgacctatcaagcacaatctgtgcccgtccgtacggcactcttagtctgtacggcagcgccctgttaagagtcccgacagcgtggaggaaggagccataagatcctgaggcactgagtcacttctggttggggcaggggccagtgtgactccgtaacagacagggtccacaaaggacatgaaggctgatgatctgcccgtgtgggaaaggaggccaagaggggagaggctaacctggccggtcactgattccatcacacgctgtagctctcgggggcggggaggtggagagggaggtttcaagtggatgctgggactctgagccatgtcatccaagctaccagtccctgcacaaccaaggggttaggacaccccaggggcagtatcacttgggaaaggctgacccaggatgtgtggaagaggaggcagaaagcagacacagtctccagccctgtcactcctcagcaggggaaataccccagactgcgctgctgggggcagtacaggagcaagggtgcttgcactcaggccttcatgcagtggggcttctgcaaagcagggcagcctaccagacccggccgtaatggccgaattcccgggcatatgtccggtaccgtcgactgnnnnnnnnnnnnnnnnnnnnnnnnnnnnnnnnnnncggccgcttcctcgcttcactacttcgctgcgctcgtcgttcagtatacgccgactagcccctatagtgatgatcatggg

SEQ ID NO: 146874 - DNA, 899 bp, Homo Sapiens
cagtcgacggtaccggacatatgcccgggaattcggccattacggccgggatactgagctgaggcttgaagatatattttaaccttaaaaatgaattcctcagggggaagaatggatgccttgaaacttgctctcaagtttttcatgtgtttctttttgtaacttaatgtctctactttgcatatgtccctttggcctttgcagtctctatgtctgtcattctttgcataataattcatatcaaaggggagaaacagctattttttgtccctagaagttctgctcttaaggttgaaaagaaagtttgaaaaatcatatcatttaggttagaagtactttgtgtttttggtatccaaaattaggactctgagattcttgtgtattcagagaatttttagtaggaaacaaggacaaatttgcatatgaactgaaaatagttattacatgacaaaatatgtagatctgatttctagaaactgaattagtccaaaacaagtaagagtgggaaaagcagtaaaaagttcttcttgaatattgctgtgtgtcatccaaagtattcttatttcttttaggtgaaaaatttccattactcttttgtgatattctcaaaagaaagtttagcgatttcatagtgttctgaaatcctgaaatcttaattcagtatttcaatagagtataattgatttgcttccttatcagtagatttttcaaattatctattctaggctatagatcttcctaaaatataatccaagtaggtttcaatgcagatttctagaaccaagtataagatctcttttctggagatgctatatttacagttttcctaagttggtccgggctgggcacctgacatattggacttaagccatctagtcataagagttttcttagccata

SEQ ID NO: 146875 - DNA, 1169 bp, Homo Sapiens
  misc_feature (83)..(117): n is a, c, g, or t
agatgtatagatcactatagggcgctactcggtccgcagcgaacgaccgagcgcagcgaagtagtgagcgaggaagcggccgnnnnnnnnnnnnnnnnnnnnnnnnnnnnnnnnnnncagtcgacggtaccggacatatgcccgggaattcggccattacggccggggaaaagggaagaagaaaggaaaagagaaatccaactcctttttcatgttttgcttttgaacaatgagggtttgtgtgacaggcattcctctttgctgagatgatagcaatggcctgagattttagcaagctcctggagtctgatgcttttgcagtactctgatcgcaactaaacatttgtctttgttttattagaaactagtgaaacaaagcaggttgtcccacatgtataaaatacagggcagctatttagttttctttacagagaatgatccttttaaggcttgtaaggccctctggtttggacaaaaaccctcagtagagacaagcgggaaggttaattagctgaaagctatgatgatataaataaaaacagctctctatcccaatacgcacctttgtattttcaagaactcttctatttattacggaaaatgtcaccattgtgatgtattaagccagtacttcaattacgggttgacttgggatgaccatatttacattgctgtagttaacatttattaatttctttttccttgtttgagtatttctgtctcttgaaattaccctttacttggccttttctagatagctttatttgatttcgaagtggcaaaatgtttttcattaccggttttcctatcgctgtattgatcccgaactcttttggcataaattttgggttcccagtacctcacttggttcggatttgactggcctggtatctgctcgcggcgactgggcctggttgggtaccgtgacccgtggaccttaggttcgtcactgtccctggaatctgggcttcataaaataccggtgtggggcatgtgttattgtccaacatcttggaatgctttaatgcctgggcagcaggaaacccgtgcctaaccgttcccgaagggccggtttaccccttgttacccggaaaaagggggccagtgattgccccttaaacacattcgcaacgtgcaacatacaggaacaaggtatttattaaacactg

SEQ ID NO: 146876 - DNA, 963 bp, Homo Sapiens
  misc_feature (835)..(869): n is a, c, g, or t
  misc_feature (873)..(911): n is a, c, g, or t
tctagaagattcatttacaaaataaaaggacagatcacatcacaaatgtacagacctcattcaggattatttaaagatgaactacctcaatattgttttgaatttttaatcgtgacctgcttctgtccctcaatccacgtacagatataagaatggaaatattctggttgtgaaagctacggtttctactgaataatttcacaacagctgacagtatacacagcactcagcccttgccacatgcacacaccatgtaatcagataaaagctttcactataggaaacggaagctgtcaaatagcccctagatactacctagtgaatgagtactgtttgccagttcctgtctggaccagctgccaatgacagttttcaaattaattaatacatatggctattaaattcatacctaacaggctttacaaataggcctctttgcaccacatatgtattcacaaaaagttacagtaaatttgaatttaaaatttaagagatgctttatcttaatttctgattgtacttaatttgttaaggagtttatgttctataggtaatatttaatgtattaatgaaacaaactatttcaatgggccttgcagaaaggttccatgatacaaaaattaccatctcctggtttctgggtttgaaaatgtgaactgtgaggaatgggagtggttggtgaaaggggctttcctgtagaataaaaattcctgtatttctattaatttatggactttaggaggcaaacgtattaaggcagaactatagaaattattaactactgcccggccgtaatggccgaattcccgggcatatgtccggtaccgtcgactgnnnnnnnnnnnnnnnnnnnnnnnnnnnnnnnnnnncggnnnnnnnnnnnnnnnnnnnnnnnnnnnnnnnnnnnnnnncttcggcccgaaacttaagggcgcgcccttattaagtggattcgattacatt

SEQ ID NO: 146877 - DNA, 629 bp, Homo Sapiens
  misc_feature (502)..(563): n is a, c, g, or t
caaggcaattctttgctctcgcgggtttcggggtctgtgttgcaaagcctttaattagaatgtttgtattttttacatcatgcataacttcacatttgtgattaattagtaattatttcaatacttgtaagctcatctgcctcagatttaatcataatacatgaattaaattaatcaaattaaggaacagcaatttagaaagaaacacactttaagaaatcaaaattctcaattcaggcagtctgtttctatcatttggtattctactcctttaaaaatttcatattgcccaacaaaaagtggttatttttactgtttttggagatgactgaacagatgaaggcatcagatgccttcatcagctggtattttgcctaagatctatttaagataaccttttcttatattttttacttaatattgggcataatcgtatcattcaagattaagtctgggttatttctttgataagaactgaatgtggccgggcgcagtggctcannnnnnnnnnnnnnnnnnnnnnnnnnnnnnnnnnnnnnnnnnnnnnnnnnnnnnnnnnnnnnaccatcctggctaacccccggccgtaatggccgaattcccgggcatatgtccggtaccgtcgactg

SEQ ID NO: 146878 - DNA, 899 bp, Homo Sapiens
  misc_feature (782)..(816): n is a, c, g, or t
  misc_feature (820)..(859): n is a, c, g, or t
gttctttatgttaataccgaagtaatatcaccaagattgctttgaatgaggggaaatttagttaatattgaaatgaacaaatttagtaacgtaaaatgctttattaaattatcgcttttgactactaattcacattttgattagattcattgtataattttttaaactagttttaatctaaacgtgtatttgactatcatttccttctaactgtgatagaaattactgtccacaaaggtaaaatgtgcaattccccatttttaatatccatatgttatatacacaatatgtatacacttaaaatataagagttacatatcctggtctcttacatgcaaacagtagatcacaaatagttttgagctacacatgtatcttgcacaggtattggaaaaaaatctgtgaaatttttttacagttttaacaaatatacataaatataagaacataaattacagtaaaatattgacagcatttgagaaaatgttgataacccagatgcactgatgcctaaaggccttataataatagaaaagtacagctcagggacatctcattcctattcttttttttaaaataagtaaatacatcatatgagacattagttctttctctaaacaactcaattagagaaatgtatatatttttatctctacttcccatgaaagaaaacaaactacgcatctcatttatgatacaatactgtcttcccccgctagtttacacatttgcccggccgtaatggccgaattcccgggcatatgtccggtaccgtcgactgnnnnnnnnnnnnnnnnnnnnnnnnnnnnnnnnnnncggnnnnnnnnnnnnnnnnnnnnnnnnnnnnnnnnnnnnnnnnctctagcgagctagcgccctatagttagatccaaagtctt

SEQ ID NO: 146879 - DNA, 546 bp, Homo Sapiens
  misc_feature (470)..(504): n is a, c, g, or t
ctctgtccatccactgcccataagatatacacaaggaggtgggcaaaaaaaccttttttcatttccatatgacttctgtgcaacttttgcatgaagaataagtactgtttgatcccctcgctcttttaaataatttcgcatagcttccctagtaagtcgtttaggtggaggccgctcaccaaatttccttttaatccacgcccatggtacttcacagaacatgttaagttaacgtcacagcttggaacacttcgactgcacctctgaacacctcagccagtgtatctgtatcattctcctttcgttttgagatcataatggttccgaagaactataatgcttccatttgaatgatagtctcataatttcaatgacctgtcacaacaggcgccatcttccacaaactctcgccaaaactccccggccgtaatggccgaattcccgggcatatgtccggtaccgtcgactgnnnnnnnnnnnnnnnnnnnnnnnnnnnnnnnnnnncgccgcttcctcgctcatacctcgggcgctcgtccgtttatt

SEQ ID NO: 146880 - DNA, 910 bp, Homo Sapiens
ctattcttaacacagaggaagacaccatgaaatgtacccacagcacaggacccattggagtcacacataagctggttgaatgtgctgcaccaggcctcctcggcatcgtccacaggtctcctggcttgaaagtcggcaaggaatgtctgagaagaagggcgagggaggtggagagacttgccgtgtcaccttctccaaagctcgccagggtaaacctggtccagtgcccgattgcctttttcttccccctcagtcatgtccaggctaaagctgtcgctgcattcaaaagctgctgggagttcattgatggaactagaaagatcatcctcatgcacggtggtgtcctcctcctcacgaacagcttcagcctttgaaccctcagaaatctgcagattattcatatcaggcaaggaagcatcaaagctggacattctggtgttaaaggaatgaggttctgcaggggtcgagtcacaggctgtggtgagcagctccatgggattcgtctcttcagagggggagagagtcatgattaggtctgagtgctccaggatctggctggctgtgaggtcctcctcctcggatgattcatcggagtcctcatggtgcattttattcaggctaggagtgcttcctgacagttggcgctcctccagaatctgcatatcacacttatccaggctgtccagagaacgtctgcgcactccccagttgaaattgtccatactctcaccctctccatcctccagctccacatctaggaagtcgaagtctctgaagactctaaactgctgctcgctgtttgtgtcatccatgttctcctgctctcgggcaccgtcctcagaagataccaagcttgtctccccggccgtaatggccgaattcccgggcatatgtccggtaccgtcgactg

SEQ ID NO: 146881 - DNA, 1592 bp, Homo Sapiens
cttcgtgtgccgtcgctctctctttccgacgcgtttcgattgtttgtgtggtgtttgtgtcgtgggtttgttcggctttgtgcattgcgtctttgcctaagggtctgtggtgccctattgcgtctgggctgtcctgtgttaggtgtgcctctgtggttctggcgtgggtttcgctgggctatgcgcggtgcctgtcctcctgtctctctggcctcgctttgtgtgccatcctggggttcccctggccgggggtggtgtcatcgtgtggtcgggctccgttctctgtgtcgagtgggccgctcttgccgttgggctcgttgcgcccgtgtggcgttgtggctgtgggctgttgtggcccgctgtctgcttccgaggggtgcctttgttctcaggtgtcgcagtgcttgcctcgggtagtagtgttgtgtctcgtctgcggtgtccagttttcgcggagtcttgttgcgttgcgccgagtgcctttcggtgtcgtggggcctgggtgcgttttgttccgcctgtgcgtgtctcctgttggcagttgggttttttgtgggcctggtgtgcttcgggtggtcggggtgtctcttgtcatccttggtgctgctgtggggcgtccttggtgggtcgcgcacgggttggcgcttccggtgtggcctcaggcgtttcgccccgtcgccagagtccctccccggtcacgcagagtcttccgaaccggcacccgccaccccaccgcgcaccagtgccgcctccccctgtccctacagctgctccctccctgcgccccctccacggggtcgcttgggagcagggcctggggcagagtcaggggcggagtctgagctcacatcttctccatccccttctccctccccgggctctccttcccccccactcatcgttgtggtctgatctgaccctggtatcggccgcctcacacgctgggccctgtgcatggcctgcatgcgtagcccctcctcaatgctggagctcaatgcctgctggttgtgcaggcggctcaggcggataagcactcggtcttgatgggcctcgtattcctcccggctaggatagatcttagagatcagggcatcaaagttggggtctggccgtagggatcgcttggacaccagcttctttcggcaggtaggacactccttgttcccgctccgtagggctgtgacaatgcagtcagagcagaatctgtggaggcactccttggtggtcatcgtattcttcagcatgtccaggcagatagggcacatgagttctgaatgcagtgaccgaggggaaacagcaatctctgtgccatccattatggcttcctgcggggtccggtgcagctcatacagactcagttcccacgttttgctggcattctgggcattcgccggcgtcgtcatggtgaccgggcgcagaccccccaccagggctccacagccgaggagaaggcgaagaaggccagctccagccgttcgcgctcccgccgccgccgcgcctctccctaggcccgggctcctgggccaagttccgctcggtccgcaaccgctgctcagacagcagctcccgccaccgccgccgccatgcccggc

SEQ ID NO: 146882 - DNA, 1012 bp, Homo Sapiens
  misc_feature (492)..(794): n is a, c, g, or t
cagtcgacggtaccggacatatgcccgggaattcggccattacggccgggattgtggcttttacatagaaacatattcagttgtacttgttttaaattgtatacaagctgtacataaaattagccaaatgaatcatttcttatatcttattcatgaaagtttgcatacagatgtttgcatatatgcctttttgaatttttgctggttaacctttatcatttatctttgtaatgtgaacatgcttcagagtgtaccttttgccataacctattttaatttactttttctgaagtttggagtgataatttttagtggaagcaatttgtaatttaagttggtagttatattatatatagaaaagattttttagttaaacttctggacatgagcgtcctgtttaaatttcttgttaatatcgtgccaagcctcaaaaataggcttattccatggaacaagaattaacaaatgaataagctatcaatatataatttnnnnnnnnnnnnnnnnnnnnnnnnnnnnnnnnnnnnnnnnnnnnnnnnnnnnnnnnnnnnnnnnnnnnnnnnnnnnnnnnnnnnnnnnnnnnnnnnnnnnnnnnnnnnnnnnnnnnnnnnnnnnnnnnnnnnnnnnnnnnnnnnnnnnnnnnnnnnnnnnnnnnnnnnnnnnnnnnnnnnnnnnnnnnnnnnnnnnnnnnnnnnnnnnnnnnnnnnnnnnnnnnnnnnnnnnnnnnnnnnnnnnnnnnnnnnnnnnnnnnnnnnnnnnnnnnnnnnnnnnnnnnnnnnnnnnnnnnnnnnnnngaacagaacggacaaaacgagagtacaagtttattaaagctatgactagtgaaaaaattcggaattgctggctgtattttaagaccattttacacagttcattttgaaacaagctttccgataagaagttggacatggctggcaaaattgttggtttctacaatttatttgagggtttattatagagtcaaccagtaggatctgatagacaacttggg

SEQ ID NO: 146883 - DNA, 926 bp, Homo Sapiens
  misc_feature (816)..(850): n is a, c, g, or t
ttggattagtttctttgcaccatactttactgtatcagatatgtcagttatgtttggatgatttcttccattttatatttaactcacttattcatgttaccaggttaagtataatcctcatggtattcatagctctgtagagccttgaagttcgctggctgacccatttcctctgtgagagtttctcctcggagatggcgaatccattggaggacacagcacccactgctgctgctacattgtctcaactggtgttgttcttcctagggtttctctcataagctcatgctttccttagtcaggaggggttaggggaaagggctggggatttctgaagatattggcatgtttccaagaaacatcctgtagccatattcactatactgtctccttcatgccagagtggcacagggaaagctacatggttatctagtacagcttcattcaggaggtgaggcagactgcgcctctattcagggctcctagatatgtctgtggcttctactcccgtcccttttcccattgtcactaaccctatgtgaggaataagtatttgttccttttcagacacccacattattgtcttattctaatgtttttctgacttccatttcttttcctgcctaaagaatttttatctcaaggtgacaagggaagaggaaggcttctactgtcatcattcttcataaatttaaagttttgagaatacatttttacttttgatatttttgagattcaaatttcctttatcctaacttatttctccccggccgtaatggccgaattcccgggcatatgtccggtaccgtcgactgnnnnnnnnnnnnnnnnnnnnnnnnnnnnnnnnnnncggccgcttcctcgctcactgacttcgctgcgctcgtcgttcgcatacaacgagtgagcccctatatgattattca

SEQ ID NO: 146884 - DNA, 447 bp, Homo Sapiens
gcctggccgcccatcgtctgggatgtgaggagccctcagacctgcctgcccagtctggacagtgaggagcgcctctgcccggccgccacctcgtctgggaagtgaggagcgtctctgcctggccgcccatcgtctgggatgtgaggagcccctctgcctggctgcccagtctgggaagtgaggagcgcctctgcccggccgccaccccgtctgggaagtgaggagcgtctctgcctggccgcccatcgtctgggatgtgaggagcccctctgcctggctgcccagtctggaaagtgaggagcgtctctgcccggccgccatcccatctaggaagtgaggagcgcctctgcccggccgccatcgcatctcggcagtgaggagcgtctctgcccggccgcccatcgtctgagatgtggggagcacctctgcccaaccgcatcacccgtt

SEQ ID NO: 146885 - DNA, 1448 bp, Homo Sapiens
  misc_feature (39)..(39): n is a, c, g, or t
  misc_feature (195)..(195): n is a, c, g, or t
gcggcgggagccgggccaaccaaagtttcttcttacgtnatccgccgtcatgcatacttcgcacggagaaacaggtagggttccccggtccccctaattttttcccccttcttcggtttttccggcttcttcttaggataccctctttggtatagggctgctccttcccggaagccagccccttttcctcctttntggagatgagccaataatggggagccagttggatggtggacttcttacccaccaggggttctttttggattggactccagggacccagaaaccaatggtcgaactgaccctgggggtgttcccagactgatacacggccaccaccagtcagcagagttgagcccatctgggatgtgctggaaagtggaggactaggttttggcacggggctaggacggggtgaccgccgcctcaccaccacagactggagggggcttttgagagctgggcttcgctcccgaggactcagctcagaaactgctgaggcccgtgatgcagaaccagtgccgtaggtggcatctggccatggcttcgagctctcagatgcttttgtatcttgagagggtgcctcccagagaaatgtctggtccttgaccttcatctccctggttatccccggcagcctgagatggccggctatccttagaagaggactttttctcctttgcaggcttgcgcttagaagattcaactcggctatggttggaggaagaacgggagggatgaggagcgccttgaccggtcagaagacgacttatcagagtttctagaaatggctcctggaccttggtgaaggggaccttctctttggggaccgggatcttgaacggcctcgacgaggactgtatgcttgccggtaattctgccaatttgagcggtagtttccatagcctcctcggttatattggccccatggataaaagcctctgttacgcccacggaaataatagggccttctatagcctctgttgtgacctcggaaatcccgattctgatatactcttgggtggtttctttctctgttatgagctggagaatatgatctggaacgagacctagaactcagcctgcgcttccttgaacgagagagagatcggcttcgggaccgagacttcgaaaatgaacgagaacgagatcttgatgcagatcttgagcgagaagagcgagatccagacttggatttgtttgtttttgacatctctgaagagaggatcacttttcaattacaccttatttgaacaatgattcaactcgtactggatcccagacactaccccaaaagaacacccgcagcaccactggcttcttcactttacaagtcagcatacacttctgggcctaccacagagatcgcagctgcagctcgcaacggaacaaccagcccgaacctcgcccccgccccacagcgcccccggccgtaatggccgaattcc

SEQ ID NO: 146886 - DNA, 841 bp, Homo Sapiens
cagtcgacggtaccggacatatgcccgggaattcggccattacggccgggggtgacctcaacaatattagcttgcacaaaccatagagaacgatgttggatggttacataatcagttataacattctggcagctaaatgctacaagagctttttcttgcaaaagcttaaaatacaagatttttaataatttactcagaacagtataacttctgacacacacaaatgcttgcctctttattcatatgttcgttacctactctgtacatgtatctgtcatttagctgtttctcaagatgatgttcagcagttggctgcttagaaatctttttcaagccagtttctaaagacatttgtttaatgttctaccatagaataatgcacaccattgtcaaagatttgattattgtgttttatagtaagtccatttgacatttatttccctttcagtttattttccttccttattttgttatacatacccttccctttctcccctgcctttcgtacattcattcctcttcctctaccctccagcacatctacttactggtgctgtgctgtgtgtcagaagataaaacaggtgtattatcgtataatgaattctgtatacatgtttcatgaaatggtgagatcaactaaaggaggcatgttcataacagtgtttattatcagcagctatgtcccaggaaacaacaaatgggagggggcaaaatgggctacagttgtaaatgggtaacatcatttagaaagccgaattactggtcatctgaagggttactggagttacatatctatgcactggtgagcatttctggattcatttacttttctccctgtgaa

SEQ ID NO: 146887 - DNA, 818 bp, Homo Sapiens
  misc_feature (706)..(740): n is a, c, g, or t
gtaataaaagaaaaagcaatcctagcattagagaacaagaacctaactattaagttggtgctgtatgacacaaaaaaattctttcaagtgactttaagcacagtgttttgacattacattctagtgggatatgtcctaaagacaaggaaaacaaaagcccaaattgcatttaacagtcttattgttagtagtaatactgtattatttagaaacacatatatgttgtgatacttacataagtaacaacatcatttgaagaaccaagatattcagcataagataaaaatgatacaagtataacataacccaaaattagcctgtatttataaatttgaaatatcaccattaattcatgatttacctagcactacctactgaaaagacccagaaacaatgacaaccagtaggaatgaacatgtcagcatccaaattgttgcttccaaatagtattatctattaaaaggatcacggttccttagaaacatggctgattccaggcatgacgcaggaagtatacatgagcctgggacgtcttactattccagaaaacaagaaactatcaaagataaatgggggaaggaattaaaaaatacaggaaccaacttagtaattcctaatggctacagatggcacaatgtgaacatcaaaaaagaatcccggccgtaatggccgaattcccgggcatatgtccggtaccgtcgactgnnnnnnnnnnnnnnnnnnnnnnnnnnnnnnnnnnnccggccgcttcctcgctcactgactcgtgcgctcgtcgttcgtacgaagagtagcccctatatgatctatacatcttt

SEQ ID NO: 146888 - DNA, 884 bp, Homo Sapiens
  misc_feature (771)..(805): n is a, c, g, or t
  misc_feature (827)..(827): n is a, c, g, or t
ctgggcgagtgatgccgagcgcctacactgatgagaagagggccactgccatgccagtggctgccaccacaatgccaaatcgctcaaagaacgggttcccagcagtctggcaccgctccttcatgactagtccaagcaaaggcatgaccatggaggcgggcaataggccactgtttgcggacattcggaactggaagacggcgcttccctgctgtagcagccggtcccacttgtattggacgtagaaggcctgcactgcgagggccacggcgcaccacgagtatcggtcccatacggttgcgtggatgctcagcaccactgcaaacactactgccgcctctgccagcaccgatccactcagcggagccccaggccccggggccggagatgggcactctcgggtcatatctctagacctggggcttcacggaggccggggcgactacggacgccctagacttcgggcccctcagccccgtcaagcagagggaggcactttcacccggccagcaaccttctccctccgttctccagcagcgaggagggaactccaccgcaggtcacttctgcggcctgggagctggcgcccggccaccccccacagcctccaacctacggcgtagacgtcgccactctgcagccttcctcacagttacagccgcccccgctgccggctcctcacctctttgggcctcgccatcttggcaccgccccgcggcccccggccgtaatggccgaattcccgggcatatgtccggtaccgtcgactgnnnnnnnnnnnnnnnnnnnnnnnnnnnnnnnnnnncggccgcttcctcgctaactanctcgctgcgctcggtcgttcgaataatgaggatgcgccatatgagctagatacgttc

SEQ ID NO: 146889 - DNA, 1111 bp, Homo Sapiens
  misc_feature (988)..(1022): n is a, c, g, or t
  misc_feature (1026)..(1070): n is a, c, g, or t
tctgtgcgccattggcttcctttctctgttgtcctggcgtgccacggttgatgcgttccagcgtgtgcagatttgtctcggtcagagctcctcgtcttatccgcgctgtgtctctctcgtccagctcccactctgtggagttcgttgcattggcgttgtgcgttgcttctggatctccgtcctgccgccctttggtacatccgtattaggtgtagcagccttccttgttctccctcaccacgcgctggatcaggcccagcaactgtgccctctgggcctcctgctcagcgcctgttgccttgttgtttaacgcacagtagcggtcaccgaaaatgtccatcaagtcttgaatgtcttctggagcttcccttaagtagtcatgcaaaattggtgtcacctaagtcatctttccgggtgaatatgagaatcatgaaacttctagccctctctccaaacattttcaggatcttctctgtggctttgtgctcttcctcagtgtaacggcccagtggaaccaccagaagcagagcatgaggccctggggaggtcagaagaatgcagcgaataatctccttggacgtttcagcattgggcacctctgtgtcgaaaatgcctggtgtgtcaactacgacaagttctgtttccttccatgagctgctgcgtttctcacacttcttggtaatggattttgctgcagtgccagaatgaaacactttccggccaaggatgctgtttcctgttgcactttttcctgctccggttttacccactaacacaattctcaattgggaatttctgggctcttgccttccaggcccataactggccctggtgtgctggggttgaagctcatactgccgtattgggctgccattgtcgcttgaactcctgaaaaatcaggatcttgcacccctctctgattttgcacacaatactccccggccgtaatggccgaattcccgggcatatgtccggtaccgtcgactgnnnnnnnnnnnnnnnnnnnnnnnnnnnnnnnnnnncggnnnnnnnnnnnnnnnnnnnnnnnnnnnnnnnnnnnnnnnnnnnnntacgacgctagcgccctatagtgagtcgtatacagtctttt

SEQ ID NO: 146890 - DNA, 1381 bp, Homo Sapiens
  misc_feature (669)..(722): n is a, c, g, or t
  misc_feature (1263)..(1297): n is a, c, g, or t
  misc_feature (1301)..(1340): n is a, c, g, or t
taacataaacaacccatacaccattgttccagatgcttgcttgtaaagttgactgatcttgggagttttatttgctatttcgataattctgtttgggacctcaaaattttgattaaagtcagacagagatgatgcttcctttatttccattactcctttacattcagagtaatcagatatggtaatgaccttcttccttacaaatttctctttcaagttgatgtcgaagactttcacatggaaatattgagtcttactggccactgtagcatgaaacattgtgcttttcccattttctggggactcgtatttaaatggcgctgttgctttcagtaccaccactgtcactgggtcgttttggggaacatttcttcttgcatccacctgccgttgggcctgggtttcctgattcggagtaaacgaagtgttggatggagttgatgatgaggtctggggtagtgggggatgatccacagctgcagatgtgctggctcctgagggacccgggggcttactctgctcttgggacacctttattccttttggcttcagtcttttcttttttttgagtttttcttttctgagctacaggaatcctccctcttgcttccgatgtcagtttgtttcttgcggtgggtgcaggtgccgcaagacccacttcttcctggnnnnnnnnnnnnnnnnnnnnnnnnnnnnnnnnnnnnnnnnnnnnnnnnnnnnnngacttctcttttcgaagattgttaacaaggtttttaagtgatggcatatctttggcaagttctattagtttgtctagacaggcaacgccttggaactttgtttgtccatcaaatctgtaatcttaattctgttgtattcctcttgcatttttgtagttagtcctaaatcataggccagtaaggacttaattgatgtaaaatgataatcatccatgagctcaaatcctttcagcaaaagaattttcttgtattcattcaccatttctgatgttatagcttggccttaatggatgcttcttccacaatagtcttcagaaatcctggagtcactgtcttgtttaggacagaatcactgtccgtaaagctttggagagattaaactgcagactattttaatcttgtaaagggctgagaaatgaaagctaacaaggaaaaatggcacttgttagagccactctcaatcttgattgtagatggccttcttacactccccggccgtaatggccgaattcccgggcatatgtccggtaccgtcgactgnnnnnnnnnnnnnnnnnnnnnnnnnnnnnnnnnnncggnnnnnnnnnnnnnnnnnnnnnnnnnnnnnnnnnnnnnnnnctaataacgcgctagcgccctatagtgagtgatacagtttt

SEQ ID NO: 146891 - DNA, 946 bp, Homo Sapiens
  misc_feature (86)..(120): n is a, c, g, or t
aagactttggttactacttagggcgcctagctcgccgcagcgaacgaaccgagcgcagcgaagtcagtgagcgaggaagcggccgnnnnnnnnnnnnnnnnnnnnnnnnnnnnnnnnnnncagtcgacggtaccggacatatgcccgggaattcggccattacggccggggggaattaggacagtgtaagaaggccatctacaatcaagattgagagtggctctaacaagtgccatttttccttgttagctttcatttctcagccctttacaagattaaaatagtctgcagtttaatctctccaaagctttacggacagtgattctgtcctaaacaagacagtgactccaggatttctgaagactattgtggaagaagcatccattaaggccaagctataacatcagaaatggtgaatgaatacaagaaaattcttttgctgaaaggatttgagctcatggatgattatcattttacatcaattaagtccttactggcctatgatttaggactaactacaaaaatgcaagaggaatacaacagaattaagattacagatttgatggaaaaaaagttccaaggcgttgcctgtctagacaaactaatagaacttgccaaagatatgccatcacttaaaaaccttgttaacaatcttcgacaagagaagtcaaacagtttgctaagaaaattaaaacacaagaaaaagctccagtgaaaaaaataaaccaggaagaagtgggtctgtgcggcactgcacccaccgcaagaaacaaactgacatcggaagcaagagggaggattcctgtagctcagaacaagaaaaactccaaacaaagaaaagactgaagccaaaaggaatacaggtgtcccaagagcagagtaagccccgggtccctccaggagccagcccatctgcagctgtggatcatcccccaataacccagac

SEQ ID NO: 146892 - DNA, 835 bp, Homo Sapiens
  misc_feature (677)..(685): n is a, c, g, or t
aaattacgcatagatctatttttgtccaaaaaaatttgccttctgcccatattaccatggattaaaactagccaattttcaccttactatgaatgctatctctctagaaattctgctctctcctagaaatctgatcctgcccagaaaaacaataagtttgcccacatgacatttgggtatctggggggctttcacccaataaaagtttataaatccataaccaactgtgagaaacagaaaagggacagttctcctctgttggtaaatattctgggatagagcatgaaaggagctgactcagaagtataaagtagtaagcagcagttgagtggggctgtgtaacaactcagggtacatccaaagaaatgatatattataagagttcttaaccaaacgacaacttgttcattctggtattcagtttcaaaagacagctctgccacattgccagttttaattacaaccatacacactcatttagatttcactactgaactactttcaagtacaagaaggaactcaaaatagaaacgacttatgatacaactattgttattccctcacagcttcagggaaaacaggctttatatacactgtagtaagtacagaatgtacagaagacagttatatatacaaaagtgcattaatatagtaatatatttagcagtaatacaggnnnnnnnnntcctggttaacaatctgatacattacagtatttaaaactacttgaagattctccaaaccagtcaacttcctacttgctttggttatgatattgctgctaccccggccgtaatggccgaattcccgggcatatgtccggtaccgtcgactg

SEQ ID NO: 146893 - DNA, 1150 bp, Homo Sapiens
  misc_feature (234)..(242): n is a, c, g, or t
  misc_feature (472)..(555): n is a, c, g, or t
  misc_feature (1019)..(1053): n is a, c, g, or t
  misc_feature (1057)..(1095): n is a, c, g, or t
cccgtgttatattattttctcctcttagcgtctgtttattcgcgttcggtgcgctctattttcttttgtcctgcgtccgggccctgtattcgtctgtgctgtgtgttgtagcacgcccgtttcatgcccgcttgttgacagttcttgttgatttgtttcccgttctcgggtggtgtgtttcgtatatctctcttctcggtgtggttgtgttttgttcgcccctctttgttgtgnnnnnnnnntcctggtttttgatgtgtgtgtccttgttccctcacgagggtgtctccttttttgcgcatgttttgtcctctatgtgcgctgtgttgtttttggctgcgtgcctgtgctttcttgtgtgttttttattttgcctcccattatttgtgcgccccttgtttatatagagacccgctgttagtgctccaatatttgtgtggcgctcctgtcgggggttttttttctgtggggnnnnnnnnnnnnnnnnnnnnnnnnnnnnnnnnnnnnnnnnnnnnnnnnnnnnnnnnnnnnnnnnnnnnnnnnnnnnnnnnnnnngaattcagcataccgaattttatttattgccactcaggagggtgggggcctgctgaaagacagggtcggggcctgcctcctgcatccccggcccaaaagcccgggccaagaaggacacaggcttcaatggctgtcatgtgttgcagacaacatggtgttgagatcttgcatggtggagggtgacgctggtccctgaagggagatggaggaggaggcagagcttttcaagcaattccaggaagctggactcataggaggaatttgtcagaaaagactccttcagcttcagttgcaaagtcatacccggccctgttccatgtgagctgccaggagggtcaagaggaggacaaggggcagcccagaccccatagtggccactgcgctcctgggatggaggagacactgaagtcccccccggccgtaatggccgaattcccgggcatatgtccggtaccgtcgactgnnnnnnnnnnnnnnnnnnnnnnnnnnnnnnnnnnncggnnnnnnnnnnnnnnnnnnnnnnnnnnnnnnnnnnnnnnnctcggcgcactaagccggcgccccgtaattaagttgagttctatttgcaagtctt

SEQ ID NO: 146894 - DNA, 622 bp, Homo Sapiens
aattcagcataccgaattttatttattgccgctcaggagggtgggggcctgctgaaagacagggtcggggcctgcctcctgcatccccggcccaaaagcccgggccaagaaggacacaggcttcaatggctgtcatgtgttgcagacaacatggtgttgagatcttgcatggtggagggtgacgctggtccctgaagggagatggaggaggaggcagagcttttcaagcaattccaggaagctggactcataggaggaatttgtcagaaaagactccttcagcttcagttgcaaagtcatacccggccctgcggatccagaagtacagcttaggacccagcagtcagggctgattcctccggagacacagaaccttcctgctcacgctccccggcacagttcctcttccccagcaatgcccctccagagcctcttggaagctcaggactggggtgtctctgtcactctcagggaccatgaagtcccaccccttttctctggcctcttcttgccacagggacccaggagtcctgccctctagccctcacctgttccatgtgagctgccaaggagggtcaagaggaggacaaggggcagcccagaccccatagtggccactgcg

SEQ ID NO: 146895 - DNA, 521 bp, Homo Sapiens
ccagacaccccagagtccctttattgaggttcttagaaggcgagtgcaatctcagcctagggtagctgaaggaggtccagttcgtgtcaagtctgtgttcaggaagtaggtgcagagctgccctttgcctttcaccttgatgacaccccggctgtagcaggtgtagcccagggactgtagggcccatgctgtctcctcagtcacttggattttgccaaggactcctgtactctccatgcggctggccacgttcactgtgttgccccaaatgtcatattgcggcttctgggccccaataactccagctactacgggtccatggttcaaccccactcgcaggcggaagttgttgaatgaatgcttgttgatgacgtccagcttagaccccagggccacggcaaattccaccatagtgccaaggtggctgcagctccgttcagcatcctgttgtgcatcctgtccagaggtggccccggccgtaatggccgaattcccgggcatatgtccggtaccgtcgactg

SEQ ID NO: 146896 - DNA, 1287 bp, Homo Sapiens
  misc_feature (917)..(951): n is a, c, g, or t
  misc_feature (1179)..(1213): n is a, c, g, or t
ggaagaaaatgtttatttagcaaaaaggtatggagtaaaattggtagaatagaaaggagaaattagaagtggggaattctgagaggctgttttaaaacatggtaactgggaaataattttgacaaaattctcataggtaatgaagcttcatatgcccttactgcctaattaaaaggcacctaataaccaattttatttgtattaattgtattgggaataattttctctaaccttctacctttcataaggaaaaatacaatccgtgaacacctagatggttctgttttcactgtatggcacaaagtatcaatgatttaactgtggagattagtatcaagtagagacttgtcttcttgtgttcaggaaagtattagcctttaactatgcattttaattgtcaggtatgccttggccatttgaactgtgttactcttccctatcacagcataatggagataaaaccattgtttttcattacctaaccacagagtatcaactaatttaaataaaatttctagcagtaaacaactgtatctatgtgattttttaaagttggtttttctcaaatttaaacgataccagtattgactgtgactccaagacatatttgagtgtcttctacttaccaggcacagtggtagtttgtatgaatatttcacatcaatcataacaagccagaaatagagatgacccctattttgtcaagccaaagaggtaatatagcttgatcactgtcatatgactagaaagtagcagggctataatataaacccaaggtttttgattctaagataatacctttttatagtgccattatgttgcttttacacaatttctgataatagcacttattaattcatatttagtggacagttttctccatttggcagtcactttattactttattttcttagtnnnnnnnnnnnnnnnnnnnnnnnnnnnnnnnnnnnttgatccaatccttaggattacaatggcaattaaatagctgtttaaaaaagcgggggtgtggtgggttgagaatgtggccagattttttagaagacctgtcacctttgctcccagaccatcttccactcagaggtggaggggaccctgcttaaaacataagaatacaattttattctcccggccgtaatggccgaattcccgggcatatgtccggtaccgtcgactgnnnnnnnnnnnnnnnnnnnnnnnnnnnnnnnnnnncgccgcttcctcgctcaatactcgctgcgctcgtcgttcggtgaagagtagcgccctatagtatctatacatct

SEQ ID NO: 146897 - DNA, 994 bp, Homo Sapiens
  misc_feature (770)..(770): n is a, c, g, or t
  misc_feature (903)..(918): n is a, c, g, or t
cagtcgacggtaccggacatatgcccgggaattcggccattacggccggggacttcggggcgcgtcactcggagcggcgggtcccgtctcgacaggtcttctctgttggttgaaatgtctatgattttatctgcctcagtcattcgtgtcagagatggactgccactttctgcttctactgattatgaacaaagcacaggaatgcaggagtgcagaaagtattttaaaatgctttcgaggaaacttgctcaacttcctgatagatgtacactgaaaactggacattataacattaattttattagctctctgggagtgagctacatgatgttgtgcactgaaaattacccaaatgttctcgccttctctttcctggatgagcttcagaaggagttcattactacttataacatgatgaagacaaatactgctgtcagaccatactgtttcattgaatttgataacttcattcagaggaccaagcagcgatataataatcccaggtctctttcaacaaagataaatctttctgacatgcagacggaaatcaagctgaggcctccttatcaaatttccatgtgcgaactggggtcagccaatggagtcacatcagcattttctgttgactgtaaaggtgctggtaagatttcttctgctcaccagcgactggaaccagcaactctgtcagggattgtaggatttatccttagtctttatgtggagctctgaatttaatttgaggctttcatgctatagaaagtctcctgcanaagtgatggtgaatgatttttaattacatccattggcattttttcttgggaaaagcaagcctgccttttaccaaggggtattttaccttgggccaactaaacccgggcttgggggggaaaggtccaaaatccnnnnnnnnnnnnnnnnggggcttaaatcctgggccctaaggcaaaaaagggtaatccttctattggaaacctgggggccaaacccttcttgg

SEQ ID NO: 146898 - DNA, 735 bp, Homo Sapiens
tacagtatagaattacttttattatgtctagctacatttttaaaaaagacaataaaagattctgacctggttttgttttctcacatacagcgtcactaaaaacactgcttttattcagcttttcatccatggtgtgtgctctggctttcacacaatatacagtcagtggtttcaaattaggaactgtaacatcagtttttttctcgataatttttctctcagcatttgaagtgttttcccaaaaaataatttcataaatcagtggataatcctggatcacaggcgtgtttccagactgttttggagcaccgatatagatatggaatgaatcactaagggatctaatgttaaagactggaggaagtaggaaagcttgtatttcagtatcaaactttatctcttcagaccaaaaagatgtgttatttccatcagatgcttgtacgcggagaaggtaaattcctttttggaaaacgttttgaggaaagacacactgggtagttttgacattttcacagtcaggtatttgtttccatttatacaaatggtttccaggattcctttttaaaaaggcgtggagccactgaacttgaaaggtcatgtttgcatatgtataatcccatttaagaacatagttctgattttggacactgacttctatattttctggtggaggtagttcattttccccggccgtaatggccgaattcccgggcatatgtccggtaccgtcgactg

SEQ ID NO: 146899 - DNA, 1290 bp, Homo Sapiens
  misc_feature (1189)..(1189): n is a, c, g, or t
  misc_feature (1201)..(1214): n is a, c, g, or t
aggagtaagatcataaactgtattcattttcttccttgtacaaagtgatgacttctaatgcttatatctcaaggtattttttaaaaaagcaacggtccctaatagagtaaaatttggttttggtccaagttcccaataatgtatttaatgtttctgttgtttactggtgcctcccgttgcatcaggtagagattgcctgcctctttgtagggcagccttgtggcaccttatgtccaacttggaggatagtatatggcttctttgtgcctctactatcttttcaaaggccattttataaaaatcctaggtagcctattttaatatttaaatatatatatttgtgaaagaacttttagaacagaccttttctttttactttaaaattcctgtatttccatttttaagagtaaatttaatctccaggatttagaagtgtctttccagagaagcataatgagaaagtcagactgaggtaataagaccagaattaagtgatagaagaaactgttgttggttaaaggacacagatttgaaggaaaaaaattttgatgtaacaattttttaaataaaattttgtttttctgtaatgtcatatttgctgctacagtagctcaatattttacagggctaacataaagctggctccatttaaaaactggagtacttcctagtgcagccagcctaggcggaaactgtacaccatggtcttccagatgggtgactgatggctttgggtagctgatgcatgctttaatatttgcctatagcccggcagcaaggaagtcggggcggggggacttttttaccctgccagttatagcattgtgattctttctgggcactggcattttgtgaaactctcaagggaaggtgatgcaggggagaaaatgtgaattaaattacatagatgggtgtttttatgtcttctacccctttcctagaattagtacaactcttaactgtgccagtccccagttcaccagctttgtatccagtcgtcatctcattcaagtatggctttacttggtgacactggccatagctaagttaacttggcatgtttgacttttgacaataacaaaaatggttttggattttgttttatttccaaaaaatgtatacaatatcagaacttcacattttatatactagtatctggctattagtattttacaggaaccatagttcnttggtgactacnnnnnnnnnnnnnnttttgtgacctttttgtgtaaataagtgccgtttcaacgttaccaatcattttagggttatggtatcaatgtgaat

SEQ ID NO: 146900 - DNA, 1441 bp, Homo Sapiens
  misc_feature (77)..(111): n is a, c, g, or t
aatgtataatcctataggcgctactcgctcatagcgaacgacgagcgcagcgagtatgtgagcgaggaagcggccgnnnnnnnnnnnnnnnnnnnnnnnnnnnnnnnnnnncagtcgacggtaccggacatatgcccgggaattcggccattacggccggggtgaagatggtggttagtagtttcactagactgatattttaggcctcttgttcacatcaaaagatattggtgtcagaataccagcattttcctgccatgcaaaggattaaaacttagtttacactatgtggttacaaatatatgtcaatgtacattttgaacatatttatgtgctatggaaggaaatgctggtgactaaaataaggtttactctgaaagaggaggaattttattcaaagcattcaaacattttattcaagtgtttcaaaattcaaagcattgtattcaaagttgcagtgaaggcatcaacttatgtaaaaactcagaaggaaggctcctctgataaaaacacagctcctttattatgctgcttttcttgttcactttacacactaagtaaacacttattgtcaggtgcctagtcttgagtgaattgttagatgtgcactgaactcgggatgttggggattggagagagagaattgccaaagtaacagcaaaaatatctcttactttgctttgtttataaataaattagtagattggaaaaactagtgttagggaaagaaatcacatgttcagagcctaattcagtaggaagggcttttctctaccctgaaatgaaggtaatccaaaggcatccattttctaggcttaaaagatatatttttgatatatttaatgatattctctacactccagcattaatatgtctgtttaaaaattactaattctcaaatggctcaagaacattagaatttaagtaccttttagagtaattattttaagcaaatagcctggacgtaagagattctcatgccagcatgctttcatttgtcagttgttgtgactgagagataatgaatgacacctgaaatgcatatggtatttctgggagagttaaggtataatttgaaggttggcagaccagttgtgctgattactcttagagaagaacgcacatggccaacctgaaagaaggcaggcaaggaaacgaccaggactataggaacgagagggaacgcgaagggcaggcatctttctactttccccaacaaacttcatttcacaccaccactctggcatctccggcgatatggtccatgggcaagaacgaagaactggtgttccgcaaagcacgcactgggttcctctcacatggcttctcacttcttacaacgacaagtcacgctctcggacgattatcacccttaccccggtgtccaatcaaccactcaacacgggggctcatcgaacacacacggacgcactctccctgg

SEQ ID NO: 146901 - DNA, 1090 bp, Homo Sapiens
tgaggctcggaattttggtgggaaccgtagaaacgggtttaagaccagtggtctaaggagcagaggggactgatggcatcataatggcctgggggaattgctgtcccgggaagcccagctcagcagggtccagggcagcttgcaccacgtggtgggggcacgaagcagatgatgaacaccggcccaagaccgggcacaccatccaacagcgcccggcgccttgacttcagcgttgcgctgctgctgcaccggctgcaggagcaaggtacggatgatgaccaggttgcagaagaggatgatgaggaagaccaggaagaagctgaacacgatgaagatgtggatgatgaggactggcacgctgcccttctcgtaatgctcaaagcagcgagtgacgttgcctgagccagcactgtcgggcactgtgttggtggagtccaggatgaggaagtaggatgcaagctgcccacaatggccacccagatgaccacaggacaaagagatgccacgcttgcgggtgttggcctgagcagtcttgatgggccgagttactgcctggaagcggttataagtgatgacgcccaggaaggccacagagcagtaggtgttgatgaagaaaaggcagccagccacgttgcacaggaatttggggagtatccagttgccctggttttggtagtagacaatccaaagtggcagggtgatcaagaagagcatgtccgccatggtgaggttcaccatgaagatctttatctcattgaatttcttgcaagggtacaggcgggcaaagacccacagcacgtagccattagcaatgaccccgagcacaaagatgatgctgtaaacaatcgggaagagagtgtatcggaactcagagtccatgtgggaggagtcatgtggctccattgctgtgggctggaatgatcagctggtcctggtggtgcctgtagcaggggcagcggcttcagctgcagtgaccgtgtgtctctgtctgggtcctggccccagcctcagcctctatgctgtctggcattgcagaagtccccggccgtaatggccgaattcccgggcatatgtccggtaccgtcgactg

SEQ ID NO: 146902 - DNA, 1145 bp, Homo Sapiens
  misc_feature (1095)..(1104): n is a, c, g, or t
cagtcgacggtaccggacatatgcccgggaattcggccattacggccggggcatttgtgcctgcctagctatccagacagagcagctaccctcagctctagctgatactacagacagtacaacagatcaagaagtatggcagtgacaactcgttgacacggttgcacgaaaagatcctgcaaaatcatttggagggaagcggttagccttctctataagggtagtgtccatggattccgtaatggagtttgcttgacagatgttgtaatcaagggcctactctaacagtgatttatagtgaagatcatattatggagcatatgcggaagagagttaccaggaaggaaagtatgcttccatcatccttttgcacttcaagatactaaaatttcagaatggaaactaggactatgtacaccagaaacactgttttgttgtgatgttacaaaatataactccccaactaatttccagatagatggaagaaatagaaaagtgattatggacttaaagacaatggaaaatcttggacttgctcaaaattgtactatctctattcaggattatgaagtttttcgatgcgaagattcactggatgaaagaaagataaaaggggtcattgagctcaggaagagcttactgtctgccttgagaacttatgaaccatatggatccctggttcaacaaatacgaattctgctgctgggtccaattggagctgggaagtccagctttttcaactcagtgaggtctgttttccagggcatgtaacgcatcaggctttggtgggcactaatacaactgggatatctgaagaagtataagacatacttctatagagacgggaaagatggcaaatacctgccgtttaattctggggggacttacctgggggctgaaatgaagaaaaaaaggcgggcctgtggcggggaatgaacctatttccaaaatcctgggaacgggtaaactttccgggaataaaaacccacgttttaatcccccttgggaatccaatccaaatattaaatcccttccctggacctacacttggaatttcccaccatcccctttgaaaggaaaaagaaatttcctttnnnnnnnnnncaaattgtgtgaattttgggagggcccagactctctatatt

SEQ ID NO: 146903 - DNA, 1046 bp, Homo Sapiens
  misc_feature (166)..(424): n is a, c, g, or t
  misc_feature (826)..(835): n is a, c, g, or t
tgactccctgcaacttcctgcctctgagagacctgctgcaagccagcttccttcccttccatggcaccagttgtctgaggtcgcagtgcaaatgagtgggaggatgtgagattattcgaaaattataatatacgaaattatatatatatattttgagacagagtcnnnnnnnnnnnnnnnnnnnnnnnnnnnnnnnnnnnnnnnnnnnnnnnnnnnnnnnnnnnnnnnnnnnnnnnnnnnnnnnnnnnnnnnnnnnnnnnnnnnnnnnnnnnnnnnnnnnnnnnnnnnnnnnnnnnnnnnnnnnnnnnnnnnnnnnnnnnnnnnnnnnnnnnnnnnnnnnnnnnnnnnnnnnnnnnnnnnnnnnnnnnnnnnnnnnnnnnnnnnnnnnnnnnnnnnnnnnnnnnnnnnnnnnnnnnnnnnnnnnaccatgcccggccatgtatatatataattttaaaaattaagatgaaattcacataagataaaattagccattttaaagtgtacaatttagtgggtgtgtggttcattcacaaagctgtacaaccaccaccatctagttccaaacattttctttttttctgagacggagtctcactctgtcacccaggttcgagttcagtggtcttgaactcctgatgtcaggtgattctcctagttccaaatgttttcattatctccccccaacaaaacccatacctatcaagctgtcactccccataccccattctctttttcatctcagcccctgtcaaatctggtttttgtccttatggacttaccaattctgaatatttcctataaacagaatcacacaatatttgannnnnnnnnnaaaactaagccttgctctgtctcccaggctgggagtgctgtggcgtgatttggttcaccgaatcctccgcttccaagttcaagagattctcctgcctcagttcccaagtagctgggattacaggcatgtgggtaacacgccctggttaatttctggtatttagtagggacatgttggcaggctgcttgtgagctcctggctcaggtgatca

SEQ ID NO: 146904 - DNA, 1237 bp, Homo Sapiens
  misc_feature (1125)..(1159): n is a, c, g, or t
caattctttcacctatttttataactgctatacattctgggaacaccacaattgacatatggaaaaagaaaagccctaccctctctttatgagttaaaggctaatttggtccccgacttcatgcttggaaggctagcgctcatctttacactagcctagatggctgtgttttgcccctatgattccttgcagcatatctatgggcagagggaagacaaattgttgagtttttctcagcagcaatggtggtcagtgtctgcaggtatcggagctgaagggctgcaggagattcagtgatgaccatggaggcttctttcagagccctggatgcattcatttctccttcggctgcaataaccttggcgcgggcctcgcgggacgcttctgcttctgcagccatagctctctggagctgcacaggtagtttcacatccttaatttccacacgctccacctttattccccaggcatcagtggcatcatccagagtagactgcatgttgtgtgcaatttcttctctgtcagagaggatctgagaaagattcttggtgcccagaacattcctcagagtagtttgtgccaaaagacgggttgctgagtcagcgttggtgatatttgccacagccagggttgcattctgaacgcggtaatagaccacaccatccacgctaattgtcactgaatcctttgtgaggatctcctgaggaggaatatcaaatgaaatagttctcatgtccactttgatgaagctgtcagtgcatggcagaataaaaaacaaaccaggtcctttggctcctccttgtaaaatgcgacccaatctaaagatgatggctctttcatactcttttataatctttatgcacatccatattgagattgggaaagttataacggtgaataagaatgagaacgccaccaaaatccatccgcaaggtccaaggcccttactggggctgtccttgaaggagtcggggagccgctgggcttcggagtcccgtgtgtgccgcttctcggccatgctgcccgagacgcagtcgcactcccccgtcctcgttgccaaacccggagccgccccccggccgtaatggccgaattcccgggcatatgtccggtaccgtcgactgnnnnnnnnnnnnnnnnnnnnnnnnnnnnnnnnnnncgccgcttcctcgctcacactgactcgctgcgctcgtcgttcgctatacgcgtaggcgcccatagaagtcagtataag

SEQ ID NO: 146905 - DNA, 1015 bp, Homo Sapiens
ccttctcactcccctttatccctcatttccttctctttaactcctcttgcccccttttcccgaccccctcgtctggccttccctagagaaactcagcaggttcaaattgcgtaagcatgcgccccggtacatccaaagccacttggtacccaagagtcaaccccgcccagtaaatcacgaatattattcgcgttatttgacctccaggatcaatattcaagattccatcctccggcaccgttgtcatgaagtgctgaagctacccaacactattcccaagaatgagttacgcaagtaagaagaagccatgaccaaagtctctaaaatgcgggctcggatgtcccctttgttcagggccagcaaagccttctgattcccagaaagagaaaaggcaaagggcatcgatacacaataaacaaaggttggaaaaaaaggggaagcaagattccccaaaccactgaatcacgggagccatttagccacctgaatatagtagttctgaggaaaagaaagcaaggatttcattgctgatgattgagaagggttaaaagcaaaacagccccagctgacactgcgagaagtgaacgtgctcaaaacatcgaatcctgttgacgatggcatcttcatcttcttgttcatctgattttctcttgtatcttgtgatgatgaagtaggaaacaacgtagagaatggcaaaaagaaggaaacatatcgtggactcccgcacttggctgtggaagtgctgctcccgcgccgacacctcgtcctgcccttccatcctccttcatgcccgccgccgcaccgcccgcgtccgcgtgctccgccacaccatcgtccgcccgccgcaggggctcggacagccgcgccggggaccggagccggcacgggcccgcgagccgtgttggaacaggtaccgcgaccacgacaccggccgtcgcctcagcagcctcagacgagcagctctccccggccgtaatggccgaattcccgggcatatgtccggtaccgtcgactg

SEQ ID NO: 146906 - DNA, 764 bp, Homo Sapiens
tcaccccaaatgttgaatctcacgcctcagcaatatctgaaaagcttcccactccatactttggagacacagtagcctcctacaaggaaagccacgtcgttcccagaatgcttggagacattgaccattcttccccgtgctctcctcaccaaaggaagcatgctcaaggtcacctggatcacaccaatgaggttcactttgagcatattcatagagtcctcagtgttcagccactcacataaaggtaattggtgtaagaatgcctgcattgttcaccagtccccagagtcctctgtcccccacatgctccttcacccactgagtagctgcagcgatgctctccatcttggtaacatccagggtcaccgtctccagcctgtcagacgtctggcccctcagctgctcggcccccttctccgtcagacacgcagccagcactctcaagcctcgtgcatccagctgtctggccagcaggttcccaaagcccgagtcacagcccgtgataaagacatacttgtcttggaggtggctcaccacctgcctctcccggtaccagtgcagaaggtagtacaggcccacgaaggccgccaggtagagccacatagtgagggtgcttccttctcggacttgcttaggaagagtccagtcctagagacttgaaaggacttctttgcagaccaggcagcagtcggcttcctcctgccccaactgctccccggccgtaatggccgaattcccgggcatatgtccggtaccgtcgactg

SEQ ID NO: 146907 - DNA, 982 bp, Homo Sapiens
  misc_feature (825)..(859): n is a, c, g, or t
  misc_feature (863)..(901): n is a, c, g, or t
  misc_feature (933)..(933): n is a, c, g, or t
  misc_feature (950)..(950): n is a, c, g, or t
cagggagaaagattaatactttattattttaaaaattttgtttgaaagcctttgtacagaataatataatgtactgcataaaatatttgaaatagatgaagtttacaagtttataaagatgaaacaatgagatagtgattacattaagtggttacattaagtctcaggggaaactgaatttttaaataggaaaccaccctatgtacaatgttactatttagatgtattctttctcatcttaatgcttagtcttgtcacaaacaagaggtaatcaaattgtttttagaattaaatcagagcatcgtggtgctgaaccatatatgcatacatatattcaaactgtatttatgaaaatccatagaaaataaaaaataggctgtgaaaccagtattcttcatagattttgcagacgattttaatctgattcatcactgctgaagtaggagctatcacagtattctgctgtatatagaaatttgtgaatggttgggttcatcttcggtatccagtgtgggggaatcaggtatgttgaaagattagataaatctacaaataccttgtgcctatgactcacagttgatcgcgggtagtgatagcctgatgaaccaccggtgccagctttgctggccagcattctgtgcaccatgcacacatggttatatctccatttgggtcatcagtgtatctatgtgcataagagaagtcagcaactgaaaaggcacctggaacctaggctcttccctgtaaaaatatatcatcatgctccctgaagtgcccggccgtaatggccgaattcccgggcatatgtccggtaccgtcgactgnnnnnnnnnnnnnnnnnnnnnnnnnnnnnnnnnnncggnnnnnnnnnnnnnnnnnnnnnnnnnnnnnnnnnnnnnnnctaccgaaaggaacagggcggaacttggggcngggccccactttaattnaattggggttacggtaattaacagttcctttc

SEQ ID NO: 146908 - DNA, 800 bp, Homo Sapiens
  misc_feature (686)..(720): n is a, c, g, or t
gggggccctcggggctgtccgcctcccggatcttcaggcgaactttctggttggtctttctccactcggagtacagctggcagtggtagcggaaggagacctctgtgaggggtcgaggccgtttctccactgcaaactccgtgtggcacagctcgcagtagctggtgttagatgaggaaagccacttctccagacagctcttatgcacggcacccagcgtgccggtgcagccacacggggacagcaagcactccccgttcgctccctcatggcagatccggcagaaaggaccatcactcggtgtgtccaaggcacggatgacggtggagaggagccggccatcccttgaagtcacctgtgccacatactggggcggtccgaggcccgtagcctccacgaccttggagaaggcagggctgccggagcagtcacacagggagccggggaggtggcagcagtcacccgtcgtcatggccaccgggagccccgtatcctcagggcctgaggcccatggttccaggagcctgatccgcggccgggccgggcggccgcacaggcccctcggttcgcctcggcccgggtcccggcccggcccggcccgtcggcgccactagctccgctccggccggcacctccccggccgtaatggccgaattcccgggcatatgtccggtaccgtcgactgnnnnnnnnnnnnnnnnnnnnnnnnnnnnnnnnnnncgccgcttcctcgctcaactgactcgctgcgctcgtcgttcgcttacgaggtagcgccctatagtgagtctatacatctt

SEQ ID NO: 146909 - DNA, 966 bp, Homo Sapiens
  misc_feature (717)..(717): n is a, c, g, or t
  misc_feature (816)..(865): n is a, c, g, or t
tgagatggcggccagcggtgtgatgaacaggaaacacaccatgtcgcagcacagtgtccgcttctccgtccgcggccccgggtccttcagccactctgtgaggggtcgaggccgtttctccactgcaaactccgtgtggcacagctcgcagtagctggtgttagatgaggaaagccacttctccagacagctcttatgcacggcacccagcgtgccggtgcagccacacggggacagcaagcactccccgttcgctccctcatggcagatccggcagaaaggaccatcactcggtgtgtccaaggtacggatgacggtggagaggagccggccatcccttgaagtcacctgtgccacatactggggcggtccgaggcccgtagcctccacgaccttggagaaggcagggctgccggagcagtcacacagggagccggggaggtggcagcagtcacccgtcgtcatggccaccgggagccccgtatcctcagggcctgaggcccatggttccaggagcctgtaatcctagcgctttgggaaggtccaaagcagtgaggatcacattgaggccaggagtttgagacgagctaagggcaacagtagagagacccgtatctctcgtgaagggtttttcttgaattagccagtgcatcggtgcgtgaaagcactgtagtcccatgctacttgggaggcatgaggagggagcctcaacctctntgagcccatggagttcaaggctgtagtgagctagtgatcacaccacatgcactccagccatgggtaacagatgcaagactccagtcgtccagtctcttnnnnnnnnnnnnnnnnnnnnnnnnnnnnnnnnnnnnnnnnnnnnnnnnnnctgagctccaaagtggggaggtgaaggaacaggggagcaattactaactcttgcgctaggacggttcactgctggataaatgccctctaaacagctcagcc

SEQ ID NO: 146910 - DNA, 746 bp, Homo Sapiens
  misc_feature (95)..(95): n is a, c, g, or t
  misc_feature (135)..(135): n is a, c, g, or t
gagcctttaccttcattcttaatgagaatgcagtcaaacagtcaaattatgacaagctatagtggttttatcttcgaatatttacatggacaccntcacacctttcaggactactccttaaagacactcgtccanacacatccatccatctgaggccaagacacttttcatggaatgcaatgaaactatgaaggtgaatggaagagagatgcttcagtctctcaaagtgcagtcatgagtttatctcgatacatcatactttgcatccctcctaagttcttctggttctggtcgtggacataactcaaaatggctgtcatctccactggccgatgctttccaatgcgacctgtcatcctgaaaggatggcctgacaatttggagagtgaggatgccaccggggctggctgggatggatattaggatgatattgaggctggtaattatggacttctggatttgttttagagcagagctgggctcgctatcactgggttgcttgctttgaacgttgaatgtctccgggatggataacgtttactaggcttcctctcaaaggtgctggttcttcgtaacctggagccatgtgtagcttgatattctgtccgcccactgaatctgaagcgagagcccagcctgataaagtcggatctattggatttgctgtttcctggcgtccgcagtcggaagaatgcccccggccgtaatggccgaattcccgggcatatgtccggtaccgtcgactg

SEQ ID NO: 146911 - DNA, 782 bp, Homo Sapiens
  misc_feature (85)..(119): n is a, c, g, or t
aaaatgtatagactcactatagggcgctagcttcgtccgcagcgaacgaccgagcgcagcgaagtagtgagcgaggaagcggcgnnnnnnnnnnnnnnnnnnnnnnnnnnnnnnnnnnncagtcgacggtaccggacatatgcccgggaattcggccattacggccggggaatgcagttacaggatcctgggaagcagagtgtctggatggaacctgagctgggtctctgactcacttctgactttagttttttcaagggggaacatggcaaaggtgttcagtttcatccttgttaccaccgctctgacaatgggcagggaaatttcggcgctcgaggactgtgcccaggagcagatgcggctcagagcccaggtgcgcctgcttgagacccgggtcaaacagcaacaggtcaagatcaagcagcttttgcaggagaatgaagtccagttccttgataaaggagatgagaatactgtcgttgatcttggaagcaagaggcagtatgcagattgttcagagattttcaatgatgggtataagctcagtggattttacaaaatcaaacctctccagagcccagcagaattttctgtttattgtgacatgtccgatggaggaggatggactgtaattcagaggcgatctgatggcagtgaaaactttaacagaggatggaaagactatgaaaatggctttggaaattttgtccaaaaacatggtgaatattggctgggcaataaaaatcttcacttcttgaccactcaagaagactacactttaa

SEQ ID NO: 146912 - DNA, 574 bp, Homo Sapiens
  misc_feature (474)..(482): n is a, c, g, or t
gcaataaatggaagagttgtctattttaacatggaacttattgccactagccatatctcctttaacataagatatatgggtaagaaaattccaatttaatgatattcaaatatataaatatttgttgcatcctcaggtttctagttatgtgttaaaaaaatgatatgttgaaatctcttcaattttagaagaaccttgttataaagaacagagctaaaaatattagaaccacctgccctttagtgtaacaaaataaactagcctttttggtttacttaattacagtcttaccatcaaaaatatattctctaacttaaaaaaatacttttttggtaatatttgatgacatttctgatgagagcacataaaaataaaacaatacttaaagatgtggatataaaatgctcaagggatcatcatttaaaaacagacggttcccttattggttctcggtcatggcaaaaaaccaggggnnnnnnnnnaacacaggctcttgagctcccctaggaatttcatttctaccagcacctttgggcctgggggcctgagccactcttcttttggaatttctgca

SEQ ID NO: 146913 - DNA, 928 bp, Homo Sapiens
  misc_feature (25)..(25): n is a, c, g, or t
  misc_feature (82)..(82): n is a, c, g, or t
  misc_feature (821)..(855): n is a, c, g, or t
catggctgtttctgtgtctatgagnccaagaacacagagagtgattgatacattgacctgggacactgaatattcctttctngatggaggagaagaacccatccaaagcaaacttgcttgcagaataggcagcaaccattggataaccactttcccagccagagaggagacgacaacaatgcttccattgctctgcttcagcatgggcaaggcagctacagtcaggaccacgtaactgaggaagttgacttccatgcttttgcgcacatggtgaatatcatcatgaaaaagattcaaagaagtgttggtgatgtggttgagaatgagcatgtctagtcctcccatgagctttcctgcttgggcaacaaattgctctgcgaaggtcatgtcttccatggtgccagcaatgtagtgtgctgaggctgctccaagctccaggcagtgggataccaccttctgtagagtttcttttgacctcgctgtcaccaccacatgggctcccatcttcgccagatgataagccatctctcttccgatccctttgctggcccctgtgacaatcactttctttccttggagcatctctggtctgaattcctcgtttgcagaatagtagtagtaggccatgaagagccccagaatggggaggagatattttttcataaaagccatccgacagggagctggcctgaagactcctgtaggacacacagagagaacctacagagctttctacaacctcctaagcaggcagcagcctctgaattgtccccggccgtaatggccgaattcccgggcatatgtccggtaccgtcgactgnnnnnnnnnnnnnnnnnnnnnnnnnnnnnnnnnnncgccgcttcctcgctcactaactcgctgcgctcgtcgttcgctgcgaagtaggccctatagtgatctatacat

SEQ ID NO: 146914 - DNA, 707 bp, Homo Sapiens
ttccttccccggcgatggcattctgggcgctgcctctgggaagggcaactcctgacagtgcctcctacacggagctcttgcccgagctctggtccccgatgacggcgatggctggcagggccaggtcctgctccacacctagagcccgcagggagtcaatgaggtcgatgcaggggcgcaccttctcctcatactggctgcacaggttgttctcagccaccgagcctggatttttctgggccacagtagcatctccattcagtaatagagggtgggatgcagcagctggatcagcttttgcgatgtccacttcggaaacaaccatcttccttctttgcaaagtaagctctaatatacgttccttcaaataaaagtaatgtcaacaagttaaatggtatcacagagctgttctcctgcacctccttggaatggtggctggatggcggcgttcttcactccagatttcagggagtgggagtcttcctgtagcctccgacccagaaccgatctcctcgcagtgtggccacagaattccaaagcccctgagctgggtgagcaggtgggcggcaagggcgcgagggaggcgtgtccaccgtgacactgggattcctggccggcaactgcggtccaaggcggtccctgcgcagtgctggagtccccggccgtaatggccgaattcccgggcatatgtccggtaccgtcgactg

SEQ ID NO: 146915 - DNA, 958 bp, Homo Sapiens
gattgtctccgccatagaactgtacttctgtatgcgtgtcatgatctaatacccatggtcagcaggttgatagcccacagccactctggttagcctagtaaggtctattagagtcagatccgggacatctcgggagctgatctacagggtgattagctcatgactgattcccattccttccccggcgacggcattctgggctttattaatttcccttttctaccctctgaagcatccggaaatctccaatctcgtagtcctggtaactgaccttgcctctcccacttatcttcgttcacaagtttcttcagtttcagcaccagcgggcatctggtcacgatcccgctgcctctgggaagggcaactcctgacagtgcctccaacacggagctcttgcccgagctctggtccccgatgacggcgatggctggcagggccaggtcctgctccacacctagagcccgcagggagtcaatgaggtcgatgcaggggcgcaccttctcctcatactggctgcacaggttgttctcagccaccgagcctggatttttctgggccacagtagcatctccattcagtaatagagggtgggatgcagcagctggatcagcttttgcgatgtccacttcggaaacaaccatcttccttctttgcaaagtaagcttaaaataaagcagatgcctctaatatacgttccttcaaataaaagtaatgtcaacaagttaaatggtatcacagagctgttctcctgcacctccttggaatggtggctggatggcggcgttcttcactccagatttcagggagtgggagtcttcctgtagcctccgacccagaaccgatctcctcgcagtgtggccacagaattccggtccctgcgcagtgcgggagtgcggcctccgctctcgcttcgcctctttcaccccgcgcccagccccgccccgcgccgcgaagaccc

SEQ ID NO: 146916 - DNA, 1383 bp, Homo Sapiens
tttttttccctttcagatggaatggtttatttaaatcagatgtaaatagtagaaagagacagattacaagccccacgggtccattagcctcaaagacaggaagtctgcccatcctcccaggttttcctggtcccaatctcctctgagagctgaaggtttttgctggtgtcccctcactgctccagggacaccgtcagctcatggcatcgtgttgtagaccctgtagttgtccttctgcgtgatgtgcagcttccaggggaagaggcgcttctgggaggggaggccacgagcctgccgcaccatgagcgctacgtcctcatccgacagcagccgaaccagatccccctcagcgtcccggtaattcagagctatgtcctctctctggaactcccgccttgtgagctccagcaggtctttcaataggggagtgctgctgagatcttcctccaccgcgatgtccttgatggtgctgatggtgtcttcgtagtagtagcaacgcagccagttggtggggtcgtcctcctcagggaagtctttgaggatcttcacgaaggagagagggaagatgcccgttggctccccggacagtgcccctccagccaagtctttgttgatccgactgaggaggaagatcacatctccagctttgaaattcagctccagtttgctgtttccagtgaagtcaaatagagcctctgctctcggagctgccatgcggtcaacgctgttgccctgtggggacacgctcttgactttccgggtgcgcgggcggagccggcggagtgcctggggcacctgctctgagtcatagggcgactggtaaaagaagatccggacgtcctcatccatcagcacccagaccggcaggctgagcaggctcttcatgtaggcgttgagggcaggtatccgcatctcggcgatctcctgtttcacacccacgtagactttggctgggagtgtgggcagggtacaggccagggcactgctcttgctgtctggcccgaagcgctcctccagcttgctctgcaaagcatggaactggcggtagcggcggtagatgaggtacttggatcctccttttgtcttcacctcgatgacgaaaacaaagtggctggtgaagcctctcttctcctcgatgtcagcaatgttggccgagatggcaacatcatccggaagctgttcaaagtcactctcggcccgcagctgctgggccacagccatggtgggcgatggtcccagggagcaggtggagagtctcgcccagccagtcccaggctgagttcacctctcacttcctccagccaccctgcgtctcgtctcagcctgtggtcctgggagtccccaggagctgcctttggggaggctcaggcctgcttctctcca

SEQ ID NO: 146917 - DNA, 1079 bp, Homo Sapiens
aacagcgctcggaaacaatactgcgggtttataggctccacctatcattctggggatttctgctcatctgtgattctcagcctacagttcatgcatgaccctcaactgactaacctacgcattttataatgttattttgttccatatcaaaatccgtggatgaactacatctgtctgatcgaagaatccctgttagtatcccaaggttggagacgtgaaatggaattgggtttacacccaggtgtgaaaattctgtcagcactttcccaaccagccacgtggagtcttcaagctgtagcggatcagatgccaggatcggccttcaacccagtgtaagccaggagctgaggagaagagcatggaaagccagggagatggaaaggtctgagagatgatcttggaatgggacaggatctaccaactgttaagaatggtagatgggtttagccaggaaagcaaaacagaaatggacagagagggagagcccagagcatggcatggtgaggtgatcccattactaaatgaacagtagcaagaagcaggcacgtggagcaaacagaatcagctcagacatgaaaaaggtcacactctgtgctttgctgctgtggtacctgaaaattaaacagtggaattaaagccccagagttcaagtcctcacagaggacaccatcctggatcccacgcctgtgaaaagcaaagctggattatagaaacgagcggtggctttttttgctccttcggctcagggcacccctgtgtgctgtgcgcgcgttattgaaaatgttacccacctaagaaaagactacagaacgcatacagctagaacgcatacagcttacacagtccttgcaaaaccagcttccgccacgggtgcccttaaaatgaaaagcagtttaaaagaaaatcatgctaaaagaatgcatgaggtctactttctagagtatattaaattattaaatacagaatacattacaatagtacctgtctgcctatccactctatggaacatattaaaataaaaaactacccccggccgtaatggccgaattcccgggcatatgtccggtaccgtcgacttg

SEQ ID NO: 146918 - DNA, 2528 bp, Homo Sapiens
  misc_feature (56)..(56): n is a, c, g, or t
  misc_feature (504)..(504): n is a, c, g, or t
  misc_feature (521)..(522): n is a, c, g, or t
  misc_feature (600)..(600): n is a, c, g, or t
  misc_feature (602)..(602): n is a, c, g, or t
  misc_feature (738)..(738): n is a, c, g, or t
ggtttagtaattaagggggggcccaccacattccattcccctccccctcccgtctngcttcaccatctttctactcatttacacgcagacaaatgagtggtggcgcggtaagccgtccgcgacccgacagtacaggagtaaggatgagcaaccctttttgcctacatcctcacaccgccatacaaggcgcggggatgcgcgtcgtcctcgggcacgggttgtggttagaatcgtcgcggggtgtgtgtattagattgggggatgccgtggtggcggagggcaggtgacgtccggctcggtaatacagtagaactcccctccgaaaacccgtcacacagtccttcccctccgcctaccgccaagggctacttgaagttacccctaaagtaaacgtgtatccatgttgaagggaagacggccccccgttcccttattcaagacctcacctggtgagtggtggcgcgcccccgccggttccacacccttccagctgttgcgtctgcnggtcgaacctataggannaagtttggggtgtccttcgggtggggggaaactggtccagggaagtggcggtttacgcaactttctcgtgagggggtnanccttggtcgtcccttccggtctttctccccccattttactcttcaaccacgaaaaaaaccaacttcttggctgcttttctttctccctcctcatgccggcccgtgccgcgggcaacaggcccctgcaccctattgngtctgtggaacctctctctccttttactctctcaccctctacaccacaccctccgtatcactgtgacagtagcgggggtttagttgtaggtgccggttcttgtttcgtccgttagtgggctcgcgcggcacaccctcggcaaccactgcgggttttcgggtgggtgggtcctcccgaccattcccccaagcctatacaccatttgtccattttattaacaggttttgaagagcactcatggaaatcggccaccactcagcaaaagtggaaagcagccgcattaattcttccactcctggaccccagggagtgttgggcccattatggtggcaaagggtgcaggcggagtccctagcccctgcttgtcccccgtgaaaacgggtggaggaagcagtgccaggctcctggagaaatggaagggtgcagggagggcatccgggcactcagaggtattgcttgccggcccgaggcttagctggccggggcgttgcacatgagacgtggactcacagctcagggcgtccatgtccgtcaggttcacatgtgacacatgaggatcgggcacagggaaaaggctgaaggaggctcacaaaggattccaggagatgtggagagagcagcccgggagggagtggtcaggaggtcattccagtcccccagaggggctctgttgcagcacagggccttgatggacagcagatgctactggttctcacccttgggccaattctgcctgcttctagagcttctctgaggtctgttcacccagaggacggcacccagcatgctcaggagcaggggcagctccaagaggaccaggagcaggaagcggacattgctgaacagggagccagggtgtgggctgggttcggggctgtcctttctggtcacgctgggccagttgtgcacgggcagcttcgtgggaggacctgaggtgcccatggagctctgggggctggaggctgtggtcgtcccggccgggaacacggacacctcaacctcgacaatgggatcatgaaagtctcggagccacggtgtatccaccccacaccagtaggtgcctgcgtcctcctctgtgagattctccagggtcactgtgaagctgaggtttgcaggactgtccctgatggacactcggccattcctttttccctgctgaccctttggtctccacaatcttgtcacatcggagaatctgtggtggtctgcaccagaatttgttgagggtcctgtgttccttctcatagcgacactgcacactcagggatccccccacggggcccgccacggtcatggggtggctcagaggaaaatagcctgggacaagcaggaggagcagagctgaagaccgccacgaggcccaggccctggcagtcattcctgtaacacgaatgtcacctgccactgtgcaagaccccaggaggggacaaaatgtaatctcctcccagcagatctgagcttcgcttctgcttttcttctgctctctgcttccttgtccagccctgtctcaggtctgaggctggagagggtcagggtacaggaagctcagggagagagccgcctgggctgaggccggtgctgacagctctgggatggtgctagtggctcctctcaaccctgacgtctggcaaagtccagggtcccttgggtggcgatgcagccacttccccacagcccacagcttctggcttcagtgtgttactcacactgcagaaggcagagccaagctgggccatttcccccggccgtaatggccgaattcccgggcatatgtccggtaccgtcgactg

SEQ ID NO: 146919 - DNA, 1341 bp, Homo Sapiens
ccctgttgttcgaggggccagggctgaaagaaggaccttggggcccagggtataaagggaagcctgtccctgggacttccctggggcccccaggaggagctcccgatgggcgaaggcaggaacaaaaagccctatgtctttctttatcaccactgtaatccggaatctggtttctccctcccggaggccttttgagcagctatccctgtttggtgttagaatcaaaaccccaccgaggcatagtgaaagtcctttccctgggggaggccacagtgctgtattccaccttccacctcccttggtggtgctggcttttcctgcagaggccacatcagcagctccagatttgcgtagtgcagctcactctgcgtggcagcctgcttggggttctgggacagctctgaatggtcaccagctttgatccatttctgaaacatcctccaggctagcagggaggcccccaccaacagaagcagcaacaatgccagcagggagaggagcagcgggagctgtgagttcaccacctcctcagtttcctcctggatgctggcactgtgggtggcacccactgcaaacagggtagtggatgatacaggtggaaatgcagttgtgattgttgaggtcttggccgcagtgatacttgcaggtgtcattgacgttgatgccgggaacacggacacctcaacctcgacaacgggatcatgaaagtctcggagccacggtgtatccaccccacaccagtaggtgcctgcatcctcctctgtgagattctccagggtcactgtgaagctgaggtttgcaggactgtccctgatggacactcggccgttcctttttcctgctgaccctttggtctccacaatcttgtcacataggaaaatctgtggtggtctgcaccagtatttgttgagggtcctgtgttccttctcatagggacactgcacactcagggatccccccacggggcccgccacggtcctgcatttgctcagagcaaaacatcctgggacccagagaagcaacagagcccaaggcagccacatggtcccttccccagcacaggcggcacttgcagcagctccaggccctacctggacccgaggggaaagtcacgcctccaggccccgacttctgcttttcttggtgccgcgctgcttccttgttcagcttcttttggttctattcctggagccggtcagaaaatgcaggaagctggtgagccccgactaagactccctagaaacggcacgtcctccttaacgctggttgaggctgcaggttcttcggctatttctagtgatgagacctctccctgtagtgactccgtagcttgcaggactg

SEQ ID NO: 146920 - DNA, 1259 bp, Homo Sapiens
  misc_feature (1125)..(1159): n is a, c, g, or t
  misc_feature (1163)..(1211): n is a, c, g, or t
ttgcgtgtagcgcacgtgtgggctccgcatggtgccgtcttcatgttgtgcatttgtgttgacgagttctggcttgtcccgtgttgggtcatgtctggttcgtggtcttcctcgtcgttctgcgtgtttctcatctgttctctcctcgttccccagcgtgctcgtaggtatacctgtgtgcaggtgttcctctcacgtgactgtggccctttatgttgtcatgataatgtgtctacactttgtgggtgttatcctgtcccgtgtatttgtaggcccatttgtacgcagggacttcctgttaggagcgagtcaattacaaataggtcatctgtcctgtctgaatgtgcggtggcttcaacacctggttattcccagcacttttgggagctcgagacgggccaagaatacctgaggtcaggaacttcgagacccagccctacagatgcagttgcttcatgttgatcaggtatacagcacctgtcatgtcgatacaaaatgttttccttgtacagatattgcatgcataaatgtacatgccctgtttaacctgctgtttaaaggcatgactattcgtgtaatatgatcagaggaaccattaaatagctaataggataataccaaaatagttttgccactgcagactttgtaaatgaaaattaatcaaacactacaaaatgtatgaaattaaaatgattacctaaagaagcttgatttatcttgcaacacaaaattaaaattattgcaaagaaaaggaaccgttaccaggacacagagttatcgggacatagtttgtaatctcaaagtaacacaaggttatgaaattagcacactttaaaattgttaagtaagattcttctttataaagactagtttcagcaggtatttgttgtatgacctatattaattgtttcaatgcagatgtcagtggacaaaacatctgtaaaactaaaaaccactatgaagtttccaccctcactggtaatcaacataaaagtacctggatatagaacaatcttcattttagagggggattccttctgatatggattgaagtacatagttagtatgggaatccccggccgtaatggccgaattcccgggcatatgtccggtaccgtcgactgnnnnnnnnnnnnnnnnnnnnnnnnnnnnnnnnnnncggnnnnnnnnnnnnnnnnnnnnnnnnnnnnnnnnnnnnnnnnnnnnnnnnngtcttaagccgtcccctttaattaagttggattttttgatttcaagtt

SEQ ID NO: 146921 - DNA, 924 bp, Homo Sapiens
  misc_feature (755)..(755): n is a, c, g, or t
cagtcgacggtaccggacatatgcccgggaattcggccattacggccgggatttagtgaatgctcctgaataaatgtgcattcctcttttagagtagctgtatgcttttcaaatgctatctgccgtgaattttttgcttttattatactttatggcaaaagtgatatcaagtgattgtcagacttgagggctcatagaagtgttaggtacggctctcaaagatgttacagttttttctagggttgggagaatagttgagatctggaaagcatagacattttttacactctggatagactttattcttgaagatcatcagaaatgaggttggaatttcgaggttttgagcagggggagcatcttatattcgcccttaaatcgttattaatacatcctgttttcttcattccctgatagctatctcatttcactctactgtctcaaaattttgttttaacaataatagaaatgttttgccattattaagtaccactttattcctaacaaaaataagtactcaggacttttttttcaaaatgaaatatttatgtactgttttatggtatgtggtagagtaagtaaaatgtaatgttctcagttttgttccatatttgcattcctcttatgctttacctgtattttatcatttgtaagcagaactctagctatatggggtagaaataaaaatctctgagatgaaacacaggaatcaaccatgatagaacatttcaggcgaaagtagttaagaaaatggnccttttgacatgtttgaagataggaaagacagcctatattcaaaatatgtaattttccttcattaagttatacatgacatctttaccaatggggttccataaatgtgtttctttcttaatagtatcctaagtccagcatatttccacatgacatttatccattctctct

SEQ ID NO: 146922 - DNA, 1228 bp, Homo Sapiens
  misc_feature (945)..(994): n is a, c, g, or t
agttgtgcacaaataagggtaatttatcaaatgtgtacactcgttgtttcttcaccaggaacccgaccgtaatgtcttcacaaacatgtgcttcaaactgtttaaaagccctacccttgctccactcaatacccccaacctacccattaattctgtgactactggtaaaaatttaatcaataaagttaaagttaaaaaggtcaataaagtttcttcgtgttgccaaaatgagccatactttcacgcccagccatcagttttggcattaacaagcttcttactattttccttgtatctagggtagcctcatctgttttccaacaatccactctcttcatattcgttccatatctgcagcttctcccttcatcttcatcttcttcctcttcacatagtgctgagcaatcttgaagccttatattgtccttattttccagtgtgatctctttaacggcttccgttattcctgtaatacctgtgttgtgatatgtatctacccatccgccatcaccatcatcttcttcaatgatagcttccaattcatctgaatattccatctgtttgcaccgcttatagcacggcacatttttggttaccaaaaattgtttgcctgttggtaggtatgccttcactttcaattcttcccctgtagcccattgccatgttggacagtggtggactaggtgatctccagctgccacaaactcttctggggtaattacacctgtttccttaaactttgattccttgaggaccggggtcaggtactcagccacttccagtgcctttcccttcacagtattaatcacattctgcatcctggggccggagtagcggccggccccgcgacgggatggaaagtgcagccgtgtcaggggccagggagtcagaaaatgtcctcgctgccaccgactcgcatcagcacccggctggcagcacccgagnnnnnnnnnnnnnnnnnnnnnnnnnnnnnnnnnnnnnnnnnnnnnnnnnnaggcacagcgcgcgaagacggggtgcgcgatcctcgcaccccaggcagcccgcgacggaccggacccagctgtcacccagccgcgagggagggcagcggggccgaagggagacctgaggtgagaagcggacgcacacgcacccctcgccctctgggagctgtctgtcctcgctttgcttcactcgcgccccttccggcttcccttccttctcactctcttgccgtagctgcgcc

SEQ ID NO: 146923 - DNA, 380 bp, Homo Sapiens
aaataaaagccattttgtaaatgtttgtgctcccagtggcagtgggaatataaagcagaggcagaagagcggtatcgtcaatatgatttagtgataattgaaagtgaaggcatacctaccaacaggcaaacaatttttggtaaccaaaaatgtgccgtgctataagcggtgcaaacagatggaatattcagatgaattggaagctatcattgaagaagatgatggtgatggcggatgggtagatacatatcgcaacacaggtattacaggaataacggaagcccctaaagagatcacactggaaaataaggacaatataaggcttcaagattgctcagcactatgtgaagaggaagaagatgtagccgaagggggatgga

SEQ ID NO: 146924 - DNA, 704 bp, Homo Sapiens
cagtcgacggtaccggacatatgcccgggaattcggccattacggccgggggaagacgtgcggagggagacgcagagacagaggaaacagttcctgaaactgatgtagaaaccaaaaaaccagaggttgcttcctgggtgcactttgataatttgaaaggtgggaaacagttaaataaatacgatccattcagtagaaaccctctgttctgtggagctgaaaatacaagtctttgggaactcaaaaagttatctgtgcattttcatccctccgtggccctttttgcaaagaccatccttcagggaaactatattcagtattcaggggacccactgcaggatttcactctaatgagatttttggatcgatttgtataccgaaatccaaagccccataaaggcaaagaaaacacagatagtgttgtgatgcagccgaaaagaaaacattttattaaggatattcgtcatcttcctgtgaacagtaaggagttccttgcaaaagaagaaagccaaataccagtggatgaagtgtttttccacaggtattataaaaaagttgctgttaaagagaaacaaaaacgggatgcagatgaagaaagtatagaagacgtggatgatgaagaatttgaagagctgattgacacatttgaagatgataactgtttcagctctggaaaggatgatatggattttgctggaaacgtg

SEQ ID NO: 146925 - DNA, 856 bp, Homo Sapiens
  misc_feature (712)..(728): n is a, c, g, or t
ctttcttgccgatccttctcaaaccactaatcttagcccctctggatgctacttaaaaattgtgccacttttcaaaaactccttgcgtttaaatcctgctcgtaacatattagcgttaaaaccgggaatatttttcttccgaatgtgcaacgtcgtttcattctaaagccacaggctgaataatttaacccctttccacgcgatccatttggcccaataaacaaaatatttgccttactgctttagaaaaacgccttcttaacgtttaattctgttactcggacatagacaatttatcaaattacactttggattatgtatgtccctatatcccctatatatattcgccaccgctttttaaacaaaataaaacctcgctttaaaatttacagtacctgggaaaccctcctccaagggtacccctatacccattagcatgtttcggggccacgagattttgaatttctaacgtttttgaaaatatcctaggcctgtggtaaatgtacgcccctctagtttcacttagcacccaccgagcacttttctaccgagcttgccttataggatttatttttaggtctgttaaaaaatcgcagatgctcctgaaaaggttcacatggtgaagcttggtaacaaggtaaaattttggtgaaatgggttaaaacggcagatgggaactatccccatggaccaaaccaccaaaccaagcccnnnnnnnnnnnnnnnnntcccaaacacaagccatatacaactccaaatagtctagtgtttcacttgtaggaataatcatttcaagctaacaagaccccggccgtaatggccgaattcccgggcatatgtccggtaccgtcgactg

SEQ ID NO: 146926 - DNA, 1877 bp, Homo Sapiens
  misc_feature (296)..(296): n is a, c, g, or t
tgtaagacccggccgtttatgtcttcctcctggtgctcccaggtggcgcccttttctcgtgcgcccgctttccccacacgtgggctcttttccggggccataaacctctattttcccccgctggggacccaccatgtttcgcctgctggaggtcatttcctttgccagaatgtcttttacggccggctcagtccatcttcccttcgttcctctgcaaaccccttttcgcttttcaaccgttgctgacgaggtcccaagctgctcgccaaaccttggaaggcctcctcagccccggngaatgatgattttgtcctccagggatgaaccatcactgccagctgtctatagccttcttcagttcaacatctgatgctgtggcctcaacccccagtgacatggaaaggctttagctcatcctcaggaacccagccatggtcaagagtcgagccacttcctcttcaggctggcagtagcgcccacctagctacaggtgcattcccctgcctattaatattctgcttgacccaaggcaactccagccagccccactgaactattcttaccagcccgctgccatggcctgcgtatctcttcaagcagagttcaagcaacgctgcaaggctggagaatccagccaagagaagagccaggtagccttatccctccagcctaaccggtcacctagtcccaccagaaaccgccatcccaactgtagaaagcccaaaaagagggcccagagccaggagcagcaaagcacccagcagcttaaggaaacgagtaaacagtcctactccacagtaaaaccctggcttagaaactgaaacatgacctgggcccagccccctaaccgccctgtccacactcccatccaaactcgaaaaaggtccaaatcagctgcttttcagttgcctgcaggcatagatgagatggccacaagtttctacgtactctcccaccaataccagcagttcaatcagccaccaaagcctgcctgtccaagttgacatagttcctcggctccccacaatcccaggcctttgcgcttatctgcctgacttcgtttccgacccagccgatgtcgaccaggggacctgggatccctacgtccaccctcccgagtatcctccttcgttggaaagcggtgccgctgtctccgggatgggggtttctttccgctggacacacgtgaaaaatcactggggaacttgagagattcttcatcatcatattcctcttccaactcatcttcccccaaagctggagaggtacagtggtggcaaaagttgctagaagaaccatttcctccctcagagtaaggcccttctggaattccaggtgttccctggcagttgcaagcagatggaatggaaagaaaagagttcccatccttctggttcccagtctcgttttcttttgagagttcctggtccactcctgattcttcttctgaagacgtctcactctgatcagggtcctctgcatctctaggtggtcctggaccccctggggggccatggcttgggtccaaccaatgggctgggtttgggtgctgtgtgtgcttaggaccagagtgctctgtgaggcagcgggtaccattaggagcagtccctgctgagtccctgagtcctgagaatgaaggtatttcagggtccacggagggtcctaaagtcctgagggaggcaccaccactgtggtgggctccatacaaccctctttctccggggtgcttctgggccatgaccccggggcttcctgagggtcttaggtcacagccatcatggtgtgttctgatgccgaagaacggcggtaactcctccccctcgagccgcccggcctggggccaggcctcgtgccgaattcggcgcgccgtcgattcc

SEQ ID NO: 146927 - DNA, 1232 bp, Homo Sapiens
  misc_feature (1123)..(1157): n is a, c, g, or t
atcgttttgctgctctgctttttaggagatcatccgcccggcgctgggtgccaccctttaggacacacctttgtctcccctgggtctctgggtcttccctgctattttcagcgccctttctcttttcattgtcccgccccagttccttggggccctccgttctcgcccatggggttcacctcttgttattctccgtctaggcgcccctttcttagcgccccccggagcgccgtggttcttcgcctggatcgccccttggaaaaccttgtcggaccaggaattcagagttccccagagagtcaatgtcatctccaggaccttggcagctattcccattttcggaaccaacgggaattggtggaatgacattaaaaataggcttctgatcctgctgttgagaaagggatgctgtattcatgtcatagtggtacatctgtcctccagaggtactcacaccatgaacagaaatggcagacattttattaccaattatatttgctccaggaaagcttgcctgacagtaaactgtgcccagtttctcttgcttaattaccccaggggtgcagagttcgatgaaatcttctttttctggttttcacttggggcagtgttacattactggggcttgacaaaaccagatctccattatccttaattttgggtttagtgtccggtaaaatgagaggcttgcagtcctcattcgagtttccttccgaaaggaatgaatcgtcttctcccgccagaggagaaagcaaacagttttcatctatcaacaggtctgatctccaaggactctcattcgtctctttacctggggacccagaagaaaactccagatcctgcaaaatgtcaaaggtgctttggtctgtggtatacaatttcacattgccaccgttggtgccagtctggcccttcaaatgttgctgttctgaagatacatcagagtgagtttttggaaactccttctctgtgggggcagcggacacagcagtggatgctgaactcttggggttctctggaacactggtcgacctattgaggtttgcaatgctttcttccaaagctttaagtccccggccgtaatggccgaattcccgggcatatgtccggtaccgtcgactgnnnnnnnnnnnnnnnnnnnnnnnnnnnnnnnnnnncggccgcttcctcgcttcactgactcgctgcgctcgtcgttcgctcggagactgcgccctaatgagtctatacat

SEQ ID NO: 146928 - DNA, 754 bp, Homo Sapiens
cacaagccattgtgggttcaagtccagctgcttctagagctctgtgacctaacagccctgcccaccatggatctcttgtatgcctgaaccacttccagtctcttttcccaggagctctgcttgtgtttttagtgtgaagactcaccccactgaaaatgaacagtgcaagatcctatgtgcaacatttgcaaacatttttgtttttaaacgatacacattttaaaaattcaagtcaaatccagatagatagatacaggccagttggttggtatcagctggcccctcatacccaccataggaaagcatgatgagaaagtccgtttctgaaatgagagagacaagaggcaccagcttcttatctgggggtgagttccttgagcttgagaggaagcctgagagggaaatgctaaggctcaatgaaagacagggcagctccagcctcgcggccctcctgggtcaaaagccaaaggcctctgtgcaagcagcacataggatctggatgtaggttgaggatagatcctcacccaccagtggggtaactttcccagcaattctgaaactaaaataaggaaggcacattcccagagccctgctgagtaggggcttcaggctattttcactctacacaaaatgggggagaggagttccctctccactaatttttcacccataaacctccacatcactaggaacctaaaggggaactccaaaggccaacacatcttggtggttatatgtgttgtcctgacaacct

SEQ ID NO: 146929 - DNA, 1078 bp, Homo Sapiens
ggcaatggaatttatataacttttatttttatataatttcacatgtacagaaaaatacccatatacctttacccaaatagctaccaccaagaaatctctgttgtaacatttcaatcgccattccctctgaaataataacaaagcactttatttgagtattccgtattccccaaagctagctgtgaaagacctacatcacctcaaaaccttccatttggttccatagatcctgccatgtcacattcttgtaaccagctgcagggccatcttgttataactggttcatgtcctgctaaagctgagaggtgaagggctaaaaacacagtcctggcacagattccaggacaccccggcacaggcttgtttgaggacattgcctgggtaaacagcctcccctgaaaatgttcagtgtacaactcttcacagagcaatcgctcagatgcgtggcagcacgcagacatgtctctcggcttctctccttgtctctgttgccttcctctccagtcggtgctttagaaatgctttattcccattgtccactgaaaatacaacctagattccttcagtaaatatctgttaaggaggtcacatgaaaagattgctccaactcattcttgctggtgggctcccaagggtaaaataatatagttcgtgtcttctcagtcatgaggaaaccattgtcactaaatctccctgggatgcttcctacatccaaccaaacaaagggagcgacagctgaggtctccaggtcaaaaacaaatatgtcaccttgctgagagatgatggcagtgatctgcgccttgcagagccccacggcctccttcggtgaggacaggaagtggtagttggtcgggctcaggagttcatggtcagctgaaaggtaaaaggaaaccacacagctttcccgtgtgcaattcccacatctcctcagcaattcagacactggctcctcataaaggcagacagcctctcctcctttcatcacaaacgttcagtcacacgagagcacacgggctccagggagctcccccggccgtaatggccgaattcccgggcatatgtccggtaccgtcgactg

SEQ ID NO: 146930 - DNA, 1504 bp, Homo Sapiens
  misc_feature (1418)..(1430): n is a, c, g, or t
ctccctgggtccccgggtgttttgcagttttccaaggtttttatttgctaaaaggaatgcccttttaggtcacagcagggtcctttgcagtttgggtggtggccccagggaaaaccataaaaggaacccaggctcaggggaaactgccatttcccccagtctgtttctgcatgacagtgggggcccattcctgtctcgaagcatcttcttgtccaaaatatgatgtctgtttagagtgggtctcaatggaccaggctgagctgcccctctgtctctgcctcctcctgctcagccctgaccatctctgagaggatgctaaggtccccctcccaccgaactagactttgagtctaagctggacaatgagtaaaacgtaaacatagccttttacattgattttgcttttaaggggaaaacgaataaatgacagcagatatatggaaaacccagccagcgaccatgggaataggggtatatggtcctcccctacaaaacgctgatcaaaatatcacccccggcccagaagtagcagctgtgccttcatggtcacctgaatcccagtctcttctactgcctggtgcctggaaatcagtggatctattaataagttaaatattcaaatcaagacaaaaatcaatgaaccaggttatctgttctcaatgactcttccaagatgtcagagagaaggccttgaagacaagtgtttagacgacacgcatgagaccttcgcatctggcccgggctgcggactcacaccttttccctccatctggattgcctttcatgttctcttgagttcacgtggaaagtaataatccagagggaagtgcgcatgctggactacagaagagtctgggacaacacacttgccttgggggagacacaacctcccactaagaggcattcactggggtttcggatgtcagttataaaccagaacttttctttaaaaagtacccaggtctaaatgtaaactatataaacactttaactattaaacgtagccagaaatatgcttaagtatccacagtccattgtttagtttactcatttaaaatgtgactgttttgatagcttagaaggctaacagcattttaccgtagcttaaaacatatatacttaacatgtgcatttgaacatcgcatttgagtacaacacacacaagaataatctcttccttggtttaatttttgttgtaaagatgagctattttcagaattcacttaagcaacgatgaccgggggtatgaagtaatcattattttcagcccaccagagaattcatagtctttaaattccaagatcaagctggctacatgatttccaaaaaggctataaaccaggatgaatgcccacatttgaggtaattattgccattaggtcacagtttgtgtaagataatgtatttaaaaccttttnnnnnnnnnnnnntctttaggtgttctgccagaattccccggccgtaatggccgaattcccgggcatatgtccggtaccgtcgactg

SEQ ID NO: 146931 - DNA, 918 bp, Homo Sapiens
tgtaattcatacccctctaacttagtgccgaatgagacctgaatagctattgaagaatcaatcactggaaccaatctcatcacagggattctccatcactgccatcctggtacctgactttatccccaaatcacatgcagctgaaggaaaagagttgcactgaaccaagggttttaggacgaggcgaagggttctttgctggtcctccagaagggtggcttttgcctgcctccttgcttatctcgttgcatggctcttcataaagaggctcacccaaggtctccgctgccctcttcactctcctcctcgctgtggtcttcacttggctcccacagtttgtttccaggctgttctccagaagtgtgggagaactgcttattctactttcctcttcagctgtctcatttaagggctgagaaggaggtggtgtgggagtattagattggatgacactttcagtggaagagacgggggctttggttagagtagtatccgctacagtctcattctgaggcaaagataacttttccacaagtttccactgaatgatgctcatgtcttttccaccagttgatatcaggtgactgtcattgtgagtaaaactgacattggtgacatggctgctgtgggcactgtacttgtgactgggagcctttgctttggagcagggatactgaaacagatggactttacaaaagtcatcggcaacagctatcacctttctattgtgggatcgcaccagtgcattgatatctgtcccatcagatccttctggccagacaccaaatacttgaaatcctagcacacaggtatatgtcgtccaatcaatgtccttacaatccgatcgattcctgattagtttgcagcccccggccgtaatggccgaattcccgggcatatgtccggtaccgtcgactg

SEQ ID NO: 146932 - DNA, 1736 bp, Homo Sapiens
  misc_feature (75)..(75): n is a, c, g, or t
cttccttgtaccaagcttttccaagagggtaaagtgagtcttcacccctgatatttttgccccgggttttacganggcttctcttctttatgcaccttcatgtgctggcttcagatgagagctctggactgaaccatttgccacattcactgcactggtaggttttctcccccagtgtgggttctctgatgttgaataaggttgggagctctggctgaaacaccggccacactcatcacactgatagggtttttctccagtatgaattctctggtgctgaatgagatttgagctctgtttgaagctttctccacactcatcacatttgtagggcttttcccccgtatggatccgtcgatgctgaatgagattagaactctgaaagaaacttttcccacaatcagcacatttatgggatttctttccagtatggatcttctggtgttgaaaaagagttgaactctgactgaaactcttttcacattcagtacatttatagggtttgtcatccaagcttcttctgagtctactgaagcttgagtcaaatcgaatagtcatgccccacttctgccgctgccggcctgttttgcgcttgttctcataggcctttccttggcttgagctccgagaaatacccgctttaggctttgctaacctcatggtgaataaccaaatgtatttgtaagagagtttacaggcttcttctgaactagtgtttcatttcctagaggtgtacagctcagaattttcgcgcgggaccagccaccactctggctcgctgggcgcctcccgcgccgccggaagtgagggcctcgccgcgctctggcgccgccgcggtcgctctaggaaagtggcggagcgaccctctatggtcccgggcccacccgaaagcgttgttcgtttcttcctgtggttttgttttctcctccccccaactcggaaggcgtcctgtgacccccgggacctcaagagctgtaaccgcccctgtgtgtggtcgaggcttttgaaaccaaactctagcctctccaacctagaaactgcatactttccacaaaatttgagatttttgagaccctggtacttttcacgaagtcaccttaattatcaccaaaaagctcctgcaagatgggagtggttatactccatttacaggaaaggaaccaaggctcagagaagaaatgtgctccgttcaccgtgtgctcctcctcagccatcctggccgtgctcagtcatctgaccagctgacctccgtgttcccccactccctggggagctcctccgcgcttttggcttccaatgcgtattgcgtgcatgctgcaagactcccgcattggtaactccagtctgactgtgggacataaatgttattgaactttagacttgtatatcgaactgattactcaagagctgcatttgcatgtgtaatggacatcccaaacctaacataccccccaaatgaattcctgatatctacctaacctgttcttgcaacagtcttcttcccagggatgggtgaagatcccatcatctttccagttgctcaagccaaaaaccttgatgtcactgttgtctcttctttttttcatccaaaattcacctgtgatttatccacaaattctgtcggcttcatcgttgaaatatattcattatcaagccactttcaacacttccactgtataaccaccaagcaccttcatccaccttctggattattatattggcttccagaggggtgc

SEQ ID NO: 146933 - DNA, 886 bp, Homo Sapiens
  misc_feature (603)..(625): n is a, c, g, or t
caaagatggaaaagcactttttatgcgacaggttgagagaccgaattactaaatttatttagatccaccgagtgccagaaaggcgttgctcggcatgaacctcttcaggcagggcaccccccgtagggtccttcacactggaggggctgtggtaccaccctctagatagcacttcagccggatgccccttcttcatggcccctcattgaaatgaggggcttagagcctagtcctgccactacgaggtgcaggatggcctcatcgtaggacctgccttcttggaagtaacagcggtaggtgccgttttcctgggctgtgatgttgtgtatgaccagggccacgctgcccctgctgatgtctttgctcacaaaggtggttcttcctcggtactcctccatctgctcctctgttctctctctgccacctttatacacaaacactgcgggggagaactgagaccggaaccaccgcacctccatgtcctcagcatttttctcgggtgacagatggcagcgtaacgtagtgttttctccaaccgtggccaagatgggatcagtgggccccacgacaataaactgggctgagaccagtgcacacaggctnnnnnnnnnnnnnnnnnnnnnnnctggccgggagaagtgcagggcagcagctgattccatgagcacccagagcaggcagggacaggaggccttctagaattaaacgttgctttttcttttctccgctggttctcgacgattctccagtcgtccctcttctctccaatctgcccaggggcacaggcactactagacgcaaaccttcccaaaagaggagaaaaaattgttcttccctttctcccctcgtgccgaattcggcgcgccttgacttcatactctctccc

SEQ ID NO: 146934 - DNA, 1009 bp, Homo Sapiens
  misc_feature (46)..(46): n is a, c, g, or t
  misc_feature (53)..(53): n is a, c, g, or t
  misc_feature (799)..(849): n is a, c, g, or t
ttcccgttcaaactccttttcccctgacagaatctttttttccttntggagtntgttgatccaatagatgcatacggcaatgggtatcatcagaataaccacaatgataggcagggccactgcacagggagacacactgggcataaaggattctggaataaaaatgacactttctttcttctggccgagcagggtgttgttgatagagcaggacatgttcctcacagacttgtctctgatgatcacagctgtggtgaccatgaagaggccgtctgcatcagggatggagacctctttcagggcgggcgcaacctcaccgtagggtccctccacactgtgaggggctctgggtaccaccctccagatatgcactccagccagatgctcccatcctcttgggccttgatttcaatgaggggcttagacccaaggcctgccaccacgaggcgtaggatggcctcatcgtaggacctgccttcttggaagtaacagcggtagatcccattctcctgggctgtgacgttatgtatgaccagggccacgctgcccctgttgatgtctttgctcacaaaggtgattcttccccggtactcctccatctgctcctctgttctctctctcccacccttatacacaaacactgcgggggagaactgagaccggaaccaccgcacctccatgtcctcagcatttttctcgggtgacagatggcagcgtaatgtagtgttttctcccaccatggccaggatgggattagctggccccacgacagtaaactgggctgagaccagtgcacacnnnnnnnnnnnnnnnnnnnnnnnnnnnnnnnnnnnnnnnnnnnnnnnnnnnaagtgcagagcagcagctggttccatgagcacccagggcaggcagagaccagaggcctcctattaatcgcgatgtttggagttgcggactcggtatctgggacctgttctcctcgtgccgaattcggcgcgccgtcgacttcatactctctcgcccctaa

SEQ ID NO: 146935 - DNA, 701 bp, Homo Sapiens
tttatgttaactgtattgtacatatatagtttttaaaatgtatgcatttatacaaactgtgtatattatgtatggggtgtcagaaatgtacacatcactgttatataatacacacatcattgttgtacatatgaggataaagttttagtgcagaaagtctcattgcaattgcattccatgtgttcaatctagtacacgatttgtcaactcttcagattatttttccagtacattcctcattagattgtgggtttcaagtttccatttgcaatttgaatgtttccagaaatctctgtcttaaccaaacctctctctccaggcacgattctgcacatgagtctgatctgtgtagagtagtatcatcaaaaatgccaaattttgatcaggaatatacctggactactctctttcaaaggcaattgaacatcgtgataaaggatagcatctattcaggtcatggaaggatatggtcagttgaacttgtgttgaactttggaggcaaatgtacgtcttcaaataaaaagacatggtaataaaaattatttgcttaaatttgagagtctctggaaggatatacatcaaactgtgagcagtggttgtctcaggcagaagggacaaccagggacttacactttctactttctacatttccccggccgtaatggccgaattcccgggcatatgtccggtaccgtcgactg

SEQ ID NO: 146936 - DNA, 942 bp, Homo Sapiens
  misc_feature (41)..(75): n is a, c, g, or t
aacgaccgagcgcaccgagttttgagcgaggaagcggccgnnnnnnnnnnnnnnnnnnnnnnnnnnnnnnnnnnncagtcgacggtaccggacatatgcccgggaattcggccattacggccgggggaacatggcctacagcaggagaggccaaggccagagccaggaggctgggaagcagctcccctgcctcagttaccacggagcagctaggtgcaaagatgaccgagaggggaagtgtggccaggccaacccagggacctgaaaccccaaggagcccagagggcaccacggaagctgccacccaggacgggaaggaacagccagagcttccatgtgccatggccatgggcacacccagcaccacggagaggatttccacctctggccaggcaggcaccagctcgcatggctgctgggcatggccattggcgggtctgagtgtgggccgctcctcgctaactgcatgcagcctcccactctgcgcatgtctgcttgggcagaaaatgctgagacactgtggccggacctgacagtcagcacttggcagtgggctctgtggacccagcatttctcatagcgtcaacccacctcttgccttgttgaggctttttcctttcagatgagctgtccttgacattctgatgtggtgaaatggttagcagcatggactttggaaccagatagacctagatacaaaccacacgtctaacacttgctacctctgtgaccttgggcaaccccctccctcagcctcagttttctcatctgtagagtggggagaatttccatcaagattgtccggagacctaaatgagataattcctggaaagtgtttagaacacagcatgtggtccctcaataggccgtggctgacagtacttttattacttgctttttgcttaaattaaaactttatgccgggccaggtgtggtggctca

SEQ ID NO: 146937 - DNA, 946 bp, Homo Sapiens
  misc_feature (865)..(899): n is a, c, g, or t
tgttgtgccgggcatcccaggtctttgccccagatgtgcccaatcgctggccgagagggggaggctcccgggatcatccccgggaagggaggaaccccattccaagggtacatggtcagaaggttcatgtttaggtaaggaaaaccctccttcgggaggattccacacaggatgactggaacattcctgtcccaccagcgaggtcttggccactgttaagtcctagcattctttgtccacccagtcaccgatgatggctcccaggaccagaacagaccctgccaccaccagcccgtagactgctgtcaaaaggaggctgtttccatagagctctaccagaaacacagacaccgcaaagtgccacatccgatctccccaagtagagagagaatgaccaaggtagagaaggaattttgcagaggtcaggtagtcggccaaggatccacagcatcctctctggcggttgtgatctcccgccctggtcatgacactaggcgaccccgctggctcttctgcggctgctatcgctgctgctgctctcgctgaggtgcttgttaacaggagtgcaaggaactggagataggacctcgtaaaaacacaacagccttgggcaaaaagactacaacgacgactttggcaaagaacgaaagaaaaggggcccagggattttcttttttccttctttccgaacttagctaacactgtagctgaagttggaaaggcaaagccttatggaagcggtttgggaggctcagcaggtcgtccgagcctagcggacgccctgagccagctctctccgccgccgccgccgccccccggccgtaatggccgaattcccgggcatatgtccggtaccgtcgactgnnnnnnnnnnnnnnnnnnnnnnnnnnnnnnnnnnncgccgcttcctcgctcacaaactcggctgctggactttcaggttcca

SEQ ID NO: 146938 - DNA, 906 bp, Homo Sapiens
  misc_feature (798)..(832): n is a, c, g, or t
tctgttttttggagtgtgttgaacggggactttgggagctggaaaggtggacaaaggagatttttgttctctggttattgatgcactttattgtttagaatcatcctaaaatcaaccaggtaaaaggatagttgcattttatactgatgcactgctgatgaccttaaacacctcatgtattatgaaatatattatttgagcatgtgtctttatgctaaagacactccatagctctgttcagaagtatacttttttggaagatgctttatcttatttcttatctgtgtcaagagctgcaatatttgttttaactatctgcaaaatggggaagccactcagcagaccagactgtttacgtcagaatcccccatgtgtagggaagggtgaagaagaggaggacctaaatatcgaagactgttacgtcccacagcggtcaatctatgatactgttagactaaatgaacagatagactctggttcaaaaggtagtctatcttccaggcattttacagatcgaactttaccctacagtcacagaacactggatgttagttctttatgctctaatggtgcccttacttcttccagtgtatttgagctgagaggtcgggaagctaacaaactagatgaaaagatgatctttgatgcactcaaactaaatagtgatatcattcgaaccacaggattacctaaagccaaatctcatgcggaaaagaaagagcatagacggtcatggcgaatgtttgtcccggccgtaatggccgaattcccgggcatatgtccggtaccgtcgactgnnnnnnnnnnnnnnnnnnnnnnnnnnnnnnnnnnncgccgcttcctcgctcactactcgctgcgctcgtcgttcgatggaccgagctagcgccctatagtgattatcag

SEQ ID NO: 146939 - DNA, 1096 bp, Homo Sapiens
  misc_feature (45)..(80): n is a, c, g, or t
taacgaccgagcgcagcgcagtatatgagctgaggaagcggccgnnnnnnnnnnnnnnnnnnnnnnnnnnnnnnnnnnnncagtcgacggtaccggacatatgcccgggaattcggccattacggccgggggcagactccgggtcgccgctccgccgggacgcgttggccggggcgcgcggtgcttggctgcggtgctcacactcatgaggagccggaagctcacaggtgcgagtgcggtcttcagcgcgcttgaaagcacgaagttgttcggcagccaggttggcctctgcccaggaagttgctggttccacgtctgccaagacagcatgtctgacttcctcatcccacaaagccacagacaggcgaacgtccaagaagttcaaatgtgacaaaggacatcttgtgaagtcagaattacagaagcttgtccctaagaatgacagcgcttctttgccaaaagtgacacctgagaccccttgtgaaaatgagtttgctgaaggcagtgccttgcttccaggcagcgaggctggcgtttctgtgcagcagggggctgcaagtcttcctctcggtggctgcagagttgtgagtgactctcgcttagcaaagactagagatggcctgtccgtgccaaaacacagtgccgggtccggagcagaagaatccaacagcagctccactgtgcagaagcagaatgagccagggctacagacagaggatgtgcagaagccaccacttcagatggacaacagcgtctttctagatgacgacagcaatcagccaatgcccgtgagccggttcttttggaaacgttgagctcatgcaggacctcccaacctgcgtcttcatcttgtccttcaatgagcagacgagagttcagaaaaatgcctttcagagccaaagatgatgatgatgacgacgacgatgatgccagacatgtaggggccatacaaaataatgtccttgagtattaagtaccattaaacaatttgacaaatttaggcacattacaacgattgatataaaatgtattctcccagagaaatggtctaatcaactttcagaactgaccatctaaggccatagtgcacagcacc

SEQ ID NO: 146940 - DNA, 954 bp, Homo Sapiens
  misc_feature (591)..(591): n is a, c, g, or t
actgactgtttataacactcaattgacaatagatatgaactgtattttaaatcatactgttaaatattttccctcttttgttgggaagctcattttagtttaaccatgtttgttttgttggtagcttacctggaaggcagtgaccacttttttatattctcttaatgaaaccattcagcaggtatatgctgttgaggctggttatagaggttttctataataaatgttcaagtatttttgtatataactggttaattttaataagagataccattatgtgtaaaacacaaagtaaaaataaacgcaaacagttgttgatgcagtatgattgttataattatgccaaatactttacgtatggaaaaagaatatttgtacatatgtgcttttaacaattctgccatattgactttacaattttgaatgtcggaaaaattaatatatgttaaatatttatgtttagtgaaagtgttcataattgagaaaaggaacatatgcattttagctttgtatcttgcaagttttgcagtcagaaattttttgaactagcttttgcttttgataacacttcgtgtttgtaaccacattctnatatatatacatatatatgtgaagctccatatttctgttgctttaaagaagtaaaaccttccatttaaataagatgacatgcataagataacaaagcttccttgatttccttttcctgtgtaatttaatagatttgttgactagtgcttgggcacattataaatcagtgttatttgctcttggagccattttttaaaaaaaattttggcagtgagcagttgaatttatcttgaatttatcatgtgtgtgtatttctgaagcagctacatagcagaacattttaagagattctgttagcccacatgttcatgttggttgctgctgaatggtaaatattaaataaaattaacaaattaatcttaa

SEQ ID NO: 146941 - DNA, 1853 bp, Homo Sapiens
  misc_feature (354)..(467): n is a, c, g, or t
ggtgataaggcgtctcgcgtgtacgttcggggtggcgaaggtttctcgcggtggccgggcgcatatttcgtgctctgtggtttagccccgtgttgtacgcttgggtacttctgtgtttgttgtcccccctgtggggtgtgtagtctcctcgcggtggggtggtgggtgccgccgagtgttgtgccctgccctccatctgtatggggggcgcctctcttcctagtgtcgctccgtttcccgtgttctccagttttgtgccttgtttttacgccgtcgcgtcgtctgggtctgtgatgtatgtcctgcctccctctttttgggcgtcccttttgtcacagtagattctggggtggnnnnnnnnnnnnnnnnnnnnnnnnnnnnnnnnnnnnnnnnnnnnnnnnnnnnnnnnnnnnnnnnnnnnnnnnnnnnnnnnnnnnnnnnnnnnnnnnnnnnnnnnnnnnnnnnnngcaagccccaggattctgttcctggtacactcaaactttatttggttgcctggatggggccagagaggaggacaagaagggtgtcaaagggtcagctcagtaggggtgattcagggtgtgctccatgatggtcagaagcgccagccacgtctccttggctgtggggatgatctgggaggctggcagcaggaagccatagcgcccagtgtcccggagctcgaaggtgaaggagtacttgatgccctggctgtaggtccagtcaatagtgcttccactggcttgataaattgccttgatgatgctgccatagttgaacttggtcccgtagagagaggccagggctgtcacagcagccttggaaagctgatccagctcatcctggtcagggactggttctgttttgtagccatagggatacatgaggagctgggagtagctgtggatggagatgaaggccttgatgttcccatggtccttcacaaagtctacaatggacttgacctccacttcggaattggcaaacttgccgtggtaagtctccgagcaggggttactgctggctccggacaacccaaagccagcgtcccagttcctgttggggtccacgccaatacagagggagcctgctgtgtgggaccgagtcttgcgccacatgcgattcgtgctgtgcgtgaaggcaaagccatcagggttggtgacgatctccaggaagatgtccaaggtgtcgagaatggcggtgaaagctgcatcctgcccgtagtcttgagtgatcttctttgcaaaccagaccccactggcctgggtgacccactcccgggaatggatgcccgtgtcgatccagatggctggacgcttactgccccccgtgctgaacttcagcacgtaaatgggacgcccttcataggtgttgccaatctggatcttgctgacaaggtgcgggttctccgccaccagcaggtccaggaagtcatagatctcctccagggtgtggtaggtggcgtagttaaaagtgtcggtggagcgcgcccgggaccggaaggcgaacatctgctcctgctcctcgtccagcagcgactgcacgtcctcgatcatggtctcatagctgatgccgtgggactccagaaagatcttgaccgcctggatgctggggaagggcactcggacgtcgatgggggagccagggtgggcaggcccccgccagaagtccagctgcaggtgctccaggtcctccagctccttcaccttctgtacctgggcctcatcggctacagagattcggagcacctgatgccccacaaagtcctccttgccaaagacagcccccaacaggacactcaacaccagcaacccccgcatgctgctgccggatcccggaaattccggacc

SEQ ID NO: 146942 - DNA, 850 bp, Homo Sapiens
tataataaatttacgaactaaatctgtaataatatgacatattttaaatagccttaactagacaagtatacattagcatgaattttgaaagctatgaaatgaaaaatacaccattaccacaagcacattaaaaatgaaccagtatcattaacagtaaagtttaagcctcaattcgtcctgtagaaaggaagcaatgatgtggtaacaaatttttagtacctctgagtctagaacattctcatgctcaaacagttctcccacaaggttgaacctggggggtgggagctttgtttctgacaacagtgagcctcaagttcttaatgatgaatcccaaggggtgcaccctacagtatacgatggaaacaacacgtgggtctagacacgcaggatccacaacaacaaaagtgtcaactttttacggccctttcaaacagatactaaaagggctgacttttttaatccattcagcattaagggttgcattgtagagtcaatttcagtttaaagataatctgtcatttgtttcctggatgttaggggtatgattatagaatctgacattttcaaagtcagaacatacaccatggagcaaataaaaactttggaatttattagactctactctggtggcagaataagctgataatatgggtcagatgggcaaaatcccacgaactgctcttatggacacactcgaaaggatgcccacacccaagattcaaccgtggttttagtgaacatggtgttataaacttttcttgttcttttgttttaaaattagggtatttgaagataaatgccccggccgtaatggccgaattcccgggcatatgtccggtaccgtcgactg

SEQ ID NO: 146943 - DNA, 1017 bp, Homo Sapiens
  misc_feature (895)..(929): n is a, c, g, or t
  misc_feature (975)..(975): n is a, c, g, or t
tctggtcaccctgcaaaaagttcagggccctcatcatcctgattcactctcacttggttgaagctccttcagggtgatctaacagagcgttgactgctactatgtctcctctcacagatatgcccatttctttcagcttctctgccatggggctggagacactgttgtaaaatgcaaaagatgatgtgagggttgctatactgcacttgctgcttggtgactggcctggaggaagtcttcagcctgctcaatgatgcttttgtcaccatattggcccctgcccagccagatgttatgaagagcttcagccttccggccaatggctttcacccaagtatgaccaccatttgcaactacatctaccacaagggtttgcttttctcctaaggtatctgtataaccaaagacatgaagaacactaactacttcttccaggttttctgctgattccacaatggctctcaggtgtgttaggttagtgctctgtaaatgagactctttaatagctactttcccagcttctactttctgcaagaattttaattctgccttcaatttgctgcacagctttgcaccaccttctatgccaccttttcttgatctagaaagtgattctgctctcttgatcagttccttggctatggcgattcgttcacagagcatggaatgtgcagacatgctgtcagcattattcctttccagcagcgccagaaccgcgagcgcgagcacgcaggcgcgtgcacgcagaggccgggacccgccgggaaatctcaaccgggcagcccccaccccgctcgaacgccgaggcggctccacccgcgcgagccccgccgcctcgggcacccccggccgtaatggccgaattcccgggcatatgtccggtaccgtcgactgnnnnnnnnnnnnnnnnnnnnnnnnnnnnnnnnnnncggccgcttcctcgctcacatgactgcgctgcgctcgtcgttcggntatcagaccgagctagcgccctatagtgatctatcacttctg

SEQ ID NO: 146944 - DNA, 973 bp, Homo Sapiens
ggagtctaaataagctcagtgttcagagttcagggaatcgcagatctcagtcatcttccctgttggatatgggaaacatgtctgcctctgatctcgatgttgctgacaggaccaaatttgataagatctttgaacaggtactaagtgaactggagcccctatgtctggcagaacaggacttcataagtaaatttttcaaactacagcaacatcaaagtatgcctggaactatggctgaagcagaggacctggatggaggaacattatcacggcaacataattgtggcacaccactgcctgtttcatctgagaaagatatgatccgccaaatgatgattaaaatatttcgctgcattgagccagagctgaacaacctaattgcattaggagacaaaattgatagctttaactctctttatatgttagtcaaaatgagtcatcatgtgtggactgcacaaaatgtggaccctgcttctttcctaagtactacattgggaaatgttttggtgactgtcaaaaggaactttgacaaatgcattagtaaccaaataaggcaaatggaagaagtaaagatctcaaaaaagagtaaagttggaattcttccatttgttgctgaatttgaagaatttgctggacttgcagaatcaatcttcaaaaatgctgagcgtcgtggagacctggataaagcatacaccaaacttatcagaggagtatttgttaatgtggagaaagtagcaaatgaaagccagaagacccccagggatgtcggtctatgatggaaaactttcaccatatttttgcaactctttctcgattgaaaatctcatgtctagaagcagaaaaaaaagaagccaaacaaaaatacacagatcaccttcagtcttatgtcatttactctttaggacaacctcttgaaaaactaaacttctttgaagctgttgaagctcgcgtgcatcgataacaccggacggcg

SEQ ID NO: 146945 - DNA, 1066 bp, Homo Sapiens
  misc_feature (744)..(903): n is a, c, g, or t
  misc_feature (942)..(976): n is a, c, g, or t
  misc_feature (979)..(1018): n is a, c, g, or t
ttataggaccgctttccctcggccagctgtgtcgaatcctcctcaggtgatcacccacaagctgctcgatgctggattacaggcagaaccacgtcaacgggcctgagtcgtcagacccccctgtaacatgcagtttgttttcaagattgtggaagtcctacctatcagtaaaagttttaaaattttgtgatatatgcaacagtgatattacatggctagctaataattttgcttggtgatttgttaaaagacgaacttccaatctacatattggatagtcttatttaaatttcagtgcttggtataactgagtgatgtcagtaactgtttaagaaaacaatcattaagacttattcttgtgggaagaaatttttaaaaatatttttgttaatatacatgtttggaaacatttctacagtcgtgtgacattatgtatgctaaattgtgaaatagctctaccagtactgttaatggaatattgtcttagattgacatcattacttttttctccaaagatctatctcccatgttactccaaaaagcttaaaattttggcagacttttccagaatgttttgtttcagaactgtttccttttcttagatcttaaagaataagttattacagataatgtattagaaagtattgcatgtacaatgagaccaggattaaaaaataaatgaaaggattgcatgttttggggttatcactgagattttgaatttcccagtgctcagttgttagnnnnnnnnnnnnnnnnnnnnnnnnnnnnnnnnnnnnnnnnnnnnnnnnnnnnnnnnnnnnnnnnnnnnnnnnnnnnnnnnnnnnnnnnnnnnnnnnnnnnnnnnnnnnnnnnnnnnnnnnnnnnnnnnnnnnnnnnnnnnnnnnnnnnnnnnnnnnnnnnggccgaattcccgggcatatgtccggtaccgtcgactgnnnnnnnnnnnnnnnnnnnnnnnnnnnnnnnnnnncgnnnnnnnnnnnnnnnnnnnnnnnnnnnnnnnnnnnnnnnnctaataaccgggcgccctatatgatctatacgtctttaccggggtgtt

SEQ ID NO: 146946 - DNA, 986 bp, Homo Sapiens
  misc_feature (873)..(907): n is a, c, g, or t
ttttcttcttccccatgcattggtatttcctgccaggtatctaagttcacctaattcagaagactgatgaataaaaggcagatcttgtgtactgctaatctacttgagaaacctgtgctcccatctgggatgccaaaattcaatggttctctcttcttaataacaattttctgagttttcctaaatatttggtttcatgtccttaaaatagtcaggttccagttgttcccaagaattttgttgtgttgccacattcccattccctccttcgatctttacactggtgggtgcatcttcatcccaggaagtccactcttcaacatctgtctgcttaggaactgatgaataatcaactgtagttggcaaagttatttggtctccacttaatttccgtcctctgccagatctgcatattaatctctttaggaatgagaatactgttgctaggcaggtacaaaatttaaataaccgaaactgggtgatggccatggtgggaatcaaaacccactgcacagatgagaaaaacaggagcgttttcaggttatacaagccgacgcctggcgcccggcgtgacgtgaaacgctctaagttgctggagctggataccaggtgaactgagatttaaattgtggaaaaatcggcctggagaggtacaaggcctgtagacggagggcagtaaggtcacgcaaatttccctgaggaaggcggctttggaggctgcgtgctttccgggccggtaccccacagcccagtctcccacgcgtgagcggagcatggcgaatgctgcacgcctgggtcccgctcccagtcgcagtttcctcccccggccgtaatggccgaattcccgggcatatgtccggtaccgtcgactgnnnnnnnnnnnnnnnnnnnnnnnnnnnnnnnnnnncggccgcttcctcgctcactagactcgctgcgctcgtcgttcgtctagcaagtagcgccctatagtgatcgatagatct

SEQ ID NO: 146947 - DNA, 802 bp, Homo Sapiens
ttcgctattttgtgattcagaactggtatcattctgttgttctctgacgagtatcactatcatggtctgtttgaagttacacagggagtatctgacagctgtaagatatatgcgaatccaatcaaggaatctcgcattagacttccagatcatctggccaatcaatgctggtaatatcgttctctcactagttggtctagcatgaactaagttacccagtgtcacttatcagatcacagataggctttactacatcgtcccatatataacggctggactgttcatctgaagtaccaccatccacagaagagaagaagatcaagtcctgttacatgtttttgctcattagttgctatagaagtaagctcccttgagtgtttttttattcagggaactctcatttgttccatagctatgtttctgagtgaggcacatactacttgaacgcactcttggtcttgttgggacgcaatgaagttcgctgtgaggaagccaactctgaagaaactgagcagtggttagaatcatactgcatgtattgtacatcttggagataatcttgttcatctgggttctgttccaaatcactcaaggagtttgtccagagtcactgacagctgctttaaaataactgtccatcctacctgcagacttattcagaatttaattcttgtatgccatccctacagcccctgcggagactttttgggaactcgacacgacgtcgcgctgaggagtgaagagctaccccccccggccgtaatggccgaattcccgggcatatgtccggtaccgtcgactg

SEQ ID NO: 146948 - DNA, 925 bp, Homo Sapiens
  misc_feature (108)..(108): n is a, c, g, or t
  misc_feature (796)..(830): n is a, c, g, or t
  misc_feature (892)..(892): n is a, c, g, or t
  misc_feature (899)..(899): n is a, c, g, or t
cagagtaccccaatcgaccagaaaggaagcacaacttatacttgcaggcccagcaccaaaaagagcaatctttgcagaataggcttcagacattttttctgggggagncagcgaaggatttctgatctgtgggatactcattgctttgaatacctcagtagcaaattgctgcaatccaccaatattaatgggtccctcttcagtggcaatataaattgcatccacctacacaaagatcagaggttggacataccattccacaagtcagaccaagtgggttgtcagaaaatatcatcttagcagctccataatagttcttgtttgcaatacttgtgatgaatgatttaatatcaagattagttggacagctcttctgacacggggcatctgcacatttcaggcatctcattgcttctcggagagctcctcgctcaccaagagtcgtgtgcttgatgtcatcaaaattattctccagcttctcacaattaaagcagttcttatcaggatttcttttccaatgtttcttgtctaatttcttggccgaagtggaacatagagttgcatgagtttgtgttcgaggatttaaagccaggatactctcgatgtccgccgagtccttactgagcacaggggccatggcagtgcctacagtctcgagtctgccagtgacaaaccctccttgcgtcctcaagctccagccagagagccaagtgacagcagccggagcgcgagtcgaaaacaggcccccggccgtaatggccgaattcccgggcatatgtccggtaccgtcgactgnnnnnnnnnnnnnnnnnnnnnnnnnnnnnnnnnnncggccgcttcctcgctcactactcgctgcgctcgtcgttcgactgaacaggagggccatatnggaaggngttcagtttaattacggtttttcttg

SEQ ID NO: 146949 - DNA, 876 bp, Homo Sapiens
  misc_feature (72)..(89): n is a, c, g, or t
  misc_feature (639)..(647): n is a, c, g, or t
  misc_feature (657)..(669): n is a, c, g, or t
  misc_feature (671)..(748): n is a, c, g, or t
tgctggagagaggcagtgcaagctaaattaacctcacaaaaggaaataagtttgcggccgcatacgcggtcnnnnnnnnnnnnnnnnnnagaaaaaaaagatcgatttctttggaagataatgctggcttcagatgacattgaaaaattgccacgtataggactcatctttcccaaaataatatgcaattaatgtacctgaattcttccatttccttcttaaatttcatttgacatattaaccctgagtgcaaacagggggcaatgccttattaatacattcttgaataatactctgagcaaatcagatcctatgaatttgttttacacagaaaattatttacatttcccccaaacccacaatgcagccttacactaaagaacagttttataacaaaacctttatactcaaatttatccattcgaactttagaataaacatgttttaacaagttggaggagggcaggaaatggccatgagttctgattttcctagttttgtagtattaaaatgtctccacgtctacctttggatgtttggtaggcatacctaacttacagctgatccaaaccctgcaacgacttgattgtaacagccttagattctaataaataaagtaggacagtgttacaaaacttnnnnnnnnnttcacctccnnnnnnnnnnnnnannnnnnnnnnnnnnnnnnnnnnnnnnnnnnnnnnnnnnnnnnnnnnnnnnnnnnnnnnnnnnnnnnnnnnnnnnnnnngaagaaggcttaaaatctttgtttccaatcttccatggccccaaatcacaagataagtccagccacttatctgagagagtaaggcggacgcgtgggtcgacgatatcccaagaattccggaccggtcc

SEQ ID NO: 146950 - DNA, 835 bp, Homo Sapiens
  misc_feature (719)..(753): n is a, c, g, or t
tttcttcctgcatagtgttcctcactcagtagtagtatcgattataaagtgacattgacttccacgtgaattctgtaactcagtaacacagaactttgttttagatcctgagttgtcaacattgccaaggggctctcaaagtgcaaacctttgcgtttttgagcccctggaatcttcctcttgtagagtaatcttgtatgtctcacttctagaaaaaggactgtacagtatatcccctgtatcgaaggatgagatactgctggctggtctcgagcccctgcagttgccccttgaagagtcagtttggcattctgcctcctgcacatcagacaggaaagcctttccagcaagcaggctcctcggggtccaggtatggcaagccctgctttggggaattccctacatgggtatcatgccgtctccttttttggtcttgaagaagctctcttatcttccaaagatgtgtctcttggatttgcaggtcacagtgacaggatcaaaacccccaagacattccagaagaacaggcagaggcagggcccacagtggctgaaggactacaaaggccttaggatcctgctgggtgagaatccggcccttgttgtggtcaaacaatggaggcgtccggcggcagcagccttctgcgctgggtgcgcgaggggttcctccccggccgtaatggccgaattcccgggcatatgtccggtaccgtcgactgnnnnnnnnnnnnnnnnnnnnnnnnnnnnnnnnnnncggccgcttcctcgctcactgactcgcttgcgctcgtcgttcgataaaccgagctagcgccctatagtgatctataatctcc

SEQ ID NO: 146951 - DNA, 789 bp, Homo Sapiens
  misc_feature (710)..(744): n is a, c, g, or t
ggagatgtagctttcctgaatgcagtgctgttccattaaatctaatcctctatgctgctaattgagctgcttatatccttttagtccagaaaagcttttcagcaacccaggaataaaaatttctcctttaggaaagactagaaaacacatccagataatgtcgacataagcctgaaaagcccaagtaggaagttttcctttctcaatgtctgctaacttacgatttttgtaacctcacagtaattctacttctcttccatcattcaaatgacagtcaatcttgctccctatcttccttcatttgtcttcaggaataatgccgccattcactaatcacaggcattatctgaaataaagaggcaagacaactaaaagtacacatactaaatgtctaaatgtctcccaagtttcttgaagatggatgtaaaaatactgcctgcaataaatgatatcaaaaggaacttacaaaacagtatgtaaagggacaaaagggagagatgaaaaaggacttgacaggagcaggttgatgtttggagaaacaagttctgatggttttaaattttgttgcctgagacttagcttcctacaggttgtcttttaaaatctaaactttcaggtagaattcaatcagaaatcctgggggattgcctattcaggtccccggccgtaatggccgaattcccgggcatatgtccggtaccgtcgactgnnnnnnnnnnnnnnnnnnnnnnnnnnnnnnnnnnnccggccgcttcctcgctcacatgactcgctgcgctcgtcgttcga

SEQ ID NO: 146952 - DNA, 1109 bp, Homo Sapiens
  misc_feature (995)..(1029): n is a, c, g, or t
gcggggggctggtggggtgcgtggcggtgtagtgtgggtgttgtgtcttggctggccgcggccctgtggctgttgcgggggtgtcgcgcgcctcggttgggtgccctaggagctgcgcggtgtggccaggaggtcgggggatccggttggttggtgtggcggtgcagcgtgtctggcggttttgccgttgtcaggtgtcggggtggcgtttgcgaggggcagggtcgttcggttgggcaggtgtcaggcggagcaggtggggcgtgggtgaggtgcggtgttgtgctggggggtgcgaggggggaagtgggcgcgttgggtagtggcggaatgtcgagtgcggatgccgagcgtgaatattctggggtgctgtgcgttggagccagcgagtgtcgtgtcgtgactgattcgcatgtaagttatcacaggctctatagcattttggaatagacggttgtgcaaaagaatgttgactccacatgatgactgcctaaatcgatttaaatcattgaagaggtctactttgacaactacattgatttccccacggataccatgtatggtgtcataaattggaaaccatcctgagatgactgttgcagcttcactatacagtaaaggatcaatatcaatgtacactttaccaatggcatcatttgcactgtaagtatcatggtcaagaactgtgatctgtaaaggttcatcttgtaagtcttcatcatccacctcaaagttgaaaccactccgagttccactgagggttgagtgacttaaggtacacatctgttttaaaggtggtattaccaaattttacctccacgaaggcatcagtcaggtcactagcacggtccatcactggcaaatggcgcccggccacgattttcaccttcagcttccctggcatggtctcggtttcggcctcttcttgggctcctgcagaaacccccggccgtaatggccgaattcccgggcatatgtccggtaccgtcgactgnnnnnnnnnnnnnnnnnnnnnnnnnnnnnnnnnnncggccgcttcctcgctcactacttcgctgcgctcgtcgttcggctgtgaagagctaggcccatagtagtcgataattctt

SEQ ID NO: 146953 - DNA, 1209 bp, Homo Sapiens
  misc_feature (23)..(23): n is a, c, g, or t
  misc_feature (1092)..(1126): n is a, c, g, or t
  misc_feature (1129)..(1168): n is a, c, g, or t
tggcttaaatataaatggtaaanaaaacggcggtttttggtggttggtttttctgagccaaaggaaaaccaggtgcttaacgcctctttggagtctatggtgtaaaaggtgtgactaatagagaagtgaatacttcacatttcctttgacatctttctcttacccacatttccaaatctgattgagtcatgcatgtatgggatgaaatcttgacttgaaaaaaggtgatgagggcctgttggaagaagcagtgatgaggagaggccagttcaagcctttctttaacaagcagggccttaaaaatacactcactagtttgaagtccagttactttatcttgctgtccagttgttggtgatgaaaatgaaaggctaatcatttaaaaggaaagaacactgcctgatctttgatctattctccttctcccttcagcacctctaggatttctccattactcttttctgtcattctttccggccaatccctttttactgctcttatttgtgtctttctgaggtttctagctagaagatgagcttgctgggattgtattctatttatctgcattatctatggtgcccacacaggcttggcacctagtattcctttaacaaatttgtaaagaggtggtacaaaccaaaagtgcaatctgttcttttgccaaactcaaatttactctttggttttcatctcaaatgcttttctccttccctctgagcttcaatcatccaaacttctgcacccaaatgatttgggttttatataaatgaaaatgctcagtattgctctaagtgattccataactcttacatgtgcacactggctataaaagaagagcaaaaatgaaattaaaaatgtataaaataccctaatctattggtgtatttgtatttctcttaggaaaattaattttgagcaatgcaagcttaatttaatttggctgctccactcagtagcaacagggtgtggtatacagaggagcttcctgtgaggaagccacctgtgttgtgaaattcgcggccagcagtcactgtcctggcccccggccgtaatggccgaattcccgggcatatgtccggtaccgtcgactgnnnnnnnnnnnnnnnnnnnnnnnnnnnnnnnnnnncgnnnnnnnnnnnnnnnnnnnnnnnnnnnnnnnnnnnnnnnnaggaaaaccgacgctagcgcccatagatgaataaaggtctt

SEQ ID NO: 146954 - DNA, 984 bp, Homo Sapiens
  misc_feature (75)..(110): n is a, c, g, or t
ttataatcaatgggcggagcctgttgagccgaacgaaacgagcgcaggaagtcagtgagcgaggaagcggccgcnnnnnnnnnnnnnnnnnnnnnnnnnnnnnnnnnnnncagtcgacggtaccggacatatgcccgggaattcggccattacggccgggatggtatgtcattctatttgttgatgtctacttttgtattcttcagtagtatttaagttgttctttatatagttatagcaatactgagtgtattcttaggtatttcatcttgttgctattataagtgggaaaatttcccccattctgtcttcttgttactggtatatatgagaattcttgatttctttaaattttatgctctggtaccttattgttgggtcgttttcagtaaattctctttgagtttcccaggtgttatctgcaaataatgatagtttccttcccagtttctatacttttaatttctcttgagtggttgtgttagcgggtactttcagtacataggtaagtactagtgatgatagttcagaatttgaagcattgttccttttaacttccaggcagattcaaaggcattttctttataaatcctttccttcctccaagctttgggtttgttgtcgtagtcgtttgtttagtcactgatgttcagaaattcacagtgatgttccttggtgtaggttttgagtcataatgatggattaacaggtgaacccctttaatcttggaaacttaacgtccttcagttctggggccatgggtcttccattgtttctttaataacttcttggtcctggaattctcatcgtcagatgtaagacctttgcaatggatttttccaattattctcttctattttctatctctaaatttacgtcctactttctgggcagttatctcaactggcattttctaaacttaacgttttttcctaattctttgacttctaaattctgcatccctattttaatttcccagaacct

SEQ ID NO: 146955 - DNA, 1625 bp, Homo Sapiens
  misc_feature (96)..(146): n is a, c, g, or t
  misc_feature (383)..(395): n is a, c, g, or t
  misc_feature (587)..(646): n is a, c, g, or t
aagctgaacataatttattctttttcttggacatgatgtgagaaataaaacatcctggcctgggagtcagaagattaggttttcttgatctcaagnnnnnnnnnnnnnnnnnnnnnnnnnnnnnnnnnnnnnnnnnnnnnnnnnnntgacgaaaaacaagggagttgcactggataagttttaaagtcccttttcaaatttcattgaaacactaagtcatgatcttgaacagtgcctcttggctttggagatccacttccattggggtgtaaaattaattctagtgtttgcaattttctgatgcttatattatgttaatgggagttttctatacttccaggagccaatcattagaatttggctaataaaaacataactgagannnnnnnnnnnnnacactgtacataaagtttactttggcattcacagggatgatctggagagagctttttgttatacatgttcttattttattctcttattgttgaaatcctattctgttctcaagtgagtggcaaaagagtagcataaaagagagatatcttggttaaggtatttcttactgagataaaagaataatagaagtnnnnnnnnnnnnnnnnnnnnnnnnnnnnnnnnnnnnnnnnnnnnnnnnnnnnnnnnnnnngaactattgctaacacttaaaagcaaggatttttcataggtttaccactactggtaaagagttatgattacttccaaaatattaatatcgtgccaaagaaaacagagtttgttaccatttttatgtatatagcaatgtattttactagttatcttgataattttcagaaatgggacaaaaatagaagactcatgattctgcttttactatttcaaaccagatgttaagcatgttgaattcaaatttagaaaaggactctgtggagtgccagctacaactttgggagtaggataaataatttcttcaacagttatatatgtacctaataagaagccaacaactccagtgaatgctatagaaatatttttcaggaccatccatatattataatgttccttcgaaaatgtaagaatttcaaccaaaggtggcaggattagggccaatgtgctgctgctcacagctccaacgaaggaaatcacaatgtctaaacgaggaataagacattgctccggcacaagtaatactaaccaagaaggatcttatcccaaattcacagatttgcttccatttagtatgaaatttggatgtgatcccagggataatgatctctgctggaacataggactgaattgaatatgtcacaaaaatgccaaaggaatagaattttcactgattgatataaccatacatcttggggaagatttaaagttatgctgcctttgatttcatcatggaaacacatatatcctaaagtagctaatgttacatacaaagttgtaacaatccccatgccaatattcaacgcttgagggaaacgctttgattctttcatttggttttccagtggaaggaccactcctatgccttcaaaagcaaatacagcagtaccaaaaagagtgggtatttcttccaaccagccactattggaacccggccgtaatggccgaattcccgggcatatgtccggtaccgtcgactg

SEQ ID NO: 146956 - DNA, 586 bp, Homo Sapiens
  misc_feature (565)..(565): n is a, c, g, or t
acacagctgggattctgtagtgtttatattgtcttcttagctgaaaatgtgaaacaagttcatgaaggattcctggagagtaaagtgtttatttcaaatagtaccaattcatcaaacccttgtgagagaagaagtgttgacctaaggatatatatgctttgctttcttccatttataattcttttggtcttcattcgtgaactaaagaatctatttgtactttcattccttgccaacgtttccatggctgtcagtcttgtgataatttaccagtatgttgtcaggaacatgccagatccccacaaccttccaatagtggctggttggaagaaatacccactcttttttggtactgctgtatttgcttttgaaggcataggagtggtccttccactggaaaaccaaatgaaagaatcaaagcgtttccctcaagcgttgaatattggcatggggattgttacaactttgtatgtaacatagctactttaggatatatgtgttccatgatgaaatccaaagcagcataactttaaatcttcccccaggatgttggtattttaatcantgaaaatgctatattccgtgg

SEQ ID NO: 146957 - DNA, 505 bp, Homo Sapiens
tttttaaccgtaaccagaaaggggttgcgaatgacatctagctgtcaggtctttaaagtattgtatttcttagagtgtcctttaaaggtacttttgcattggtaaccttttgagattagtttttatcatagcaacgtgtggaaattctgaagctgacatgaagttggtttgatccgtgtgtgaacattgtgcctttccagtgttaagtgagtcagacagagcatcgctgcccgtgatagccactgtttttgataaactcaaccatgagtataaaaagtacctggatgccgagcagagttatgcgatggtgagttacatggagtatgacaaagggtcctcctcccccaccccctcccgggtattttctaagtaattatgatgcaaaattgtttcctatatattagaataaggtcgctgagatttgccgcctgccatagggcaaggtggcagtagtgggggatagtggaggagtagtaaattcagggtccctgcatcccacgagctg

SEQ ID NO: 146958 - DNA, 746 bp, Homo Sapiens
cacaccctcgctggcctcgcctgatcgctcagaggccagcatgccccccgcccaccggcacaggagccccaggcaccgtgcatcctcagggcccgtggccaaccaggacagtcccaaggacggagaccccgcttctgctcctgccgcccccgcccccgaccagatgaggctgcctgctggtcagccctgcagccccctccacagcaccctccttcccaggcccatggggctcccccaccccatcccgtggctccaaagtgaaggcctgtcccagaatcaccagcttttggcagtttgggcaagtggagagtcggtgagaagaaacccccagtttttattgattaaaaacccatccacagtgctaacatggaaactgcagtgtgatctgtgatgtgattgtccaatcagggctctccctggaaatcgcctaggaaaggaaatctaaggaaacacatcctggtgttgaactcggttcttcccaggtcacttgatccctgtagtgggaggggaatgaggtgtccgggctgggggtcggggagcagtcatcaagtgcagatgaccctggttgttctccagggcactggggcgtgtcaaaactggccgccccagccattccttcccacccgccaggaaatcctcttgctacctttgtcctgacaaaggttaggacagtgaccagggcctgtccatggtccccacccagaggccccaggcatgcactccccacagtgcccgaggctgcagtg

SEQ ID NO: 146959 - DNA, 1273 bp, Homo Sapiens
  misc_feature (1138)..(1138): n is a, c, g, or t
  misc_feature (1186)..(1186): n is a, c, g, or t
tggtttcagagtgagtctcttctattttagaacgttgttccagtggaaagtgtcgaatttttcccctcgcagggcagatttctccaggtcacttgacttttcttctgggagtaggagttaggagagattcccctctaaccccccagaggctgctaagggaggaggagactgtggacatgagccctccctgctcacaagcatatgcccggagacctgatagggcagtttctgggccatggacattgctttgaagagggggagactggacagcatctgtgggtgctgagaccccaccttaggacctgagagattgaactgtgtaagcgccattcagctgcgagtgcattcttggactgccttgtgagcatccccggtctgggcaggaccctctccttcccatctttctataccacccagcccagccatggcactgaaaggccgagccctctatgactttcacagtgagaacaaggaggaaatcagcatccagcaggatgaggacctggtcatctttagcgagacctcactggatggctggctgcagggccagaacagccgtggggagacagggctctttcctgcctcttatgtggagatcgtccgttctggcatcagcaccaaccatgctgactactccagcagccctgcaggctctcccggagcccaggtgagcttgtacaacagccccagtgtggccagcccagctaggagtggtgggggcagtggcttcctctcaaaccagggtagctttgaggaggatgatgatgatgactgggatgactgggacgacggatgcacagtggtggaggagccacgggctggtgggctgggcaccaacgggcaccctcccctcaacctctcctaccctggtgcctaccccagccagcacatggccttccggcccaagccaccactggagcggcaggacagcctggcatctgccaagcgaggcagtgtggtgggccgtaacctcaacagtgccatttctcacacgggccgtacctatgaagccatcggggagatgtttgctgagcagcccaagaatgacctcttccagatgctggacacactgtctctctaccagggcctgctctccaacttccctgacatcatccatctacaaaaaggcgccttcgcncaggtgaaggagagccaacgcatgagtgacgagggccgcatggtgcangacgaggcagacggcattcgcaggcgctgccgcgtggtgggtttcgccctgcaggccgagatgaaacacttccaccagcgccgtgaa

SEQ ID NO: 146960 - DNA, 1026 bp, Homo Sapiens
  misc_feature (908)..(942): n is a, c, g, or t
ccagttcgcgtcgttgcgtcttcggtttgtctgcttatgctcttcgactctgccctggatctgtcaggtagccctgtctgatcagttgtttttcttggcctgtcgagacaccgcgattaggtcctagctggtttcacccagggagccatactggcacattccttctgcgcttgatactatctgttaattcccttcagccagggaccagtcactttaggctattagcctgcaggtcatttagaagatttaagtaaatatctgatttgaggaacctgggataagagtccttttccataagagtatatatgactttttgtgcttcatcaaaacacgtgggggttggtgctttaatcttcttggctgtagattctcgagtgcggaagtcaatattgatttgtttagcagcatctgaatgcacaaatgctttatatatctcttctgctttacagggcaaaagatcagactctgttttcttatagtcttcacaagccagccagaactcaatattctcctcactgaattcagactttaggaaacttccaaagacattttgaccagtttggttggcaagaagtttttccagagattgagaccattgcattacttcagcagcagaaagtacatccttggacttggaagatttcattccagattccagatgtgggatcatagatctcaggtatgctttcatatccattccaaaagtctttggcctccttttttgcattttgtcgtctagaagtgaatgagtggttcctttcaattcctttgggttagcagagaagaacattcctggcattttgtctaactttggagtggagatggctgctgcgcgcatggtgctcttagcaaatatccccggccgtaatggccgaattcccgggcatatgtccggtaccgtcgactgnnnnnnnnnnnnnnnnnnnnnnnnnnnnnnnnnnncgccgcttcctcgctcactgacttcgctgcgctcgtcgttcgtctgtgacgaggtagcgcccttatagtgatctatacatcttt

SEQ ID NO: 146961 - DNA, 997 bp, Homo Sapiens
  misc_feature (879)..(913): n is a, c, g, or t
ctgtgtgcaaagtctggggtttgcagagccaggaatagtggttaagggtgagcccgacggagccggagccagtcctcctctgtgcagtcctgaggaatgggggccacagccatggcccatacttgaggggagaatctgttctcgagagccctgtgggggtcgccgcccagcccgtctcctctcagggtcctctccagttcccattctagacccagggattttctcacgctccctgggataactgtcaaagcaggcaggctgttctctggttccaactacttgcccacaggatctctaaagacccaggaatgggggctattgccaggggttagaagagaaccaggtcccaagggcatggtgggcgggcagatggttccagagccttagagattcataggttcttcctcctccaccagctgctccgagggcctatcttcagccaggatgcccacagagagggacgccagtgcggtcactgcctccacttcttctttgtcagcccctggcactctaggcacccaggagtctggacaggaggccaggcgctgcatgcagccccagtatttactgtgcacccggatcacggcctccagagagcggatggcattgaggttgggtttctgtttccagccttcttctgaaaggggatccaccctgttacccagaagagcagccacacaggcctcagaggcgtcacagatggctgtgaggtcatggccaccctccaaggccagcaccactgcgcctcctgccaggttcatcagttgctgcgtcatgtatccaaaacatttggcagaaacatggtagccacccagtggggccgggtgacccggccgtaatggccgaattcccgggcatatgtccggtaccgtcgactgnnnnnnnnnnnnnnnnnnnnnnnnnnnnnnnnnnncgccgcttcctcgctcatctactcgctgcgctcgtcgttcgaaagagacgacgtagcgccctatatgagtctatacattctttg

SEQ ID NO: 146962 - DNA, 911 bp, Homo Sapiens
accgcaggatgcccatctcaatcatgtgatgcccaggctccagacgtcggacttgacattgtagccattctggttcagctctgggttgatcctctcaggggccatgtagggcttgcagccggcatccatcgtcttggccacagagtccaccaagtagccactgatgccaaagtcacacatcttcacatggccctccttgttgataaggacattggaagggcttcacatctctgtggatcaccgacagctttgctgtgcagatgctccagggccccgcacgatagacacagcaatctccccaaggatgtcctctggaattgtcatgtttttatccagcaccttccggtagaacttgtccaaggatgtgtccatgagctccatgcagatccacacgtctccctctctgaatagtgccccgtagaaggtgacagtgtagaagcagtcgaccgtgcgcatgttgatgtccaggtccatgagcagccgcttctgctcctgtgagttcacggtggcccggatccgcttcacggccatgatggtgccgctctgggcgtgccgcaccttctctaccaccccataggctccacggcccagttctgagatggtcaccaagtcatcagcctccacctcaaagtttctgtctccaatggtgatgaaggtccgggagtccaggttccgggggggtgtggggttgggtgcgggtggcttggacatgcaggatatccgtagatccttcttcctcttggattttcctttggactggggcatgctggcgggctggctcgaggcgggcgactccatgctgcaagtgggtcctggacggcggtggagactaatctagaggactgcgggctccaccggggccgagcacgctcatggctgcgggcagacggcccaggccaggcggaggagca

SEQ ID NO: 146963 - DNA, 1206 bp, Homo Sapiens
  misc_feature (289)..(299): n is a, c, g, or t
cagtcgacggtaccggacatatgcccgggaattcggccattacggccggggggccgagttgtgtaatgagttggggcaggtggtggggtaggtgcatgggagggtgggccctctggggaggcccaagcagcttgttttgcaaaggccccaagtcctcctgctagggaaaagcttttgcatgtgtcctgaatgtgtctctgtaaacatagctgttatttattattgtgatgttgggacctttagcccatagcggatgcctcctcaggaatattctcgatttaataagctnnnnnnnnnnngttctgtgtttgtgcccacagtaaacagaatgtacagtgtgacccacatcgtggtccctccaggcattcctgccccaggataaggaaaacctgagcccacatctgattgccaacggctgtagccttctaacagtgggaaactattaataggcaagaaatttctgctttatcagtcatcacacaaccattcctggggcattgagactgtcctggttaggctgtgtgtctcctacattaacagctggggaggagggaaaagcttcagacttttaaactagcaaaacagttatttctctggcatttcacaattcctggatttccatggttttcctctgtacttgtttgcactcattatcaggccattcgtgtttaacgtttgaaactaagcattttaaggaagtcttgcctcagttatttcagttttcaggtgactagagaatttcaggcaacagtgccctttgcaattacctttttgatgattaaggtgactatttttatttcttgttaagcatcagaagatgtcagcattcatcttttgggagtccagttacaaggtggaactagaaggtgttttcagcaatagccagagcactggaggaaaaataattgacaaatatttatacttttaaattgttttgaactgtatttacatacatcatgttttatcaggtacccaccaactttatactttctgccttcagatagagtttctaacattttctagtttgtcagttttaaaatataaaattcttttatgtttttaaaccgtcaaccaagaagtcaagaccactgtcccctgctgagttaggcaatcacttaaaactccaaagaactccaggctgaggagttcttttggtgctgaacagtggtctgacaacaggtgctagaattaaggtgtgggaaaaaa

SEQ ID NO: 146964 - DNA, 1460 bp, Homo Sapiens
  misc_feature (1349)..(1383): n is a, c, g, or t
taaatattattttgctttattgttgtaatgttatttttgtaataaataaattcagagagaacatcctactattagacataggaaaatgcctagaaatcttgagatattttgtccttctttatgccagtattatattttggtttacacctcagaagtaatagtgaaaattggtagagacaaaatattctagtaaccaattgtgctatttttctggttgaatttaaaaattttaatttcaatttatatgttgattcaatagttgcaatagtattaattgagattttaatgtccataaaatactatttttctccaattattatttagatcattatagatgcataattgttcgtgaaatggctttgctggagctggtttttagggtaactgacaggagagagaatttccagtaatttctcttctgtttagagagacatactatttcttctacaggaaaactaacctctgactcttttaaacttcatagtttctaatgttacacactgaatgatatcattaattattataacttctgttttcaaggatagtattttgttttgccaaggggagatagaactttctcttagaggaaacgaatctgtttaagacacattatgagcagcagagggcagccaacttactaaatgaataagacttgttagctatgtagcttcactgttgacgtccccacattaagaaaataatgtaacaaatggatataccaagtcctgatttatagtaatgcatctctatgatagaatatggaaaaggaagcagaatatctaccatcttgcatcataccttagaatggcagttttccatgaattatgcttttgtttatttaaatagtcaatttatagttacaatgggcaactatctagaatgcatgccaatagaaattagcagagaaaacacccaaaacaatgatagctggtaattatcgataactttggaatgcaatgaaaggcacatgtttgagcagagttgtgttaaaggaagtgttagtggcagaactagaattttctctttgctgtggttgccgtattgaatcttttaagtcatgcaataattaaatgtcctatggtgacctggaggcactgctaaggaacacagaagcctcgcaacagtcagtgacacacatacagatggtcagtcaacagatggatatacacacaaatcactaatctcagtaatttaacactttccatgtggaacatggacattcctttgagtacagcactaatattaacactcagaaactcatttaggaggtatgattatggtttactctaattgctcatcccggccgtaatggccgaattcccgggcatatgtccggtaccgtcgactgnnnnnnnnnnnnnnnnnnnnnnnnnnnnnnnnnnncgccgcttcctcgctcactgacttcgctgcgctcgtcgttcgctagcagacggagctagcgccctatagtgagtcga

SEQ ID NO: 146965 - DNA, 1063 bp, Homo Sapiens
  misc_feature (42)..(76): n is a, c, g, or t
gccgacgagcgcagcgagtcagtgatgcgaggaagcggccgnnnnnnnnnnnnnnnnnnnnnnnnnnnnnnnnnnncagtcgacggtaccggacatatgcccgggaattcggccattacggccggggggccacggcggctccagcagggtctggttaaggggtccagcccagcactggaccattccgtctcctgctctggacttgccctctcccttcctggcactctcatgttgcataccctgaccccagtgctgctctaagcaccgtccctgcccagccccacttctccatcgcagccccaccttggctgctgagccaggagctaaaaccttagatatctggttctgttttgcacccagcttggcagatgtggatttgaatccaagccttgtgtctgcccctatgtgacagctctatattttatccccgttttataaaagaggaaactgaagttctgaaaatctccttccagggccccagctaactaatgccataggtgagattcaaaccttcatccttctgtctccaggggcctgatctttaccattggcaggggctgcaaggccgtttaagttggacaaggaagtggccccacattagcccgagcaggggtctggaagcatcctgtgatagtgacacacctgatctctactactactcccaggcaggcagctgaaggcagactactacctcattctcggactgtaacactcctcacccttccttcacacccaggtgtgggtactccggagctctctgtgctcttgcattctctcattcccttagtactctattgagcagagtctggagtgtgagaatatggaatccaacctcacacatgacacagatggggaaactgaggcattacgacgagaactgaacgctgtgggacgacggtgataaccgcaggctctgggggaaaaaggcgccatcataggggggggaacaagggagagtaggacagaaggagggaccccagaaggatcaaaccacagaagctgcgtgcccaaacgacagtcagcgcccaacacgcaggaacatagcccacgaaagagacaggag

SEQ ID NO: 146966 - DNA, 948 bp, Homo Sapiens
  misc_feature (659)..(671): n is a, c, g, or t
accaacaaaggactttattagtgcaaattcatttgaatatttacaagcatatatgatagtgcatttcgatgcaatctaagaaggaatacattacatgggaaactgtcttaatattttcattataccgtgcagatttctagaaaaatcaacaagcaatagtcctgtctgaagcacagaatttaaaattaagtttacctccattacagacaagaaaaccaaaaattatcggccttataaattttagtatgagtacttaaatttaggtacttcacagatttattttcattaattaatgaacgaaagtaactggtatttataagaaatataacattgtgttttaaatagttctttaaaatacacatttactggtaagtatttttacatatatttaaattaaaaataataacattccttcatacacacgagctatttaaaaaaatgtgagtaccctttccatgtgaacatttttaaaataaatatttacaagaggagagaataattttcctatccaaagacaattcctatttctctcttactcaacagatgttcgtctcattttttcagctaattcttttctcacttcaatgtgtttttctaaattttgcacttcatgtggaagattgatgtcccaaacggtcaagcaagattgtatctctagnnnnnnnnnnnnntgaaatcatgtttcaaagatccatcataaaacattcttattttatttcagtttggctcatgtatttttagctgacttagataaatgtaaatataaacacagctataactaatgtactaaattattatttataaaaaactatacttggaaaagttttataatacattatagaaactattaaatttcaaatagagtatcaacatttaataaattaacatttcatattctcccggccgtaatggccgaattcccgggcatatgtccggtaccgtcgactg

SEQ ID NO: 146967 - DNA, 881 bp, Homo Sapiens
  misc_feature (26)..(26): n is a, c, g, or t
atctgcagcactgaatgagtgcgagngtcacacacattgtgtgtggcagagttcgagagtaacagtgcgtcacgtgcatctctctccagtgctgctgcaccggatctcatgcgtagcaaggagactaagccatgccggtgacctgctgatcatctatgacggctaggcggtcattttacgcacatgtacaggagccttagtgcgtggtactggaccatgatgttatcactggatgctgcctcctgagcctcattcacccagcgcttgaccacgtcaaagctgcacttcagcaggtgcaaggaagacacgagggcagagctggagacactgggcaccttgtccacaatggcttgtttcatgtagcgctcaatagcctgcagcatggtgctatcagtgatctggcagagggctcgcacggccgggccccggtagttgtcttctttcccagtcatgtcttttgttaggctgctggtgacaatgatgacatcctctgcaatgcaagacatctccttgatggtcaagtagcacatccgacggagtgtgggatcattggactgaaagagcttggtcatggcaaagaaggcctcggtcgcttccgtggtccccaggtgctccccctggtttatgagataaagaatcttggtgaggatgtgggcacatttccgagggttgatgggagtttcattaaatacacgggcctcctggagtaccgcactcttctcaaggtgctggaatgggttggagcctccacctgactcctcatccttcttgtcgaatttcttcaacatagtggagtcggtggggcgcaatgcagcaacgcaatgctcgacgggcgcctcgtgccgaattcggcgcgccgtcgacttcatactctctcccca

SEQ ID NO: 146968 - DNA, 1114 bp, Homo Sapiens
gatgtggagggggtggcggaacccgccacgcattagcgggagggagccgcccctgggggtgaagtcgccggaaaaaagttgggagccactgaaccccagcccggggacaaattctttggggcactacaagcctgggcaagattgccgaatggcccgaggggggtttcatacaaccagcatttttgtaacttgttgcacaaacagctctggaagaaatcaaaccagtgggctgtcacggctcccatcctcctttttccaggtgctggctggccaccccggatcatcatgcagtaggcaaagggagacttagggccatgccgtgtggctttgctgatcatcttattgacggctaggcggtcattcttacgcacatggtacaggagccctagtgcgtggtactggaccatgatgttatcactggatgctgcctcctgagcctcattcacccagcgcttgaccacgtcaaagctgcacttcagcaggtgcaaggaagacacgagggcagagctggagacactgggcaccttgtccacaatggcttgtttcatgtagcgctcaatagcctgcagcatggtgctatcagtgatctggcagagggctcgcacggccgggccccggtagttgtcttctttcccagtcatgtcttttgttaggctgctggtgacaatgatgacatcctctgcaatgcaagacatctccttgatggtcaagtagcacatccgacggagtgtgggatcattggactgaaagagcttggtcatggcaaagaaggcctcggtcgcttccgtggtccccaggtgctccccctggtttatgagataaagaatcttggtgaggatgtgggcacatttccgagggttgatgggagtttcattaaatacacgggcctcctggagtaccgcactcttctcaaggtgctggaatgggttggagcctccacctgactcctcatccttcttgtcgaatttcttcaacatagtggagtcggtggggcgcaatgcagcaacgcaatgctcgacgggcgcggcacggagtagcggtgccacagtggttctacagggaccaccctcgtgccgaattcggcgcgccgtcgacttcatactctctcccccct

SEQ ID NO: 146969 - DNA, 535 bp, Homo Sapiens
  misc_feature (42)..(57): n is a, c, g, or t
  misc_feature (283)..(315): n is a, c, g, or t
cgagtgggcagcattactctcgcaccgacatgatgctcgagnnnnnnnnnnnnnnnnggaaacacacttatcttttagaatttgtaatatttattcataaataggcacaaaataatttaaaaagccaaactgcattgggtaaatttacaagcctttgccttcttcaactcatgccacccacgcaacatttagttttactatatattacagctttctttacagcagaaaactttgaagtcttgttaaagggcaatacttgtgggtccccttaagatgtgtctcnnnnnnnnnnnnnnnnnnnnnnnnnnnnnnnnntacatttgtctgaactgcaacaaccaagcatggccaaacatttcccattataccttatagcaatctttcttctgaacaacaaactgatttttaaactgagaataaaaagtttataccactgtattgtgtgtagtccatgttctaaatccaggatgccccggagccaaaatgccctttcaggttctgcctgcaggttaggaaatagcaacagtttttgttt

SEQ ID NO: 146970 - DNA, 616 bp, Homo Sapiens
gtttgtttgttttctttagggatcaagggggctaggagggttacagaaatggggggcagcttgagctgagactgctcacacggctatctctgcccatgtgacttgccccctcttgacagtttccattatcattccagttcctttgaagtgcttgggaggaggtcttagaaaggtaaagtgtccaggaaaagtttgtcaattattgctggcggtggcaccaagtcttccaatttcaggtagaaaatgcgctgtagcccctgtgtgcaaagggtacgaagttctgggagcttccccaacagtttggacaaataattggggcggttcaaccccccattgttgaaagtcacgtggtctttgagacaatttacaatcttgttttgcagttcttccactctcttgggttccttgagcccgtgtctctctgtgacctatagccagggcagcaatgcaggagaaggcagaaatgtcgatgttcatattctgcaagttggaggagaattcaacaatggaatcaatccattccccaaagccacgaacgcattgcaacctgtgcaagaccaccccattgcaaaagatgagtttaccctccactgggttgacctgtatgctaatcgaa

SEQ ID NO: 146971 - DNA, 1222 bp, Homo Sapiens
  misc_feature (211)..(211): n is a, c, g, or t
  misc_feature (1148)..(1182): n is a, c, g, or t
tataagtaggtagggatcgccggggacggataaacgggggtattcccgcggggggagtactggcggcgggttcgatgaagggaggtggtatggctgggcggggtatgcggcgttggaacagggggaaacgtgagcagggtgggtttaatcctttgtatagtttattataccaaagattgatagtaaaatagtgaattttaaagcttcttcntaccctttcattgtgaatgaacagtgatgcagggagaagagacattcagaagaaaaatcatgtatgtattattaaactagaagtgataaaatgttcagaatgacaatgtatttaaaaaaataataaccttgtggggaattgtacatctatcattatcacaacatgcttatttgatgaagctaaagaaaagccagaagactaatatggctggatgagaatagcattttaaaacattttcagcaaaattctagaaatttgctgtttagttccaaaactgaattttatacaagtgctattattccaatagtttttttcaattgtcactagtgatcttgatccatatactgcaatcataatatccaaaataaaagagtatttcattaataacaggtgttttcaaagcttaaatatatttcaaaaaccaatgacagttaaagtaggggttctaaatttttgcatgtcttattaagctttgttgtatagactaaaattttggtttcatagactcagaaatactaaattgcctattgggttttgtggcttcttgcatcagctcctgcaactgtccaatttgttcatcacgaaagtcattaagtttttcttctgggaggaaggtgccaaaacatgcttttccagttgaattttgtctgttttcgttagcctgttgcaataacgctgttgcatacacctcccattcttgcaagaaacgctgtgcctcgtcagaaccaacggtcttatgtctcctaaattcgtctttcacgtactggtcgcccagggatttgaggtccgggggcagaacacggtgcagctgcaagacgcgcttgtacaatgcccggactcgagaaacgtgccgccccggcatagcgccccacgccgaccgccgacccccggccgtaatggccgaattcccgggcatatgtccggtaccgtcgactgnnnnnnnnnnnnnnnnnnnnnnnnnnnnnnnnnnncggccgcttcctcgctcactgacttcgctgcgctcgtcgg

SEQ ID NO: 146972 - DNA, 1874 bp, Homo Sapiens
  misc_feature (177)..(177): n is a, c, g, or t
  misc_feature (240)..(240): n is a, c, g, or t
  misc_feature (431)..(431): n is a, c, g, or t
  misc_feature (509)..(509): n is a, c, g, or t
atctaaagagcgaacacacactaagtcgcgacagtgcgctcttagacttccaggtacagcacgtctatatgaggggggcgactttgctgcggggagattctgtcttcacagaacgttgttctcgcctgcaccctcttgtcgagacagaagccaccaggaggtgagctctttgtttcncccccgccgcaggtctttatatgccagacacacagtgtgtggggggttcttttcgccactatntaatgttgagtcgccagggaaaaaaggctggcactcctgtagcgcggcgcatgttctatatttcttgtgagaggtccattctgtgtacaatgacaccgcacgaggcaccaactccgctcatatatatttctgagagacggggtagtggtttccttcaccctaaatgacgagtagttggaaggtttgtctcnttcataagagaagggtcgtgagcctcctctcagggtgtggggatttgccagggggggattttagaggtgagctcgtgnttagttcgcccgcgctatgacttgtagagctttctcagccggtgtgtttctcccggaggtgggagggtagtgcaaagataaatgggagattaagtacgcctgtttgctttggggctcagacctccgttttccaacccagacgaaattcctgcggggttagctaatttgtttccaatacccagtatataaattccaaaaactggccaggtatcaaaaaaaaggtgtgttgggttttttccaagatacgggtcttggtgaaaataaagccaaataaaagcatatgtcacacattaccaaagtcttacattttgcctttgtaatacaagcaagtgaaatattaacacatagcatttaaaataataaatatatattttattgacagtaatttggaatgttagagatacaaaattttatgtacaattattcagagtaaaacatgtaagctttaggttttatttacaaatatttatcttatcttcctctcctatttgacgttttagctcaagaagagttaaaatggaatgcatctgtagatatatatttgggaaatgcgtgttcagtcacttggctctgtgataataatctttatgtaccatgtcagacagattttcagactccagatcctctttgccattatctgaatttcctgatgagatatagcaaccagagtcccttgggcagtcatctaactgtgacttatttaaggagatgtctgagctcaaggataggggctcaggttcattttcttgctcttgaataatttcttcttcaaggaagttttcagcagctgatagtaaccttcttctgtcatctgggttttcaatatttgattcaatgaggtgactctcttgtttatatctttttaaatcttctagagtctcataaccattgagcaaaagtgttgaggtgtattcctgcagatgaatcctctctaggaactcctgcagagtcttggattttttgctgttactccttcggtttgcctttattttcttgggggctgcttcctcttctgagatgacatccacataaatgaatttgaagtttcccactttattgttcaacattcctgtccacatccccattggtgttttgcaaataatgtctatgatgtctcctttcttgattttgagggagtcagtgtcatagggacttggcgtgaaatccgtatgcactctggcacggccacagaatggtcctgaataggggccatcgtcatccagtcgaaagctgtcccggttacttgtaccatctgaacagcttgttatgccacttgatgagctctgtccactgtagagactatccatggagtcaccccggccgtaatggccgaattcccgggcatatgtccggtaccgtcgactg

SEQ ID NO: 146973 - DNA, 774 bp, Homo Sapiens
ttcggtttgcctttattttcttgggaggctgcttcctctttctgagatgacatccaccataaaatgaatttgaagtttccccactttaattgttcaccatttcctgtccacatcccccattggtgttttgcaaataatgtctatgatgtctcctttcttgattttgagggagtcagtgtcatagggacttggcgtgaaatccgtatgcactctggcccggccacagaatggtcctgaataggggccatcgtcatccagtcgaaagctgtcccggttacttgtaccatctgaacagcttgttatgccacttgatgagctctgtccactgtagagactatccatggagtcactggctttgagggacaccttctctgtgtgggtcccaatcacagggtcactgtttctatatgggtgggcattctctccatcttcctcatccttttcctcagaaagggctttgatgtactttttacccacttttttcttcattgtccatgaaatagctctcatttttttacccaaaccgcctccattatttgaagttttactttgttctccacttccatttgtgggatctccttcatgtgcctcagttgaatcatctggttttgataaagaattattccgaaaacgatcgaaattcccaaaactgctgcttcgctttggtttttgatgtttctccttctctgaaacattggatggctttctcttgagcattttgaattctgactactcctagtgagtgcactttctgctgttacagaaacaactccc

SEQ ID NO: 146974 - DNA, 1256 bp, Homo Sapiens
tcggtgttcagccggggttcctgtagtgtctccgagtcaagtattgttggcacaccagagtgcaccttcatctcggaggaatgaaggacagacgtggaaaatttgcgcctgtcctccaaatatccgtgtgccatatgccccgtatttccccctggtataataatgggaggagtgaaacaaaagggtgcacccaaaacgtgtgtagcgccagctgtgcaataagcagccttggtttcaataatatcccaacagccagggaagtaatcccaagggtcgcacagggagggtggtgaattaaaccagaattggggttcaatcccataccagtggaatattattcagccagaaaaaaggaacgccagtactgttatatgctgcaacatgaatgaaccctgaaaacccgctaagtgaaatcagacagacccaaaagaccaatactgtatgattacacttatatgaggcccctagaataggcaaattcacacagacagagagcacaacaaagtttaccagtataacaaaggttaccaaagactagggggagagacaggtaggaagttatttttttatgaatacagagcgtctgtttgggatgacgaaaaagttctagaaatggatagtgtcgatggttgcacaacatagcaaatatactaaaagccactgaatagaacatttcaaaagcatgaattttatctcaatatttagaaggaaaaataaatattcttagaagaaacaatattaccatcataaatggaaaaccggtaataataaaatacatacataaatattaagatttacaatgtctattagcaagtcaccctaactcatcttacagaccaccagtaggacaattacccctttgggtgacatgaaaaaggctgccagggggcttatgtccagtgcccagggtccagcatggcaacatattttgtaaaaagttccagcaggctgtggacagcaggaataggctgttgaggggttgggcacagggtcaggtgctggacactagaacaggactccactccgacattccgggtacacagaacttcccagtgggaagagctagccacacagtggcagaagcttggaaaacaacccatcccagccctacgctctctgaatgtgaccttgggtgcaagctgggtttgtatgaacttactggcatttttaacaagacagtgtgtacgggagcatttcaactgcaaagaccactgaactggacactgtcggcgtgacagtatcaagtaaccattagg

SEQ ID NO: 146975 - DNA, 856 bp, Homo Sapiens
  misc_feature (107)..(537): n is a, c, g, or t
  misc_feature (631)..(650): n is a, c, g, or t
  misc_feature (733)..(767): n is a, c, g, or t
  misc_feature (833)..(833): n is a, c, g, or t
ctgctttggttctcttggtccatcaggaggttctccaaccttcttgttcgcccatggcttggaggtgccgatgggcaccaatcttcaactccacgtgcgcgtcccgnnnnnnnnnnnnnnnnnnnnnnnnnnnnnnnnnnnnnnnnnnnnnnnnnnnnnnnnnnnnnnnnnnnnnnnnnnnnnnnnnnnnnnnnnnnnnnnnnnnnnnnnnnnnnnnnnnnnnnnnnnnnnnnnnnnnnnnnnnnnnnnnnnnnnnnnnnnnnnnnnnnnnnnnnnnnnnnnnnnnnnnnnnnnnnnnnnnnnnnnnnnnnnnnnnnnnnnnnnnnnnnnnnnnnnnnnnnnnnnnnnnnnnnnnnnnnnnnnnnnnnnnnnnnnnnnnnnnnnnnnnnnnnnnnnnnnnnnnnnnnnnnnnnnnnnnnnnnnnnnnnnnnnnnnnnnnnnnnnnnnnnnnnnnnnnnnnnnnnnnnnnnnnnnnnnnnnnnnnnnnnnnnnnnnnnnnnnnnnnnnnnnnnnnnnnnnnnnnnnnnnnnnnnnnnnggacaacgtagtgagaccctttatctattataatttttttaaaagttaaaacaaaacaaacaaaacctgtgttgttctatccatctgaccattnnnnnnnnnnnnnnnnnnnncttgtactgtaaagagtcatgaagaaaactcccccggccgtaatggccgaattcccgggcatatgtccggtaccgtcgactgnnnnnnnnnnnnnnnnnnnnnnnnnnnnnnnnnnncggccgcttcctcgctcattacttcgctgcgctcggtcgttcggctacagagcgaggcgccatatnaggtatatagttctttttaaggg

SEQ ID NO: 146976 - DNA, 958 bp, Homo Sapiens
  misc_feature (882)..(916): n is a, c, g, or t
gtgtttgttccgctgtccccccggaagtggaaaggggggttctccctctgcccgagaaaacgggcggggcttgtaaccccccgccacgaaaggccctcccgggctgtcggctgtagggggaagtcggggcttccacaccaggggagccgttcccgaaaaatccccagcgcttgagggtcgccgtcgttcggggggaactgagcggacggcgtagggggactccgaggtgggcggggtgttcggggctgcagactcctgcttcgatggtgcctggcacagggataggcccaggcggcctccggggctggtctccggcgtgggcacggaaagaccgacggacgcacacacctggcctggcaccgctcggtagctccagctgagcgccccccatggaggcgccctttaaaccttcttgccgggagaccacgcccaccgcggccagctgccgcggtgattggggtggggcaaatccccttttggccaatcaacttcggattctgcttctcacttaaccgcgccgcgggcccagcgcgcccgctgattggttcagctccacctctgtggcaaacctggcaggagtgatgcaacggcaggggaggtttctccagcgccggcatgcagcaagggcagcctcggattgcgtcaggcggcgggcagggggcacccgccgggcccagggcgggcaccgggcgggcgtctccccagccgcacccctcatggcctgggccccttggaggtacggcgagcgagtcccaggcgatgtcagcccagccttgccgctagtgcatctggccgagtccctgccagcctaggcggcacagactcagtccccccggccgtaatggccgaattcccgggcatatgtccggtaccgtcgactgnnnnnnnnnnnnnnnnnnnnnnnnnnnnnnnnnnncgcgcgcttcctcgctcacatactcgctgcgctcgtcgttcg

SEQ ID NO: 146977 - DNA, 934 bp, Homo Sapiens
  misc_feature (919)..(919): n is a, c, g, or t
ggtaccggtccggaattctcgggatatcgtcgacccacgcgtccgcaggtgtgtgcgtccgtcggtctttccgtgcccacgccggagaccagccccggaggccgcctgggcctatccctgtgccaggcaccatgaagcaggagtctgcagccccgaacaccccgcccacctcgcagtcccctacgccgtccgctcagttcccccgaaacgacggcgaccctcaagcgctgtggattttcgggtacggctccctggtgtggaggcccgacttcgcctacagcgacagccgtgtgggcttcgtgcgcggctacagccgccgtttctggcagggagacaccttccatcggggcagcgacaagatgcctggccgtgtggtgacgctccttgaagatcatgagggctgcacttggggcgtggcataccaagtgcaaggggagcaggtaagcaaggccctgaagtacctgaatgtgcgagaggcagtgcttggtggctacgataccaaggaggtcaccttctatccccaagatgctcctgaccaaccactgaaggcattggcctatgtggccaccccacagaaccctggttacctgggccctgcgcctgaagaggccattgccacgcagatcctggcctgccggggcttctccggccacaaccttgaatacttgctgcgtctggcagacttcatgcagctctgtgggcctcaggcgcaggacgagcacctggcagccatcgtggacgctgtgggcaccatgttgccctgcttctgccccaccgagcaggctctggcgctggtgtgaggggctgagcccctgcggggagtgctcatgtggacatcagggccagacacccactccagtgcacaagacagacttgcgaccgcttgagccactgaacaaaaatgggtggggtggctggnagctttctctttctc

SEQ ID NO: 146978 - DNA, 1115 bp, Homo Sapiens
  misc_feature (1006)..(1040): n is a, c, g, or t
tgcctgcttgttaaaggctttcgtacaattcggcaatgtgtccgggcctccattggaaactctctgcgtcatctttgggaagatcttatccatagtatgtccggctgaagtttcttaacgtggatgccagaggtttgtatagagtaccgaggatcggaagcggcaaccaccttcttgaaagttgaggccttagagaggtcacacagccatctcttctgctcttactggattggtcaaagcaagtcatgggcttagttcagactgaaggggttagcaaaatagacccctacctcttggttggggaaaaaaggcaagttcacatgtgtaaaaggagtgggcacataaggatagaaggacttgatgtggctatgcgtataacatcctaccacagaaggacttctgtttttctgatcctcccttaagtttgaactacatgtgtccctgaggaattcctgcctgtggagatccaaaataagacatctggaattcttcagcaggtgttaaataaactgcaaccagttcccttccagagtccctgaataaaatcatcctcctggggtcctgggaaaggctttgatgggtatcttaagctctctctccgcagatcttgaactacttccataggttattggatatttggtgagaaaggcatcttggaggaatggaaatgcaggggtttgggaggtggacagacctggattcagccagttcagtcttagttctgactggctacatggctttgggtaggttacttgacttctttgaatcttattttccttatccataaaataagtgtattcattttgcatgattgagttgaggagtcattcattcaacaatgggtgataataactaaaatcaattccaagagtagcatgagctcaaggcctctcattcagactcctgaatcagcccatctcacccctaccccattccccttcgccttaccttggcttgctggccaaatggccgaattcccgggcatatgtccggtaccgtcgactgnnnnnnnnnnnnnnnnnnnnnnnnnnnnnnnnnnnccgccgcttcctcgctcaactactcgctgcgctcgtcgttcggctatgacgagctagcgccctatagtgatttca

SEQ ID NO: 146979 - DNA, 962 bp, Homo Sapiens
aattttagaagcaaatgggatctatttaatctgttaggagggcgctaccatgctgccattccagctgccctgcggtgacccagtggcacttcacccgctcactcgtcagaggcctgagagggtctgtgaggctgggtcatgaggcgggtgggaggggacaaggagcatgcatcctggtgtttgtcatggctgtggtcttgctgaagaggcgggggtcagtgacaacggagaacaggcacctcgaagtgctggagccagggcacgacccagacttcagagtagcagctcagagtctgcttcaaggtgtggttggtttggaagtcacagtcatccagacgcaggtgctggtttttcttgcaggtagttctgccaatttccacctcgagcatatatttcaggcctttcactatctgaactagggcccttgtgatgcgggactccttgaacaagaacatgtcgttcgtgcagttgttgaacttttcaacactgtatctggctgcttggaggactcctgggtcattggtctttattgttttaggaaatcctggcttcacacgtgagttaaggtcctgggaacaagtatctggggaagggcccccagtggtgctcaagaccaggcagcagaaggccagcagagttccagccgctcgcatggctgcccgggtagggacagtgcggggcagttgggggtggccgtgcagtgccttctcaggcagcatggggcagttggaggcagtggttggtgcccgtgccgagccttcttgggtagatggcgcagggcaggtgggggcagtggtctgtgcccgtgccaatccttctcaggcagcacgggccagtgccgggcaatggtttgtgcctgtgctgagccttcttgggcagcatggaacagtgggctgtcccagcccaggggcccccggccgtaatggccgaattcccgggcatatgtccggtaccgtcgactg

SEQ ID NO: 146980 - DNA, 1075 bp, Homo Sapiens
  misc_feature (187)..(208): n is a, c, g, or t
  misc_feature (968)..(1002): n is a, c, g, or t
ccgcctccgctttgtcgaaaattgtagggggcggcccttgactggtgcccgcccggcgctttagacgtgatggacttttttgtggtgtgttgtttgttatacctgcggggtttgtaaaataggaaagcggctcttggatcagttgggttgggtctataatttgattagtatgtagtaacctaaacannnnnnnnnnnnnnnnnnnnnntatcccccacgctggcgggaaagagatttccccgtaaaccccttctctctgaggcttcgactcttttccatggaaatcgtaaagatggggggaggtggctcatgtagaaagggtggataggcaggggttccaatgggagagagggatgttaaaggctctgttcaggttttcctgttagggtcaccggaagatccctctggttattggtcaagacatccagcctaggccattcgtggagcatctcggggcagaaggcgcgcaccgagcgcagcgaggcgaggtccagctcccggactatgagctcgcccaccccgctgacgccaggctctgggccgcactccgcggcctggcggagctcgcggcggagctgacccgccgcctcctcggcgcgcgcgcggtcccggcagcccatgatcacccgcgctcccaggcgcagtagctcggcggccgtggcgcgggcccaaggccgctgttcgccccggtgatcagcacagtcttcccgtgcatgaggccggggtccccgcctctgcgcagccgctggaccctgggccccacgaaccggcgggccgccagccacagcgccccgcccagagcggccagtactgccgccgcagtggccactgccatcgtcaggcccgagggcccaccggcccctccacgggagttccgcagccgccgccttaccggaacccaagagaccacctgtacccccggccgtaatggccgaattcccgggcatatgtccggtaccgtcgactgnnnnnnnnnnnnnnnnnnnnnnnnnnnnnnnnnnncgccgcttcctcgctcacatgactcgctgcggtcgtcgttcgctacaacggctagcccatatagtgattatca

SEQ ID NO: 146981 - DNA, 944 bp, Homo Sapiens
gattccattgggaagttgccagggccttccgcttggatcttgaagggaagaaaggtgtcgtgctggtcacgggctgggtgctgctggggctggaagagggcgtcaaagttccagaaggagctctcaaatgaagttatcagtcggcatctcggtgaaccccatctccaggaagatctgtcggaactgggagcggaccttgagcagcgggtgaaggtggccgctgtcggggaggacaccgtgggccaagaagttgtagggcttgaagggccggtcccgccaagagccactggagatcatctctgggctcagctctgtctcttgcttggagatgctggtactaaaggcactgcctttgctcacccagtaggtcttcagagtcacttcagccaacagcttcctcttcctcagctcgctcctctccttctcccccagcttctcagcctgtcccccccggaccagctggagccgccgctgcacctcatcctccatgctgtccaccactcggaacacccggggcccgtcagccgcactcttgtccacccgaatccacttgttggacatggccttgctgaagcccactttgccactgggcagtcgcataagctcgctctgggccaggccctctgggggaatgcttcgaaacacacgggcctcatggctgccctcccgggcaatctcctcgccctccgcagtaagctcccagtgcttggtggaccgaagttcagcctcgatgacctcgcccagcgcctgaaggctcttcacggcgcccaccaccgcctggtgctccatgcccagctcagccgccaactcggcgctgtccaggccgccatcagacgcctccagccgccggagcagcagttccgccacctgaccatccgccatgaccctcgtgccgaattaaacacccaggcctcgctacctagcctagtggttgtggggtgggt

SEQ ID NO: 146982 - DNA, 1309 bp, Homo Sapiens
  misc_feature (53)..(130): n is a, c, g, or t
  misc_feature (1233)..(1267): n is a, c, g, or t
tttttccctttctcgttcccgttctcgcctttctcgttccctttcacgctccnnnnnnnnnnnnnnnnnnnnnnnnnnnnnnnnnnnnnnnnnnnnnnnnnnnnnnnnnnnnnnnnnnnnnnnnnnnnnntgtgtgtctctgaatttgctgatctctcgagatatcaggtctcttttgtcttcttccatttctatagcatttatatcctccttagtgatgagtggataagggatcagtggggccactggaaatctgcggaaaatgtcctccttcttttccttcttcttcttcctggggtgagaatcagattcctgtgagggggcatttagctcactggagtattcacgaattaaaacttcaatagcccctttaatcatctgatctctcctctttgtttcttcatccaaggcttcttcatcgtcattagtgacagtttctggccttgcattcccattagaagctttcttctttgctttccattcatccagctgtgcctttgtctttgcatcaactttaacgagtagctttttctctccaatttgcaggtcatgtaataatctgagtgcacggagggtagattctggctccttgtactcacagaatccgaaggcttgaagctttccggaagcaccttgtactctcttccagctcaaaaccaaaccacatttagctaagagttgtcttataagcatgtctgaagctttctcggaaatgttgccaacaaaaacagtggtagtaggaccacaattttcatcattttctttagcctttaagcctggatgatcctttcttgcgcccaaatgctttccaaccatagacacagtgggtactaagacagttggagcaggagccataatgctcattggtacaggaatcattggggtccctggaggtacaggtggaggaaatcctggaaactgcgggggtgggatccctggtgggagtgctgggattcccatgggagggcgattcaaatgaggtggaaaagacattcttactgcagcagtccgccgctgaggaaacggtactgccttcgcgaccttctgggataaccaggttacgagtgcgctccactggttcgagatttctgcccgtcgctcgccagggagactgagtgcccaagcgcctactcgcacaggccgcaaatacagccgcgctgcgcggcgagctgatggaggtcccccggccgtaatggccgaattcccgggcatatgtccggtaccgtcgactgnnnnnnnnnnnnnnnnnnnnnnnnnnnnnnnnnnncggccgcttcctcgctaaatgcttcgctgcgctcggtcggtt

SEQ ID NO: 146983 - DNA, 1155 bp, Homo Sapiens
  misc_feature (374)..(394): n is a, c, g, or t
  misc_feature (1081)..(1115): n is a, c, g, or t
ttttgattctattacttttattaaatagtgggtttccacacatggctttttaaataatccaggcaggagaagagaggagggcacacttggaactcccctccccacaatacgtgattatttacattttagtaattggacaatcccggctcaggaggaggttgcaagaatctgcaaaagttggagggagcgccccaggagaacaaacagcaagccttatttcccctagcccatcccccaaaaaaccatccatcccatcctagtgtctggtggtgtccggtggtgtccatcttccattccttcccaaattatggaagtaaggttcttctcaccagaataagagcacttgggataacagagtagggtcccctcacccnnnnnnnnnnnnnnnnnnnnngaagccttggggtaacaacagggcattacctcccccagaataaagaatcctgggctgaggcaggtaagcagcttgacccaatatgggaccctaggctaggggaaagggtccctttactaaaataaaagctactggggtattggaaggaaagcacccttgcccaagtaagagcatatgaactaagtttgtgtggtggtagtaggaggtgccaatgtggggtgacacatcatcagaataagagtcccggggctcagaatgggaacaacttcaccaaaataaacttccttagcaaaatgagaagcaagacgttccccctccagaatcagggaccacaggttctgggaggaaggctcctttgtaggattgggaagggaactgggcagacttggtttatgtcttctaacccctgatcctcaatcccttaccttagtaatactggactttaatgactggtaatgacctgtaaaaccaagtcaacaaatgtccatctatccctgtgacatggccatgggatggctcttctgaccattgggggccaggccaggccaggccaggcttagggtagcaaggaccaggccaaaggggcagggcctcctttggaggggttgaggggtacatcctcggctggtgtttgcacccggccgtaatggccgaattcccgggcatatgtccggtaccgtcgactgnnnnnnnnnnnnnnnnnnnnnnnnnnnnnnnnnnncgccgcttcctcgctaacatgactcgctgcgctcggtcgt

SEQ ID NO: 146984 - DNA, 899 bp, Homo Sapiens
  misc_feature (791)..(825): n is a, c, g, or t
tgaactgcccacctgccaactggattgaacaccatgcaggggagccagtgtttctactgtccaaacaaagggggcacctatgcaagtatcttgccccaggccttgtgggaggcataattccatctcattgctgcaagcaagttaatggagatgttaataaaaacactacattaatgaaaatgctgaggctagaacctattctgtgcctgtaagactggacgattggggtgagatttctgatagtgccattctttagttcctgttgggcctaagtaaagcgagacttacgacctgggacacgacttattttgttcccaggttgtaagaggacagagaccctcctggtaaaggaagcaaattgcctgaaatgctgatgggtcctgttacttctctgtcccttcacctctggacattcactttttgcttccggtagtaaaggccatcatgtcctcaccttcgtccaatgttgctccttctaaggtctctggattctaaaacccaagtcttcccttgtgaagaggcagaccgggcaagtagaaaaggtctaggactgaacatcagacttgggtcccagttctagttctactgctaaacatgtgaccttcattaagtcatttaatatttctaaatctgttttctgacctgaaataggaaagccttccctggctaccttgcagaattgctataaggatgtgaaagcactttgaaaaagtataagtggtagagaaatatgtgtgtatcccggccgtaatggccgaattcccgggcatatgtccggtaccgtcgactgnnnnnnnnnnnnnnnnnnnnnnnnnnnnnnnnnnncggccgcttcctcgctcactactccgctgcgctcgtcgttcgctgcagcagtacgcccatatggtctgtcagct

SEQ ID NO: 146985 - DNA, 2154 bp, Homo Sapiens
aaggccatgaaatcaagttcaaaattggggtattcttttatcgggttttttcgttgggggggaaagaatgttgcctgggattctttccatctaaaaggctggattgttagacctggggcagaactctaggatctgactttagcctggggaagcaaagaggaccaaaacctaaaagctcaactttctgcatggtatgcatgattcaaatgagctctttctgcttgggagtctgttggcttggagactcggatatgatagggcttcagttcctcaggagggacagaatctggggtattgctcatgaggtcatgtccccggaaggactttgggaaggctatgacatctctgatgcttggagatccagtgacaaggcatatcagtctgtctaaccctaaggcaattcctccatgagggggtgccccataatctaaagcctggagcagatgggagagcattttcacatcctcctttagtaaggttgccaggatataacgctgcagctctgcattgtgaattcgaattgaaccacctcctatttcattgccatttaaacccaggtcatagtgttggctacgggcctttttgggctccagtgtacaggagatgtatgtcactggggtggggagcagtaaatgggtggtgggccgattccagctcttctgggattttcctcccttgggcaggaagagtgggaaaatctaccaccccaaaggaaagagaacagagtggggtcacggagcaccactcctcttgtttctagaaggtcagcacattccagtcgtaattttcctaacaaagagcatgctttattgtgctctccagcagttagtaggaccacatcttcctcttgggtctccattagtctgattaattccagtctttgtgactccattatgaaattagcaactggagaattcccagtttcctattggcgttaaaggaatagcaggtaagatttcctgattacaatggtcagctgcaaagtttctaatggattcaatgtctttcctttttaagtattgttgctccttcagggatacatattggctttcacagttccatggggcttactaagtgcatcttgaagaaatccaatctctgtgtttctaaacacatcactgatatcgtataatctgtcattccaaagcgagtgtcaggtttatcagttccataggtggccagcacctcagcaaaagtcatagtaggaaaaggaacaaccacaggatctttgtcattgggccaggaatactggagcaaaccctcaattaaactctggatcccagtctggtctacaaatgacatctctatgtcaatctgagtaaactcaggctgtctgtctggtcttgaaccttcatctcgataacatcgggcaacctgaaaatatctgtctaaaccgccaaccatcagaagttgcttaaactgttgaggactctgagggagagaataaaactttcccaggttcctgggatggtactaaaaactctttggcaccccttggggtcctcttaaacaatgtgggggtttctatatccacaaacccatgcagattacagagatattcccgcattttcatgaccatctgggacctcagtcgcaggttatactgcatttggaaactacgcaagtctaagtagcgatactgcaaccgaagagcctctgttttcttcacgaagttcttaatttcaaagggcagcttcttgcaggcattcagaagctcagctgttttaactttgatttcaatctcacctgttggcatttttggattctcttgtcctgcaggacgggaaatgactgtaccagacacttgcaccacagattccacaggggcttcacataaaatcttcttcacagaggctgccgactcatcctggggaatgataacttgaacaagcccatcgaaatctcttaggaccaagaatgtgttttgccttcggtactgaatccatccacacaaggtgacttcttggcctaagtgagacgaacgcaactctccacatgtgttggtccggacaacaaagctactgaattctggaattctcctctgtgaactctgcaacagacttctgtagagagaaccccagatcggttgggtggtccttctgatgggtctgcctcgtgccgaatttcaacccagcctcgtacctagccgtaagt

SEQ ID NO: 146986 - DNA, 803 bp, Homo Sapiens
ggagaactgataatcactatatggcgcccgctcttcattagccgatacgaccgagcgcagcaatatcattgagcgaggtaagcgtgcgctataacttcgatactagcatacagttatacgaagttatcagtcgacggtaccggacatatgcccgggaattcggccagtatacggccggggtgcaggcacctgattgtcttacacatcattgcatccccagtgccctatagtagcacatggctgatgtgcaagatattacctattgaataaatgaagattcagttgttccagtcactggccatcctgtacgcataaaattttccccaagtcttaccaacaattgcctacagttccagtaggagaagaatctgtgagcctaatagcccagtgagcattcactgctagaacgcacgtcaagcccaaaggaaaaagaagccctgagagaacaaaatttcttctatgaagggagtgttgacctgactattttgccctctggatagtgcaaatctgttgggaatctcctgacttctgattaaaaatatttatacttatcctagtgtttcttttctcatttgatatttctgctacttctgtctctctatatctacctgggagcccacagccgtgaattacggtatgaatcatgataatatgttacatttcctggagcactttgcattttaggtaagtgctttcggggccattaatcagcttatttgaagtgatttgcacaaccagaaaatatgggaagttctatcagtatatgatgctgtggtctgtaataactttgtgtttggtaactg

SEQ ID NO: 146987 - DNA, 807 bp, Homo Sapiens
  misc_feature (697)..(731): n is a, c, g, or t
gggagcccaatggggagaatggggacattcggtggacagacccagggacccagctggtgtcagagaatggtagattaggatttggcctcgactagatcatagctggcggcattggccaacatcagaccacgagggggctctggtgacaggacatgacactgcacaatcagagatcacagcgaatggctttcgctgaggtgtccactttactcctgccccgatcacctccccttcctgattgttagtccttttgtttctccaggaagtctcttctcatccctgttcacgccttcatgtaacaagcatttatcacactagtaccgtgagccacgcgtgtgctgtggttacatccgtggaacagacagacagcagtgcctgatcttgtaattcttccatcctttcattcctttactctcagtctcgtaagctgatccacagattgcaacgtacagatgtgatgttccaggtcttggccacaaggggacactgttgccaggttcactgagagtgcttggggaaaatgtgggcgagagaggcacatgcacagtcctccggcttggtaggtttcaagctctttagactgggactggcgctgacatttgcaggggcagcttgctgtggattgcctgcgcattgtttggctgtccccggccgtaatggccgaattcccgggcatatgtccggtaccgtcgactgnnnnnnnnnnnnnnnnnnnnnnnnnnnnnnnnnnncggccgcttcctcgctcactacttcgctgcgctcgtcgttcgcttctgaggagtagcgcctatagtgattaatttt

SEQ ID NO: 146988 - DNA, 896 bp, Homo Sapiens
  misc_feature (482)..(518): n is a, c, g, or t
ttaattattttggagtaatgtcttcttaagaaatggtagataggataaaataatttacagatttatctgcctttgaactggaaggaattttaggtaatcacctggttcaacctactccctaaagtcacacagctctataatttccccctcactcagctacttttttctgtctaaagatatgtcaaaagcgatttcatatgtaatcatgagacatttcaaagtgcaaagataatttacccaagaaatcccactccaagatccactgtacttatttaacgaagacaaattaagtttgtgtaatgaaaatacacaacaaacattgcatttagcgttttgactccacttttaattaatgaatcatagctcctatgctgaggaaacatattatgtatagattaatataaataaattactggattggctaaatgaaatgcatccagttcaatggaaaatgtgcattctattcagagccatactttagnnnnnnnnnnnnnnnnnnnnnnnnnnnnnnnnnnnnntcagagaaggttggtatatttgcagttggagcatcttggcttgaatgtctttatatatgactcagaagcctatcaaaagggctctgagcctcagacacaagatcaatgccttctttgtaagtgttccttacccaaaaatggctctgcaggagtgtccttgggcagccaggacacatagacagcctctgcaggaacacttggctctagaatttgggactgagggagatgcagcgagcccatcatgacgagtgcaaccagatgtggaagaagccaatgtgggcatgtcacgatctcatcagcatgccagtgtaggagaagcagaggctcccccggccgtaatggccgaattcccgggcatatgtccggtaccgtcgactg

SEQ ID NO: 146989 - DNA, 887 bp, Homo Sapiens
  misc_feature (765)..(799): n is a, c, g, or t
tttaaaaggaaacagtccttaggttactgattaaagcaaggtttgatacagatatcccctcttgtaggcactcagcgggtagaatgtagccacaactaacttcccatcaaacatccttccagtcagtaatttctgcgcagctttggaatcaccagcatttgcatactcaacaaagacttgtcctctgccaggattttcctttggaacaagtagagataccactggtccatatttttgacactcctcttttacatcttctacgacatcttcatattcctcttcattctcaagataatcatcatccagcacattcagcagtcttagcactggagtgggaagcatgaccagatcttcaatatgaggggcaaaaggaatgctaaagaatgggctgcacaatgccatttcagcaggaattcttctggttggatcatcatgaagcatgcttttgataaggtctcttaggtgataggctggaattgcggcattcaccactgctttactggcaaatatgtgatcaataatagcagaactgtttgccttccattcctgagatctgactgtatgtttcagtttcattcctgagaacatttccagtaaaatgattcctaggctccacagatcaacagctgaggtacattctgtatcactctgcaggccagcctgggccaagcaattttgcaattctgcttctggagcccgatacccgtctgtctgcccggccgtaatggccgaattcccgggcatatgtccggtaccgtcgactgnnnnnnnnnnnnnnnnnnnnnnnnnnnnnnnnnnncgccgcttcctcgctcatcagctcgctgcgctcgtcgttcgactgatccgcgacggcgccatatatgtatacgttctttttatttgct

SEQ ID NO: 146990 - DNA, 2251 bp, Homo Sapiens
  misc_feature (56)..(68): n is a, c, g, or t
  misc_feature (93)..(143): n is a, c, g, or t
  misc_feature (377)..(418): n is a, c, g, or t
  misc_feature (450)..(697): n is a, c, g, or t
cccccttttttcacaaaaaaaattttggaaaatttaatccctaaattttggggcgnnnnnnnnnnnnntgtgtttttcacagtttttctccannnnnnnnnnnnnnnnnnnnnnnnnnnnnnnnnnnnnnnnnnnnnnnnnnntggggctctcccgtggaacccttgtattccctgccccagggcctcttcaacccgtggggtgaccccccgttttggaaaaacccgtgtctcttttcaaaggaaggaaacccgttcccgggaaaattgcccagcgggagaatttttatgggcatgtttgagagacttcaagaaaccatttgggccacaaggcaaatcccccccaaggggaagcaaggaaccatttttccagttgcnnnnnnnnnnnnnnnnnnnnnnnnnnnnnnnnnnnnnnnnnnacttacagaggctgggtgtgttggctcacacnnnnnnnnnnnnnnnnnnnnnnnnnnnnnnnnnnnnnnnnnnnnnnnnnnnnnnnnnnnnnnnnnnnnnnnnnnnnnnnnnnnnnnnnnnnnnnnnnnnnnnnnnnnnnnnnnnnnnnnnnnnnnnnnnnnnnnnnnnnnnnnnnnnnnnnnnnnnnnnnnnnnnnnnnnnnnnnnnnnnnnnnnnnnnnnnnnnnnnnnnnnnnnnnnnnnnnnnnnnnnnnnnnnnnnnnnnnnnnnnnnnnnnnncagaaacaaaaccaaaaaactacagaatagagtaggggtggagggaagtcatgcatttccagtggctagcactttgcgctctgccttggcgagtatctgcaaacttcctgaccatcaagtgcgcttgcagccatcctggatgtcaactggccacagaccctttgctatggggagtccctggctacatccattagcaagtcagaggtttccttttgtccccatgatgccactctccagcaagctcaaactgctgtcacaattgttttactgtacctaaaaaggaacagataaggcaagagccacagtcaatgttttctgtgaaatggtcttggcaaatagcattaagaaatcttggttgaatttccaagaaaaaggtctgattagaggtgcctgttggaagcagaagcctcaagaaatgaggaaggaaagttattttgagggtctgtttcatttctgatacagaataatcacaaaaaacaagtatatgccgctggctgtagctccccttaggatttggataaccagctggatttccagatggccactcccgttctctatgcttccctcctccgggctatatcctgcagagcttcagcgggaagttctccgtgatgaggtggtcagggtgaagcagcaccacgatgttaacctcaaattccactttgaagttggtggtctccagtgtagggcaggtgaacagcctagggaagaccatgtagatggggacagagaggcccctgcacacatccccgtcggcgatctgaatgttctgaatctccgtggcgtcgcgggcatagccttctgcacacccgcacgtctccacgcgcaccagctgcagctccacgcttctgatggcggcttccgagctctccaccaccagctctcccgttagtggctgcgtgatgacacagtttgttgagttgagatgtcctcgaaggagaaatttgggaagcaaagctctctctttgacgttctgtaaggtttcaggtgtaatcgtgaagtccacgggactgggagtaaacttccccttctgaggagcggagtgaacgataaattcacaggtctttgtcaagtccttggccaacagagaccgcttcatgtcacagcgcagtgtatactgaatgttgacaaacacgccatgatacgtctcatacagaactttgttacccttcaagtgcagaggaaattcaaaagggatttctgttttgccgctgggaaatttccccggcttcaccatttctatggtgctgttgataatctggataggcttaacagaattataaaaagcttcaaacacacccacacttttggcactgagctggaggtttacagttccttccatggtcaaagacactcctggtgttggactgaatccttactcgatatgaccaccacgccagagagcacttccccggcgtgataaactttattcgctcttttaatcttgatgtccagggcggtccccatctccaattctccgcagcagccgccacttccggctgcccccggccgtaatggccgaattcccgggcatatgtccggtaccgtcgactg

SEQ ID NO: 146991 - DNA, 1123 bp, Homo Sapiens
  misc_feature (158)..(404): n is a, c, g, or t
  misc_feature (750)..(858): n is a, c, g, or t
cagtcgacggtaccggacatatgcccgggaattcggccattacggccggggaagtttgcagatactcgccaaggcagagcgcaaagtgctagccactggaaatgcatgacttccctccacccctactctattctgtagttttttggttttgtttctgnnnnnnnnnnnnnnnnnnnnnnnnnnnnnnnnnnnnnnnnnnnnnnnnnnnnnnnnnnnnnnnnnnnnnnnnnnnnnnnnnnnnnnnnnnnnnnnnnnnnnnnnnnnnnnnnnnnnnnnnnnnnnnnnnnnnnnnnnnnnnnnnnnnnnnnnnnnnnnnnnnnnnnnnnnnnnnnnnnnnnnnnnnnnnnnnnnnnnnnnnnnnnnnnnnnnnnnnnnnnnnnnnnnnnnnnnnnnnnnnnnnnnnngtgtgagccaccacacccagcctctgtagttctttttacaacatttttcattataactttaaattttttaagcaactggaaaagtgttccttgctctcttggggggatttggctggtgccgaagtgtttctgaagtctcaagaactgccataaaatctcacgctgccatttccctgaacagatacatacatagagagagacagttttccaaactgtgtcacgcaggctgagtgcactggcaggatcacagctcacggcagcctcaacctccctggctcaagcgatccctcccctcagcctcctgagtagctgagactacaggtgagtgccaccacactcagctaannnnnnnnnnnnnnnnnnnnnnnnnnnnnnnnnnnnnnnnnnnnnnnnnnnnnnnnnnnnnnnnnnnnnnnnnnnnnnnnnnnnnnnnnnnnnnnnnnnnnnnnnnnnngtgtgagccactgtgcccagcagtttcccagaatatatttaaatgcaaagttacatgaggggaaaacatgtatgtttgctcctgttgttactgggtaggttctgaacagcagaaacccatgtgcagggtgggctggtgaaggcccctctccgcaaggtggtagcaggaaaaggtccttgacttgatgaatttggtctgcctctgagccactggaggaagctgttttgagccagggttttttggcctaaagccagcatttcctcag

SEQ ID NO: 146992 - DNA, 631 bp, Homo Sapiens
  misc_feature (516)..(550): n is a, c, g, or t
cattaaaatagtgcagctgggtccaggtctctgtagttccactggaggtgatgatatgtctgataattatttctcttaatttcccacaaagacaaaagggtgagactacctccatagatccaaccgggcagattaccaagattccaagctcccaggcagggttgctgtgaacagcaggggactttggctttctctcaggccagaaaatgtataaaaataatcagtccattcccaggccattgtagaaacctgccggctactctcattgagtgatccaatcctacctgtagggtcacagtcatggtgcccatgatattcaaagcgcttgtactaataaatgttcccatgaaagatgaatgagaaaggccattttatgaagtactgaggttcccttcacatggtgttcaagtggaggctggaggctcaagtccaaggcattgcagaagacagttcctgctctggttgcccggccgtaatggccgaattcccgggcatatgtccggtaccgtcgactgnnnnnnnnnnnnnnnnnnnnnnnnnnnnnnnnnnncggccgcttcctcgctcactactcgctgcgctcgtcgttcggcttgacgacgtagcgccctatagtgatcttcagtctttt

SEQ ID NO: 146993 - DNA, 851 bp, Homo Sapiens
  misc_feature (741)..(775): n is a, c, g, or t
atatccgggcggggcgagtcttccccgggcccctgttctctttgtcgttcgcccggtgttatccctcttgggcaaccgccttgtcggaccacgctagtgcaccacttgactctctttggggtcccccgcgcgcgtccccaccaagtggtttctcaaaggtgcttttcagggggcccggggcggcccccaaaagtctcttcattatattctcagcttgcttctttttgccccagaactacacaatgtttctattgaaaaagtcaggcctcagctcagctgtctccattcggctcagcttggtggtggggccctgcccatagtagactgagccagatcttcctgcaggcagctgggctggactccctccctggctacccttcccttcgtctctgatggtgacatccaaacaataaatatgcaataaatagcgctcctgggctgggccgggccggctgccttcaaaccccactcggcccctaccagtcttctctggccaggacaggcctactggggtgctagatagtaaagtccccaaacatcccagggtcccacaagacctgggatccatctccattttgaggcccaggcctggtttccaaggagacctagcaaagctgggtccaggacagggccaggcaagcagggctggcaggtgggtgctgggaagaggctgttaccccagaccacagccccggccgtaatggccgaattcccgggcatatgtccggtaccgtcgactgnnnnnnnnnnnnnnnnnnnnnnnnnnnnnnnnnnncgccgcttcctcgctcactactcgctgcgctcgtcgttcggctataagacgggcgccctatatgattgatcagtcc

SEQ ID NO: 146994 - DNA, 508 bp, Homo Sapiens
ttaatcgattaaaggagggagtttatttctgtaaccaggtatggggagaaagcctggaaatgatcccaagaccaactcaaaactacaaagttttccagagcttatttacattataagctatatgtctacatgtgagtgtacattcatctaaagacataagtgattcacttttttaaatctataaataagatctgagccctgaagaccttcctctggagcctcagtaaatttacttaatctaaatgggtccaggtgctggggtgattacccttatcttgtttcctgctaaatcatggaggtttggggacttccttcagacccccagtaaacttgtttgtggaggccttcagaccccctcaataagttccttcagacccccaataaaacttgtttaatcctaaatgggttcctttgttatcttgtcatgcttcaaggcccagaaaaggcctgggcaaaacccttggtggccttttgttacattctagcctttgcataagggccctcactc

SEQ ID NO: 146995 - DNA, 975 bp, Homo Sapiens
  misc_feature (15)..(15): n is a, c, g, or t
  misc_feature (30)..(30): n is a, c, g, or t
  misc_feature (74)..(74): n is a, c, g, or t
  misc_feature (860)..(894): n is a, c, g, or t
tttggtcatcacctngtcgccttcatcatnggtaaaagagcccagtgtcactgctgctacaccacactgctggntttcacattctgacatgtttctcatcagagccctgtttttgttcatctggtttcaacactccatccgttctgttccttcctgttttgcttaggaaagtcctattttctgctgattcacacaatccgtggcctgatgaggtccagggagtattctccttccagcgggacagacgctgcttcttagcagacttgaacctgcagcctctctcatagctccaatctgacaccttcagcttctgctgaaggctagcagccacctctgatgtcactcgcttcaccttccgcctgcgcctgagtggtcgacaaggtgcattttcagtaaaggagtcagattcatgccaagaatgttgcttactcttgacaatggcattgagagctgggtgtcgtttggctaccattgtgtcatcagagtcactaaaattggtcaccggagccacttctcgacagtccttagtggcctcatccagacttgactcagaggcctcgctgtagcagcaggtatgctctgccaggtgagtgaagtcagaacgacgcttccgacctcggcgtttccgaagctgccgcctctgctgtcgggggctcagcgccatctcctcccacagttcaccaagcttattctgctcagatgtctgctccaaggctgaggctaagtcgtgtaccagctcatccatgaggccacatctccaacggccgccgctttttgggccgactctcaccgccggggcttccctctctcccggccgtaatggccgaattcccgggcatatgtccggtaccgtcgactgnnnnnnnnnnnnnnnnnnnnnnnnnnnnnnnnnnncgccgcttcctcgctcaatacttcgctgcgctcggtcgttcgcaatgacgaggggcgccctatagtgattacagtttcttt

SEQ ID NO: 146996 - DNA, 1428 bp, Homo Sapiens
gtttcagattcgccccagcagttccgttagtttcagggcactctttttgggcccagggctgctttctgctgctcctgttccaagtgttgtttgctttcatccagttctattctcaatttctctatttcctgatcttaaatttcaagatccctgttagtttttgctctgaactctctgtgctccttttctgcctcatctttcttccatgttgttttattcagctgatagcgcatttctccacacacctttgtgacatccatttccccgagaagccagctggctttgaatttcctccagttgattaatagctgaaatcttttcctttgtaaccttttccacctgggcctccagttgggcaatattctgagacaagatcaacatctttgatcccatgtactccctttctttcgttatttcctttttcatcatgtctttctcaatggcccttttctcttgctgagatgcaagttctttttcaagtcgctccgcctgcctctccagctccttcctcaactggtcacactggattaaagccttggttttttcaaaattggcttcctcagatatttgcaaaacttgtttcacctgttcataagccacttgcttcttctttgctgcgtatctgcccaagctgctccttacgggaaactagtgcagacatcaagtcatctctttctttaaccagtctttcgatggtctgcatatgaccattagtatgggtttgggaaagaacagcttcatgctgagcacatttcaaacaaagaccaccaacacggttacaagtattagcagccagaagaaattctttatgctttagttgctctttaagatcttcacaagttctctgatattcagctaagtcgttcctcaaaaacttcaattgggattcctcaatttcacacttttcctcataagtaagttttagcttctcggatgcatccagaagtgtttgttccctcagtgtctcctcttgtctttgagattttagctgttgctggagcccttcgttttcaagcacaactacttgtattttatttttcattccagagagttcctccttgcagaacttaacttctgcctctaaatgatgaatatattgagactggtcattaatagtatgaacaaggtcgtgcatagtaggcatattggtttcctcatgttctaatgccctcaagggggacatttttcttcttcttgacggagatacttcactttccttatctgcttgttggcgcaacaaatctttgagctgattaacagcatggctctgttgtaattcgggccaggctgtcctggcgtcctcatttcccacactggtgctaaaagaaagatttggtgcatcttctcccaatagtgacatcgccttctttccggacgcgtgggcggacgcgtgggtcgacgatatcccgggaattccggaccggtacc

SEQ ID NO: 146997 - DNA, 829 bp, Homo Sapiens
gatgggtcagaattcaggttcttagtggctcaccagcagattgcaagtgttgccggtatgtgcattgtcatgggaaatggtcttttggaggtttcggccaccccagaatcttcacctgttgtaatccaagaatttgtgcatgtttcgggatgcatccagaagtgtttgttccctcagtgtctcctctgtgtctttgaagatttgtagctgttgctggagcccttcgtttttcaagcacaactacttgtattttattgtgtcattccagagagttcctccttgcagaacttaacttctgcctctaaatgatgaatatattgagactggtcattaatagtatgaacaaggtcgtgcatagtaggcatattggtttcctcatgttctaatgacctcaagggggacatttttcttcttcttgacggagatacttcactttccttatctgcttgttggcgcaacaaatctttgagctgattaacagcatggctctgttgtaattcgggccaggctgtcctggcgtcctcatttcccacactggtgctaaaagaaagatttggtgcatcttctccaatagtgacatcgccttctttcagggcacatgtcagttggtgaatgcttctgctggcatgttcccggagactccgttgatactgccccagaatctcctccagggtagagttctccggggacttcgccatgcacgcactctaggcccagagctgggagttacgtggggaaatgtccagctttctcccttccgagaacaacaggcctgtggccggggagcgcccgcctgcttcctgccgcggctgtcacaggggagcctccc

SEQ ID NO: 146998 - DNA, 1243 bp, Homo Sapiens
  misc_feature (1135)..(1170): n is a, c, g, or t
aggatttctgaacaatatctttatttagctcaggtagttgttcttacacatttttggatacctgggttagaattttccctattacattaaatcaatggttcttaagctcttatgcaagcatgcaagctcaatgcaggctagaatagaaggattgttgtgtacaaacattaaaaatagacattttactacaagagtgtagagaagggagaccaatagaaggtaattgaaatacccccccctcactccagccctagtcctggtgcctggatatgtgcactccctgtgcgctctgatccccgcagacacaagtccccagcccctccaggacagcaataagggtcttacaaggccagaaggcagccctgtttgttcctgcctgcaggaagggcagaggaatgtgatgttcccaggaactgtgtcctagacccatagggtcagattgcgtcagcctagttcaagcagtgagactacctctgtgccagtatcctgggctgtctcttcccttcactcttggcagctcccaattgtcaaagattggacagggtcctggtttggctagttctaacttgctgaagccagtcagcaccctcacagagccagctaggtactgggcccaggggcttccagagagttcttcagagcttctcagaggcctaaggacctcctaaccctagcaggcctcctggctcaagcacaacttgggaaggctccatcagcatctatgtggccctgttttacctgttgtctctggagggtgtgcagaggcaagtccagggtaggggcaggcaggatcccttaggcttgcccacagcccagatagcaaaactgcagccagatcagtgtctatgagtttcaggctgaaccttagaccacataggccagcctgctggtctggctgcccaaccagaccaggtggacagagtctaggcctcagggctctcaagcacctaagagcgcagctgcatttggaagtgctcacagcaggcatgcttcatggttagcccatagatgggggtcatgtgcaccttcacgcccagtggacacgctgaattccaccggttgcagcaggatagccaggaagcccggaccgtaatggccgaattcccgggcatatgtccggtccaccgtcgactgnnnnnnnnnnnnnnnnnnnnnnnnnnnnnnnnnnnnagcccgcttcctcgcatcacatactcatgcgctcgtcgttcgcttgacggggcgccttatacgtgatagatct

SEQ ID NO: 146999 - DNA, 1081 bp, Homo Sapiens
  misc_feature (119)..(129): n is a, c, g, or t
acgtgtatccatgcatacaaagaaatctcaaaagcaaatgtgcccataacaatgttactggtaagattactgaggacttttaaaaaaaatttccttatttgcaaactttacagtaaacnnnnnnnnnnnacatattagaactcaatgaagaattatttaaaagagaggaaaggcagtgcagggctggaggtcctggagggtggcggcgggtcgtcctaactagcaggctgaaaggttctggaggggatgccttcaactcagaggaaagttcacagccaacctgcctgtggaacatggtacctgttcatcttttcgtaatgttagtattcattttgctatcttcctgttgccaatgttccaaacagtgtcagtatgtttttgttaaatacggacatttaaaacatatcgtatctgtaagcctatttgggtgtcttcatttcatgcccgcactgcaccataatgagtaccacacaaagccagaggatgacacttcctccagaggtctcactgcacatggagaggttagccctggcattaagggtaccttggaatctctcagcagtcatagtcagtcagatgcaccaagggcagctgagtcaatctcctttttgtaacacaggccgttcctgcggttctcagtgctgccaacctgggcatactgaagagcctcaaccaatactggctctcagggtactttcctttttaaaagaagttcaacttttgctattcttatgccccataacttttaatttgcacaagatcagccatgcccactcactgaattctattatattacccacacctctggaaattcacaaagtctgaattcagatctatgcataaggatgcaaacggattagcaataattgctggcactgcacatcaacacctcctgtcgatctcacctgatctgaggataaatgaaggcaaagaatgtggccccagcccctggattggagtggaggcaaggagggtggcgagctgtcttcagcagtcggcctcacctctctgctcctgtatcaacaagtgcccccggccgtaatggccgaattcccgggcatatgtccggtaccgtcgactg

SEQ ID NO: 147000 - DNA, 912 bp, Homo Sapiens
tttttttgaacaaaaaacaatgccatttaatctgagttgccaattaaaagcaatgctttctagaatcttatctatagttctgtcaaattcaaaaatttgaattatagtctgtaacatccccccaataaactgaagaactttcccccagttgccctctatgctgacagtgtgtgtgagatgagttcatgcatacttaatcacattgataggacggctgctgtgctcaatggccacaatgatgcctccagaatccaggatggtgtaatagtggggtccttccagcatctttgtccaggagtaacccccatcatctgagatgtacacatctggaaccatcactgagatggcatcccccacgctaccatgagcaatgacaatgcctacggcattcggctctgagagtggggccattggaacattcagtttctgggagatgctgtaggaagcatgaatatgaaggctgcactcattcttgttttttgctgtagcatcacattcactgttttcaggcttcctcaggtgcgtccaccttcctccttggtcaaaagtgatcatggtctggatagaattatcttcggagagcacgcttgttatgtagacgccgcggagggaggtcacgttggtaaagtccgtctctccgcctgtggtagtgtagagatgtcggtccaaagacttggaatagacaatgcctcgatcatctgaggtaaagattgtgccaaacccagtgtctaccaggttcatctacatgcatgaataccatgtcattatttgctgccagaatagaatagaactgttcctgtcccacggaggggagctgggccatgctccatgtgtccaccttgatctgttgaaacgtggatcccccggccgtaatggccgaattcccgggcatatgtccggtaccgtcgactg

SEQ ID NO: 147001 - DNA, 922 bp, Homo Sapiens
  misc_feature (845)..(879): n is a, c, g, or t
tctcgaacgttgttttcacagagccgcgcggtgtctcccccggcggcgtttttaacttcgctaggaacttctacacgactctattttctattggtcccacagtgtctcctctgtggtacccactcttattgccaccagttcgactataacactaatctggggttccccacggcgcacaaacagcaaattgtcgcctacaagaaacccctttttatgcaggggcccaaggcggcccaaacaggtttgttgtgtgttgaagttttgttgtttttgacctttcactccactttattattgtattctgaacatggcacctctgcaacttttgtttccatatcctttgagcgtcttctagaaagcaaagcttgattctgccttctgggcttgagcatgtgggcatagctgggttgtcctgcactgcctgaagagctgggaaggaagaaaatagtaattgggagtcttgtgtactaagctaatttccaggtatcggacctgctgagagtcccagcgtctctgccaggtaactgtcttcttcacaaatgtatgtgatgcaaatttggcatgcctgtgcccctttcggaataacggagtcaatcaaagctcgggtcttatccataactgtagcattttcacgttttactttctccatctcttcctggttcagcacccttgtctgtaataattcatccagtaagccatttattgtaccttcacccatggaatggataaacagctttctcttctccttcaggaccttgtcggccatggcttttctctcctacccttcttgtgcccccggccgtaatggccgaattcccgggcatatgtccggtaccgtcgactgnnnnnnnnnnnnnnnnnnnnnnnnnnnnnnnnnnncggccgcttcctcgcattcactgactcgctgcgctcgggtcgg

SEQ ID NO: 147002 - DNA, 883 bp, Homo Sapiens
  misc_feature (229)..(229): n is a, c, g, or t
ttttggggtaaccacaatcttgttttttgccaaaatttgtaaaaaatctgctaccgtgcgaaaatggcatctggcaatggcatttgtgcaagtccctgtggttttatgttaaatgtctctacaaaatgatgagaagaatttttagaattggactttaatatactttcacttgcaactaatcttgcaaaatgatacatcagatgaataaacttaggaccaccaggagaanagaaatacgtgaacctacaacttgaggaaagctgcttccacattcaccagaaatcctttttatccattcacagcaatgttttcggaattcagtgtcacttttttggtcaaaatgggggccaacaaaatttgaaaacttctttggtgagagactggtccagaacttgaaacaaaaaataagaaattatatgaaaggcatcacggttcagcttgtcaaacatgttcactccgaggtgcgtgtgcgacacgatctttccgcaggcaatggttgccgggcctggctcgaagccgagcgcctgcagatacatccagagatgctccttctcgaaagcggttgaccgaggccgagctcatcctcgcggtaggcacggtggctgcaaagaaagaaagcgcaagcccaggggactcggagggccctcaagatccctccctacggtcagcctgaggtcgcggtggtccttccattgccaacgcctgctcctttcacgcccagagcgatttcgcctcaaagggcctcacaacctccgggaaattgagtttctaacggtatagtgcggccaccactgcctcagcgaagccaccacataccgagactcccgcccttccccggccgtaatggccgaattcccgggcatatgtccggtaccgtcgactg

SEQ ID NO: 147003 - DNA, 859 bp, Homo Sapiens
  misc_feature (783)..(817): n is a, c, g, or t
cgtgtttaagttttttactctccaaatgtaatacaattcttcagctaaaacaggaataatgagacaaaatggttcgaaaagtacaatagaaaaatattgttcactggtttatttttccaaatgagcatcaggctatttacaaatacgcagccctccaatgacgtgtattaaaatggcaagtctatcactgtttgaaatctaaatgaaaacaaatttattaaggcacatttgatctgagaatttaactttctggtataatgacagattcatttcacttttgtccccaaaacacatgagcaccaaaattgtcaaagaacacttaatatttagtaaaacagtaaggaatataaaaattaaggaggggaaaaagcgtttccaaaaggaaatctttggagatcggtttactgcaaataaaacagactaaacacactcccgatacacataaataatactaactaacaggtactcaagaaatggcagagctctgaacaacagatattaaataaattaaaggtatttcagatacaaaggataaaacgaaacagtaatgaaagaatgaaaaccatctccacccacataacacagacaggatgaaaggaacaaaaccaaatacatttttccccaacgttttgattagggtgtatgtgtgtgtgtttcagtctgtgtacatcagatttattgtaataattcatctttgtcattctaaacattaatattttaccctttaaagagcccggccgtaatggccgaattcccgggcatatgtccggtaccgtcgactgnnnnnnnnnnnnnnnnnnnnnnnnnnnnnnnnnnncggccgcttcctcgctcaacgacgtcctgcgctcgtccgttt

SEQ ID NO: 147004 - DNA, 924 bp, Homo Sapiens
  misc_feature (168)..(205): n is a, c, g, or t
  misc_feature (409)..(418): n is a, c, g, or t
  misc_feature (813)..(847): n is a, c, g, or t
tcaaaggccagttgcttcacatgactgaatttcttgtgccagggatgagtttaccatacagagaagatcagagcatcagaagcccactcatgtcactccttcacatagccaaagggcaaagagatcagcttaatagacactttactttattgttcgtgtctgattgcnnnnnnnnnnnnnnnnnnnnnnnnnnnnnnnnnnnnnntgtgattaacacacgtgccatagagagtaataattttctgactgaagggatataatgaatacccaataatggagagccataaaataaagtgctgtcagctttgtacttcacacacttcagcttcctggtggttaaatgatagtatgaaaatctccagaagatcaaatattcatataaattttggcctaaagtactatttacttnnnnnnnnnnttcaacccattagagaatttctttatagcagcagttctgaagtgtttcaaaaaagagacttccccctaccccccaagagggggctttgtactcagttgaattttcattgcttaaaaaatacctctcccccaaacacctgcatggaattttttagaaaatgcagatgctgtggtcatagtgggtcatagcacacatttaaataagggggtgagttttggaaggccagaactttggcaaaaatatatttaccttgatgccatcagtttgcaacgctaattaaactaattattatagtcaataataaaatacagaactctctagtactcactacgtcatataggcaccccggccgtaatggccgaattcccgggcatatgtccggtaccgtcgactgnnnnnnnnnnnnnnnnnnnnnnnnnnnnnnnnnnncgccgcttcctcgctcacacactcgctgcgctcgtcgttcgctataagctggcccctatatatctagtacagttctt

SEQ ID NO: 147005 - DNA, 512 bp, Homo Sapiens
ttcggcaagaatgtacaattctttttgcaattttttgctaacaaaagacaaaaagaaatagtgctcccttcaatttagtagcaataaaatcatctatcttcatctctctcagagggcttagggagagtgaaaggaattagaggaacataaaccatgggtccttcaggtaaaataagtcatttcatagtgatggaggcaacagcaggctacgctcttgtctgcctgtacgctcagcatcagcatgccctgcccctcctcctcccacataaggtgcaccaaagccttcttttcttctacaacagagtcttccggtataaaggtggcaacagaaaattgttgctttgtccttttggggcatctcttgcatctcctgcttgttttgcttttggggtactataacttgtctctttccatttcacaactagtatcctttccacgatattccataacttcgcatacttagtctcatgaccttttcacttgcattctctgcatcccgggatactctagag

SEQ ID NO: 147006 - DNA, 1145 bp, Homo Sapiens
attttttacaaaaatggttttttaggggatttttacaaaggaaattagtaaccgaggtaacgttagaatttttaagaaaaggccctgtttctgaatctaacaatttcggttttaaactgaagaccacatcttgccaaccatatgttttgggattttttgcccctctgacttccaaggcataaccaagccttttcccactttggccaaaactttgttttcaaggtatacagcttctttaggaaacctcgtaaaggtccagtgttgccaatgaatgaaaaccccatcataaacctgacgtaaaaactggctcacttcaaagggggtatcaatgtccccattccccacactgttaatacacatccgcatcaattctccagttaagtcagccactcccagaaggtaatcgacaggtgtgactctcagtctccaagtaccaaactgcttatcctgtgcatcagaggagggagttttattttctttcccattgtcttcagtcgtaaatatcaattgtttattaatttcatccatactaattaatgatcgtgttttgatgaagtgttgaaaagagacagcttccacatattcctgtagtcctgtagtaatggctcgatggaactgatgcatatcttcccctgatagctcttgggctacctggaatatcttttgtctgacaccatccaatttaatttctgattcagtcaatatatcttccatatcaggagcacttgtaatcctatggaggagaaaaattgtccttttactttcaacagttatatcccgactaagtttcacaagtctctcatatttgtcatgccttgcatcaagttcctgctgaaatgatttaaaggccaacatcacgggtgaagatgaattaacatccttcccttctcttctttggttatgtgggaaattgtcatgcttccttttcctgaaccctcctgatccttctttgttgctcatgtcgtcacagcctacggtgagacgagcggagactgaaggacctggagcaagaggagtgcgcgaggtacaggccgagggaacctgggaaaacagcctgcagaaaaacgctttgcagccgggccgactacaacgcagtggcggacgcgtgggtcgacgatatcccgggaattccggaccggtaccag

SEQ ID NO: 147007 - DNA, 973 bp, Homo Sapiens
  misc_feature (15)..(15): n is a, c, g, or t
  misc_feature (75)..(85): n is a, c, g, or t
gaaaatacatattgngcaatggtgaaggctctaaataagattcaaacggaaccttctgaagatggaaagttgttnnnnnnnnnnngggcaaagaaataatatccaccaaaggaaaaaagattaatggtagctaaaatataaaactaaatcaccagttaattaaactatacagatctaatacaaaccaaaaccagcctgaaagacccaaccttaaaaaatgctaaaaaataaggcataaatctgcataatattgagttttatttccattctctcctttccctctactatgtatgctttacctgatctgcctctaggggcttacaagaaaacggtttccggtttccgtcttcaatttgacctcaaatgtcctgagcaaagtttttgttattctgctgagggttcttttgttggtaagctttagacatcattatttctactaattcagtagttttgatcgtagcgccaaatttaaattcttccactggttcttctggaaggaattaaaacttttacagtgccttgcctgcacagtattatgtttttaaaaaagaaaacccaagcaaaatctattgcttaaagaggtttcttattttttaaacaaacagaataactcttgacaattttaaaaccttgggagaaacagttcattagaacttcattttcttaccgtgaagaattaaatactaaaaacctgttctgaagcacttggttaattttctctcccagagtctaataaagcacatgtgaaagagccatttgttttagtcagaaatacatcttatgttcttctacttctaagtactcagtatgttctttaggactcattttgaagatgcaccaggagccttttctcattcaagcactgcctaccatgatggctgaattttgacctcaaagaagaccgtaatttttatcagtgctcaagaataattttggacatcttggtccgtagcctacagcaagtggtatctgt

SEQ ID NO: 147008 - DNA, 672 bp, Homo Sapiens
  misc_feature (548)..(582): n is a, c, g, or t
  misc_feature (586)..(632): n is a, c, g, or t
agtttcagatctgattccaaggggagtatgccagaaaatggaaggaaagagatgttctttccacttgttaaatcatgatgtattcaccagaaatgtataaacaatcataatgaacttttaacctaagcctttagcaaacaggaaaattgttaaaatatatacaagttgcataaaagccagcatgataaatcaatcgtgcctttgcacgcatattcagtccccgttaagacaactaaagacaagtcaaatgacggggtcataaccaaaataataaaccaagttagtttgtcagtatcttttacaattaaattacggatgggcctcttgaaaaaaatgttttccaaaatgtagcaatcacacaattttttatttaaaatgcgtaatccacaatacaaattgaaagtgataatgtggaaaattaagactggacttaactgttttataaaactaaacacctttgatcatatacaaattcctatcagcagtgagcctttgtgcccggccgtaatggccgaattcccgggcatatgtccggtaccgtcgactgnnnnnnnnnnnnnnnnnnnnnnnnnnnnnnnnnnncggnnnnnnnnnnnnnnnnnnnnnnnnnnnnnnnnnnnnnnnnnnnnnnnaccgaggctagcgccctatagtgagtctatacagtgcttt

SEQ ID NO: 147009 - DNA, 795 bp, Homo Sapiens
  misc_feature (682)..(716): n is a, c, g, or t
tcttcctaacacctgaagatttttttccagataactaagctatatgtaaagcttaaaccatccaagcccacataacactatcttttgttccaggagagatgtgtatcactattgccttatcttcagcttctaaatgtacttctggaggaccaatctgagctttgcgaaatggtgtaaatgagtcaacctcataccatggaagaagtgttttctttttctgctcttatacgcaatttaatttcttcataaacattcagcttgagtgaagaaaagttgcatttggtactagtaatattctgacacccagacaattttatccaattatccatcccagttttttgataatcgaatgaaaaagtcacattcccgacagactcatcgctcctgttccacctcaggataaagttgtcatctatgatgtcgacctctactttttgaggagattttagattttttccacctgcggctgcggacaacacccatggcgccacggcgacgagcactagggtcgtcgcgcccaggaggacgaccatcatctgggagccgccgcagatcccaccagttacatgttcgcgcacgcgcagctcctctcagccgccatcgccccgtcctaagtcacaccgcccctctccccggccgtaatggccgaattcccgggcatatgtccggtaccgtcgactgnnnnnnnnnnnnnnnnnnnnnnnnnnnnnnnnnnncgccgcttcctcgctaaatacttcgctgcgctcgttcgttcggctgaacgccgaggcgccgatatgaggcatatcagtt

SEQ ID NO: 147010 - DNA, 1394 bp, Homo Sapiens
  misc_feature (106)..(106): n is a, c, g, or t
gaccttgatgctgccaacagcccgataaggtattccatcgatcgtcacactgacctcgacagatttttcactattaatccagaggatggttttattacaactcaanacctctggatagagaggaaacagcctggctcaacatcactgtctttgcagcagaaatccacaatcggcatcaggaagccaaagtcccagtggccattagggtccttgatgtcaacgataatgctcccaagtttgctgccccttatgaaggtttcatctgtgagagtgatcagaccaagccactttccaaccagccaattgttacaattagtgcagatgacaaggatgacacggccaatggaccaagatttatcttcagcctaccccctgaaatcattcacaatccaaatttcacagtcagagacaaccgagataacacagcaggcgtgtacgcccggcgtggagggttcagtcggcagaagcaggacttgtaccttctgcccatagtgatcagcgatggcggcatcccgcccatgagtagcaccaacaccctcaccatcaaagtctgcgggtgcgacgtgaacggggcactgctctcctgcaacgcagaggcctacattctgaacgccggcctgagcacaggcgccctgatcgccatcctcgcctgcatcgtcattctcctggtcattgtagtattgtttgtgaccctgagaaggcaaaagaaagaaccactcattgtctttgaggaagaagatgtccgtgagaacatcattacttatgatgatgaagggggtggggaagaagacacagaagcctttgatattgccaccctccagaatcctgatggtatcaatggatttatcccccgcaaagacatcaaacctgagtatcagtacatgcctagacctgggctccggccagcgcccaacagcgtggatgtcgatgacttcatcaacacgagaatacaggaggcagacaatgaccccacggctcctccttatgactccattcaaatctacggttatgaaggcaggggctcagtggccgggtccctgagctccctagagtcggccaccacagattcagacttggactatgattatctacagaactggggacctcgttttaagaaactagcagatttgtatggttccaaagacacttttgatgacgattcttaacaataacgatacaaatttggccttaagaactgtgtctggcgttctcaagaatctagaagatgtgtaaacaggtatttttttaaatcaaggaaaggctcatttaaaacaggcaaagttttacagagaggatacatttaataaaactgcgaggacatcaaagtggtaaatactgtgaaataccttttctcacaaaaaggcaaatattgaagttgtttatcaacttcgcta

SEQ ID NO: 147011 - DNA, 1034 bp, Homo Sapiens
  misc_feature (917)..(951): n is a, c, g, or t
  misc_feature (955)..(993): n is a, c, g, or t
cggaataatacagtgcttaagtcaggacgttatttaagggtgtgttttaagattagtggaatatcctagacagttagaaggatgcagttgttttattaatacctgcattttacccacaagagtttacttgcccacctgtcctgagtgaccttacagaggggatcaattcttaaacaaggagtgttcagtacatctagatgtagactgatcctatcttaatggtactgtggggacctaggcacaatccctaaagatccagctctgaatgtcacttctctatggatccctttatggtaataaagattttataatataggataatatagcatagagattaagacatgacttgctcctccttgccttccgccatgattgtgagattaagcagagaatgaccaaggtaggagaacctagaataatgtatgcgctgctatcatttatactatagtattatgcaagttatttcacctgactaagtctctgtatttttcatttataaaatgagtacagtaattagacctacctttttcaagtattacatgagctactgcatataaactacttagcatgatgtccaccacttgattaaaaacaaatgatgaaaaaaatccattcctctttttcttgcgggcaagacaaggtaccatactggctacataggttaatgttaattgattatctttagcttcctaagagggatctcacaacagcatactggcattcatctcaatggggcactgtctctcaacgttggttcacataaattctcccctacccactgcatgaacactgctctgtccatcccgtgagagtgctgaatggctgagagaggacgcaggagagaggtgagagaggatgcaggagtgcccggccgtaatggccgaattcccgggcatatgtccggtaccgtcgactgnnnnnnnnnnnnnnnnnnnnnnnnnnnnnnnnnnncggnnnnnnnnnnnnnnnnnnnnnnnnnnnnnnnnnnnnnnnctataacgagctagcgccctatagtgatttaagaaggtttt

SEQ ID NO: 147012 - DNA, 423 bp, Homo Sapiens
aaaaccaaactccattacacagctttgcttctttggttacaaagtaggttgaacaatttcacagctttttattcccacccgaaaaaaaagtcatacgaaatgttgaaaagcagaggaatcgtggcaatttctcttagaaagtagaaacaaatgaacaaagttttcttcatcaaaatagcccaattatttatcatatcacaataactggtgactacctgtacagttgcactatgttcttcatacttacactatacaaaatttacattcaagctgggtctttactactgaaaataaataccataagtaaattgccattagtgttagaaatatgccaggattcttttgttcaattattgcctaaacgttttatctattaaatgcaatcctgtctttcacttcctttactgatacttataattattc

SEQ ID NO: 147013 - DNA, 1424 bp, Homo Sapiens
cgttggtggagggagtagttgagtaggtggcggtgtcgccaatacggtgggggcgaggtgaccgatgggggcgggtcgtggacgttggtggggtgtactaaccttaggtttggcgattggtgttgtcggggcaatgtcacgggactctgcaggtaggtgggtctgtgcgggtcggggttattggctggaatggggggcgtgctagggtgcgcgggatggggagtgcagtggcgggtgtaaatattatgagccgggggctttttttctccggccggggcgcggaccatatcgtgtcaaggggttgccatggtgggggccctcagggtccaggggctcgcagcgggtcattcccagtgcccatggcagaggccaggtttggggagcagttcatagtaataaatacttggtatttaccctatctaccttcccagtccaggggatgggaggacaggagctttttctcactgctacaggcaggagaatgaaactcagaaatgcagggaaaggacacagaggcctggggctccgttctgctcttccctgtctttaaatatgaggcttaaatagacataaatattaaatagagataaatacatgggatggggagggcttggctcagggctgggcaaggtggcgtagaacgcggtacgacacctccaggaagctctgcagatgggaggcaaccaggacccctcctgcccggcgctggaaagcagaggcgaaggccggcatggcaccctgggtgggctgcagggcaggggccattcccagttcttccatctgctgccagatggtggtggcaaagtcggcgacgtccagctgcagtgtgtccaaggtgggacccaactcgggggagatcccttccagggcctgcaggagcccctggtagaggaaaaggccgctatggagttggctcaagcagcctgccagctgcagggcctggctggggcagctgctcaggggagcccaggggatgcccagagagtgtccgagcagcaccagctcctcggggtggcacagcttgtaggtggcacacagcttctcctggagcgctgcgccatcgccctggatcttcctcacttgctctaagcacttgagcaggaagctctggggcagggagctggcagggcccaggggggtggcttcctgcactgtccagagtgcactgtgccacagcagcagctgcagggctggggacagagcgggctcaggagacatgctgttccctaccacctgaggccctctcggggacactgggtgcctttaatccccattcccagaacggggatccccagcccctctgtcacaccagcctccctcccatgccagggcaggcggctctcccatcctgggccaagacactcacccatcagcttcatggggctctgggtggcaggtccagccatgggtctgggtggggctgg

SEQ ID NO: 147014 - DNA, 1097 bp, Homo Sapiens
cctgtgttgttttctctcccttctaaggctgcctttgtgacccctcttttccactgggcgtcttgtggccaggtgtcctttctccggggctcatcacctgtgtgtgttccttcgtctcgttccctgtgcccctggtgtctccccctggggatgtttttcccagtgactttgtgcgcctgccctcctctccatctgtctgcccacttgatccgttcttccagtgcgggatcttgacctagccgatttgcggtaccatcctcgacggcatctcagcccgagaagcgagacatgtaacaagagaaccagctggcaacaggcaaagaggcactggcagaaatctacctgaaccttccacagaggcttgcaagagatggatgcttcccatctggattcaagaggagactgccctggtgaaaatcatcactggtcttttggactttgagctatacctagagtacctccagaacagatcttgagagtagtgaggcacaaagccagagctgtgcagatgagtactaaagtcctgatccagttcctgcagtaaaaggcaaagaatctagatgctataaccacccctgacccaacctactaatgccagcctgctgacgaagctgcaggcacagtaaccagtggctgcaggacatgacaactcatctcattctgcgcagctttaaggagttcctgcagtccagcctgagggctcttcggcaaatgtagcatgggcacctcagattgttgttgttaatgggcattccttcttctggtcagaaacctgtccactgggcacagaacttatgttgttctctatggagaactaaaagtatgagcgttaggacactattttaattattgtttaatttatgtaatagtttaaatatgtgaagactgagttaactttatgtaagtcatatttatatttttgaagaagtacccacttgaaacatcttatgtattagttcttgaaataataatggaaagtggctatgcagtcttgaatatcctttgtttcagagccagatcatttcttggaaagtgtaggcttacctcaaataaatggctaactgatacatatttaaaaatgcctacttatacttgta

SEQ ID NO: 147015 - DNA, 1205 bp, Homo Sapiens
tttgaattttttaaaatgccatttattggtataaaaaccatttatacattatataaatacaatataaatatttctttaaaaatatgtataagttagccatttatttgaggtaagcctacaactttccaagaaatgatctggctctgaaacaaaggatattcaaactgcatagccactttccattattatttcaaaactaatacataaaatgtttcaagtggtacttcttaaaaatataaatatgacttacataaattaactcagcttcacatatttaaatattaataaattaaaaataattaaaatagtgtcctaacgctcatacttttagttctccatagagaacaacataagttctgtgcccagtggacaggtttctgaccagaagaaggaatgcccattaacaacaacaatctgaggtgcccatgctacatttgccgaagagccctcaggctggactgcaggaactccttaaagctgcgcagaatgagatgagttgtcatgtcctgcagccactggttctgtgcctgcagcttcgtcagcaggctggcatttgtggttgggtcaggggtggttattgcatctagattctttgcctttttctgcaggaactggatcaggacttttgtactcatctgcacagctctggcttgttcctcactactctcaaatctgttctggaggtactctaggtatacctcaaactccaaaagaccagtgatgattttcaccaggcaagtctcctcattgaatccagattggaagcatccatctttttcagccatctttggaaggttcaggttgttttctgccagtgcctctttgctgctttcacacatgttactcttgttacatgtctcctttctcagggctgagatgccgtcgaggatgtaccgaatttgtttgtcaattcgttctgaagaggtgagtggctgtctgtgtggggcggctacatctttggaatcttctcctgggggtactggggcagggaaggcagcaggcaacaccaggagcagccccagggagaaggcaactggaccgaaggcgcttgtggagaaggagttcatagctgggctcctggaggggagatagagcttctctttcgttcccggtgggcgacgcgtgggtcgacgatatcccgggattccgaccgtaccagcctgctttttttaccaactgtggttctataggttcacatgtgcgtt

SEQ ID NO: 147016 - DNA, 1102 bp, Homo Sapiens
aagtttcccaatttccctgggagaaggttctcccaccctttggccgttagggccctggaagttcttccagggaacggcccccttccggcaggggaccccatctgtcaaggaagttgtggagggcacctcattcatggaggaggccagagggcagctgtggccaggcgcctttcgctcgtgggaacgcttgtggcctgtcgcgggtggctggaaggtcctctgcttcttatcccgggaagagaaggacgtccaagtcagagtcaataaccagctgggccacccggaatgcgagggtgctgcctgaggggatggtgaccgtcttcttctggctcagatggccctggccctcaccctgcaagcacgtggctccgggcagggaaaaccggcccgagccctcccgcttgtgggtgcgcgtgacttccacctccttctgtgtctgcagcacctcagtcaccacgtacacgttgtccccgcggctgcgcagctgctgcaggactttgtgttctggctgccgcaggtgcctctcatggagcagagtctgccaggtgttagggtccacactcagcgagtacacattcattgaggtgctggagctgtcagacaccgcggccccgcctgcgatctttgcctgtcctggggctgccagctccacgctgccctgtatctgcccatccatggcatcgtagaagtggaagctcctgccacgctgcacgtctggttccgcggcatccggctccaggatgtccttgatagacaggttgacacacttataacggggtttccagaaccatgagcttgagggcttcctaaccaccaggcagtagggctggaagccagtggagctctgcaggctggtcacagggatgaactccccaccatggtccagctcctggaccactctccggactacccgctcaaaggccgaccccatgctccgtgaccgtcggcgccccgagggtggcgcgtctggcgcgtctgctctccctgggagccgtccggcgagcaggagctggaggtgcccagagctaaaagtgaaactgcaacctgacgcccccggccgtaatggccgaattcccgggcatatgtccggtaccgtcgactg

SEQ ID NO: 147017 - DNA, 638 bp, Homo Sapiens
ctcaccatctataaaataaagtcttaaactatactaaaataatataaatgtcaggtcttgcattggtgcttctcttgggtccactgcccctgccactgccctgccctgccctcttcgggcccacctctcatggagcagagtctgccaggtgttagggttccacactcagcgagtacacattcattgaggtgctggagctgtcagacaccgcggccccgcactgcgatcatttgccatgtcactggggctgccagctccacgctgccctgtatctgcccatccatggcatcgtagaagtggaagcatcctgccacagctgcacgtcatggttccgcaggcatccggctccaggatgtccttgatagacaggttgacacacttataacggggtttccagaaccatgagcttgagggcttcctaaccaccaggcagtagggctggaagccagtggagctctgcaggctggtcacagggatgaactcacccaccatggtccagctcctggaccactctccaggactacccgctcaaaggccgaccaccatgctccgtgaccgtcggcgcccacgagggtggcgccgtctggcgcgtctgctctccctgggagccgtccggcgagcaggagctggaggtgccc

SEQ ID NO: 147018 - DNA, 1045 bp, Homo Sapiens
  misc_feature (929)..(963): n is a, c, g, or t
tgccatcggtcattctttggctgatctgcacattgactcgcgtgagcacgggccatgctcagtcactggtccgagcagagctcatctggcccgtctttgttcagccggactgggtaggggatgaatcttgaccaaggtcgatggaatccggctcttagcccagctctagccctggctacagtcccagccacagcccgtttttgggcttggccattctcttcttggtctggtctctccccctggtgtatttgtagacacagtaccaggcaccagcccctatcactatccccgccgctacacagccagcatcccgaacgcggctcatggtgcagctggggttattcactgatccagggcgtggaactggattgcttaaggttaagggatgcctgctcgtccgggtgaggctcttcagtttaggcttacaagttctgctgaggcttaggcagggcctgggatcaagagcagtttgcttttttccactgtagctgcagttgcacagagcccaaaaggaagacagaccctccaaagattcaaggctgtttctccttacttcagttcagttagagcttcatcctaaggacagaccgaattccttttccaggactgaaaagacggggggtgaacggctgtgtgggccggaggtgtctggaaagcagtctccctgctggccttctatgcgctgccacgtttatttctcttccctcctcctctcaaaacaggacggaatgtggggtgcgggcctgcccgaatctgggggaattttctcctcctcctcctcgcctgggttaaacgcacggcagcgagctgcgcaatagagttggtacccagaggaggacggagaacgacggtcagggctttaagtacctttgcccacccccggccgtaatggccgaattcccgggcatatgtccggtaccgtcgactgnnnnnnnnnnnnnnnnnnnnnnnnnnnnnnnnnnncggccgcttcctcgctcaatgactcgctgcgctcgtcgttcggtatgaaggaggagcgccctatagtgatctatacattctt

SEQ ID NO: 147019 - DNA, 939 bp, Homo Sapiens
ttttggaaattctgccacttgggagcccctctcccattgcaggggctctctgcaatgccccaaggccttctgtcaacctcgggaggtggtgctatttcaggaagccattgcagtccccgaactacgtgatttcgggccttaggctcatccccgggctccatctgcctcttgggcctgacttgcctgccccacctctgagcctcagcgctggatgcagcctgggggccacttgcctcagctccaactgtgtccagagcagaggcttcatcctgggccctgtcctctgcttcagcacggactggggttgggggactgaatcctgacccaaggtcgattgtgaatccggctcttagcccagctctagtcctggctccagtcccagccacagcccggtttttgggcttggccattctcttcttggtctggtctctccccctggtgtatttgtagacacagtaccaggcagccagcccctatcactatccccgccgctacacagccagcatcccgaacgcggctcatggtgcagctggggttattcactgatccagggcgtggaactggattgcttaaggttaagggatgcctgctcgtccgggtgaggctcttcagtttaggcttacaagttctgctgaggcttaggcagggcctgggatcaagagcagtttgcttttttccactgtagctgcagttgcacagagcccaaaaggaagacagaccctccaaagattcaaggctgtttctccttacttcagttcagttagagcttcatcctaaggacagaccgaattccttttccaggactgaaaagacggggggtgaacggctgtgtgggcacggaggtgtctggtaagcagtctgcccagtatctgggggaattttgtcctcctcactcctcgcactagggttaaacgcacggcagcgagctgcgcaatagag

SEQ ID NO: 147020 - DNA, 883 bp, Homo Sapiens
cgccctcggagtaccaggccagtccttctgcacatcctggtacaggcagtccttgcagtgtacacgtgccgtccttagcactcatgttggccacctgtggagaggccatccagcgcgtccttgtccggcctgcgtcaggccgtccttctgcagtcgcagcagcagctcagccttgcggtagggccgtagtgccaggaggtgcagcactcggtcacggaagggcactctgggacaccccgctgcccccactcacggcactggcaccactcttcctgatggcactcgccaagttgatgggggttgcccgcttccgggagggcaccgcgtctgttgcacctggggctggtttccgaaactgaaccttcttgcccaggtagcggcctccagccttgatgacaatggcacttcggctccgcgtctcctcctccgcctgggccatgctctgccgcgccttctggtaggagtcgtcggtggcacacaccgtgatcttgtcctgtatgctgcccaggcagtccaggtgaacttccccatgactggagacatactgctggatgcagtcgaaagctgccctgggggttgtcgcggccgatgttggagaggtagaaggagaacgtccgcgcctctgcggggcagtcaggctgggggatggagatgtgcccttggcttccttgaaatcggatagatggcctcagtgaaacagaatcctgtctggcgcggtagctctcgaaggccctcagggcactgtcggtgagcttcacgtggaacaccgacaccttgctgccgtcgctaacccgcccgcacgacagcccgtagctcctatcctcccctcgtgccgaattcgccacccaggcctcgctaccttaggaccgttatagttactgcc

SEQ ID NO: 147021 - DNA, 482 bp, Homo Sapiens
gatggaggttattaaatgaaaatggcaagttacaagacaattatgttaaatatgatcctactttaagtcaaaagatagagctggggaagacttatggagattttaaaattggtcgcctgtaggtggtaagaatattttcatttaatattttatctgtattttctcttttttgggaaagttaccgcagatgattatctgtattttctaattttctacaatgtacaaataatgcttttgaagtaaggcttatgtttttgaaaagttatggatttaagtcattacttaccagcaaaactttatatgccaagtagctaaaaatcatagttcaactgactttgtggatatttcttagaactatggtcttcaaattgtgagttgctgtagaatggaacttttctgaactattatctcccatccaaatgccatcttttgcactatgagataagaatcactgtcacaaggctgggtgtggtagctcacac

SEQ ID NO: 147022 - DNA, 1134 bp, Homo Sapiens
  misc_feature (884)..(912): n is a, c, g, or t
  misc_feature (1025)..(1059): n is a, c, g, or t
ctcaggaatggggaacatggttgaacaattgtcacttatttactgagggagtggagtatagatgtagggaggtgagattaccattcctggggatagatgtaggattttaatggaatgatagaatttattgtacaatcacattggtgagtcttattcaggtattaggcttaactatttagataactaattcatacatcagaagtaaaggatttttttgtgggaaaaacattagtacatgtacataatttcttgtctttagtaagctgcaagtgagtgaaaactatgtactaattatttatcaaatcaggaaaaaaatcagaaacgaagtgccagggaagcatataaagttaaggcaccattatttacaacatcagtgattggcacttattctgaaaaaggctttaaagacatgaataaaaagcagtattacgtttttccctacttctataaactacttagtagttcttaacttagctatctattatttgtgctttgtttttcagctccatgaatagcagctggattttacggtaacatcctgcatttttcctttactttggtgtttgtgaacattacacagtggtaaaggctataaaaggtgcataacaggaaaacacatatgctttgcctccttatagaaaacaatgcaaaataggtggctgaactgacatagtactgtctcaaagtctttttcaggaattagtatatattaagtttagggtttgtagcattctacataatgactttaaaacagcaatggcttccaaaaattcaaaaaggttagttatgtgactgttggtccaacagatgtgttgaaatgcagcaagtatatttaactttataagttctgtccaagtataaaaatactatacaaaattaacaannnnnnnnnnnnnnnnnnnnnnnnnnnnncatgtatgcatgcacgtttataactgttcatgcttccaaagctcaaacattcactagtttaccccggccgtaatggccgaattcccgggcatatgtccggtaccgtcgactgnnnnnnnnnnnnnnnnnnnnnnnnnnnnnnnnnnncggccgcttcctcgctcaatgactcgctgcgctcgtcgttcgatataagcgggagcgcctatagtgattatcatt

SEQ ID NO: 147023 - DNA, 1144 bp, Homo Sapiens
  misc_feature (1023)..(1057): n is a, c, g, or t
  misc_feature (1061)..(1100): n is a, c, g, or t
gaaagccattttcaatacagagtgtaaaattagatagcctctattaattaattagattttggaaagaaatgcagctttttagttagcattgaggcaaaacagggaacctgcttctttccaattgcacttgggtctttgcaaaagtccactcggcgctgagaaactttcctgttcaccagtgtgaggagttctgtgaactctaaggaggagccatattttcccaacatctcacaccaatcttgaatgtaccatgagccgttcacagtttcccggtgagaataatatccttctgcaacagagtaacacatgaggaagtcagctccagcaggcagcgtgtaaacggaggctgcatccacctcagttatgttggtgtccaacttctctgtctgattatctactacatccaaaggaatgactggcacatcgtgctggtttccccgacatgcctgaatgataaatatcttgggttttccaaccaggctgtgacacttgtctcctttgaacaagccagttaatgtctgaatttcgattttagcatcatatgcataaatgtgattgccttcgccatggctcaggaagacacacacaaagcaatcggcatctgcgtggctaacagttgacacctcatgaattttgagcagtagttcttctgctttaagatcattaaagcatttcacttcaaatcctagatctgaaaacctgcgggtaagattgtctctatctgcgcaggtgccccgcctttctggcagtgttaagtgccaaaagaacctctcatgattgaagattaaagcaattcctctcctcctgtggtccattttgtacttttctgccggatcaaacatttctcttttatagaaggcatctgtttctgtcatgttttcttccccacctgccgggtgccccctgcggagccccgaggccgagctcattgcagccaaacgcgcagccagacaccttgccctcctcttcctccccggccgtaatggccgaattcccgggcatatgtccggtaccgtcgactgnnnnnnnnnnnnnnnnnnnnnnnnnnnnnnnnnnncggnnnnnnnnnnnnnnnnnnnnnnnnnnnnnnnnnnnnnnnnctatcgccgagctagcgccctatagtgatccgtatcgatttttg

SEQ ID NO: 147024 - DNA, 1975 bp, Homo Sapiens
  misc_feature (577)..(577): n is a, c, g, or t
  misc_feature (1861)..(1895): n is a, c, g, or t
tttttttatttttaataagtttatttgtgaaagaaaaacatctgaacatcaggtacagtctgatccacaatgtcataactcattctcgggagtactcttatgcagtttgcaagagaaattccacgtggagcatcagctgaacatttatcagaattcagaaagccttcaaacctgagtattacacaatacataacgacaacgatacagtaataaaaatacaatatcaaatattactttgtgagttacaaactacaatataaacaatttaggcccttttttaaaaaatgaaaaaatatttctattacaggcttatttcaagcattttcagttagaaacagctttatatacttttactcacgatagcgaaagaatgtcttcataagtatctgtaggtaaaatatattacttgcttaatgtttgcactctgaagtatactttgacacatacaagttccgataagagaatgaaattgctgtggcaaaatcctggctgatgatcaagacttggagagttttcatattaagttaaaaaaaatttacatcaatgaaaaaaagaagcaaaggccatacaaagaaancaccatcattcttttgcaatgaagcagtctaattccagggaatgggttttccattttgaattcaaaagtgtgtggtcccaaagttgaattctttcaaatccaaggagctgcctgccactgtgaggcaatagcaatgatgaagcaagttgggagtaaagtgttaactgaactacagagatggtcactgataaaacaagttcctagaagtcctcgggcccacctagaggtgaagggcagccagaactatcaacacaaaagaaaaatgcgctcactgaactgcacacatagagcttctaggagggttaacagtccttgacataggttcctggttgtagtttacaatatctgccttcaccaccctctgcactactgtactgaacagattctactctgagtagaggtggtatgttgattttcttcttccgggtacttcactatttctgccctgacaatacgctgtgactgttctatttctgctttgtttaatttgatcccaaggatttcagcagcaactttctgaaagcacaggaagacagagtctcctgtcttggctgagacatagtggctactgaaaccattttcctggcaaagaccgtaagtggtttttcaggtgtttagttgttcgcatatgctccgaatcaagttttatgtgcctaccaaggcaaccagtggctgagtttctgactcctcgctcacttgtcttgcaccacagtataccaatcttcgtaaattctcaaagctttgataaatttgtaatatcatataccaagaggactccctgtgctccatagatatatttatccaacattttgcctcctattgtctgccctcctatatcccagatttgaagggtaacattcaagtttcctggcaatgttatccttctcaaaaagaaatccagtcgctatagtttgtttgtactgtttcccaaaagtttcttgagcagaacacgtagttaaggaggtcttcccggaggcgccgtccgcccagcacgacgattttcagttgccggtccttggctctcctcctcagagtccgacatggtgtcccgggaaccaggcccgcccctcgaggtggggggggaagggaaggatgaaggctccgggggcgggggagaggaggaagggaggtagttgcggcaggacccccgccccggtgtctccgcgccggcaggaggtattcgaggagaatcactcggcaagcgccatcttgcccacctccccgccctctgcccccggccgtaatggccgaattcccgggcatatgtccggtaccgtcgactgnnnnnnnnnnnnnnnnnnnnnnnnnnnnnnnnnnncgccgcttcctcgctcactacttcgctgcgctcgtcgttcgctgcaaccgagctagcgcccatagtgagtgatagtcttt

SEQ ID NO: 147025 - DNA, 1201 bp, Homo Sapiens
  misc_feature (1069)..(1103): n is a, c, g, or t
  misc_feature (1106)..(1144): n is a, c, g, or t
taggacctcattatgaccatgatctgcaagaaagatgctttttcaatgtcttttaggcctgaatatggtaggaaatcatgaagcacccaaagactcaggatctcacttcgtatttggagtggccattctcctatgcacacacacccttgttttgttgccctctccaaaatcaagtcttcaccccttcagttcatatcgccttcgttccactcttcaccatgggaaactccccacagtgtttccactgtttacagattcctttctctcacgtcagcgcagggcaccctttcactttactctgtaaccatcaggatttccattacattctgtgactttgcacatcttcatcccagtttttaacagggatatatatacgaccatcatataaacttgtgcggcaatcctgccggcccaccagaactttctcacattctttaatttctattgccttcagtcttgacgttcatttatgttttcaagtgaatctttcctgtctctttcccaaaaaggcagaaggaaaagaaccaacattctaatttgatgatgaacacagtgatttctgaaatacgttcagagaatgaaggaaacaggctggctctcttctacgtcgctaggatgtgggtcaacctctgaataaagaggtgggggttgaaaccggaattcttgtatacaggcaaacacaggacagcacacttctccctcacagttagggggttgagggtaaggaggaatgtgtctagagaattcttcctctgataccacatctgcataatttggtggtgcttcaggctgctctggcagggtcagtgtcaaccagctcatatccatactgaactggctggcaatgctggagtttctgctgccaaaaccattatatggaattgtaccgatcactaatggcagttcgagcatcaattttttagcaccaggaatgtgaatgtatacagctaaggaatagtccactctgataatgcagcaatccaggatggatggagtaacaggtgggatttttagcgttcccggccgtaatggccgaattcccgggcatatgtccggtaccgtcgactgnnnnnnnnnnnnnnnnnnnnnnnnnnnnnnnnnnncgnnnnnnnnnnnnnnnnnnnnnnnnnnnnnnnnnnnnnnnataaaaggaggcgcccattttaattcggtaggaagtttaaggtattagatttttttt

SEQ ID NO: 147026 - DNA, 1088 bp, Homo Sapiens
  misc_feature (555)..(555): n is a, c, g, or t
  misc_feature (1015)..(1032): n is a, c, g, or t
tagggtatgtggatcttcatctttaataaatattaccaacatgtgaaaagcccgacaatgtcaaggactggcaagagtgccacatgtgatgggtgtggaatggcagctcactgtagcaggtgctggggactcagttggggtcttggagaagcacttagttatagcaagaatgtctcataaatggtatctgatagagacaagagtagtggggaataaaaactagttgcttagaaataattatagatctaaagtcaaccaaaaacccttttctaaatgtaaaaatacatacttttttcagagggagggggaacaacttaaactagaaaacaccttcatattaatcattcttctcatatacttcaaatttgtacttaatgcctttctcctcctggacatcagagagaacacctgggtattctggcagaagtttatatttctccaaatcaatttctggaaaaaacgtgtcactttcaaagttttgcatgatccttgtcccaaatagtttaagatggcctgggtgattcatggcttccttataaacagaactgccaccanattatccagagcatgtttactttatttgctatttctggttgttccagtaagttttaaggcatcatctagacttctggaaagaaaatgagctccttgtggaggtttcttgagtttttctgctgagaactaaattaattctaccctttaaaggtcgattcttctcaggaatggagaaccaggtcttcttacccataatcaccagattctgtttaccttctactgaagaggttgtggtcattctctggaaatatctgaattcattcctgagcggtggccagggcaggtccccgttcttgccgatgcccatgttctgggacacagcgacgatgcagtttagcgaaccaaccatgacagcagcgggaggacctccgagcccgctcgttacagcagaacgcgcggtcaagtttggcgcgaaattgtggccgccccgccccctcgtccctatttgtgcaggcgaggnnnnnnnnnnnnnnnnnngcgcacgcagggtcgcggcgtgctcgcgcccgcagacgcctgggaactgcggccgc

SEQ ID NO: 147027 - DNA, 928 bp, Homo Sapiens
  misc_feature (825)..(888): n is a, c, g, or t
gggggcagcctttcccagtggacagtttgttctcatagatgactttcaggctcctgtttgctttcatctttgtccccttcctccttgacaaagggttgttcctttggggctgttcctgctgccccccgagcccctgggctggggagccaagaccccaactgagtccccagcacctgctacagtgagctgccattccacacccatcacatgtggcactcttgccagtccttgacattgtcgggcttttcacatgttggtaatatttattaaagatgaagatccacatacccttcaactgagcagtttcactagtggaaataccaaaagcttcctacgtgtatatccagaggtttgtagataaatgttgccaccttgtttgtaacagtgaaaaattgaaaacaacctggaagtccagtgatgggaaaatgagtatgtttctgtcttagattggggaacccaaagcagattgcaagactgaaatttcagtgaaagcagtgtatttgctaggtcataccagaaatcatcaattgaggtacggagaaactgaactgagaaggtaagaaaagcaatttaaagtcagcgagcaggttctcatcgataacaagctccatactgctgagatacagggaaatggaggggggaaagctggagtattgatcccgcccccctccttggttgtcagctccctgtcctgtgtgtgggcggaacatagtccagctgctctatagcaagtctcaggtgtttgcagtaagaagctgctggcatgcacgggaacagtgaatgccaaacacttaaagcaattcgatgtttaagtatgtaagttcnnnnnnnnnnnnnnnnnnnnnnnnnnnnnnnnnnnnnnnnnnnnnnnnnnnnnnnnnnnnnnnnctcgtgccgagtacgccacccaggcctcgctacctaggac

SEQ ID NO: 147028 - DNA, 716 bp, Homo Sapiens
  misc_feature (600)..(634): n is a, c, g, or t
  misc_feature (696)..(696): n is a, c, g, or t
tttttttactctgtgtcattcagtttagagcaatttaatctttgtttctccaaatccatttttgaagctgagtttaacttttgcaacccatggcaaatcttaaatgccctcatttaccactctttaccaaactcctatttaagcctctaaaaggcaatactggccagcagacccaaatttcagcagacaatagtgaaaaattacttacgtttaatctccagtcgtgtcccttggccgaaggtgatccacagtgttaacgtaatcactttccccttgaacaaaaatctcttttcgctgttaatatcactaacctgaccgatgcagagaaaatcttgcaattgagatgcctcacttaactggctagcgcttggctgttccttaagatgaactaattttctatcccttactcatctgactttttgaaagaatctggtagtctttggaattgacctgagctaatatctcaaacacaaaaaggctccaaatttaaaaccttataagaaaaagcattaggaaagtgcacttacgtttgatctccaccttggtccccccggccgtaatggccgaattcccgggcatatgtccggtaccgtcgactgnnnnnnnnnnnnnnnnnnnnnnnnnnnnnnnnnnncggccgcttcctcgctcactactcgctgcgctcgtcgttcggctcacagcgggcgccatatntagggtatataagtttcttt

SEQ ID NO: 147029 - DNA, 1235 bp, Homo Sapiens
  misc_feature (899)..(907): n is a, c, g, or t
ggaattcccgggatatcgtcgacccacgcgtccggtgcagagaaaaatcccttagattgcaaaataaaatagttgaactctctgtcttcatgtggaaggtttagagcagttgtgagatgctgttatgctgagaaaccctgactttgttagtgttggaaaaaagtcttacaagtctataatttaaagatgtgatggtggggaggggaggatggggaagctttttatatatgcatacattacatacctatatataaacttgtggtataaccatagaccatagctgcaggttaaccaattagttactatcgtagagtaatatatattcagaataataaactcaagctggagaaatgagtcctgatagactgaaaattgagcaaatggaagaagatacagtattgtttagatcagaatcattaaaaaatatttttgtttagtaagtttgaagatttctggcttttaggccttttctattttgttccatttatttttgcaggcaatcttttccatggagggcagggtatccattctttaccatgggtgtacctgcttaggttaaaaatcataccaaggcctcatacttccaggtttcatgttgcgtcttgttgagggagggagagcaggttacttggcaaccatattgtcacctgtacctgtcacacatcttgaaaaataaaacgataatagaactagtgactaattttcccttacagttcctgcttggtcccacccactgaagtagctcatcgtagtgcgggccgtattagaggcagtggggtacgttagactcagatggaaaagtattctaggtgccagtgttaggatgtcagttttacaaaataatgaagcaattagctatgtgattgagagttatgttggggatgtgtgtgtggtttgcnnnnnnnnnagactgtattaataaaatacaaacaagctggcttgtgttgctggttcctattcagttattccgtgggatggttgcttttaagtaaaacattctgaccatagctcagatgtctgaatccagaggtcacatcagcatctttcggtttgaaaattctcacagctggtgctgcttcacttagattggagtgagaaaccatagttgggtgatccgattttcaaatccttccatgtattatcttgaagagatatagcggaaaagaaggtgttcataacagagagtacttaggaatgttctcttaagtaaaagtgtaaagttaaagggtgagtta

SEQ ID NO: 147030 - DNA, 1244 bp, Homo Sapiens
  misc_feature (105)..(105): n is a, c, g, or t
  misc_feature (170)..(170): n is a, c, g, or t
  misc_feature (238)..(238): n is a, c, g, or t
  misc_feature (330)..(330): n is a, c, g, or t
  misc_feature (361)..(361): n is a, c, g, or t
  misc_feature (1151)..(1185): n is a, c, g, or t
gaggttatatgttttccccagccaccccatggattcattttttcctccccattttccccccatggccgtatttaagtagggagtgtgatggccccagcatgaaanttgtttctgattcagctatgagctcagatggcctcaacatacattctcaaagaaatgtgccatgnttaaataactgagagtgtgctaaatctcatctaaaaaaaggaggggagaggggctggggaactcaggnccacagtcatgaaaggatgaatacaatttctaggtttaataggttcaccatatcgaagtctttgagaatccaatatggaatatcaattattntgcaaaaggtagagaaagcagttctcaactnttgcaaatgaaatacagtggaaaaacactgttgtatatattccaaataattagtctcgatttcaatgctaacaaaacaacaggaagggtactcgtgagcatctcacggttaagtcagaaatgatcggttcacacacgtctgatttcagaagtacaacagcaaggtgcagcaccatagacacatcggtttcggctgttaaaagatggatcgttttaaaaactgtgttttccttccttaatttttggtcagtgaagctagcacttgtttgctgaactgtggaagaactgcaaggtcacacacattattcatgataaagcaaccgagctgacgagtctgtgcttaattcaagaataaccagtaggagagagagaaaacacaaggagttaaccaccatcgccggtgctctctcaaaggaagaggggttaacagatgaattcacaaaggtaggcagatctatacagaacactgaatgccatgtgtaaatcctcatgaaactccagaaacaggaacaccacacaatgtatatactttgatttacacattccgttacaaaggaaaaaaagacaccattacagctttgtaactgtgttaactgcaatataaaccaagtccagagtttggcaggtaactaaaagagggttatcacttaggttatatagcaaaagtgttgatgtatattatatatagtagtataaataataaaaaagtattatttaaattagatcacagtgctgcattacccggccgtaatggccgaattcccgggcatatgtccggtaccgtcgactgnnnnnnnnnnnnnnnnnnnnnnnnnnnnnnnnnnncgccgcttcctcgctcactggactcgctgcgctcgtcgttcggcttgacgagctagcgc

SEQ ID NO: 147031 - DNA, 670 bp, Homo Sapiens
agcttttgaaggttttccacatggttcttctttccttggccacggccaataaggacattgacttcctcgtcaaagctgtcacaggagatagcgagaatgtccaaatactcaccataattctggaaccacctctcccggatcaggcttccattgctcacgatgctcacgctgggcagccgcaactctactttgcagaacctcaccaacttgcccaggtattctccccggtcttgaagaaatggctctccacctgaaaagttgatcttctccataccagcttccttaagcaaaagcaatcctctctttgcttcctcaaggggcagcacaaaggatgttttggctgtgtggaaacagaagccgcatttgtagttgcactggcgagtgaagtgatagttgacgctggttggggtggtgggcagaggagggtcctcttcctcctctttggtctcatctggccctctcaggaccagctgctgctttctcctcttggtagctagcagccagaaggttgccctcagccagcagaacagcgggaccaggctcctccacagagagctcagaggttgcctgaacacactcaagagcttcccagcaaaagcagcaggtgtaagcacccacattgtggcagatgcctggagcagagcagtgcctgtatgccagggactctctt

SEQ ID NO: 147032 - DNA, 744 bp, Homo Sapiens
cgtgcacctattcaaaactagctttaaagtgagctatttttaaaccttcataaaaatattcatgattttattagtttgaatatttctacaagattcgggtgggcttttcctttaggtgaaaacagctatccactcctgtggccttataactcaggaaatgctggggatgcaaacgtgcaaaaggcagggggaagctgcccaggctgagactggagcagctaggagtgtgcttggggaacgggagctgagatcccggagcagaaatggtcagccgtgctctggagcaggcctgtcggagccatcaggatgccgggactagcactgcagcttgcggatgctgcgggagatgcgcttgaactctctctgccccttctgccaccgcttcaccgaggtgatcaccagctccccaccctgtttctgtcccatgaccaggtagggcgcgttgatgtcgttcatctcctcacaggtgcactgcaagctgtctttgagccacagcaccgatttcttcaggtccctttcggacacaccgttcagcttgtaaatggtcttgctcttggtctcccaggatgattttggtatctcggttgatgtaggttatctccttcacttttattttcagtgcaaaatcatttttacaaagcgtttccattatgtcgttgtcatcatcatttttatttttgcaggcttcacataccccggccgtaatggccgaattcccgggcatatgtccggtaccgtcgactg

SEQ ID NO: 147033 - DNA, 1040 bp, Homo Sapiens
cgtgttgtatatgggacagggtacacaaacttctccggattctggctgagcagggcattcttaatgtggctgcgacccaccccactggctccgatcagcaccagggtcttcctcttgaatgcagggagccgaacgactttcttcgtaggaaacaacatccaactgatcaaaaatcgagctgtgcttggccagatatttgtctttgtacttcttcttcttcccaaagggactgcagctcggggcttcgctaggagctgactgagccatacttgccactcgccattcctgcagctcaggggaagggatcaatcctgctgactccttggaggagccttccacccgtccctgccaccaattgctgtcatccttgttgataatctggataatgtccccagtagcaaacttcagtcccgcctccttgcaagggatcagattgtcctttttgggatcatagtcaaactgcgctctcatgaacatctgtagtgcaggaagacggctttgctggttgggaattacttttaatgagatcattcctttggtttctttcatcgccttctgcagctgatccactgaatgatttgtcacatttgtgccattgatttctaggatctcatcccccacgtgaagggagccttgtctatggatcatgccaccatgaagaattctggccaccgtacaggactgtttttcattcagcttcagagtgattcccatgggctcttctgtgaccttctcaaactgtatgagtcgcactttccgcacctcctgtcccttgacctgggcagggctacctggggcaggagacccgttggtgtacatgtcctcggtcacagtattcaatggatgcgatacagcctctggccgactacgcttctgcagcaaatgctccaggtagaggtcggagagcgccgtgtgcatgctgcccccactctcgccctcgctcgccttgagggtcatctcgcagaagctggaacactggaacgcaagcctcgtgccgattcaccacccagcctcgtacctagcctatgtggggtggcgtt

SEQ ID NO: 147034 - DNA, 1008 bp, Homo Sapiens
  misc_feature (277)..(277): n is a, c, g, or t
ctttgtctttaaagccttacccttggcttcaacaaccttgcccatggaggcatcccatcacataaacatgtaatcagttgtatagcattacaacttgaagcatttctttcaacaaagatcttcttgttttttgcgccaccttggtatcaccaataatgaatttcaaaaattttcattgttagagtttctctactccttcagaacaatgatgacaggatccatttctgtatagcttccataaaatggaattcttgctttggtagcattctgttttatntggtcataagcccctgctctgaatgctgtctgcacatattacaccaggtcttccaacctttcctctggtaattatatgctagctttgcacatgttgttgttttaccactcccttgcaatccactaacataatcacattttgttttcctttagtgggtgtccatgccttaactccagggtctacaagcttcacaagttctttaaatacagcatgctgaatcattttttcttttgttaagaccagatgccatctcttcaagatcaatagcagacttaacattttctcttagttgcttcactagtttaatattaacatctgcttccaacaaagcggtacagacttcttttagcatagcattcaatacctcttcattgataatggtggcattgctcaacgagcgtaatgctgatgttatttttcttccaaggtctgctagaaccatcttgacagctttaagatgtacttacgaagaactcgcaaaagacaccgctaaagccgtggccctgaggggccgggaattccttagcgaggccccacgccgtcggaagaaacccaagaaagctgggagcagacagacaggtatgaccccacaacccaacttcccgaactagataaagtagggtcccaacgcccagcaccgcgtcgtcaactcccaccagctggaagaccaacggagtgccccccggccgtaatggccgaattcccgggcatatgtccggtaccgtcgactg

SEQ ID NO: 147035 - DNA, 892 bp, Homo Sapiens
agcctggggcataacctgtcccagtaaagctgggcctctccaacttccttccccaaatggcaatatccataatagcagctttctattaaagagctacatgaactgaaaagaaatgtttatggaaaggggccagatacccaggcagcaaggcaatgaggatactaaacaagagttaagtgctttcaacctctctgctctacagatcaggttaaaaactctaaacccttcaactttaggtcaaagaacagggcaaatacaaattaatgccatgcttcaaatgcagcaaccagatggagctgcaagaaattaaacactcctatagactatcacttggaaagcacagcctcttgaacctccttcattacagatacacccactgatcaaagatgttacacaattcaaactcaacaaacagaaaagagtagtggaggtgccaccaacacaaccctcttatcatagaaagagacatgtaaacacacaagagggtgatggagctgcacccagcactggatgttcactgagcacaataagcctgaaggagactacacagcagagacccaggaaataggtctttctccatatctacccctatcaaaattctgaatttgtaaacactgaggtcagcctgtccatttttagtcctgggttagtggagaaggaagttgcaaggtttttgactcccctgaaattgctaaatagggcttcacaaagaggcacacaagggtcatgagatgattttgaaataagttaaagaaattaaaagatgagacaaattttacagatgttagaggtcattccccctcaaacagacgctggccttttaagccctgcatagtcagccaaaactatgataagatccactagtcccctaccttggtactacgcaggagat

SEQ ID NO: 147036 - DNA, 988 bp, Homo Sapiens
attccggttggttttctttaagagaatttcaacattgggcctgttcgtgccactgttaaatatattttctggactttctgtgggagaaatcatcattcaaagtcattattatagaaatttgggcttatttatctcagaaaagagatcttgtttgtaaatggggagttttgtctggtatctgaatcctctgaattcccaggtgtaccccacgatcgtgtttctcatttcctggtaccaatcttactatctttcttttcagtttgtgcctttaatttcctctgcatactcctggttcttctagttgcaattccagagaatgaaatgtctgagcttgatgtctcagcatcagatatagcttctgtatgagattcttggcttggatctgtcagagatttagccttacttcttctggctcctgtagttttttctgtgggaagcacaattctagaaatacctgaaacatgagattctgcttcagacactatttcttcagtgtaagactcctttgttggagttactttcggctttttcctaacactggacactggggagcatgcaattaagatctgccttctcctagttacccttaaaatggtatcatggtgctcagacacagaataatttgactctgcctcagaggtctctccatccgtagatggttcagtcccctttggtagtgagcctgtagttctgctcttcctctttctagctttaggagttctagggattaaactttgcttcccagtggtctgtgattcagcagtagttcgggcatcagatccagtactactttctggatgcgcttgaatcccattagcagcaaaactcttttgcccggaactttcagccgacgcggcttggatgctggccttagcccgtgcagatctggtaaccaccatctttccggctccctcgcgaccaccacgacttccctcttccccggccgtaatggccgaattcccgggcatatgtccggtaccgtcgactg

SEQ ID NO: 147037 - DNA, 986 bp, Homo Sapiens
  misc_feature (871)..(905): n is a, c, g, or t
caaatttttaggccaccacccaataggtccaagcagaatccttcttttcctttggactcaattcgtcattcccatgtttcccatgattcgctattaatggcatcatgtacctccaccacctgctcaaggtcccaaaatgccaaatgtccatccttcttcaaattattctgttgtaatttcatcagttctaagatggacaccttttttaacctctgaaataaagatgcaatttttttcaatgcccagtgtcttagcattgtgtcatcattgaattggcagcttttttagatgagctataatttttaaaaatggtgtgtgtcatcattgatggcatattacatttagtgaaaagtaaatcctgtctcctcatctctaatcccactgcttctactaaggtttaagtgtccatcctctctcatttggactacttatctcctacttgacttttattgctggtatcttgccataatcagctttctatacggccacctcagttatctggaacacgagattcccttgttttcagtggcttttactgcacacgaaatgagtccagacacccccagatggcatttctggtctcagcttactattcctggtctagtttccaagcatggattttctcagggactctgcgtccagctgcagccactggacccagtgcaaataatgcaaatgatagccacttccagataagacccaggtccttctgactcagagcctttctcattccatgccctgaagctagttgttcttcctctaactccatgatcttcactatttgtagacgccctgttcaaatcccaccccttccacagttcccggccgtaatggccgaattcccgggcatatgtccggtaccgtcgactgnnnnnnnnnnnnnnnnnnnnnnnnnnnnnnnnnnncgcacgcttcctcgctcactacttcgctgcgctcgtcgttcgccttcgacgagctagcgccctatatgatagtcagtcttt

SEQ ID NO: 147038 - DNA, 1236 bp, Homo Sapiens
  misc_feature (86)..(120): n is a, c, g, or t
  misc_feature (846)..(974): n is a, c, g, or t
taaagaatctgttagatcactatagggcgctagcgtcgttgaagcgaacgacgagcgcagcgaagcagtgagcgaggaagcggcgnnnnnnnnnnnnnnnnnnnnnnnnnnnnnnnnnnncagtcgacggtaccggacatatgcccgggaattcggccattacggccgggtatgggaccactgctgtgtatgcagcccaccactgatgagaacatcataggcagtgcgtgactgtactttgaccaccagggtacaagtgcatggactggacagaaggaaaacctcagagaacctgaggatgtggataagactgtttagtgaggttctcaactcatcacaagctaccaggtattcggcatggaggggtggtgacagttatgcaggacattgacatatgatgatacagtggtcattcttacataaaatgaagaagactgtccagtaaattctatgagtttgcagtagatggatcatcaaaggatatgggtaatcttgtagtaacaggactatgttactaggaatttcactagtcctgttactaattcataggccatggagcaatataagaccaaggttacaaacccctaaaattgtctggaaagagaatgatttttttatgtactttggtctgagcatgtgattcataagtatatgacagcagatcaattcagatacatccagaagaagccatcctttattctgaaatgtcctaaccatacctgaaataaatactaagtgatgcaccagaattttcctccctgggatcaatgagcagtagcattgagagcagaaactggcagccgtggtaacaggagctgctgtggtcagtaggctctcagggtctgnnnnnnnnnnnnnnnnnnnnnnnnnnnnnnnnnnnnnnnnnnnnnnnnnnnnnnnnnnnnnnnnnnnnnnnnnnnnnnnnnnnnnnnnnnnnnnnnnnnnnnnnnnnnnnnnnnnnnnnnnnnnnnnnnagagcgaaagtcttgggacttgacgctttcgaaaccaaagggagagcaaaagcagccgggagcgcgcgggccgacctggttctcctcccttcccacggctgccttagtacagaatcttataagtcctcctccttcagaggctacaaatggtgttccgaggccaggggagtttaaagctcgatttcacccgcgcagcctccaatccggtaaagaggggccgcggagcccgaccaagtcttcctatgccttactctgctgatcc

SEQ ID NO: 147039 - DNA, 736 bp, Homo Sapiens
  misc_feature (620)..(654): n is a, c, g, or t
  misc_feature (657)..(695): n is a, c, g, or t
ggcatctctctgcatttcgatgaactgcaagtctgagccatttctgcagtcctgccaggtcacccactgtgccatcattcctggagcatttctgtcgttcctcctctaactgaagcttcagttttctaatctgtgacagtagttcttccttctctccagcaagttttcgtagccttacatctaatggcccttctcctgctgactccaagacctgagcagcttcctgagacacaaccagtgatggctccagccactggttcatgactgacatcaccattgggagtgccaatcggggattataactaagccatgtttctcaataagctcatctctttgccgcaggccttctttaagttcttccatcttatgctgcagcacactacacatatgtttctgcctttctaactcctttgatttttcttcattttctctataaaattctgccatctgttcctcctgctcttcaataacatccttgagtgtgtctacttggtagatcaaattgttcttctcattgtctcaactgtgcattggaaaccatggctttcttgtatttttcttccaccttccccggccgtaatggccgaattcccgggcatatgtccggtaccgtcgactgnnnnnnnnnnnnnnnnnnnnnnnnnnnnnnnnnnncgnnnnnnnnnnnnnnnnnnnnnnnnnnnnnnnnnnnnnnnctatcacgacgtgcgccctatatatcgacattgaggggggc

SEQ ID NO: 147040 - DNA, 1154 bp, Homo Sapiens
ccatcatgacctcctacagcatacattaatttctttaacacacctacacctgctccactccgcctggtgctcatttctgctatataggtccactcatttgttgtagcattatagcattctactgtgctaagacactgacgtgatgctccatcataacctcctacagcatagagcaaacctccactacacccacaccaacactgctcctccttgtattcatgggagctacatgaaaccactcattagactttatgttgtatgcttccacagatgacaaacctgtactcccatcaaagcctcccacagcgtataataatccatttaacacagcagcttcccaagtgctttctgcggtctctcaatgttagcaacgctggtccactggtcctttcaacaggttcgtagggaattctacagtgcgaacttcttaatgagccattaaagccaccaccagcaaaaacaagtccagccatgtagaccatgcctgccctgcacctcctggaaggcaactctgctacttggtgccacctttcttctttaaagtcatagcattccacactccggatagcctttggtgcttggcccccaaccaccaccatcaatttgggaaggttcatgggtgtcctcagccgggtccggacactcttcattaatatacgctgctctgttggcagcaaatggtacttcattgcttcaatgaggtaatcctttgcaagcactgctattcttgaccaatgcttcctcttcaaccctctgaactaaatattcccgaggaagcaaaggtaaccgtacatgttccatcagtcgggccataaactcttgcctcacatccttgtcatggttcacccatgctattactgcttcaaataccttctcttctgaagaaatggtaagtttgtcacttgagattaagctgcacacttgttcgatgccaagattgagaaattcttcactaagtacaacatctgcaaaatgttgctctgtacattttcttctgtaacctgaatttctgcagtgtaaacataatcaattagcatcctcagggtccagccatctacctcttttattctaactctctttgctcggctctcactcatctcacctcccggccgtaatggccgaattcccgggcatatgtccggtaccgtcgactg

SEQ ID NO: 147041 - DNA, 1051 bp, Homo Sapiens
  misc_feature (939)..(973): n is a, c, g, or t
ctcctggtccgagaataaccttcagagaaaattgggttgatcctgaaaacagctttcagggccttgagccccccacattcttcacgcccaggccctttggcaacactggtggatcttgggcaagggagacaaggttgcccgcggtggtgcagcgtggaacctgtgggcacgcaaagtctccatggccgatgacaggcacgtccccccagcccacctcctgcagcccctggaccacgtccacacagcaggcccccgccgcccacgtgacagcgcggatggcccccggctttttcccaacagtgtctccttcagctctttcacgatggaagcgtggccttcccagatgagggggtcatcaaaggggggaatgtagacccaacccgggttgttcttcgctagggccttggccagctcgaaggcttcatccgataactcacccaccaccttgactgtggcaccttcattcttgaggcgctcaatggtgagagcaggtgtggtgctgggcaccacgatggtggcggggacgccgagttgcctggccgcatatcgcagccgccatgcctgcgttgcccgccgaggagcagacaaaatgtgcacagccttgcttggcccacctcttgcagaagtgcccaatgccccggatcttgaaggagccggagggctgggcactgtccatcttgaggtagacgctggtgccggccattttggacagggccatgctgtcacggatgggggtcttcacgtgcaggggttctccagacatcattcccggcaaaggtgatgggtctgagcaggagtcagagccaagccagcgagggagggatcaactgagtagatagcccacgaagagagggggctgaggacgggtggacagtcttctgaatggtccccggccgtaatggccgaattcccgggcatatgtccggtaccgtcgactgnnnnnnnnnnnnnnnnnnnnnnnnnnnnnnnnnnncgccgcttcctcgctcacagactcgctgcgctcgtcgttcgcaaataggccgctacgccctatatgatctatacattt

SEQ ID NO: 147042 - DNA, 965 bp, Homo Sapiens
  misc_feature (489)..(497): n is a, c, g, or t
  misc_feature (845)..(879): n is a, c, g, or t
  misc_feature (883)..(924): n is a, c, g, or t
tctgcctttcccccttatcctaactaagcttcattaccacttccatccagagcttaactagggaaataagcagtaatctaactctatttagacccgaacttgttgctttagaaactctactagaagatttaatagttagcactgtgcaaacctactttgctacaagtggatgttgctctgggttcaaaaatcatgtaagtcgtgacttgaacatggatagcatgacaatgagtgatttgtgacgtgaagtctctgcttcccatgaaccatgagtacggttgtacccagattgattccaacatgaactagagtttagttaagtgaaaatcgtctggttcaacagatttcaccacagttccgaatctacaacttgaccactggaaactaaatgtaagtcgtgctattttctgttcaatgaacagtaattactactatactcttatattctaataatagggaagacattctgcaataaaatgcttcacggcnnnnnnnnnctgctccgtcaatgtagcttatcttctcttacaggtaatcacccagctgttaagaacgatcacaatcttcacctgcactgagatcactgattttgctgctttcttgaatagaatacaggattcacccaagcaaccaggccttattacaaatggaatcttttaacccagggctcaccgtaagtctggtggttagaataaagaattctttatttatattcagattatctgcttggtggccaagttttaatctaagcccatttcttcctgccaagtagcaaagagcgtgtccttcgtttgcccggccgtaatggccgaattcccgggcatatgtccggtaccgtcgactgnnnnnnnnnnnnnnnnnnnnnnnnnnnnnnnnnnncggnnnnnnnnnnnnnnnnnnnnnnnnnnnnnnnnnnnnnnnnnnaatgaaagacgctagcgccctatagtgagtctatacatttt

SEQ ID NO: 147043 - DNA, 783 bp, Homo Sapiens
ttcccctgaaggttatgttcaaaagcaggtcagggtgtgattaaatagattaaggaaatatactgtgctgtttgataattcttcactgttgtttgttaaacaatttgcacaatttgcctcctgccatgtggtattaaaaaattctgagagaatcacaactatttgcattctatctgccattaagagacttctggcacaactctgactctctgaagtattccccgcggtctcggctgatgttgtccatcttgctgtcgacctgttggaagaaggggtgtagcaggtctgacagaggcgcacggtccgggcgtctgcgcaccagacaccctgtcagcctctgcgctgctgttggcgaagtccagcaggagctcccggcactcaggatccagatccggcaggtccgggggcatcgacagaggccccagccctccaccctgcaggagggacacgggacaagtcctccacctccagcaactgctgctccgacacggaggtccgtggcaagaccctatgccggacctgctgccaaacggcggagcgcagccacagccagcaccgaccgacagccaacagccccagcggcagccacgtcggcaaccgacacccccgctgcactggctgacgaggcccaggcttccatcaacgggctcacacacctacagggacgcacctccgcacccactgctccgccaccagccggcaccgcggaccgcccccgcttccgatttccgcccccgaccgtaatggccgaattcccgggcatatgtccggtaccgtcgactg

SEQ ID NO: 147044 - DNA, 695 bp, Homo Sapiens
  misc_feature (465)..(465): n is a, c, g, or t
  misc_feature (576)..(610): n is a, c, g, or t
cagaaatatatagcattactgtggcagggcaagtgcacccaatatggcagtttacaaggagcagaaagcaaaggctcaagtgaggggcctggtcagagttcaggctccaagtgttctagaataagaaactcaagtcaggcaccgtggcacatgcttataatcccatctactcgagaggccaaggttgggggatggcttgagcccaggagcttcaagtccagtcttgatgtcttcccttgagagacagggcaatatagtaaggacttgtctcttaagggaaaaagcaatgaaagaaagaagctcagttttccaaattagtagcaaggactccagaaatggcttccttactcctgcctctgcccaagatttaggaggcaaatatccctctgctggcttactagcaacctgagtcaggcaaacaattttatgaaacactgctacagtttagtttgtttgacctcctcncaatctcatgttgaaatttgatcctcagtgttggaggtgaagcctaacgggaggggtctgcccggccgtaatggccgaattcccgggcatatgtccggtaccgtcgactgnnnnnnnnnnnnnnnnnnnnnnnnnnnnnnnnnnncgccgcttcctcgctcaactgacttcgctgcgctcgtcgttcgctataacgacctagcgccctatagtgagtctatcagtctttt

SEQ ID NO: 147045 - DNA, 931 bp, Homo Sapiens
  misc_feature (822)..(880): n is a, c, g, or t
cattaccaaccgagcacccaacttcatttaaattaaaccatcttcctgctcataaagtattttttaacccttaaattgttcctaatcgacattaaattcaatcattgtatctattatccacttgctagatacctccctttccagaaagaacctaagttactgttctattccccattacaaagctccatctcaaccaccacatgattcatggaaagaacatcagacttagcaccagaaaatgtgttcaaatcaagatagtaacacttcctagctatacggtcctagaggaaatccaaatgtttctaaccttagtttcctcatcagcaaataaggataacaatgttgaccttaaaggattgttttgaaaattaaataaactaaatactcagatgtaatgtatacattataaagcaccagaaaaacgtaagaccagtattattattcatgtacgaagatggttcattcattattcaatgaatatttattaaacattcccacttggcagactttttgcttggcagtgaagatacaaagtcaagaaaagacagccatcgcccgtgaggggcctacattccagtggaggaaccagaactaaaaggcggaggaaagctctgggtgcttgggagccagaaggagctcctagactgggtatgggaagtgagggaggcctgggagcctcctgtggggctgacaccagaaggaactccatcactacagatccagcaagagtaaataaatctgagtccctcctctgtggggtggtccacacactccacagtcctgggccttaagctagttcaaagcatcccagccccttaagtnnnnnnnnnnnnnnnnnnnnnnnnnnnnnnnnnnnnnnnnnnnnnnnnnnnnnnnnnnnccccggccgtaatggccgaattcccgggcatatgtccggtaccgtcgactg

SEQ ID NO: 147046 - DNA, 680 bp, Homo Sapiens
  misc_feature (379)..(431): n is a, c, g, or t
  misc_feature (661)..(661): n is a, c, g, or t
gacaatttaaagttttattgagtaagcttcacaaatgggcattttaattgacatatccaggtgctcattacaaatcagagaaccaaagcttcattttaaaagttaaagcaatcttgctgctcataaagtattttttaagccttaaatttgttcctaatcaacatttaatttcattcagtggtatctatttatccattgctagatacctccttttcagaaagaacctaaggtactgttttattcccattacaaagctccatctcaaccaccacaatgattcatggaaagaacatcagacttagcaccagaaaatttgttcaaatcaagatagtaacacttcctagctatacgtcctagaggaaatcaaaatgtttctaannnnnnnnnnnnnnnnnnnnnnnnnnnnnnnnnnnnnnnnnnnnnnnnnnnnngttttgaaaattaaataaaataaaatactcagatgtaatgtatacattataaagcaccagaaaaacgtaagacagtattattattcatgtacgaagatggttcattcattattcaatgaatatttattaaacattcccacttggcagactttttgcttggcagtgaagatacaaagtcaagaaaagacagccatcgcccgtgaggagcctacattccagtggaggaacanaactaaaaggcggaggaaa

SEQ ID NO: 147047 - DNA, 933 bp, Homo Sapiens
  misc_feature (201)..(211): n is a, c, g, or t
  misc_feature (803)..(837): n is a, c, g, or t
  misc_feature (840)..(884): n is a, c, g, or t
cgtgtgttgttaaaatgagatttcttctgatccactaattttcgagtgaattccataaatctaagactccatttcaaaaaaggttgatcatttgtaccctggtttttaatctcacatatattgtaaaagtaccctatttttctaagtggaaatatagctccccaagtaaataaatggaattaacttacttaaacgatgttnnnnnnnnnnncttgtattttgacatattatagatttttaaaagaacactgtgttttgaaatcacatggtcaatgatcataaactgatcgatatctttcatagttcatttacggacatgagtcatgtgatttacataagaagactaggaaatcttcagacagggatgaaacatgataaagataaccttcagattttaacttatggttgaattctttcaaacattagtcaatatgtcaattagatataaacatacggtaaagcaaaataaagaagtcatttttaaaaattttcaaaatagtgtattcaggataatacaggtccagttttaaaatattttaaaagccttccacatttaaaaggacaccgcctgtaactataaattctagcacttagtcatgatagccatatacttcaacaaaacattttacattaagaaatcataagatatattgaaactattttcacatttgcctacttttcctttttctgttttccttttaattatacaaatgctttatggaataactgtctggagtagacaagaggaaaagcccggccgtaatggccgaattcccgggcatatgtccggtaccgtcgactgnnnnnnnnnnnnnnnnnnnnnnnnnnnnnnnnnnncgnnnnnnnnnnnnnnnnnnnnnnnnnnnnnnnnnnnnnnnnnnnnnaagagctagccgggctctctttatttaaggtggaggtctgtgttccaac

SEQ ID NO: 147048 - DNA, 1031 bp, Homo Sapiens
cgtataaacaatacgtttacatatgtttcacattcatcattatctcttgttctattactgtgggttttccacccctattttctctcgtactactaatctctttttctactccacttttttattctcacccgttgttttatcctgctatttgtgctccctctgttaaatattgttcattaatagattgttgtcaccctccgtttgctatcttataggctaccctctttctcactgtcgtatatagtctctttttgatcgtggacaatttcttgcctctttatcttgtctgctatggtgtcctctttacttaatttcatttggtattttgtaaaaaattttccaaaatagtgtattcaggataatacaggtccagttttaaaatattttaaaagcctttccacatttaaaaggacaccgcctgtaactataaattctagcacttagtcatgatagccatatacttcaacaaacattttacattaagaaatcataagatatattgaaactattttcacatttgcctacttttcctttttctgttttccttttaattatacaaatgctttatggaataactgtctggagtagacaagaggaaaagtactatgaacataaatacaaaaataaaattctggtatccattaacattctctgttatggagaaacattattgcaaatgtgctaatattttcatcacaaattgtgccagtacatgtttaaatattagacaaaccacttggcttgaaaaactttgcatataaaaagtcaaatattctaccattccaggtcattaggaggtttcatgtgtccataaacagatgatattctcacatcctaatatatgagcataagttaattttgggtatatgtaaatatttagattgtggttactgtaaaatagtataaagatttccttatattttatgtaacaaatgaattaagttctttagagcgacgcgtgggtcgacgatatcccgggatatccggccggtaccagcctgcttttctgtaacactggtctatacgtccta

SEQ ID NO: 147049 - DNA, 928 bp, Homo Sapiens
  misc_feature (144)..(144): n is a, c, g, or t
  misc_feature (258)..(258): n is a, c, g, or t
  misc_feature (825)..(859): n is a, c, g, or t
gcttataaatttcttattatagcattacacattaggagcaacatataacaaagatgtaatagtttttttaaaaatagctgttgcttcagaaagtccatataatctattccccccaatataattttatactttgcactaaaccanatagcttatggaaaattagtattaaatagctaaacacagaaaacctacagctataaataacataaaatacagtttaactttaatgtgatgcttaaacaaacaaactatgatgcnatatgaatcaacttcattaattggacaagtcccagtgaggcacaaattagataagcactaaaccctccatgatgtgcaagtgaaacctccaaccccagcaaggttctttctgttcttgggctatgtccaattccattccagaaaagccacagtttttacatggttcttgacttttttactgaggagacgcacaatatatttcacccaaagtctgttttggatttgcgcacacagacaactttttctttgtgtgaaagatgatagcattgatgtcacagccttcattggccagctgccgtgtgaagcccacaataaatttaggatgaagaatacggtctgtgtatccaagacagcagtcaaagttgcttgctgcttctgattcgccgcagaggtggagtagcagcactgacatcaaagcagccaggagcaaactcttggtacagcacatggtttttagctcaaagaacagatctgctcagtgttgagtacccagttctttgggagtgctgttatatccccggccgtaatggccgaattcccgggcatatgtccggtaccgtcgactgnnnnnnnnnnnnnnnnnnnnnnnnnnnnnnnnnnncgccgcttcctcgctcactactcgctgcgctcgtcgttcgctcctacacgctagcgccatatagtcttc

SEQ ID NO: 147050 - DNA, 535 bp, Homo Sapiens
atttacttcacaaatgaaaggggcttagcttttccagcacagtgtttggccaagtcaggcttttcatggagttctggttgaggagtccaaatttggctctgtggctgactgcagaatgacttgtcatcccaggtccttaaacatgccattttgcctctaggtcattgattttccaatcataaaataaggagactaacatttccttgtgtgtgtgtgagatcgtagcacctgtaatgacgtctatgccttccataaccgacacaccatccaccccaaacattagaaaatgcatgcggtaggaaaaaaatagtgagcttacatcaactaaacttgaagctggactctgaaagattattttattcagcttcaggctttaagccttggaaataatcttagatgcaaatggtggtagaattttcagaatgaaagcaattgtttcattcactggtgtcaacatttcttttcatgaaaattataacatttaaaagaactcccattgccctacaatgagcatttgatcctttcactacttaag

SEQ ID NO: 147051 - DNA, 622 bp, Homo Sapiens
cagtcgacggtaccggacatatgcccgggaattcggccattacggccggggtataagtgacttttaaattatctgctctttggattatcactactgctactagccgttagaatattggtttggataatggaaagttgactagagctacaaaatctgtttcaaaataaaagatctgctcaaacaagaatgtgatgatcacttgctgtattgtacaacaaagtcaaactgctgttagactcaggtgacagtcaaatgttggaggctgtgttgggatgagttgttacaaagcctctttcattcttcccatgccatgtccaggagttcttctctgttaaacctgaagagatgccagccctcctcagaggaaaggtctaaagcccctcgactagtatagtagttgatagaagcctggttccaaatgacgacaagaaagtgcatgcagttacattgagttgtgatggctatctgtttaaaaacaaacaagcaaatattactttcatttgaaagtataatcttcgttaacacatatattttattgaaggtctactctatgcaagacactatgtgtgaataatacttccaaatatagtagttaccttttgaacttttctatagctgtaaa

SEQ ID NO: 147052 - DNA, 1032 bp, Homo Sapiens
ccgtactctatctctctcgcccttgtgtctttggtccgccctgtgcatgtgggcccccgctgtggtctggcgtcgcttcgtcctcttgggtgtctctttctctggccacgaaggtctgtcccaggggcccgtgcggacgccggtgcacccgtcggggtcgccgccccacccggcaatgttgtgtaagcaaggcttgggtggccaccaggctcctttaggtaagatagcctgccgtcgtgggttttcagctgcgcagttcccgtgtcacttcggtttccagacgcctgttgtgaacgtccttgagcggacgaggagcttttggtatctggagaataacagatgtcctggaccagtgtgttgcctatgcagtctttatcaagtcctctacttcatggaagtcctggggtgggctggataaagaggcaagtccaggacgatgccgtcctctgctcgtctggcccttagttctccactcagagtgacaaacgtgagcgtgctattcatgttttttattttgtgaaacagcacagctgcagaagccagggtggcatggccacagagtgggacctcactcgctggtgtaaaccatctcagtccaaagcaggaactttgtgcaaagttgtctgtcgggtgcagttttcggataaaagcagtttcagagaggttcatctcccttgcaattttctgatgcatgtcttcatccaattcattttctaggaggcaaacagcagcaggattcccacgaaatgctcttgctgtgaatgcatctgctatgaaaataggaagcttcattttccttgcaagctgtttttgcaagttctcaaaattgctggtagcctgctttacgtcttcttctgggctgacgggactgcgagtgacttctgacgcagattcccaagatgagagaggctggagctgggggaggaaagccaatggcgacgaaggtgctcaactcccaaatccaggacaaaggaggccgacgcgtgggtcgacgatatcccgggaattccggaccggtaccagcctgctttt

SEQ ID NO: 147053 - DNA, 526 bp, Homo Sapiens
  misc_feature (244)..(346): n is a, c, g, or t
  misc_feature (399)..(433): n is a, c, g, or t
  misc_feature (437)..(481): n is a, c, g, or t
ctccgtgttcaacgtgattttctttatcttcgaccggatcagtaaccgactccggacgggagcgagggcactgcactgagcttttcagtccctgttgctcacacacagcatccagttcacaagggacgggcaacgtggacaaagaacgaaagacaacggacaaaaaactgaagggacctgaaattggagtttccagcgtggactttgaatacatgacagagaaaagacaaggttcagaatgttnnnnnnnnnnnnnnnnnnnnnnnnnnnnnnnnnnnnnnnnnnnnnnnnnnnnnnnnnnnnnnnnnnnnnnnnnnnnnnnnnnnnnnnnnnnnnnnnnnnnnnntgcccggccgtaatggccgaattcccgggcatatgtccggtaccgtcgactgnnnnnnnnnnnnnnnnnnnnnnnnnnnnnnnnnnncggnnnnnnnnnnnnnnnnnnnnnnnnnnnnnnnnnnnnnnnnnnnnnaacagcgaggcgccatatgaggtatatatgttgtgaataagctgg

SEQ ID NO: 147054 - DNA, 808 bp, Homo Sapiens
  misc_feature (693)..(727): n is a, c, g, or t
gtctactttcactaaaggtgtgttttccatgtgttatttttggagttggtgtacacgaaaccttttcacatattgggggcttaccgctccaaattgctactgatcctttaagttcaccatatagaatttcttcaccaattaagtaataaccctcattacaaataaagtgcatctgataaccaaactcgtaagtcccatttgcagggactgcttggccatttaaaggatcccgtatatatggacatgtttctctataacaggcgtcatctgagacaggtagccatgtatgattccgatcacaaatagtatgggtggcaagaggaggtatatagaagtatcctttgtttacacttataatctactcgttcaccaatctcatagtagggttttggtttaccaatgagctccatagcttcaaatgttggtggctcctcacaggcatcggagaaggagtacagcagcaacaccatggccgccagaagcaacccaggaaagcgccaggaaggaaagggacactcgcggcggccgggaggctccatgcgcggcgcggaagacgctgttattttctccggaggaaagcagagaaaccgagagccagccgagcagggaagtcccttctgggtccagatatgggacgcaacccccggccgtaatggccgaattcccgggcatatgtccggtaccgtcgactgnnnnnnnnnnnnnnnnnnnnnnnnnnnnnnnnnnncgccgcttcctcgctcactacgtcgctgcgctcgtcgttcgctgctaagagctagcgccctatagtgagttatacaatttt

SEQ ID NO: 147055 - DNA, 964 bp, Homo Sapiens
  misc_feature (72)..(106): n is a, c, g, or t
  misc_feature (893)..(901): n is a, c, g, or t
tagactactatagggcgctagcttttgcagcgaacgacgagcgcagcgagtattgagcgaggaagcggccgnnnnnnnnnnnnnnnnnnnnnnnnnnnnnnnnnnncagtcgacggtaccggacatatgcccgggaattcggccattacggccgggctctcgtttgaggttttttaagcctagttaacttttaagacaggtttccttaacattcataagtgcccagaatacaggtgtgtagtacagcatataaagattgtacagctctgaggtttttccgtattgacttggaacatttgttttgtgcctgtcgcttgccacatggccaatcaagtaatgcttcacgctttctagataattgttatcttagagattatgccacgtgaatgtattttattgtacatatggttaagctgagtaattcatattctgtattgtctatatagtcaaatatagacatgtccaccgaaaagattaagagtttttaagcttcgtagatgctgctggtcatgaagaattaatttgtcactggttataagagtaatttttaaggttatttctaagtgcatatctttaagtagttttcgtaactgagagtcatagtggagaaacttagtggtttgttgtaaaaaagttgtgtttttttgggctgagatacttagaatcagccatccagagggggcggttcagggaaaatacatgatactttgtcagatattgaatagtgaaagtaaaaactttgggtcataagtaatgaaccaagagttattttctgatgtttaaaaattagaaatttgcgtttaggttgtagggtttgaaatttttgggtaaaagattctttaataatcctttgattatcacggtctacatttgtttattttgtcttagaaagnnnnnnnnnaattataatttagataatttacggtgaggtaaatttttcaaggtttaggactttgaaattgtg

SEQ ID NO: 147056 - DNA, 966 bp, Homo Sapiens
  misc_feature (590)..(598): n is a, c, g, or t
  misc_feature (850)..(884): n is a, c, g, or t
atttttctctaccccacctgtaactctataaattttgtctcctttcccccaaaatacaacagttgcacgtttctttggagccccctcataagttccccccgcccaactctctaacaattgccgttttttccacacccacaacatgtctgcccatacacctctataaggatgccaactctctaagaacatcctttataccaacaatctaacacgctaggcgcgccctgggtgaaaaaggaaaagttgctttcttagaaacatccacccacgcgttttgtcgcgttaaacaccctctctgatacgcacgctttccacaagactataaagatatccaataaacattatccccgaaataaaaaaggttgttatacctactgctcccccttttacacctgcaccaataccacccttttatttataaaataatggcccctatactcacgacttcaatatttatttccccacagaaaagatacatagataacagattaccaaaagctatctgtacagtcgtctctatccacgatttccccttcttgctagatatgtcaagtctgcctatgtaaacaacatatgcaggttcttaaaannnnnnnnnccagctctattcatgacattcaacagagctctttatatggaaatgttaaaatacaataaacttctaggagattctatttacttttgacatgggtgcctagttatttcccttatgtctatcagatatagaggcacaaacttctgaatttaagctctgtaaggcatagtagcaaacttccaatttacaaataaggaattctctcccggccgtaatggccgaattcccgggcatatgtccggtaccgtcgactgnnnnnnnnnnnnnnnnnnnnnnnnnnnnnnnnnnncgccgcttcctcgctcactacttcgctgcgctcgtcgttcgcttgcgacaagctagcgcccttatagtgagtctatacattt

SEQ ID NO: 147057 - DNA, 868 bp, Homo Sapiens
aaaagcaggctggtacggtccggaattccgggatatcgtcgacccacgcgtcgtaaaaacaaagtttactcatgctttatattatatgtgatgcaagcgttataagcgtgtgccactggcctcctatgttgatgcttaggtaatggaggcctgtggtgagttttatggtgacttgggcatgtcttattcaaaaacaaaaacataaaacacagaaacctttcttcagcataccaaggcaagcagccatttcatgactcacttaacacattgcagtgtaccagtttacagatgatttttcccttttgcgtgacatggcagttctaacccccagagaattccttatttgtaaattggaagtttctactatgccttacagagcttaaattcagaagtttgtgcctcatatctgaaacaaagggaaataacacacccattcaaaagtaaataaatctcctagaagtttttgtttttaacatttccacataaagagctctgttgaatgtcatgaatagactggaaaaccaaacattttaagaacctgcatatgtgtcttactagcagatgacaactacaaaaggaatctgaagaacacgtaaaacttgtatccaaaagggagatacactagccaggcctattttaacaaggtaatcccggctaaggggacactaaacttataggactacacaaactatcttgatgtccaagtgtccgaccggtacttgtcacattatacctgacaactgatgcaaataaagtgcatcagtaaggcatggcgccaaagctatacgccggattcggcacaccgccttcgcaacacaactatggcaaccggtgccacgcaacgccaacacttgttgtactccaaacc

SEQ ID NO: 147058 - DNA, 1143 bp, Homo Sapiens
  misc_feature (48)..(48): n is a, c, g, or t
  misc_feature (1023)..(1057): n is a, c, g, or t
  misc_feature (1060)..(1103): n is a, c, g, or t
ctgtgtaactgccaagttatttgaatcctccaggccctcgatttcctnatatataaaatagggataatagtacttacctcataaggatatcgtgactattaaatgagttattctatgtaatacataaaagcacttacagtagcatctgccacataagtcctatctaaatgttggctgctgttatcattaagatggtggcaaactacgtgttttaaagggaactaaattttgttgtatgtctacaacaacctgtgtgatcgatgtttttaccgggttctcttagtttaacgcttctcaattctttgagacaaggattttatgcttactttctgcctattttgcagctaaggaataggaagttctgacgcagtaaaaagtagtagactctcaatctgcaggtgactgaagctaggagaggttaagtcactcgacgcagcggcgaaggctgggactcgaacccgggcctgacccctaagccggcgctctagactagggctacgacgatttaaacagaaacatctagagaccgagcggccgtgttacgacgggaagattcggtgttccctgcacctcatgtcccacgacactcttaactgctactgccgccatttgtcgtcttctcgtttagttcgagcagaattatatacaagttcctggcccgaataccccccctgtccctctccatccccacagcggactccatcagtcctacagccctacacctggcccggtcgagtctcacagtacctcgagccaatcgtcgtcgcacgcgcatcagcagaaagtcccagcacccgagagtgaagctgaagaccttcacgggtaatacaagaagttaacccatccgttgggcatcctctggactgttctgtggctccgcccgcgccagagcatctctcgctttctcggataaggatctcgccgccgaacatgcgcgtcgccttgcatagtctcgcgacgcgcctccactcccccggccgtaatggccgaattcccgggcatatgtccggtaccgtcgactgnnnnnnnnnnnnnnnnnnnnnnnnnnnnnnnnnnncgnnnnnnnnnnnnnnnnnnnnnnnnnnnnnnnnnnnnnnnnnnnntgaacctagcgccctatagtgagtctatacaatggctttg

SEQ ID NO: 147059 - DNA, 1221 bp, Homo Sapiens
  misc_feature (139)..(139): n is a, c, g, or t
  misc_feature (148)..(148): n is a, c, g, or t
  misc_feature (282)..(282): n is a, c, g, or t
  misc_feature (367)..(367): n is a, c, g, or t
  misc_feature (1118)..(1169): n is a, c, g, or t
ggaattgccaataccaattaaatattgggaagggcttattatggaggcaaaattcctcttttttcggttaggacaaaggatgaaaaaatacttctggccggttaaccatttttataatttttaggacctttatgatttntgaacaccntacggtaagatatttttaaaccttgaccagttacatggggagatttacatcaagaacccagcactatggagtcagaatttgcatggagttctatcttcaaagttttactacaaaccggtgccactgggtcattnttagattcagaccattggttagtggcttctccccacagtgaaccggacagtcatgtgccacttggcagttttcaaggtatgagtntattctgtttgatgttctgtcaatttctccaggggacaagcagccagatggttaattgcccttccttaagcacagacgcactcacagaaaaggtgtgaggaaggacccgtccgaaagaggagcctctcacagagcaggctgagccgctgtacagagtctgagattgttgacccactgtattgtgcctgaaaagtctatttcagccacactaaaccctgggcttcctcacttagcatatacagcggtggcgcagtggtgggaaatcactgacaggctacaaagaatgtgtttcagtggcacttgtctcattggtgcttacagaagcagaagagatgataatcaggccggagttgcagtgatggacagatgttgcacatatatttcttgggcaaccaatgtcttccactccccctccatcagttgacccattctcaagactacccctgcaccgcatgccaaggcacagttcctcaaccaatacacaaggaagccacgacactatcgaaacctctctttgagctgatacgaagacactagtgttcagcttcttaacgttgaacccatgcctggaaggtgatttgtcattctttcctcgagatcttgacaagtcttattgtcggaacattaacgttgatagatacaataggcagagtcaggtctgtccagttactaataccatcatagagactgagtcactgtttgatgtcaccgccgcctctttgcaggatcagccatcattattattttatannnnnnnnnnnnnnnnnnnnnnnnnnnnnnnnnnnnnnnnnnnnnnnnnnnncccccggccgtaatggccgaattcccgggcatatgtccggtaccgtcgactg

SEQ ID NO: 147060 - DNA, 923 bp, Homo Sapiens
  misc_feature (294)..(294): n is a, c, g, or t
  misc_feature (440)..(440): n is a, c, g, or t
ccttttccccctaattggggttccccgggaaggcctaagcccccttttggggaagcccccggttaaaaaccggaaatggccccccaccccctttttgggtatcgcgaccagaaaaatattggccccccggggttcccggggagggtcaaagaaaacgggttgtttcccccttggatcccgttacttgggggcccttccggtttcccctttgtaatgccggaccacggtgggttcccgtggtcatttgccggcgtggtggccgaacagcccgtgggcgccgtccccggttggccngcagcagcaggttcccgcactcggggtagcgctccaggagcagttgtgcctccagccggctcaccttcaggaaagcacgagggtgtctccagtgcacggcgcgccctcctctttggccaagacttcagacatcatgtataggtgcnccaggaagcagggtcaagtcggtcgggacacggagctccaccaccgttaagatgaagcctttccacatttcccgacactccaaggtctctaccttgaacttgatctcctgatcccggagaatcaggctgaagtgggtgccagggtcacgtgagcttccccagggaatctcatctgtgagtttctcaaatgctcccaagttgagcttctccacgtgctggaagtcccgattgctattgtagaaataaatggtgagaccctgcaggcctgcccagaacttcttgtaatcccggtcacagggccccttcttctctagaaagctctcatagtagtgtgaaggcaggacacccttaggcttggggacacggggtggcctcagggcagaggccatgacggagccagggtcttccgcctggcctctccttccagtgggtccccggccgtaatggccgaattcccgggcatatgtccggtaccgtcgactg

SEQ ID NO: 147061 - DNA, 669 bp, Homo Sapiens
tataaaggttctaaaatgaagcagatttaatgctggaatgcagaatcctaccgtgggtataaaaacccaaaagtgaactataaatatatcttggttcagaaatctagatagatagatagatatctaaatcacttgaagttggcagtactaaataaaatatcagcaccttttagctaggttgcttgaagggccaagcaatgagatgaggactgtcctaattcagtgcccatgctgaaaattaattatatataaaacttctacttattataaggaggccatggagtaagtcagaaataatttttcagattcaagcataaattaaagaaataacacctaagctcccttgcttatagcatacagaaaagacactggcaataatctataaatacctggatgcatgtgctgctctcaaagttttgtttttgttttgaagttcatagagtaggaggaaagaagagtactaaatgaaaacattttagatggaatggaaaagagtttggctcttatatatttgaacaataagatagattgttacagcagctacactggttgccaagcagattaaaacaagctagctgcacatagttcaaatacagtttacctggcataaatgaagacccccggccgtaatggccgaattcccgggcatatgtccggtaccgtcgactg

SEQ ID NO: 147062 - DNA, 607 bp, Homo Sapiens
  misc_feature (532)..(566): n is a, c, g, or t
gttccatcgaaaagcatatgctgggtgtttttagggtgaccattaagcctatccatcaactcagggagaactgacatctttatgcagtcaagtctttccatccgaggctgtggctagaccgggaagcccccaaaagttacagtggggccaatatgccaacaccagggtggccattgccaaagactgagggcctggaatgacatacacccctgttcagatgagcaagccctcctctctgccctacccagatgacaacctctaccttgtatcatgcacctgagttgctctggttcccaccatctcataattactctaattctggagccattttgcggggaggcccagagtctgtgtggtgggaatggaaggtacccaactgcgacctgccacctggtcttcccaggagcatcactggcttgtgatgcccaggccagggccactctgctgctggacaacttggcagagcaggtctctgctgccccccggccgtaatggccgaattcccgggcatatgtccggtaccgtcgactgnnnnnnnnnnnnnnnnnnnnnnnnnnnnnnnnnnncggccgcttcctcgctcactgacttcgctgcgctcgtcgtt

SEQ ID NO: 147063 - DNA, 892 bp, Homo Sapiens
  misc_feature (773)..(807): n is a, c, g, or t
  misc_feature (810)..(848): n is a, c, g, or t
agtgcagcctgcctctgcctggggtaccccagctgccgaaagcttccactgcagcatctccaacttctcctctttcaagcgctggcggagcttctcgtgccgtgcacgggcttgctcctgcgcaaactcagccaaagagaagcgacggcaagcactgtggcgaagggccatacccagagtacagccaccacggctgggcacactggtgaagccctggcagcgggggaagtagaagacggtgatcccatcaaaggctacacggcctgggcgctcccggcgagcccgcttcaggatagacaggggggtgaaacttctggggccgcagaagtcacggtcaggcaggggcatctgatcccaggggccttcctcctctgagtcccaggcacgggagacagaagagcttggggagcaggagcgagactggcacccagaggaagaggaggaggaggagaccgaggagttgtcctcatccagctggtcaaatttcctcttcaacagcccagtcatggtggtgccggacgtgctctggggtctggggacagacagcctgcaatccggacgctcgcggaggacaacgacgcgacccgcgtcccggccggggacgccccctgcgccgcgactctgtgcgctcggcccggcagccgtcggtccagccgcccctcgctctgcgcgtccggcagcggcggcggcggcgggagactgcctgcgcccagccccgcccccccggccgtaatggccgaattcccgggcatatgtccggtaccgtcgactgnnnnnnnnnnnnnnnnnnnnnnnnnnnnnnnnnnncgnnnnnnnnnnnnnnnnnnnnnnnnnnnnnnnnnnnnnnnactatgacggacgctagcccctatagtgatctatacgatctttc

SEQ ID NO: 147064 - DNA, 970 bp, Homo Sapiens
  misc_feature (615)..(671): n is a, c, g, or t
ttgtgtactttggggtaggaatgtaaaaaggggaggaagtacataaataatgcccaatcttttattaggcaagtaacttacaaatgtagtagagaattcctgaactattttttcaaatgtagaccatagattcagctaacttcataatccacatcattggtaacaatgggtttagatcagagtatggtttactcatcactgttagtaaggtaacttaattgtcatgctcacgctaaggagtacgacactaataataccactccgtatgtcagctaataagataatgaaataacaaacatgttaagactagctaacacatgggagcaatagccaatgtaaatttgtataaagtgagaagtattcaatcttctacctaacaatgaagcctagacctgccatcaatatcccagctggcaggctgagcagtttcatcaacatcaccaatgagtcaccagaactgaacaaagtgaccaacaatgaggactgggaacaaagccaatttgacctaaaatgaagtcatcatttttgcataactctgctgggttagacatgtgcgaagaacagatgccaaactgccattatatattaagcttacacaggagcaaacaaatgatnnnnnnnnnnnnnnnnnnnnnnnnnnnnnnnnnnnnnnnnnnnnnnnnnnnnnnnnntgaaactaaccctgccagcgtttcaataattccctgagatgggctaaaggaatgtgggaggttgtgacatatataccaattacaaatgagtggttctttcagagacttgcaagctgatgttaatttatgacatagaaacagcttgtggtttcaaacacactgcagtcacttttttcacacgtttaccttaagtgagctttgaccctatggaagaaagttgctttagggcattactggattttcattcataactctatgtacacctcgtgccgaattcgccacccaggcctcgctaccta

SEQ ID NO: 147065 - DNA, 1746 bp, Homo Sapiens
  misc_feature (188)..(197): n is a, c, g, or t
cttgggtggttatttttcttttctgtgtccttccccaacagcagttggaattttcttttgaacacaaagtaaattaatgtttatactgttttttcacctgagtcatgtaaaaggtgactcctttcattttaaaaagttatatttaatttttgggggccttaattaaaatttaacatttaaccatgtgnnnnnnnnnngtaaacagtctacatgtcaacaaatggataagggttaacaaaggcaaatactgacttcatttgtgttttaaacacgattatatgaatttttcttttttaattaaaaaaatgacataaaaccattcatataggtcctcttctctcaactgctttgagatatagctttaaatatgggtagatcaagacaagtaatgttggtaatctcttatcttgcatagaaaagaaaaaataaaggaacttatttccttcctaaggtctcagctagtttcttaagtcttttcttcagctccaatggaaatttctcatagcacttcttacagactggcttcatgtcaaactccacaaaacttattcttgagtgttattttagtgttgcaggtagaacaggcaaagcagttcatgcaccaggccttattaagagcagagaccacatcactttctataacacgattgcagtggaagcaaacatcaccaaatagctggttatagtgagtttcacaatacgccaggcctttcctctcataatggcgatgtccaagaaagggtttctcacacttggcacaaacaaaatgctccacatgccactgcttgcccatagcgttcaccacgcgcccttcgatgggccgtcggcaagcaccacagatggggacccccattttaatcatggcatgggaggccagtatagctccccttttcagctccccgtgcatcggcagtcaggtcttttcccgcagttggcgcagttgaaatggtctggatggtaggggtcgttcttgaatatcagaggctgctcatcgatgatagcatggcatttctggcagatgtatttcccaaggcttctggctttctcacgattatgacaggggcgacacaggtgtctcccagcattcttgacaaacccgatatctgccagaacttcctggcagaggtcacagcggaagcactccggatgccagctgttattcatggctttgataactcggccaatgatgaattcaccacactgatgacagcaaggggcaaagagcatctgaaagtcatgttcacagtactttcttccttcaaactcatagaagagtccttctgggaactgctggaagcactgagcgcacacgaaacactgctcatggtacagctccccattactgttcacgatcttctcagcgggcgcaaagccgcccttgcagcgctcgcaagtggcgctggccagggcgttggccatgttgaatttcgcataaaagtcacagaactccttgtagactttcacgtcactgtgcctgcgctgcagtttggaaacagccctctcgtcctcggtcccattggcctcgtggacagtgttaagggctgctcgggggatttcttcgttctctgggataatgcaggggcgcgctcggcctgagaaggccatcgtgggtgcttgagagctctgagcacagggacgagaatggcaggacacagagccaggagaaacaatatccaggcctccctgcttcccagcccccggccgtaatggccgaattcccgggcatatgtccggtaccgtcgactg

SEQ ID NO: 147066 - DNA, 823 bp, Homo Sapiens
  misc_feature (404)..(413): n is a, c, g, or t
cagtcgacggtaccggacatatgcccgggaattcggccattacggccgggaacaaaatacttctttaaggttgcttttgctgtttgactgctgtctacattcgtaaaattctattttgtgaattggtagctaaatcccttactaccctgacaccgtggtatctactgtatttcttttcaaggtgcaatttgcttcagagttccagtcagctagattaagcaagaggctccagaagaaatgtttacttgaattttgcgcttcctttcttgatagtttcctatataaaatttgtcattgaacaagagcaaatgctgaagtattaatgaggcacaaatgactgtgccccattagcaagaattcaggaatcaatacagacagtattaaattaatagcttaagtgaagnnnnnnnnnncttagtgaaaatgtattagcacgattaaatggcaaaaggacttataaaaggcaagggcattaactttcagtcctgcacaaaataaaaaattcctcacgatctccacttttaccagtggagtttgtcttagctgacctgtcgtctttctcttgaaggaggattgtgtagacttctctagcttgaatattgcaacatagcatcttaggtctagatagggatgctaatgccagttgtagaagtgtgaaaaaagcaccttgtattgtagtaatgtatttcatatcttgggtttcttttactgactgtttataacactcgattgacaatagatttgactgtttttaaatccatactgttaattattttccctccttgttgggaattcatttagtttaaccatgttgtttgttgga

SEQ ID NO: 147067 - DNA, 1113 bp, Homo Sapiens
ggcgcagcgcggttgccaatggtcgctccctgagaggatgccgctcgtggtgttttgcgggctgccgtacagcggcaagagccggcgtgctgaagagttgcgcgtggcgctggctgccgagggccgcgcggtgtacgtggtggacgacgcagctgtcctgggcgcagaggacccagcggtgtacggcgattctgcccgtgagaaggcattgcgtggagctctgcgagcctccgtggaacggcgcctgagtcgccacgacgtggtcatcctggactcgcttaactacatcaaaggtttccgttacgagctctactgcctggcacgggcggcgcgcaccccgctctgcctggtctactgcgtacggcccggcggcccgatcgcgggacctcaggtggcgggcgcgaacgagaaccctggccggaacgtcagtgtgagttggcggccacgcgctgaggaggacgggagagcccaggcggcgggcagcagcgtcctcagggaactgcatactgcggactctgtagtaaatggaagtgcccaggccgacgtacccaaggaactggagcgagaagaatccggggctgcggagtctccagctcttgtgactccggattcagagaaatctgcaaagcatgggtccggtgccttttactctcccgaactcctggaggccctaacgctgcgctttgaggctcccgattctcggaatcgctgggaccggcctttattcactttggtgggcctagaggagccgttgcccctggcggggatccgctctgccctgtttgagaaccggggccccaccaccccatcagtctacgcagtcccaggccctcgcctccgggagcctttctgcaccagttggaccaggccccgagtcaaggactggcccgaattgatgggaaccccaaaaaaaggcttggccccggggggattgttcccccctttcctgggacacccaaacaccttgcgggtttaaccgcgccccttgaccctggggagaaactaaggtcccctttgctccctcagttttatttccctacactccaaagtgcgatccccccaatggggagattttgtccgcaactggttacaagatggttctccttccgactt

SEQ ID NO: 147068 - DNA, 558 bp, Homo Sapiens
tttccagaccaaccaattcacatcgtgtatgttccttctcacctccatcatatgctctttgaactatttaaggtatgatacttcacaataattgaaattttacctttttaaaaaagggtttaacagttataatttttatctcctttattattcgccacaaaaacagaagcctcaatatcttttcccaagaatgcttctaggtcctcctaagagaaagaaactatacagtcaatgtttgacaaagtacatgtagctcattgtagcatcaacacatatttgagaatgcatcatataattcatgatgtatcaatgctttacagccaagaggaagttcttattattttttcaggtgcccattaaagaactagtcatttattcattcattaagagaggtcatggggtgaatgtttcagtgaatgaggccttgttacctccacccccacaggctggtcctactcctaactcagcagttcaggtccagaattcctgtaggtggtatggctccattcagagtccagaatgtgctaagagcacagtcagtagttccttcaatcatct

SEQ ID NO: 147069 - DNA, 1102 bp, Homo Sapiens
ttctcgtacatggtcccagacagtaagctctacacaggcttccatcagatcctcaggcctgaacccatcatacaccatagtgtggttgaagatagggttggtggttttccctacagctcttgtcttctggcgacttttcctacttgtatctggaaggatggtacagcaaagaccaggctacagaactgttgcagacagagtcatcaatactattaccatttaacaaaagaatttagatgacttccccttagcagtggtagatcaaggcattccttcacccagatgtgcacttctccagttgtaggaagctttttaccagggactggctctgggacatactggagagctagtttcatttcacctctgttttctgcttcaagggcaactggtgctgtcttccgcttcagagggtaccatctcaattgtttattctgtttgttatcccagtcccatgtttccaaatcaagttccacctcccctaggaaactattgcgcttaaatgtatcccgatgccaaatggacaggttcaatttctgtgtctttaagatttgtttttcaattttataccgcagtatttcgttatacacaggattcaaggttttcttcactacgagtgttttcttcttgcccattttgcctttgtctggtagcaaataggcctttacatatgggtctgaacgctgtttttttacatccgctgctgctaagtccttacactgggccacaaaaacatgcaactccttcagtgactccacatattcaattgcaaactgaatatttcctttaacttccagattgccaaagtctccactataaacactcatcacactgccactcacagaagacaaggacgtcatgccagaggagctgctaagattggttaaagagctcgggctcttcttgtgtctgctgagctggtaactgctttctgatgctgtatctgtttctctgtcatcactctcatcttggagaaatgctggaacagacttgctcatccttttgagtttgtcagggcccacgcgtccgcggacgcgtgggtcgacgatatcccgggatatccgaccgtaccagcctgctttttgtaacaaacctgttcatatta

SEQ ID NO: 147070 - DNA, 1186 bp, Homo Sapiens
ttttccgagaatctttctttttataaaacacagggcgggggcacgcgaaggcagctcgggcgcggcggacggcgcggctcacacgaagatctggatgcggtcgcggatgggctggcggcagatggggcaggcgctgagcgcggagccgcagggggcgcatgcgccgtggccgcactggaacacgaggcggatgtggctgtcgatgcagatggggcaggtgatgcgttcctccatctgccggtagcggctctgcagctcctccaccagctggcgcggcgggccgggggcgggggcggcgctcgccacctcagagccgtctgggcgcagtttcttgctgacgaccacctggcacctgatgcacttcttcatcctgcgcgcgcactcctcacacacggtgcggtgctggcacggcgagaacagcaccagcagcgccagctcggagcacaccaggcactcagcggccttcgggccccggcgcggctcccacgtgcaggttccgtcacggttttgggggttcccgagcgtttgcctggggcccggggccgcgcccccgcccgcctgccgctcccggaagcgctgggcatcagcccctgaagggccattgagcacgcgaccctcggcggccaggtccagcgggctccgtaccgcggtggttggtgtagctcacgtcggcgccctccagcgccaggaagcaggcgaccgccgcgcccaccagtcagctccgcgctgccggggaggcccgaggcctgtagcctggacagcagctgcaagggccctgggtcccccccggccccatcagccaccaggggcagcagctgatgacgctgcagcgccacgtgcagggctgtgtccccctcctcgtcctcggcgttgacactgcacccagcgtccaccagtagcggcaccagccccacgtgggcctgttgcacggcgagatgcagcaggggactgcagcttccggttgcgcacgttcacgtcacagcggccctcccggatgaggatctgggccacctcgcggtggttgttgagggcagccagatgcagcgccagtgaagccgtcctccttcttggcgtccaccagctgccgcgcccgagccagaatctttctcacagctagcgcgtgacccttgagggaggcatggtgcagcagggtgaaacctggctgttggtggcggtaacatcgatg

SEQ ID NO: 147071 - DNA, 1133 bp, Homo Sapiens
  misc_feature (285)..(348): n is a, c, g, or t
ttaaaaagatgaaagaacgattgacatttaagcgccaaccttctaaagtcaagaaaaacggtcacagtagcctgttccctgagaggtttcaaatgtgtcgtttacaacaattgcgaaagagtgtcaatttcttgtttccagaccacggtgggaaaattcttacacgggcatagcatttgtggaagataaccccagactcctgagattctgcctggatgtccaaagtcacgatatttcttggcagcaacctgtagtcccagctacttcaagagttgggttgggagnnnnnnnnnnnnnnnnnnnnnnnnnnnnnnnnnnnnnnnnnnnnnnnnnnnnnnnnnnnnnnnntgacaagagcaagaccctattttaataatgttcagcttgggtaacaagctacaatcagccagtgttagctggtccccatccaagaatagtcttctggaaactgggggttcctcagcactgtctggatcaatttcatccagaagtggggtgtttaagtagtcatccagacgcttgaattctttgagcagagatttttcagaattcttatttgcctcctgtttgtgtattcttaatgtatgcagaaaacttggcaaagaggttacagcccaccatcaaaagactccttgtacttgggactcaggtgagggtaccttggaggagccagggtttgttctaaaaactcctcaattttaatgaagtctgttttcaactccttgttatacaccaggaacggaggattggtacctggggctaagtcctttagttcttcaggctttctggtcatgtcaacagttgtcacattaaatttaactcctttaagccagaggatcatgaaaaggcgttggcaaaagggacagtttccaatactctctccatcacttccagcctttacaaaaagctcaatctcagggtccacttgagtgccggtccgcaggcctgacatctttgtctttactgccagttgtcagcctcctgcctcctgtagagtccacaatacttgtagactcttttctcaattttatccaaagactcaagtaatgttggtgctttaagaagaccgtctagcttgtagaccccggccgtaatggccgaattcccgggcatatgtccggtaccgtcgactg

SEQ ID NO: 147072 - DNA, 1216 bp, Homo Sapiens
gtggtgtgggtcttgtggtgtttgtgtgtcttctggtcgtttgttttgttgtccttttgttctgtgtttccgggcgtcctgttttcttttctcgtgtcttttcgcttttgcttttggggttgtttccgtcccttctgtgcgctatgtgttatttgggatcgccatggtgttcagttggcagttttcgcatttcgatcccggttgcccccacgtctgatgtcataggagtctgatcgagtctcagtgccaattggtagacccttcagtacatcgttggtggatttcctgtgtaccttggtcttgtttctcctgcgatgtacagtactgagccagatataagatggctttggatgcctgcagaagccctgagctaacaagtttattttccaccttctactgcccaaggcccagtatcagacaggtacagtgacaccgcccccacaataggcaattgatgtccgtgctttgtgccataattgaccctcataacagggagcaaatcatttcattgaggaacttctcagaaaagccggccttttgcaaggtttcaagaagtgttcgattaagcattccaaggaagtcatctcctcctagagcatgaagtaatttttcgacactactgaaggcatagtcatgagactggtagcggtagatcctcatgaacttgtctaacacgtcctctacccacatgtgcatacggagggattgaaatccatagcgccaaactaatttaatcacgttaattatgaaccagttgctctcctcaaataccagagtctctccattatatatccccagtaggccaccagaggcctgaacagcagagagacccaggtctttgacaaaacgtttcatgtgcagatttaaaggatggatgacagaacctcctgcctcgtattcttgcccctgcaccatcatggtagccaggcggcccccgacctcttctctttcaaacaggtctatcttcacatctttcccaaatttctgccgcaggtaataggctgctgaagtgccaccaattccggctccaataatcgcgattttatctggcggagcacgcagctcggcgccctcggggcatccgcagctgcacagcaacagccacaaccccagcagcgaggagacgagctccgcgacgacgcgccccatggcctccacaagctctccccggccgtaatggccgaattcccgggcatatgtccggtaccgtcgactg

SEQ ID NO: 147073 - DNA, 894 bp, Homo Sapiens
  misc_feature (779)..(813): n is a, c, g, or t
cgcaccttcacttacctgcaccgtttcctcttgaactctgaccattagatttcttccttaggagtggatatgatgtacatattatctgtaatgcataggatggatttcaaatattattttacttattagtccacataatcagttctaagatcatatatataatacttattaaactttattggagttatttgtgtagctatttctctgcttttctatttagattgtgattaccttgaaggcagacggtgtaatttgccatacacattcctccatgcaattactgtgcttggtttatgactgaaagcactcagtaaatatctgcagcgttaatctgaatctagattcagtgaagaccgcaacatggacctctgtttaaaaaggactaattcaatgatggttttgggatacatcgagtgctacttgctaacagaacactggttttcctggaagcaatgtgctgggctaaaaactctattttccaaagtcctctctgcagcttcgggtagccattaaacacagttctggccaaggagatgtaggtaaacattactgggtggggcttccaagaaaactgttgttcttctgataaaagaaggtacaaattcagctgacagaagcctgtggttttttgcccttcctcctttttccttcttccagtttgtaccacagatatggatacgatgtttggaatgatagagctatcctgagatcatgaagatgacatgaaccccggccgtaatggccgaattcccgggcatatgtccggtaccgtcgactgnnnnnnnnnnnnnnnnnnnnnnnnnnnnnnnnnnncggccgcttcctcgctcactacgtcgctgcgctcgtcgttcgctatacgcgtggcgccctatagtgagtctatcagttttt

SEQ ID NO: 147074 - DNA, 977 bp, Homo Sapiens
  misc_feature (868)..(902): n is a, c, g, or t
gcatttggattttcttggttgttcgccatgcaaatcatttagaatatgggcctaagttcttggtatgtccttgcaaaactggcagttgggagctagagtcttgatcagatttaggtttagttgtttctgaatcactgaatatatcacatttggtaagacacactatgtatagagtcagttcaaaggactcttgtcccatgaaactcaaaatgcctttcttctctatcctctgagactaacctacttacctaaaaccctgggcattctcttttctttgactgctgatggcataccaccaccaataatcagcttatcatctataactctctgtgtggtaaatgggggagggagtaagtctccctgtggggtcctcaaggatcactccaacatagctgtgggaattatacttggagcaggtaaatgaaattaaaggatttattatactcaaaggctcctagagagggaggcaaggtacaccatgcagggaaccatatgggagaagcccaaagaatgggttcagccaaataggtataactgatagagtgaggacctgtaggcaaatgcttgtatcagggctcagcatacactgacatcgaggtacgagtggactctctgtttgatagacttccagtgaatgacccagggaatgccatctgggaggtgggatcagtacgcatgcgtccccctcggtccattcttgttatcatctgagaatccaaggcagtaagtcattgcgccgatctcttaggatacagatacgacacagggttcatcactacagtatctgggcccgtcgagccatcacgaatggtctaggcacgttcttgagggccgaattcccgggcatatgtccggtaccgtcgactgnnnnnnnnnnnnnnnnnnnnnnnnnnnnnnnnnnnccgccgcttcctcgctcactacttcgctgcgctcgtcgttcgctcaaaaaaacaagaccggctttaggccgccca

SEQ ID NO: 147075 - DNA, 1123 bp, Homo Sapiens
  misc_feature (1046)..(1080): n is a, c, g, or t
agtaatccccggctgtaggacctaaatggaccctccaagcctggggagaaaaataaagggaacccatatctttcattgagctgattggagttttcaagggtgttattttttatagctttgtgaaaaagttttataacctcattggaaagagtcccccattatgccccaaccattattctttccggtaaataggtctctatataagaaattaaccgggaaaggttcataccaggcctcaattcccacagctgcagtcactatgtagactaaagaaatagtcacctggctaatgtcatatccccatggcaggaaaaagaatctcctgtgttatactttttcccagtgggacaggatgaaagcaaactaatctacccatagcaggagataaagaacaaaaacactgacaccagttgatcctcttccaaagatggaataaacagtcacaacaaagtaaacacatgaccacctatccaggccatgatcaaaaagctcccgtaagggagtgctagaattggttctgcgagcttgctttccgtccacaccatctagcgtgtaggctacgaagttgaggatgcccactacaatccaaacccagtcaggcacgtgcttgtgacctggtgctgaggcataaaagtcaggatcaaagtatgccattagcagaaaattgaatacgtccagcagaaagccagaaaaagttatcagattgggcgccagccaagtaggaaatacctttactatagtgttccagaatggatgcctgacatacagagaaagtggattggtatccacagcactgtacttgtacttatccaagccagccagctgctccgggttcacagtattctgtagcacagccatgacgacccgagagaacttgagctgcctcacttcggcatgcgacgtccctggttacaaggctgtgacacatcagagcaccacatacggctgggcaaggatggctaagactggcgctgcccgagaaggtaggagatccccggccggtaatggccgaattcccgggcatatgtccggtaccgtcgacttgnnnnnnnnnnnnnnnnnnnnnnnnnnnnnnnnnnncggccgcttcctcgctcattgactccgctgcgctcgtccggtt

SEQ ID NO: 147076 - DNA, 924 bp, Homo Sapiens
  misc_feature (438)..(489): n is a, c, g, or t
cgtggactccccactactggcatatatctgcccttatcacgtgacgcttaggacatctttagggacgaccccttgtcgtctgggcgccaacaagtcttctgcgatcccccaatgttgcccaggccaattgatcaggtgcaacttcctggggtttctatagggttgtaaaagtgttgtgtggacgcacgtcaacatttaggagcacttaagtagttacctggccccgggccggtggccggttcaacctggatgccgacaccttggggaacctcagccggccaagatcagctgagttcaggacgttccgggctcacgcttgaccaacatgcgaggaacccggttctacctgaacgatgaagaatttagcccagatatggctggccgcatgccggtatatcccagcaacttctggagctgagcaaggagattgcttgaatnnnnnnnnnnnnnnnnnnnnnnnnnnnnnnnnnnnnnnnnnnnnnnnnnnnnaaatgtttagctaccatctcagctctctgcatagttccagggctccttgttccttgcgtccagacaggtaatcaggtctggcttagagacagcaatacccttcacccggagaaaaccaggtttctgtagttctctcgacatcacatgcctatatcaattctgctgtgcagtgtccaggcattgccactcctccaaagagaattctatgccacatccataaatgtcaatggtcccattgtctaggcttccagtgggtcctggcgtcgttagctgtggatctcccaatacctgcatggtaacgaggccacagaagctgggcctctaggagcagaagacacagagcagtgaagactacaccaagaagctccggctgccgccagagacccccggccgtaatggccgaattcccgggcatatgtccggtaccgtcgactg

SEQ ID NO: 147077 - DNA, 798 bp, Homo Sapiens
  misc_feature (489)..(542): n is a, c, g, or t
  misc_feature (723)..(757): n is a, c, g, or t
tttttaaaatcattctcaagtctttaattaaaatccatagagcatttaacatgaacagatgtttaaactctttcagtgactctcatatgtttaaaatcctttgcacagcatcgtgaggctaacttcatgctagaaatctacggataacgtaacaccacaaaaatacattcggagtccattccaatgcaagtttaaaacactttaattggcagacaatgtaaagatatttaaaatcaaaaattacaaaatgagcacataaaagtcttcccttttgaatttttaataaaatacttctctgtataagatctaatgaaaaattccagttacttataaaatagttgagaaatcaattaagatatgtatctatatatgtatgaattacacttttgtttaaatgaacagaatgttgaacacttcaatgacagcacagcatctattactcacattaaactagatgaaaatactcaaagaagcagttggatacaggcnnnnnnnnnnnnnnnnnnnnnnnnnnnnnnnnnnnnnnnnnnnnnnnnnnnnnncaacctccccatcccccaccaaacccttaactgtaagggaaagaaaggaagagagaacttaaagctaactatggaccaaattctcattctttttaatgagaaacagcatgagaatttggcttcaaattaccccggccgtaatggccgaattcccgggcatatgtccggtaccgtcgactgnnnnnnnnnnnnnnnnnnnnnnnnnnnnnnnnnnncggccgcttcctcgctaattcacttcgctgcgctcggtcgt

SEQ ID NO: 147078 - DNA, 375 bp, Homo Sapiens
  misc_feature (203)..(233): n is a, c, g, or t
gttcaagtatttttagaacctctgttcttgtattcatagaccctgtgcaaatctctatgtggaaataccaaattatccttaccgtgcattcagcaaagttgacgttgaccgcaaaggcaaggctaattatgaaacagttagaggagaggtcacccaactttggtcccagacctgttttgtatggccctcaagctaagaatggnnnnnnnnnnnnnnnnnnnnnnnnnnnnnnnaataagaaagaataacatgtgacataggccatatgtggctcacatagcataaaacatttaccatctagctcttcatagataaagtttgctgactatgaattagaagaatatatatcatataaatattacgagaccttagcgg

SEQ ID NO: 147079 - DNA, 1048 bp, Homo Sapiens
  misc_feature (611)..(670): n is a, c, g, or t
gggtccggaattcccgggattgcgcctgcgtagccggcgggctggcagtgagactgactgcgtcggggttgagactgggtggatgaggctcaccccggcggggagaagggacgaggaggggcggacagcggaaggtccgggagtgtccgccataaagtcgtttgaggtgaccgttgcgtaattgtgagtctgtgagagaagatgtgaagtatggcctcgtcccggtcatctgggcgtgcgggtcccgggttttgatcgcgcgtttgtgtagttttaacttctagtcatggcgaatgatcgcaggagagcacagactggaccctgctacgatctctcttggagtggatcagactgatgatcaccaacaaccaactcattcccggataaggaagaagagagtgtcacctacttcagtgtggtttcaaccctacttctgcatcttaaagacactgtatggtttcagcagtagtgcccctgttcattagtccccctgatgttttcattcctcatctcatctttttcttagcagcattcaatgaatccttcattctagaaacactctatatctttggttttcatgagaccattctcaccttgttttgtcctgtgannnnnnnnnnnnnnnnnnnnnnnnnnnnnnnnnnnnnnnnnnnnnnnnnnnnnnnnnnnncacaatgaaaatttgctatcttaaccatgttgaaatgtgcagttagtaaagtacattcacattgtggtgcaagccatcactaccatccatcactagaacccttttcatcttgcagatctgaaactctacccattaacaacttcccatcttcccatccccacagcttctagcaaccaacattctactttctctatcagtttgactactctaggtacctcatatgagtagaatcatacagcatttatccttctctgcctggctttattcacctggataatgccctcaagggttcattcatgttggtagcatgcatcagaaactttcctcccctttttaaaggctggatataaaatttcctgggaaaatgtttaagattcc

SEQ ID NO: 147080 - DNA, 793 bp, Homo Sapiens
  misc_feature (585)..(736): n is a, c, g, or t
tttcttgttttctgtggtagtctttattattattttttagctattgatacatagcatggcagcaagattacatcagtaatgtaatataatacagcttttttcattgaagctttgtaccttactatactctaggctatttggagtgttcccccacttgcactaaagtacaactatgatgtctctactgcctctcccagtgaaatataaaaatattgcactacattacagatatagtttacaaatgtcattagcagcattactgagctttctataattgtggtctacagagttaaatacttttaaaacatgagtagattcttataaaaccaaagttttgcattatttcaacagctctttcaaatgcatcagtttcagcaacatgcttgggtatcatgaaaacttccatggtttaatcaataaacaccagctacttacaagtagtccaccttccaggttatcaatggtaagttattttttataaagtggttacacactgagcagattgcctcaagtgtaagttatggaacaatactttagctttcagggaatttggtgtgtaaattcttctatagcagtgttcttttnnnnnnnnnnnnnnnnnnnnnnnnnnnnnnnnnnnnnnnnnnnnnnnnnnnnnnnnnnnnnnnnnnnnnnnnnnnnnnnnnnnnnnnnnnnnnnnnnnnnnnnnnnnnnnnnnnnnnnnnnnnnnnnnnnnnnnnnnnnnnnnnnnnnnnnngcgcctgcccggccgtaatggccgaattcccgggcatatgtccggtaccgtcgactg

SEQ ID NO: 147081 - DNA, 1347 bp, Homo Sapiens
  misc_feature (71)..(202): n is a, c, g, or t
  misc_feature (1228)..(1262): n is a, c, g, or t
  misc_feature (1265)..(1304): n is a, c, g, or t
aaagcatgatttacatgcaaaggaagcactatcagatggtgataactagtcatggttatgttcgcactccnnnnnnnnnnnnnnnnnnnnnnnnnnnnnnnnnnnnnnnnnnnnnnnnnnnnnnnnnnnnnnnnnnnnnnnnnnnnnnnnnnnnnnnnnnnnnnnnnnnnnnnnnnnnnnnnnnnnnnnnnnnnnnnnnnnnttttttatattttattctatgtcatccgattcttcatgaagtgtgacattagttttgaggtgacccttaacccataactgtaaaataggttgggttagatgagctaaaatgctaggaagaagaatgaacaacctccacaatgtaggacctctttatttagaagagagtacactctaggttttattagagacaatgccaagtaaatgaaaaacagcagcaaactgggaatgtttctaaatgtttaaaaaaagtcaaatgagcaaaggagggtaacagaaaaaaagcagaaaaagttctattgatatggctataagatctttgtaactataacatgcccccaagctaaaatggctgtaagatttatgtgtttggagacctcatccctcctacttcagatttattactatgggggctggagagaaatcttgaaatagggtgaattctagagttagtgaaaagtctccaagaacacatcctgtgcaaagactacggactgttgtacacagaagtagagcgaagtgggagaaagtcaatgcaactgccgttctactttattcagaatgtttgcatctttacttatgaatattttagactagtggtcccagtggtttttcctaagccacacatgtgcaagcatgtgctcctaaacaaacccagagtcctactataaatatcactttattcattctgtgtaggcaattaaataaaacattccttttaaaaccttattttaaaaactaaatatatatactggtgtttctgctaaagcccacagtatctctttattgcctcagtggtaataaccagctgctcactgtctttcacataaaaaccatcaggaacctgaagagtgttctaattctcattctactccaacctgagttctctcacctttctcataagtctaacaactattttattagtgtggtgactcccttctaagtatctcccagtatttcacatccctcttgcccggcccgtaaatggccgaattcccgggcataaagtcccggtaccgtcgactgnnnnnnnnnnnnnnnnnnnnnnnnnnnnnnnnnnncgnnnnnnnnnnnnnnnnnnnnnnnnnnnnnnnnnnnnnnnnaaaaaccgacctagcgccctatagtgagtcgtatacattcttc

SEQ ID NO: 147082 - DNA, 1455 bp, Homo Sapiens
  misc_feature (25)..(25): n is a, c, g, or t
  misc_feature (184)..(184): n is a, c, g, or t
tggcttgtagcacaggttggtcttngaatggttcttcaaatggggcttcacatttcaggcaaacctgggcgggtctcccctgaggataatggccagcaataaatattgccaagtcgctgtcatctaattccagtgcatggaacttcacagcaaactccaacttgggctccataaagtcaccaanaggctttcgcaggctctttagaaactcccttgtcatgaagccttggccctcggatatgagaaccccatctttattcatcaaggaggccagcattgtgtaaatgatctcgtggactccatatttgaggagagttacttggtcgttcaagtcaagatttacaaaaccaggaatgcttttggcatactctgtgatctcctgcacagcctccacggagcgaaactggcagccctgaaagatgcggatggccacctctttgctctgctcctgcaggggggtgatgtgtttgaacttgattttatcttctcccatcattaaggaattcatgtcatagataacgaatggtgatttgtctgttgtctttcctgtcaagatcgccctcgcctttgctttggtcagcgggaaggactttatgtatgagtcatacaaatgttttgccagggcccggaggtcagcggactctggattcagctggtcgatatcactggagatctccgccaacagcttctccttctcggcctgtggcatccgcccaaacctgatggcattatgagacatccccactgcaaggcatttctgaaaccgacagtactgacatttatttctactttttttgtggatccgacagttaagatcacatctgtcatagataagcttcaatctgattgttctccggaagaaacccttgcatccttcacaagcatgaactccatagtgaaatccagaagctttatctccacagacacgacattcaattgccatgagggagttggaaggctcttcatgaggcttattgtagagctgagtcttctcagaataataaggtggagatgcaggctccactttgattgcactttggtactcttgaagtttcaggtcatacttgtaatctgcaaccactggatctgttcttgtgaatggaatgtcttcgtaatgtggagtagaaatgctggagaagtcaacagtagtgaagggcttgatatcaaaggagtgggagtggtcttccattacggagagatccacggagctgatcccaaagttggtgggccagaatggcatctctgtgtcaaccatggtcatttcgttaaaggctgactctcgtttgagaaaatggccttgttgtatatttgtggtttagtgttggcttctttcaaatctaaggaaagggaattaagcagaatgcagaaatgcaggcttctggtcaccagcagaggttaaggcccccggccgtaatggccgaatttcccgggccatatgtccggtaccgtcgactg

SEQ ID NO: 147083 - DNA, 827 bp, Homo Sapiens
cataccgtacaactagcttgtaattctccctttgtccatttcagcaaatctccacctgtaccacatcccaggtccaaaccgtgatatcacatttttttcttctgtcgtacctgtgtgcaaaaagttctccaaatgagaacacttttcatccaattattaaactttcttagctaaaaaatacgactttgactacgcttctccaaaccaacttcctgaagttcattgtaatgggcagccactgttgagctgtgtccttcttccagattgtttctgcttttcaggaacatcctcaagtgctatttttctcttattttgagtgccatctccagtagaagatttatcttttggaacatcctcagtttctctttttcttttctttgaattgccttcagcatcaccacaatctttttcctctgggacaatttcaggatcaagttttctcttcttggatggagtgtctttcccacaactagaactttcctttacaagatcatcttcaaactcttttctctttcttgctatgtctacttgcctacagacagaagtcttttcagaaagcccagtcccagaagctgttgtgttttcattaatattgaatgaagactctgtttcagaattcactgacgcttttgcctgttcaagagacatcttttcatattcttctgcttttgcagaatttgccatttatgattacttgaacttgatggtaaaacttcatgaaccaacacagcacagccaaacgcgattctgtttgcggaaacggcggcccgcgccacccccggccgtaatggccgaattcccgggcatatgtccggtaccgtcgactg

SEQ ID NO: 147084 - DNA, 881 bp, Homo Sapiens
  misc_feature (70)..(70): n is a, c, g, or t
  misc_feature (213)..(213): n is a, c, g, or t
gttttccagcaaaattttcccgcctttgcccacattcccaggtccaaaacaggggatatcacgttttttntttcgttcgtacctttccaaaaaatctcccaatgagaaccctttccatccaattattaaagtttcttaggtaaaaaatacgactttgactacggttctccaaacccacttcctggaagttcattgtaatgggcagccactgtngagctgtgccttcttccagatttttctgcttttcaggaacatcctcaagtgctatttttctcttattttgagtgccatctccagtagaagatttattttttggaaacatcctcaggtttctctttttcttttctttgaaattgctttcagcatcaccaacaatcttttttcctctgggacaatttcaggatcaagttttctctttcttggatggagtgtctttcccacaactagaactttcctttacaagatcatcttcaaactcttttctctttcttgctatgtctacttgcctacagacagaagtcttttcagaaagcccagtcccagaagctgttgtgttttcattaatattgaatgaagactctgtttcagaattcactgacgcttttgcctgttcaagagacatcttttcatattcttctgcttttgcagaatttgccatttatgattacttgaattgatggtaaaacttcatgaaccaacactttcaatgactttgtgaagctgagattttggtatcacagaaaatcaaggtgaaacaggaaatgaggttggtggtgcctatctgatttcgaggcttgaagttgtacagtacccaataggttcacacatccagcacagccaaacgcgattctgtttgcggaaacggcggcccgcgccacccc

SEQ ID NO: 147085 - DNA, 593 bp, Homo Sapiens
tgatggaatctcactacagcttgacctcttgggcttaggcacgtcctcctacctcaagttcccaagtagctgggactacgaggatatctggcggccaggagaaatacagtggaaaatgcaaaacaacgaaattataaagcctgccaaatacttctcagaattggaaaagagcatcctgctggctttagtagaaaagtataaatatgtgctggaatgtaagaaaagtgatgtgtgaactattgcccttaagcaatcaatgtacctgcaggcgctgacccacgaatgcaactctcagccgagctgtccctgccggatttcaaacagctgaagaagtgctgggagaacatcaaggctcggaccaaaaaaattatggcccatgaaaggagagagaaagtgaaacggagcgtcagccctctcctgagtacccacgtcctagggaaggaggaagatcgccagcatgctgccggagcagctctacttcctgcagagccccccggagggaggagcccgaataccaccccgacgcctcagcccaagaatcatttgctgtttcaaatagagaactgtgcgatgatgagaaagagttcatacat

SEQ ID NO: 147086 - DNA, 845 bp, Homo Sapiens
  misc_feature (535)..(717): n is a, c, g, or t
gcttaagtacatcatcaatgaacattaaccttcagaaaattactaataagtatcctgcgaagactttgagaatctttatttagccctgtgaattccaattgaaccccattttaaagaacacttaccattttatctgtaatattaaatcttcataaattgtataagctactcataagctaagttatctggaaaataatgcacatgagctataattttactgctaagtaaagtcttagaagtgcaactgaacagctgttcatatggcttcattggaatttcaggtttttagcatcacttgtcttcctcagaagttaaatactggtaagagggcatgagaagatggaggcctgagtggaggccagtggtttgacattagcaccagtctagggcttttacttatgagtaaaagtagataaccttagagtcacctgtgagtttgaactttaaaaagaggcacggatggagcagttgtagccagccgtactgggtaactgcctgcggagttgttgcttgggtatttgtctagaacaggttnnnnnnnnnnnnnnnnnnnnnnnnnnnnnnnnnnnnnnnnnnnnnnnnnnnnnnnnnnnnnnnnnnnnnnnnnnnnnnnnnnnnnnnnnnnnnnnnnnnnnnnnnnnnnnnnnnnnnnnnnnnnnnnnnnnnnnnnnnnnnnnnnnnnnnnnnnnnnnnnnnnnnnnnnnnnnnnnnnnnnnngcctacagagggtttgtagagattagctagctctatatgccgctatagtacacttgggacataagacatttttaaagcagaaaaatttgtttgttaagtgaatctaaataagtgaaatgctgcacatc

SEQ ID NO: 147087 - DNA, 950 bp, Homo Sapiens
  misc_feature (809)..(829): n is a, c, g, or t
tgggaactgacggagtactcgagccagggctcgggtggggacagcgaggacgcctctagggccagggtcgctgttgtctccataggagaggttgcgcttgatctgggcaatcttgggggcctgccggggaccggcatcgatgctgatggagttggggtgaggggtacagtccgggaggctcctctcagatgacttacagcttgagtcattggcatcctgggtatccgagtctgtgtcccgtcgggaggacatactgtgagaggggacgctgcttcgccagtcgtcctctacctgaaccccgatggactggaatttggtagcgggactgggctcctcttttggcactggctgaatgcagtcaacttgtattcctatcgatgacagtttccttttgggggcggcctcggggtgggactcagagctggtcagcgtcccttgttcacttttcagagctgcatgttttgggggtggctctggggcctcaggggctggggcgactccaccccgtgtcacgctgggcggtcgggtactgctgtccaggctgtccgacgagttgctcaggcccgactggctagtcacctcgctcttgtggtcctggctgtccaggtaggtgtcctgggcagactcagtactgctctggactgtgactgagatgaacggctttgaagtggtgcgtggagggaccggtggcggggtcttcttatacgccactaggcatgatgaaccctcctccctcacgcagcccggcccgaggctccggttttgtacgcccgaggggcggggcctccgggttaaagtcccgcacctgnnnnnnnnnnnnnnnnnnnnngcgtcagccgcgcgcgcgtcgtcagggactcccgggccgggcaggggcgcgcgcagcccgcttggcatgtccccggccgtaatggccgaattcccgggcatatgtccggtaccgtcgactg

SEQ ID NO: 147088 - DNA, 964 bp, Homo Sapiens
  misc_feature (848)..(882): n is a, c, g, or t
gtatattccctttccccactgaaagtttggatgttgtttttcatatagtcttctgcctttctgcaggagaaaccaaagtacttttttccaatatctttaggtttcaaggtttttcatccaactttgacattaccccgagaatccattttctaaaagacaggtgttcaatgagagctggtccatagggaagtaatgggttaagcacccctcttcagtagttcacccttaggtgcgctggctactatttcagtcaacctttccaaagtaagcaaaggttcagcagctctagcatgatcaagtggatagcgttcacgaacagcaaatttaacatcatctgcctcatcagttcgaaaccttagaatatttaaaattacgtactcataatctgtaagaacaatgttccccctatcatagagctcaatgattaaatggtaagcagcttcatcacttccaaattgaaaatctacaattctatccacaccaagctgttttgcactgactaatctccgactcttcaaatgttttcggcacttcatggcaaaactagacggcatcatattcttaggccactcaaattctgttgtatgaattcgtatgccagattcaagtaaaagtgtagctttaaagtccggtttttgaagacgaataaggtatgtcttattatccacatcataaacattgtttactctcattcctagcaagctagcattcagctccgcgagtacggcgcggaggtcaatggtgctaaagcggctcttcatggcgaggcccgagggtcactaccgcaatttcctctccccggccgtaatggccgaattcccgggcatatgtccggtaccgtcgactgnnnnnnnnnnnnnnnnnnnnnnnnnnnnnnnnnnncgccgcttcctcgctcacagactcgcctgcgctcgtcgttcgctgcaagagcaggcgccctataggtgatctacattttctt

SEQ ID NO: 147089 - DNA, 1113 bp, Homo Sapiens
  misc_feature (84)..(118): n is a, c, g, or t
caaaaatctatagactactatagggcgctagcgtcggtttttccgaacgacgagcgcagcgagtagtgagcgaggaagcggcgnnnnnnnnnnnnnnnnnnnnnnnnnnnnnnnnnnncagtcgacggtaccggacatatgcccgggaattcggccattacggccggggggccctgcgggttctcagaggcaagttcagaccgtgttgttttcttttcacggatcctgccctttcttcccgaaaagaagacagccttgggtcgcgattgtggggcttcgaagagtccagcagtgggaatttctagaatttggaatcgagtgcattttctgacatttgagtacagtacccaggggttcttggagaagaacctggtcccagaggagcttgactgaccataaaaatgagtactgcagatgcacttgatgatgaaaacacatttaaaatattagttggcaacagatattcatcttggatttatggagaaagatgcagtcagaggaaatgatacgtttgtaacactcgatgaaattttaagacttgcccaggaaaatgaagtggattttattttgttcaggtggtgatctttttcatgaaaataagccctcaaggaaaacattacatacctgcctcgagttattaagaaaatattgtatgggtgatcggcctgtccagtttgaaattctcagtgatcagtcagtcaactttggtttctagtaagtttccatgggtgaactatcaagatggcaacctcaacatttcaattccagtgtttaggtattcatggcaatcatgacgatcccacaggggcagatgcactttgtgccttggacattttaagttgtgctggatttgtcaatcacctttggacgttcaatgtctgtggagaagatagacattagtccggttttgcttcaaaaaggaagcacaaagattgcgctatatggtttaggatccattccagatgaaaggctctatcgaagtgtctgtccatacaagaagtaacaattgttgagaccaaaggaagatgagaactcttgggttcaacttcattcgatgatacatcagaaacagggagttacacatgcgaagttactaaactacattcccaggag

SEQ ID NO: 147090 - DNA, 906 bp, Homo Sapiens
  misc_feature (827)..(861): n is a, c, g, or t
ttttgctcctttttccgttctgccagtgcggttgcttcgtgggtccactgtctttctgtgttgctgtgttcttgctggtcccttgcccctcccttttctcgcgtcgatcggtggatgttccacgatgttcctgtctgtatgcgccatggggggacactgccgcagtggctggccgcatgtaccttcttcatccacctgacgggttctacacgacgtcttggaccttgatgtgccatgtccttgtcccaagccgacaccattacacctgtggtttccttgtcccagccggtgggcacagagtgcaagggctctgctttgtggccatgaagcatctttgccaggataggtagtacatcagtgatgcagagctggtaccaccaggggccaccatgcacagggagacctgtagggcttgattgatgaccacagggttcttgtcctggtggtagaattcctcgggtcagtgccttagcaagcacgttggggtggactcgctgcagctgccgtgtgaaccgcactatttcttgcactctccgctgtaacagcgtttgtggacaccggctccgttctttgtgtcttgttcccgtttctgggctcggagcttctccgctaatctctgggcatttatggccgtagaggcagcggcagcggcacaaaatggctttgagacgagagtgaagagactcccgcaaccttggccgtttccccggatccaggggcccgacgcgctccacctgggcgccgccatcttacaaggaagggcggggcgagccaaccccggccgtaatggccgaattcccgggcatatgtccggtaccgtcgactgnnnnnnnnnnnnnnnnnnnnnnnnnnnnnnnnnnncgccgcttcctcgctcactggctcgctgcgctcgttccgtgtttt

SEQ ID NO: 147091 - DNA, 905 bp, Homo Sapiens
  misc_feature (792)..(826): n is a, c, g, or t
gtttcttattagccaagtccattttggggatctgagaggtaagacatctccaacaaggaaggagagagatacttgggattatatttgtttcagccttatccaaagagagcctttgaggcaaaattcagcactactgtgcctactttttatttaactgtttaatctaaattcttttgaattcctttccatttgcagttttcagagagtctgatcctgaagactttcacctcctggtctggcagaagattcctcacagacagcaagactgcgagtcagtttaccttttcctgctcctgacttggattttcttctttcttgattctgagcctccagccgcctctgcagttccagtttctcctcttcatccagactttctgatttaacaatgccgttctctggagtggccgtctcctgctcagtccctccttcctctgctattgcctgattcaggtctccttgctcagacattctcccagatgcaaattaaaataacaagattttatgccctttgagggtcaacatttccaggcttcgaactgacagctacattattaaaaacataagccctctcccaagctcccgagctcccaagctcctgtcagttgctggtgcgacaagatcctgtggaaggaagtctttggcaggcagctctagtggagctatcccaactaaatgctacttctccaggctcacaatagtctatagacactggaaatggcttttcagagttaaaatctgttccccggccgtaatggccgaattcccgggcatatgtccggtaccgtcgactgnnnnnnnnnnnnnnnnnnnnnnnnnnnnnnnnnnncggccgcttcctcgctcaaatgactcgctgcgctcgtcgttcgctactacgcgctagcccctatatatctatacagctt

SEQ ID NO: 147092 - DNA, 1061 bp, Homo Sapiens
  misc_feature (959)..(994): n is a, c, g, or t
cgaatttagccaagtttctttagatttaagatcaaagttcttctttattatcccatgtacttgcccactgttgtactgttccactccagatgaaattccaatttacgagcccaaaagccaaaacaaaaagaaaatttcacatctgagagccattcctaaacatcagcatatacagagacacccatagctatctcaatactaccatgctgccggaaaactgcacattctaaatttccacgtaaataaaagataaaaggaaaaaaactctgtattctttcaatctcttcattcagaaaaagtgtcccattgtgacatgaaagagctgaagtcaaaaattcctaaaactttcaataaaggtaaaaataaactgccatgaaacttcagcaatactcagtcatgttgaaactgctgaaactactcagtacacaaatcaacgtctctcagtttcggctgaagaaccccaacaacggggtgggggaaggggaggcaaaaattaccaccagctgaaatactgtaaccagttatataatccgtttgaaccaaaatactgaagaaatgctgcctgggtctctttttaagtagcttgctgaattgttcactactatcaattcacttcacagacgattcttgcccattttaataaacttctggggcaaaattatccaaaaacactgtaaatccaaaatggccacttaaaatatccagggccttttacaccaaacctagatgatgatcttcatatctgagtaattcaatcaccttctgccccaccagaggtgcccctggcctgggggtgccgccgcgcctgatcccgggagaaggttttcggtactttgaataatccccttttgccgcttttccctcccccacaaccagtctcagtccccaaatggcgccgacccgatccccccggccgtaatggccgaattcccgggcatatgtccggtaccgtcgactgnnnnnnnnnnnnnnnnnnnnnnnnnnnnnnnnnnnngccgcttcctcgctcaccacttcctgcgctcgtcgttcgcatctacgcgctagcccctatagtgata

SEQ ID NO: 147093 - DNA, 1401 bp, Homo Sapiens
  misc_feature (72)..(72): n is a, c, g, or t
  misc_feature (132)..(132): n is a, c, g, or t
ttcctcttccttgttgggggtcttttatcatcccccctaaatcccatcttcaaaatgggcctctttagagcntgaagaccccagccaccttcctttatccaggtactgaccaggaatacttctgaaaaggcnttactagatggaagggggtccatctccagccacttgtaaatctggccaaagggctgatagtttgagtgcatgctgtgcactgtgggtaatatcttctttttgctggatggtcatataggtcaggagcatctgttgggtttccgctcccaaggatcatgaagaccaggccccccaggaagtagtattccagatgccaaacactccattactcgtctcaaggcctccccagcgcccaaaggtctattacaagtacctatagacttttcacatataagttctagtggccatcctttcaatggtgcccatgtggggactctgttgcacaaatcacgcagaatgcggaggacaattacacatgattttaatccatttgcccttgcctgaaaccatttggcatgtcgaagagacgccaaggcgttcaggcatttctgcctgtccaataagtccggaggatctttcatcgaaacattttctccatccttcttctccaattcgtccctaattagaggtgaggtaagtatcaccttcaaagttagcgtgggctcttttgtattccgaattataatagatgcctcatttacacattgttccacttgatatttctcttctgtgagtttctgaatctgaataggaagattatctttgactgtatttaacaggttctctgtgggtttgtctttgcacattactaccagctccaagtccatatcatctttaatcagcaagccttttgccaccaggccaatcctcattacaccacaccatgtccgaccaccttgatccttggaatagttttctccggcctcatctttcttcacttctgtctcaccctctgtttttgtgcctttatttgtttcatccaaccaatctgagacatgtttaagagcacattcaacagtagataccatattctgaacagcttcaagttcctccggagatggatagattgttgaatgtttcaccataacatggcgatcatcattagcaaaagatcgaatagatctcatggttttctatagtattttagcttctttttccgatcctttcccctctttcttgtcgtcttcactagacactgttttgtgtaacatacctcctcataagcctgagtcccctgacagctcagcgtcaatatagcaaatgtctgaaggcttgttctctggaacacacccgcgccgccgcgctctgcccgcgcccggtacccgctcccgctcctcgtgccgaattcgccacccaggcctcgctaccttaaaccgttagagttactgc

SEQ ID NO: 147094 - DNA, 969 bp, Homo Sapiens
  misc_feature (651)..(660): n is a, c, g, or t
  misc_feature (730)..(758): n is a, c, g, or t
  misc_feature (853)..(887): n is a, c, g, or t
  misc_feature (891)..(929): n is a, c, g, or t
  misc_feature (952)..(952): n is a, c, g, or t
tcccatccccaacttgagggggatattggataagctatcaagtggtcacacccatcagttaagtcggaaaaattggggagttttctgtaattcctgttaaaacttttggtttaccaaagttacaacacatactggtatgtctacaggaaacacatacttttcctttgcatttttaaactagaaaccatattgtgtcagcagcctgcttttctagacccatagtaatgatcaatgacataacatgttagttgagacagctgggttattttctcatagtggaggcagagtattcccgtgaccacattacaagggcagaggggtgtgaaactacagcaatatatatcctcgtattttctcctctgtatacatatgcaggcacatttcctgagagaagatactatgaagtgaaacttaactagtgtatctagtagtttggtttttaaatgttgacaattatccaaattgtccctttaaaataaaaagaacagttaactcttaaggtgaaatttctaacttgtcaatctagaaaagccaaccagagctctttcttcccttcctacccaacttcacagaccaggacaaatataattaaatactggcgataacagtggtatacagtagaagcaaccatccctcagaccggaggggggnnnnnnnnnntcatccaatcaactattaagtagatcttaacaaaaatgcaaccttggaaagaaccagttttaagcatgannnnnnnnnnnnnnnnnnnnnnnnnnnnntctcaacttaccagctctcagatagttacaacaataaaacagaccccggccgtaatggccgaattcccgggcatatgtccggtaccgtcgactgnnnnnnnnnnnnnnnnnnnnnnnnnnnnnnnnnnncggnnnnnnnnnnnnnnnnnnnnnnnnnnnnnnnnnnnnnnnctacagacgagtagcgcccagangtaggtcatatagtttt

SEQ ID NO: 147095 - DNA, 887 bp, Homo Sapiens
tatggggaaattttctctcggaaaaatttgttcaaccatttcggttttttaaggtgggttaaaacaaaggttggggacatacaatggcccgggttcttgggttcatctttccggttccaaattagatccccatgtccccttttgcagccttaggattctggtctacatattgaggtttgatgatggcttttaggtcatcttctagaatctttgtaaagtaattttgtaattcagatccacggaaataagtcaaaatcttcctgccagtcaggaggatcatcgtactttccaaggtttggcttttgtttttcctgcttaaaattttttaaagcagttgactttccaataccattagttccaactaatcccaaaacttcacctggacgagggataggcaacctgtgaagtttgaaggcattggcacaatatcgatgtgtggtttctttttccaagttgcttggtagattgacaattgataaggcgccaaaggggcatttcttaatacagataccacaaccaatacaaagagtttcggaaatccatgctattttgctctggggtgtaacctctatgcataattttcccattcgaaactacaggacaactctttttgcattcctgtcgacatttcttaggtttacatttgtcatggttgacaatagcaattctcgttaacttgtctgccataactgggcgaaagaatatccagctcttctggagaaaacgatccccttgcggaggggagcacagaggccaaatcagctcttgccttcacttttcagccacacagcgtgttctcacggccaccggccaaaatggcggtgcccagccgccgcccccggccgtaatggccgaattcccgggcatatgtccggtaccgtcgactg

SEQ ID NO: 147096 - DNA, 1055 bp, Homo Sapiens
  misc_feature (934)..(968): n is a, c, g, or t
  misc_feature (972)..(1012): n is a, c, g, or t
cgtgggcctaggcattttatctcatcttcctaaagcctgccaagccattcagactgacccagttgatgctttgtgcctggtttggaacggagctggagcagtgctgaagtctccccacaagtcattgcttaccgaaacctggagtttgtgctggtgtcttgacaggagcaggagaatccaaatctaaaaggatatctgcatcactgcctccatggttagatttcggaatggttgtggggtgacatgattgctgatggcaactgaggaggatggtgggggaatagtgactttgcctcctggcgggggtgggagtaagctcagacccccaccccttgcagtcctgggcttagaagcacctcctttcttgtttgtaatgttcccgatacacaacttgatggtttgtccttccttgaagcccagatccaacttaggacgagcatccatttcttgagattccttggaaatctcagattcctgctttacccacttgaagtgatcctgcaaggagacattaaagtcgaaggcatctccccgatctgtgaagccaatgccaatgaaagcactgcgcccagtaccatcctggatccggattacaaagtagcggctagaatctgtcaccgtctccacagcaataccaggatattgttctactggtgcctgagcaaagagctcccctgaaactttatcctcgagtttgatataggcagtcttcccttttgaagtgattcggaggcgaccagtccaatcaggctggtctaatttccagtcagaggccctgtaaccgcggttggaggcccggggcggaatccggtagacgctgacgtctggcttcacacacagcacagactcgtactccaactcggtcgccatcttgggtccgctccccggccgtaatggccgaattcccgggcatatgtccggtaccgtcgactgnnnnnnnnnnnnnnnnnnnnnnnnnnnnnnnnnnncggnnnnnnnnnnnnnnnnnnnnnnnnnnnnnnnnnnnnnnnnnaagaaacggcgctagcgccctatagtgagtcgatacgattctg

SEQ ID NO: 147097 - DNA, 918 bp, Homo Sapiens
  misc_feature (77)..(77): n is a, c, g, or t
  misc_feature (80)..(114): n is a, c, g, or t
  misc_feature (369)..(386): n is a, c, g, or t
aatgtatagatcactataggcgctactcgtctctaccgaacgacgagcgcagcgagtcagtgaagcgaggaagcggncgnnnnnnnnnnnnnnnnnnnnnnnnnnnnnnnnnnncagtcgacggtaccggacatatgcccgggaattcggccattacggccgggggaacgaaggattcttttgtattaactaagacacatggtgtattttgttagctaatgtatctagtcatgagatcttaataggcttttgatctagttggaagttctgatgagttaatttctaatatcatagtttctttactagagtataattgggctgtaaatgtaccagaacaaaaaaccctacaaaatggtgttggaaattgtnnnnnnnnnnnnnnnnnnaaatttgaaacatcaaattcatgtaactcataggataatttacctttggcttctaagaggaaagtcctttaaggatatccttttttaaaaaattgcatttttctcttataatttgtaaatttgttggatctcaaaagacataattctttgtgatcagttatccttcatttcatcgtggttttacacagtgagttgataacaggttctctgagaagtcatgcatcaaataaaagaggcaggtcaaacaattatgtcacatggtaaattataaaatgacagtacaagttccagatagttaagggaataccgaagggatgattctttttttaagataacaggaagttacccacatgtttgtttctgaattcttagagtaaatggaagcatagaatgagggaataatgactttgcatttctcttgttttctagattcaaaaggaacattgtttaacttgaatcagattaccagtttcaaggtgactgatagacaagaaaaggaaaaataagcaataatagtgggcaactgaagaga

SEQ ID NO: 147098 - DNA, 1069 bp, Homo Sapiens
ttcccgtagcgggtggcactggtcgggagtccgccggcaagggacgggttcccggtcccggccgcagtgttggtgaaggtgagggtgacggtcttctccggttaggcagcttggtctccgtctgtagtccgctgggtgctcatagaatagcgcaaaatagggagagatatcgggcctgaaaacatggataagggacaagatttcatctttgtagccccagagcaattcgtcaactgtgtgagtcacgaagagcttctgctgataggctttcaacatggcctcgatgatctccctgaggaagtgcacctgggaccactctatgacagtcaatacaggaatatttaatgttctaattaagtcaattttagggtctccaacagattggtctcgttcaaaaacataggccttgttgctaacagcagatattgttgttccattatctccaaattgaatatttgctttgtttctgagttccctgtaggtgtatggccccacttcttccacccgaggggtctcccctctgaggatctcctctggattggtgacattgaagaaatagaactgagtatacacaggcagagggggcttctcccaggagtcaaatgcctcagtaccattccttaacacaattttcttctcgatactctggtctacagccttctggaagacccgggccaccagcagcgtgacgctggtcaccagcaggagcagggacaacgtccccgccgtgtagaagcagcatcggcccattctgtgcgccgctcacgggccgggccgggccgcacccgccagggatccaactgcaaggagggaggagccgccgcagaggcgtcgaagacccgggacccttcggcgccacgcccacgccctcccggcgcacggttcgtgcgcgcagctctgggctccgcggcctggcgagcgcgaccccgggtgcaccgggcggatggggccgcggagggacgggcccggactcggtttcggtttccttcgccgggcagccgtggcgcccgcctagcgcagctcgggagagtgcagggagcgcgcagggacgtgacgttcgcgggccggc

SEQ ID NO: 147099 - DNA, 982 bp, Homo Sapiens
  misc_feature (873)..(908): n is a, c, g, or t
  misc_feature (950)..(950): n is a, c, g, or t
tcgattagaatcaggggcgggcccaggcgcgggttttcaaggcaggccatttcgtaaggccggggccgaattcgcagaaaatgggaattgtgttaattcagataagctattttataaaagcgaactcttaaaaaggccaagatgttttgtaactgcagagggcacagcaaacttgagccttaaacagcaacctgacaaatacagatgtccacccggcacaaaaatagattcggctaatggagacccacatagttaggaagtcacctcaggcacgggcagtcctccgaatgcagcaaaggctttttttgaacaatagcagtcagtgctcaaggtgttgcacgcaaaacatccagctctcctggaggagtggttctgggtaagctgcaaccggtcctctgctgtggaattgacatgttccaggaaggacctcagatggaatgtcccaggccccaaacccattagctactcaagtgaatggtggttcttgttgcatatggtgccagtgacacttcagaaggtcatcagcttggccagagtctccgcagtatccttggaaagccaagcactcaaagattctagattgctctgggttctcttttgttagtttctttctaacagtgaacaagctgacttctgattatcatttgcaagtggctggatggattcaaagttagcatgatttgttctgaatcatctcaggccacgtggcatgcctgtgaggacaaacatcaggccaagaagagtcgctgggggcctggccacctctattccagtactaagcatggtcagagccttggccaggagaagatgattgagcacctgcccggccgtaatggccgaattcccgggcatatgtccggtaccgtcgactgnnnnnnnnnnnnnnnnnnnnnnnnnnnnnnnnnnnnccgcttcctcgctcactactcgctgcgctcgtcgttcgctantacgcgtagcgccctatagtgatgtataactt

SEQ ID NO: 147100 - DNA, 1187 bp, Homo Sapiens
  misc_feature (1069)..(1103): n is a, c, g, or t
ttgaatattaattttcaatttatggcagcagcaagcaccaaaatcaaaacccaacaatcaatataataagtatatgtaacaaataatctgaaattcagccccattaagacatgtgggtgcaatatttttatattcccaaaggtctgcatattttgggggcattaaacaacagggaactaaaatttaacacaaaatcaggtgccatttaatactgtttaacatttgaaaattatttatttaataatacagatcgtcttaatgtgctgtaaatatttctcgcacagcatcatattgtcagaagtttttcccttttggaggcttcttttttccattcctttccagtaactggcctcccaatgccagcaactcaggtagattcatgcagtcattcctcttctctctgtactggtaagcgctctggaggaagaacagattccaatttctgccagcgctctgggggccacaggatatgtgtggcatgggcatgcagaagtcctagggaaaccggcccaaaagaattactgtcaaaactgtgtccatgatgatcaccttcaacccagatgtgaccacgggggactttgacataccggtttttgtgtcctatggttctgacaatatctccttcaagagcaatcactctcttaatgatcttctgttctgggtttttaggagacaccaatgatacaatgtcaccacggtgtacttcaaaattcctcactttccagtggttcaaaagcaccacatcagatgactggctccccccaggattcaaagaaggctgcatcgatgctccttctactcttgccacacaggcgacccgatccaagaaagtcactgccacaggcaccgccacaaagaagcctttacaaaaggccttgatgtatcttttcacccacccttgtgactgtgccataccctttctcccgctcttcctcggtgagaaggggtaagtggttattttgtgccctcgcccaatttggccaaaaccccgctgcgcagctcagcccgggggaagtcccccggccgtaatggccgaattcccgggcatatgtccggtaccgtcgactgnnnnnnnnnnnnnnnnnnnnnnnnnnnnnnnnnnncgccgcttcctcgctcactgactcctgcgctcgtcgttcgctcggagagctagcgccctatatgatgatcatctttcctccccc

SEQ ID NO: 147101 - DNA, 1082 bp, Homo Sapiens
cagtcgacggtaccggacatatgcccgggaattcggccattacggccggggggccgggagaccaactggaacccgcagcacctctctcatccttgcaggcccagttcgtctcgtagcttgcgggagaccacagagggcaagtacatcatgtctgggacttgggcccgcagggagcagggtgcacatctcagaagtttactggagctctccatgagccaccatgcaggccactggctggacccataatgtgaagtaccagcttgaggaggacaggtggaactggaaattcctaacagagacctggacacagggcatcctgttttcttttgcaacgattgtgcctctcagttcagaactgcttctacatacataagtcatttggagacacacttgggcttcagcctgaaggatctctccaagctgccactcaatcagattcaagaacagcagaatgtttcgaaagtcctcaccaacaaaactctgggcccactgggggccaccgaggaagacttgggctccacattccaatgtaagctctgcaaccggacttttgcgagcaagcacgcagtcaaactgcaccttagtaagacccacggcaagtctcccgaggaccacctgatctatgtgactgagttggagaaacagtagcgtccaggtatgcaagagaccgcggaacattgcactaaacgtcgtcgagctgcactaggcctggcctgagcctctgaaatcagtctttcctttgttgctggcccgcctctctggaccttggttttcttacacatattttgtatatttatatgctctctgtccgatctgtgcatgttatttttctttttccgtgagtcaaagtctgacctttattttcaacatctgttcttggtgttaagctatcttttgtaggaaatagtggggcacactactcagagacattatttagcagtaaagaaagacacaaataacaatgataaaaagacatcctaaaatggtgaagttgccatgacaataaaggtcatagaacctggtagtgtcaaatttaaccctttgaggactgtaattgcatttctgtgcctttcacttgaaaa

SEQ ID NO: 147102 - DNA, 989 bp, Homo Sapiens
  misc_feature (877)..(911): n is a, c, g, or t
gaaaatctggaccccatgctgaccccattcactcatgactcgatcttaacttcgtgtaattcattttagaaccctatcttcttttgccatcacctggataatgtttaccctgctgctcaaggttcttcatggttaagagatcaaatgtcttcagagattggcctgtccgttgaaatgaaggtagagacacacatggatgcgagaattcatggtagggtaaagagagtacgcgtaatgcttcagttcttcttggagattaggcctcaaactgagcatctatgtagtcaactattggttggtagctctcttctttatttactttggtccaccgaatcccactgtattcacacatggtcaatttcaattgaacattactttcctggagttcatatgtctgagctttaagtttgacatttgggccaaagatgtgaggattcatagtcttcaaaattagtattaaacaatgtgtcaatcagtgttgattttccaattccagtttcccccacacagagaatattaaagcagaaaccttgctgaatggatctgttcaccagctgatcaggcaaactctcggaaccaacatggccagacatagtcaacgaacgaatgttttctctttttatctgttcatcatctgatccttgtgaagacatacaagttgttttcgttgccatgtgagactgaaagagcaggtgccgcgccacctcggaggaggccatggtcgcgggcaggggcacggtgaagcggctgtatcagcccggccccgagcggctggtcccggcgacggcggcgggaaggccggagggcagaagcaacgggcggggcccccggccgtaatggccgaattcccgggcatatgtccggtaccgtcgactgnnnnnnnnnnnnnnnnnnnnnnnnnnnnnnnnnnncgccgcttcctcgctcaatacttcgctgcgctcggtcgttcggctactaaggcggtagcgccctatatgatttcagtt

SEQ ID NO: 147103 - DNA, 1202 bp, Homo Sapiens
  misc_feature (48)..(48): n is a, c, g, or t
  misc_feature (274)..(274): n is a, c, g, or t
  misc_feature (1138)..(1155): n is a, c, g, or t
tggctgggttttccaaccccagtatttggtttgccaagcggaagcctnccagttccctggccaggattttccttttttcttttctcccgggaattgggcagcctgacttcccgtttcttgaatcattcggtgctgcccgcttcagcaggcttgcattccacctccaggggggggcaggagtttccaggcataggagcggggaacgatgcttttcctctccaggcccgtggtagagagggagccgggcccttccagggctggacttgaatagcanccctggatgagggcaactggggaccactggggtggcttgacgagggactgcagaaggactgtggtgctgggaggcacagctctggatggcattgggacagtggttagcactacaggtttgggctgcagtggcggcttccgggtgggcagggctttgcctgaggagccatcaagggatgggcccatgctgatctggacagctccaagtgagggggctgggacatcccacagggaggcatcctgaaggggacagggactctgtcttcacttccaggacctcctctcctataaaagcctggctggaggagtcggctgagagcagggaggcctcagagttgacggaagaacatggagagacaggttctatcttggtctggacatctgaggaatcatcagaggtggggataacgttgatctggacggtttcaaatgaggatgttgggtcatctcccaggagacacagtgggggtgccaaggactctgtcttcacatggagcacctcccctaccccaagagcctcgctggatggctctgtggagagacgcgatgactcggagctgagggaggaggaagagtcagggggaagatggctcagacttcacctgaagatctgggaagatcggcaggagttcccatgggggctcagaggggctgacatccatccccacgtccagggagctgccgtcaaacgggacatcctgctccgggcaacggaagagctgcgtctgctcctcggccacttcatctaggccagaatacaaggtgctgttctgcagaccccagtcctccgggctaagcaggttgtcggtgaagaaacgcgtcgggtcagcaatctcgctgagcagcatcagctccgccatctttnnnnnnnnnnnnnnnnnnggccgtaatggccgaattcccgggcatatgtccggtaccgtcgactg

SEQ ID NO: 147104 - DNA, 1056 bp, Homo Sapiens
  misc_feature (73)..(73): n is a, c, g, or t
  misc_feature (99)..(99): n is a, c, g, or t
  misc_feature (102)..(102): n is a, c, g, or t
cggttgccccccagggatgccatcaggaaagtgtgctcattaaacagccaggatgtgtcttcggttgtctccngggccacaggcaggacatcctgccancgntggccccacagacactccttccatttgcaggcggtagagcatggagcagctgtccaccacgtccaggcattgcatcgttggcctgcaggctgggaaggatgtgggtattcgtagatggtcggcgcggcctcatattcgcctttctcaatcagatataaagcccagtgccaatagttatgacaagccaacatatcagagtccttccagagggtctctgagtgctgcatgaattccaacccatccttgatctctgctttcatctcgtggatgtgagcgacggtgtgcaccgaccatgcgtctgtcgggttaatagataaagcctctttggcgagtttttctgcctggtcgtagaagttggtttccatcaagccaaaagagtagatgcctttcacatagctgcttagggggatgtcaggtgtccagaaggggtaaattcgagcaacagaatctctcatctgttcctgatagcccaggtaaaaataagcatcatgggaaaatttcagggccaacatgtctgtcgggtggtcctggagaatctgttcccatagttcacaggctttcggaaagttcccattggcaaatgtctctactgcagacacgtgcagctgctcccgccttgtcagcggctgggttcttgaaatctccaccattgtcttcacagccaggtccagctctttgtccagcttcacggagcttccagtgccaatcagcacaaggccagtagccatggcgtggcccatcacaaaggttggatctgctgctttgagctttgacaggcagccctcgatgccaccgagactcttgtcattggtccattttacatactgggtcagcgtggcatcgaacagcttgcaggcttcgttgcttgtggtggagagcgggagcctcgcatccttccaggcctggcagtcgcgcagaggcgaggctgcggccatgtgcgccatcccgagaatc

SEQ ID NO: 147105 - DNA, 753 bp, Homo Sapiens
gacccgcccaagtttttccttgttcatgtggatgttggtgttaagtgcgtgaaaaccctgatataagattatacaaagagtgaaaaggtaatgtttgctcctaaaaagttttatagtttttggttaagttttttggatacagtggtaagtaagttgtaatatttgtgtgtttgaggtaggggtccaacttcatttctttttgcatgtggtatctagtttgtcctagcaccatttgtcaaaaaagactattctttcaccattgtcttggcatcactgttgaaaattagttaaccatagtgagtttacttctgtactctcaattctactccattgatctatgtgtctatccttaaactagaaccacacagtcatgataattgtaggttggtaataagtttggaagtgtgagtcctccaactttgtacttttccaagattttccaagattattttggctatgctccatcccttgcatttccatatgaattttaggatcaccttgtcaatttctacaaaaaaagccaggatttttataaagaatgtgctgaatctctctattaatttgggaagtacaaccatgtaaataatactgtctttcaatccatgaacatgagactatttgtcattaacgtaggtgttgtttctttcaattatgttttaaagttttcagtatatagggttttcttaatttcattttcagattgcccggccgtaatggccgaattcccgggcatatgtccggtaccgtcgactg

SEQ ID NO: 147106 - DNA, 806 bp, Homo Sapiens
  misc_feature (116)..(159): n is a, c, g, or t
cacagaactgaactgaggttcatggattttccaggactgtttcaaacatgcccattactaacggcaaaagggggattccctgatggaaccataatacccttggaaatactgtatgnnnnnnnnnnnnnnnnnnnnnnnnnnnnnnnnnnnnnnnnnnnnttgaattcatttcactgtagctctaaaatctgcttgtattccaagcatataaaattttcccccttagtgaattagttttaaaatgatattgttatatacatactatgaaatatgtataactttaacttctgttttaccagcatacccacacaaataacaagaatactacttatgaaatgtgcactttatcctcattccataaatgttggtgcataccttatgtaagggagcagttcaataatccatgaaagaacttaaggcatttgttggtttatcagactcggaatctattttctcattgctctgaatatgtcatcactctaggttttacagatttattcctttgttacttctctaattcttcctttgtaacaacaaaaaacaaagcccacctttttcttgttattttgttggtcttacaaaaccaatactgaaagagtccctggttacaaattcttcatgttcaacggtataactgggcggtatgtcttaaacccgcttttcatgtgtgctcctcccaggtacttaattcacttacttctcgttttcgccagctgtccggctgttaacctacgattttggacaaagaacaacaacaaaatgtgtgcggccgaattaaaactgggccggcgaagaaacatctcgcg

SEQ ID NO: 147107 - DNA, 865 bp, Homo Sapiens
ccgagaagaggcagaatctccggtgcattcgcgagaaatgtgcggtttgaagcaaacctgagttttcgttgccgccctcacaggaacccactaggatggaaaagccacattcaaattagatctgtactgtggtagcggtaaacagaagtaagtaacaattcatagtagtaataacatgatcatttaaactaattcactagggggaaaatttaatatgcttggaatacacagaattttagagctacagtgaatgaattcaataacgacaaatctgtaaaccgacaacagacaaaccatacagtatttcccaagggtattatggttccatcagggaatcccccttttgccgttagtaaatgggcatgtttgaaacagtcctggaaaatccatgaacctcagttcagttctgtgttccatcaggccttacggtcctcagcaggtctgaaaatccagttctatacacaatgctccaggataccacatgcccccttctcttcccctacccagggtctgaagtttcaggaagggttggcggggcaatcaaacactgatttagcctccctgagtcttatagacagaaagaagacaaatgtgggaatccagcgggccaaatatttcataacgtgcagcattcaaacttcatacaatcaccgtagtgacagtgccttggatgtaagtggaataggtttttggtgatattttgtgaatagttgctgctttgccacagagaactttgaaacagcacagattagagacccagatcacagaactgacttgaaagaattgctttgttttgtggggaaacaattgaaactcccggccgtaatggccgaattcccgggcatatgtccggtaccgtcgactg

SEQ ID NO: 147108 - DNA, 977 bp, Homo Sapiens
  misc_feature (858)..(892): n is a, c, g, or t
  misc_feature (896)..(935): n is a, c, g, or t
tggctccattttcgttgtgtatgattgacaggtgttatcacctgcgtcctcagtcatcacgatgagtcgatgtcctgtgttgacttgtgcgccctgtaccgtgagtccgtggagagcctggcgattctttgccagctcaagaggtgctgtccagttgtagaggtcaatggtagggacgatggaattttggaatttttgttctgatccagatactgttgaatacatcgaatgatctggaacattgcaatctgattgtttttgatatatggtgacattcgcatatccagtcctattgaatgtgggacttctgacgatacaggtataaataccagaatcagcaactgcagctggtagaaacttcagaagttggcctgaggcaaacacacgatttctttcctgagtgggaatacttttgtttgtttgtgagtaataccaatccacggtgtaactaggttttccttgtctaggacatcttacaattaaagcctcattttccaggccccatgattgtttactaaactttgctgctgtggaatacatgagaattgtgagaattgctaagatccgaaaccccattctgtttatcaatcaagagcaagtattggtaactcgttgttgagattactccagatgagtcactggcatacgacagtgaaggtcaccacacatgaggcagttggtgatactcttcaagactgagttgggaagagtagcctatatctcaaccaaactgaaagacagaggggatgaacttggagtcagtgacggagctaagaatagtttccagtctttgtaggtccctcctcccccggccgtaatggccgaattcccgggcatatgtccggtaccgtcgactgnnnnnnnnnnnnnnnnnnnnnnnnnnnnnnnnnnncggnnnnnnnnnnnnnnnnnnnnnnnnnnnnnnnnnnnnnnnntacgaaagagctagcgccctatagtgagtctatacagtcttg

SEQ ID NO: 147109 - DNA, 1028 bp, Homo Sapiens
gaaaaaaatcagaccaagaaatgagcctgaaattcagtgtttaccatggctcaaggatgcccatctggtgtccagttgccttttgtattcaaatgaaaatgctttgtacaactgaggagttacagtgaagtgttaaccaggggtccagggagcgagttgaaaagatggagtgagtgtatttgcagccagggagctgcagggtggatttgaggggccataccctctgagcacttaaaaaaggtatttgctccaggccaggcagcaggctgtggacacccttgccaccactggggactgccactgaggactccccgagcacgttgttccccgtcttctccaaggtgttgaggtgagctggggttggccccggcccaggcttctgtcccaaggagaagctgccactgacagtcatcctaccgcactgctaaagagaatgttcgcagtggtgggcggcgtgcctgtgccaacccttccagggacccggccatgggggaccttggcccaaggatgcctggggcctgccagctgtgctgcaaaggtggggggcccacaccctaaaactaacccaggccccagaccactggaggccagggcttccctgcacgggctaaggggagttgggatatcaccccaaagtgaccttgccagtgagctgttcagcaggtagccactgccctgccatctgtgcagagccagccaccttgggggctggggttcccgctttgaggcccaccttccatactccccttgactcggctctggctgaactggggaactctcttgtggtcagcaaagcccctgccatgcaggccaggtgccattgagaattaagtgctcagagggccaggagcccaggggatgggaaagtgtgtggttttagtacgttcaaaagggacaatcgcttgcagttggtagatctagcgatctagttgggagataatggtgtttaccccatatgaagtattcaatagttctacttgtgaatttgtatttattttgagttatacttgacacagaattcctttttt

SEQ ID NO: 147110 - DNA, 1086 bp, Homo Sapiens
  misc_feature (817)..(817): n is a, c, g, or t
aagacagttcattcatacctagagaaattccttaccgagcagatgatggaaaggagggaggatgtatggcttccactcatctcctatagaaattcattagtcactgggggtgaagatgatagaatgtctgtgaacagtggaagtagcagcagcaaaacctcatcagtaaggaataagaaaggacgacctccacttcataaaaaacgagtagaagatgagagtctggataacacatggctaaacaggactgacaccatgattcagactcctggccccctgccagcaccacaactcacatccactgtactgcgggagaacagtcggcccatgggagaccagattcaagaacctgagtctgaacatggttctgaaccagactttttacacaatcctcagatgcagatctcttggttaggccagccgaagttagaagacttaaatcggaaggacagaacaggaatgaactacatgaaagtgagaactggagtgaggcatgctgttcggggtctaatggaggaagatgctgagcccatctttgaagatgtgatgatgtcatcccgaagccagttagaagatatgaatgaagaatttgaggacaccatggttattgatctgcctccatcaagaaatcggcgagagagagctgagctaaggccagacttctttgactctgcagctatcatagaagatgattcaggatttggaatgcctatgttctgaagtctgaagaaaatttacaaatctggaactctattatttagagctagaggcctatatactgtgatagcttgtatggggaaaaacactttttgatgtngatctgattttgttttttaatcaaatggattaaggtcaatcccctttttgcagtgacagaagaggagcatgtaaattacccaaggggaatgttcggtgaatgtcaactcagaaagactgacctgaaaatcatttgtgtcctactattggacttatcccaatacagatgtgtgtgtttttctgggagggagaagaaattttaaattttttaaacagctgtcaagataaacactgttatacacctgttttatgaaaactcaacattgaggt

SEQ ID NO: 147111 - DNA, 1627 bp, Homo Sapiens
  misc_feature (26)..(27): n is a, c, g, or t
  misc_feature (133)..(133): n is a, c, g, or t
  misc_feature (206)..(206): n is a, c, g, or t
  misc_feature (227)..(227): n is a, c, g, or t
  misc_feature (248)..(248): n is a, c, g, or t
  misc_feature (303)..(303): n is a, c, g, or t
  misc_feature (423)..(423): n is a, c, g, or t
  misc_feature (427)..(427): n is a, c, g, or t
  misc_feature (439)..(439): n is a, c, g, or t
  misc_feature (445)..(445): n is a, c, g, or t
  misc_feature (482)..(482): n is a, c, g, or t
  misc_feature (531)..(531): n is a, c, g, or t
  misc_feature (587)..(587): n is a, c, g, or t
  misc_feature (594)..(594): n is a, c, g, or t
  misc_feature (656)..(656): n is a, c, g, or t
  misc_feature (700)..(700): n is a, c, g, or t
  misc_feature (749)..(749): n is a, c, g, or t
  misc_feature (765)..(765): n is a, c, g, or t
  misc_feature (887)..(950): n is a, c, g, or t
  misc_feature (1031)..(1084): n is a, c, g, or t
  misc_feature (1196)..(1207): n is a, c, g, or t
  misc_feature (1245)..(1245): n is a, c, g, or t
  misc_feature (1500)..(1543): n is a, c, g, or t
gcacccagagattgacatacagacannatatccggtaaaagcactacagaataccgaccgcagcgccctcgcgtcgcacgagcaataacgcgttcctcaaaagagtacagttttgattgattaagcgttgtanggagacgcagcgctgtggattaccctcgctgcacgatacccgtggcggcgaggtgaggtgtgtagtggggatnacatatagaggcgcatcaccnacaacagggcagggcaccggngtgaagagccggcgggcgccaccgcaccgcatacgtgcgtcatcacaacgtcctnttcccatgtgagggccctctacgcccgtcgcacggtgccgcgcgcgtcaccatcatttagcacccgagttcctcgtcccctcatcttgggctatctccggccccctctctacccttcttncctnatccggatcgtnacaagnactcgggcagcccgcgaggggggcattcgttccatangcattaaacgaccccccaccgccccctctataccgtagcgtatgaaccnagtcattccaccctcttacacctgggggaccggtgaccgccatacgaagagggttntgccctntgtactgcgagcgtgtcagaggggcggaggcagtggcgggcgtgtgctttgggcgggcgcgntggactaccgccacgcagcacgcctgcatccgccgcgcgctcancgccacggcggcgggacggtgcagtggtctgcatgtgggcccgaggccntccccagccgtgatcntcggcgcgccgcccgcgacgcacgccgtcgcaggctcatggtacgttgtgctgtcgccctcgacgcgcgtcgagcgccccgccccggtcagcacaactgcctcatgcaatccggcccgggcnnnnnnnnnnnnnnnnnnnnnnnnnnnnnnnnnnnnnnnnnnnnnnnnnnnnnnnnnnnnnnnngccccttagtgcggtgccgtagccgcgcggcagcgcggcgatggtgtacgacggaggccggcgcccggcggggttggggannnnnnnnnnnnnnnnnnnnnnnnnnnnnnnnnnnnnnnnnnnnnnnnnnnnnnacgaacacggtgaccaacggcggcagggagggcgggcggacgggacgcccggggagccgcttccgcctgggcgccgccgcgcttccgcgccggcctgggcggccgggcgctnnnnnnnnnnnngccagcgcgcggcgggcgtgcgcgccctggggggctgnggggtgtggccgacccacttccgcccagaggccctggctcccccacggccagccctccgcggcctggctcagcctcttcattttccactagagggggcgcctttttccgccgccccagtcccagcggcatgagcagcgagaagtggggtcaccagaagatctaaactagtgtggttgcctcctgtgggtttcgccagcttccaccctcaccccctacgacttcttgtccagacagcagccagaatggtcctgctnnnnnnnnnnnnnnnnnnnnnnnnnnnnnnnnnnnnnnnnnnnntccctcgtgctggattcgccacccaggcctcggttcggggtgttgtgttggtcgttgtgggatcgtagatctgtgatgtgtggt

SEQ ID NO: 147112 - DNA, 1400 bp, Homo Sapiens
  misc_feature (344)..(344): n is a, c, g, or t
  misc_feature (1307)..(1350): n is a, c, g, or t
aagtctaagcaaagaaccgcgccgacgcaggcgtgtcaattggctttctatcgtatgggcagcgcgggcgtgctgtacagagggcgagggcgtattacgcgctcatgacgatcgcccactttttgagaggggattcggcggtgccctgtggtccaaaaaaaagaggggtgcggcgcacatgtattccagatcctcatcgcgtgtgaggttattggcaaagagggtggtcgcagatacatttatcgcccgatggcgcagcgccgccgacaggggcgccgcctagagggaggctggtcgtgcgcgacaatagtgtggttggggtgggcggtcttcgttttaaacgntgacgggcacacaaagggtgtggtggagggcgagcctctctttgtatttgcgcggtgggccgagggggtggcggaatgtccgagcgatagaaagagggaggaggagggtgagttcaccctaaccgggcgatataggtatgagataaacaggtggaacacgagcggagtgcggagagcgaaataagagaatatggcgttacccagcgccaagcgcgtgagggtgatttacagcaaaagcacccctatgtgcgagcggcacgcccacataatattatatgtgagacccgagttgcgtgaaaggaacgccaaggtgtccgaccaatttgggggggtgcgggcgcttctatgggaatccggcgcggaggtgtgttcctactcgtggggggttaaaatagacacaccccggggaggctgtcgataccgcaggggaccaaactacgccacactcccgggcgggagtttcacatatttattcgtaaggtcgcggcaaagggggtatggaatccccgaaagcgggttgggtggcgctcagcatattagccagggctttttcgtggtcgacgggaaactatggtgcgtgagggaacccaaccctccccgccgcggggtcggtgccggacatggctaagtttagggcgggggcaagcccatttgggggccccccgacccacctccgcccagaggccctggctcccccacgcccagccctccacggcctggctcagcctcctcattttccactagagggggcgcctttttccgccgccccagtcccagcggcatgagcagcgagaagtggggtcaccagaagatctaaactagtgtggttgcctcctgtgggtttcccagcttccaccctcaccccctacgacttcttgtccagacagcagccagaatggtccagctgtgtggctggggggcaagtcacttcacatcacagggcctcagtttcttcatctgctnnnnnnnnnnnnnnnnnnnnnnnnnnnnnnnnnnnnnnnnnnnntccccgtgcgcacccggctcggccctcgtgccgaattcgccacccaggcc

SEQ ID NO: 147113 - DNA, 855 bp, Homo Sapiens
  misc_feature (731)..(765): n is a, c, g, or t
  misc_feature (768)..(811): n is a, c, g, or t
gcggatagcctgaggccttcagccagggaacagcttgcctcgagggacaggtcagcccaggaagggaggggtcttgcccatgaccagtggggttgcacacagtagctggagattggcagcacccacccgctctcccatccccagggaactttcttccagcttgccaggtgtgaccccactccatctcaccgggaccctcacagcagcgtgtcggtgcgtttgctgcgccacaccaccaggccagccatggcgacagtcagaacgacgggtataacgatcagcgggatgagaacctcgtctggggggtcctccaagtggaccctgtccacggtgcagttggagaagaactgcctgtggatgccggtgatgaagtcctgggccagggggttgggccagtagcagcccacgacattggcctccatctcggtgcagttggtgaaactctcatagtacacgatgaactcggacaggttgcaccacttccagacgtccaccttgcccatcatgtctgcgaaagccttcccacacaggggcagcctctccaacatgcctgtctcgttgcagccgcctgctctgggacacccaccgcagagcagcagcagcaacgggagaagttgcgggcgccgcagcgctccagtctccatggctggccggccgcagctgggtcacgctcggtcccccccggccgtaatggccgaattcccgggcatatgtccggtaccgtcgactgnnnnnnnnnnnnnnnnnnnnnnnnnnnnnnnnnnncgnnnnnnnnnnnnnnnnnnnnnnnnnnnnnnnnnnnnnnnnnnnnccaagcgagctagcccctatatgttaattccaaattctcttttt

SEQ ID NO: 147114 - DNA, 1396 bp, Homo Sapiens
  misc_feature (53)..(53): n is a, c, g, or t
  misc_feature (302)..(302): n is a, c, g, or t
  misc_feature (391)..(391): n is a, c, g, or t
  misc_feature (404)..(404): n is a, c, g, or t
  misc_feature (429)..(429): n is a, c, g, or t
cataggcagagtgaggggggattcccacatttttttaagccagaaagtggggngaatcagtagtactggaaagaataggcaatgcctgactggatagaaaaagattctatgcttgtcaaattttcacaaaagtgacttaagcctatactgcgggatgttcacactacgtccctttagtgcagttacggtacttcagggctgcaagtaaccaaatacaactaaaattgtcttataccataaggggcgtaattatctcatataacaggaagcttggcatgaaggaaatttcaacaatttcacanacggcaacaaaaaactctgtttcttctaccttttccaccattcctgtgttctcagttccaatatggctgctaacatccatatgtcttcnccgcacatctctntaaaagctacaaaaagatttcccanaagcgtctggaaaatttcctgtcccatctccattggccatacccacctcccatgggactgcctcttgtgaagcacacaaagggcagataccaaacggtaccgttagggagacccagaagatggaccatccaggatagagacatgaagggcagaagagggcccagggatgtgtgtccctcagctggactacagggaaggagttttggtcaggggaagaaaagcctcatttcctatcagtcactggtggaatgactaaagatgctaatggactcaaccaaaaaaatggccggaggcgtgagacagaagaacaagaaaaggtgtgcaggtgcactccgtccacagcgctgtagaaggagacattcccagtcccacgatccaggtaaacccccactcggtggagagctggctcttgctgggtgggagttccagggaagcctatcaagggccaatagccagcagcactccaataaatcgcccagatgcccacatctggggacatttttgaacgatcagtaattcccatgacgtcctcccgacacaccccaacagcaacctccagactatctctactctcaacttcccagtaatgtttccctgaggtgaaaacgttttttcccagaacacagggtaagtgctgaaatctctctacaaaagcagtcttctgaggattcctccatccagcaaagtagttccatgctgaagaaaacactggccaagaactggctgatgctgtatttttcacgtatctcccttcctgggagaagacgagtttgggatgagctgtgtcttcagctaggtttacagccacttggaatcgctttagcatttccttcatcaatggtatctggcacactgtcttcacctttacagcttcaagggaatagttcacatcctggatctcactcctggtcacccacgcgtccgcggacgcgtggtcgacgatatcccgggaattccggaccggtcc

SEQ ID NO: 147115 - DNA, 1290 bp, Homo Sapiens
  misc_feature (1163)..(1197): n is a, c, g, or t
caatttaggatcccataccccagttttaaattcttgtcaatccattcccatttgaatcagattccaggagagggcaaaggtattattccgacctggtcagataaccacccacatcccttgctgaggccccaatgtctgccggaaagacatcttccagccttttgctgtctgaaatgaatctgtcttgaacaccaggagcatactattattgctgctcttcacatttggtgggcgcttggaaccgcagaatttgccaagaaggggatcgctggtattggcaccatcgtaaattgccaggtagtcatgggagcaggaggtggagggaaccacatcaaaatcactgaacttgagctcgatcaccttgtcgtcactaacggtgatggtatacagacagtgcatatcatttgggtagtctgcgtatgaataggcaggacttgtgatgattccagaagagaaattgaacacaccaccacaggagattatcctataggaaaacttgaatccgaagtctgtgatttgctcgttggagtagaagttaagcagaaccggcccagcgatggtgaggggagctggcatctcatccccacacacagtagcaaatggggtggacatgacgctgtaacctctgataatggtgcacgccatcgttgacacagcttcccgtcacagcggaacgagcttctaagtggaaggacacaaaagtcaagaggaccactgacagaggattagcctctatgacataggtgcaattcatagttgttgtcatattgcttttgggtaatttggagaaatgatgtaacctgaagggccagtgaaattacttccacatcggctaacaaaggacgcggagaagccctgagctggtgcctcctgagactggaagacggcagtgaatgtgttacttggtgtgataacgggacccggagccacgttcccacagccagtggctagcagggctttgtccacctcctcagttcctgcccacaccttcacgaagctattctgacattgtccatcaccgctggggattaggaagttgttgtcaaagctgatctccaagtgtgttacttttgtgagtaatgaccgtccaggaacatctgctgttttcgggacccggccgtaatggccgaattcccgggcatatgtccggtaccgtcgactgnnnnnnnnnnnnnnnnnnnnnnnnnnnnnnnnnnncggccgcttcctcgctacacttaggcttcgctgcgctcggtcgttcgacaaaacgcgatgcccataatgaggagatagtctcactgcatgccc

SEQ ID NO: 147116 - DNA, 879 bp, Homo Sapiens
  misc_feature (517)..(689): n is a, c, g, or t
  misc_feature (728)..(762): n is a, c, g, or t
  misc_feature (765)..(805): n is a, c, g, or t
gttagtattggggcacaagtccgttagtctccgctgttcgtgggggtttgtggcaggggtgatgctctgtaccccgtgggggtccggtgtgtcagtgaggcggtgatccgggcccctgttggccattccggggatacggattgagactctgttgtccttggacataaaaagtgtaagagaaaagctacgttggaccctagataatcatgagctgtgtagttccttttgcttcagactagaacattgtttaaaatggtcatcgctcacctatgatgattttatcatgtgcacaaatgatttagacatgaactgttacagctgcttacctggactttgttctcccccttagcggctcagggagatccagaggatacagtattggagcatttttgcttgggacttttatagtagggacagcttcatcagtctgtgattctgattgctttgttcttcccagcagagccctacctgtaacctgcagtaatctgttaactccagtagtagggattattgttgnnnnnnnnnnnnnnnnnnnnnnnnnnnnnnnnnnnnnnnnnnnnnnnnnnnnnnnnnnnnnnnnnnnnnnnnnnnnnnnnnnnnnnnnnnnnnnnnnnnnnnnnnnnnnnnnnnnnnnnnnnnnnnnnnnnnnnnnnnnnnnnnnnnnnnnnnnnnnnnnnnnnnnnnnnnnnggccgaattcccgggcatatgtccggtaccgtcgactgnnnnnnnnnnnnnnnnnnnnnnnnnnnnnnnnnnncgnnnnnnnnnnnnnnnnnnnnnnnnnnnnnnnnnnnnnnnnnataataccgcgctagcgccctatagtgagtgatcatcttggtgcgttggtttgtgtgttgtgttttgtgtagtg

SEQ ID NO: 147117 - DNA, 410 bp, Homo Sapiens
gggggcgggaagattttactcccgagtagcggaaagatctgctcgaggcctgggtgctttggtgtcggagatccgagagtcggagatcggagagtcggacacaggacagtcggacaccggacagtcaaacaccggagagttagactgggcttctcggtggggagaggctctgggataactactgttacagctttgaagggtcaagggaggattggccaccaaagcctgtttattagcagctgccatttgttgaaagaaatttggattattttagaaacaaatttggaaagaaaaagaatggcgtccgtttcagctctaactgaggaactggattctataaccagtgagctacatgcagtagaaattcaaattcaagaacttacggaaaggcaacaagagcttattcagaa

SEQ ID NO: 147118 - DNA, 813 bp, Homo Sapiens
  misc_feature (161)..(218): n is a, c, g, or t
atgcatatcattgaaaatttctcgttttcattttcttagatgacttcttgtctgagacagaaaaatttcctactacagcagtgcagtccagaggttaagatgtattagaattatacaatatcagtttaaaaatctgtatgcataaagaatgcaccactcannnnnnnnnnnnnnnnnnnnnnnnnnnnnnnnnnnnnnnnnnnnnnnnnnnnnnnnnngcagctacatttgaaagtgatagaataaagagattttaatgagttatcactttttcagctgatatattcattttaatggcttttttgaaagttcctttttcatgaacacacccgagaaatcttaaatagacactttgcaatatttaagaacctaatgctgtttaattttggtacagcttccacattgcatgttcactttagtatttgcaatttgatatatttcatggtggcaaaatattagctctgttttgggacattttaaaatagaactatccttgttcgatagcataggaaaatgttctggtgattgtcagggtctcctaatatttatctcaattcttttataagtctatggaaattatttaattattttaaaacgtacacacttttcttgtaaatatgtcacatctgagttcaaaaaaattactttgaataccttaatatttgctgcatttttttccgtatatataacatgtcttctttcagaatgggaatatatgtgtgcctcccaacatttactgttaaagtgtgttatctttatatgtcaaactggttgaacactgtaatgagaataaactgcacagagtttaaaaaa

SEQ ID NO: 147119 - DNA, 1656 bp, Homo Sapiens
  misc_feature (978)..(987): n is a, c, g, or t
  misc_feature (1345)..(1357): n is a, c, g, or t
taataatgaaacaggaagataatacgtttttatgctactgaatatgacatgaatgctctatcctaaactaatatttccctacctttcccaatgatgtcttcagttcaaaacagacaaagagtctaaattttgttagatgcttaaaggctggctcactgtttttctaccaggtattagaatactagttagctaaatgaggtataattaaaaaatagaccttcaaagtaaagagtatagtcttctgaaaatttataacaaagactgcacaaaatgtttctgtaaatagtaagaaaccctgcagcacctactaactgatgcacaggtagattattgtatcataatctgtctgaagtaaaatatagctaaaataagttcccagcgaaacgttttacaatcaactgatttacatgctacttagttacagcacattttcactgtctgataccctcagactctatttgaaaaggtctagtccaatcactgtcaaaaattaacacactgattaataaagtgcagcccactgaaccacctaatactgctgcaaaaatcttcatgtactttatccataagaccacaaaaatgttcacaaaaaaactagatttcttcagtttcagcggggaacagacaattatctgtcattaaattcatctacaaatagaaaaaataatgcactgtatgtacattattaagcaaagtggaatatttattgggtcattttatcatgcagaaagtgaatttcctaaggtcttagctcaatgtatatacaatctagcaaagctaaatgtaagaaaatagcaaggacaatttatttctatataacagagcatatactcccaatttgctgctacttcaaagagcacttttagactcatctaacttttacaggctctttcaagtgaagttcatggagactagttattaatccatataagacaaaagaagaaagaagaaatataaccaaagcaaagcattctgttnnnnnnnnnngtaataaaagctaaccacagaatatgtcagttttggtttgcagacaacccctgagattatataaaccaaagcgttaagacaccaaatagtcagaggtaaattactaagagaattacattcatacatggtgtcatagcacttatcttttagaaggtactttgttaccatccagaaagcgttaactgcttggattttttcaggaaatagtgaatattaagatgtttctaaaaaattatcttttccttttgaaaatgtatctaatttgaagatagtagaattacaataaactttcaatcacggaactactaattatactagaacagcaacgaatgacttttaagcctataggtaattaccnnnnnnnnnnnnnttaaggaggctgaaatttgtcaacaataagtttagtatatctattaaaaatagcttgggcatatttgcagctgctaaattgttcctatattttcaaataagtacaaaagattgactggtccaagcattctaatgacatatcttaatttgaagagaattctctgtggtaacaagcaatccctttccactgccatctcctgttcttatctatccagcatgatagtagcctttgtgaagcaaaacaggcataccaggaagaataattattaacagaattcatttccctcatcccctctgttt

SEQ ID NO: 147120 - DNA, 1287 bp, Homo Sapiens
  misc_feature (1169)..(1203): n is a, c, g, or t
tttttaggagctctttggactttcttttattatgctaaaatagtggtgcttttaggatttacattattgtactctccaatacaaagtatggggcatgttaaagtatacagtacaccattttcatacatgtacaacattggtggatgaagaatgtctcttagcagtaatactggatgtagcctctggttttaccagctgcaaactctaggactattatataagtaaaaatctctcttgtgatactggaaagtgattagaatgtgcaaactgatatagtagctttcatccgcctcttaaagggtaccaccacaggaaagtccatttaagatgttggtaggtttaacaaagttggaatgctggcactgttgaattgggcaacagtttcttcagacctggctcagagctacaatgcatttagtatattaaaggcagctgacatgatgactttttgcgagccttcccaggcactcggagtttttctgttaattttgccgcactaggtcataaaagatctcattaacatttatttttgattttgcagaagattctaagaatgcacagttgttccattgtcttgctagattttgaccttgttccttccctacaactctttcatcttccaagtcacacttattaccacaagaatcattggaacatcatcagtgtctttaactcgaagaatctgttctctcaggtcttgtaaatcgttaaatgtggactgtgctgtgatggaataaactaatgcaaatccttgtccatttttcatgtataaatccctcattgctgtaaattgctccgttcctgcagtatccaagatttcaagcatacactgttgtgcatctacttcaacttgctttctataagaatcttctatcgtaggatcgtatttttctacaaaattccttgaacaaattgtacagtcaaagcagactttccaacgcctcctgagccaagaacgactagcttatactcacgcatgatgcaagcttgtcaaaacctagtacctctcacgctgtcaccgggtccctgcagccagcgtcgccccgcgctccccccgggtcgctactctaggcgccacggcggtcctgccgctgccgcgccgctccggctggtttacccccggccgtaatggccgaattcccgggcatatgtccggtaccgtcgactgnnnnnnnnnnnnnnnnnnnnnnnnnnnnnnnnnnncgccgcttcctcgctcactacttcgctgcgctcggtcgttcgggcttagcgaccgctagcgcccaatgtaggtgtatcgtcctt

SEQ ID NO: 147121 - DNA, 1188 bp, Homo Sapiens
  misc_feature (255)..(346): n is a, c, g, or t
  misc_feature (430)..(441): n is a, c, g, or t
  misc_feature (472)..(572): n is a, c, g, or t
  misc_feature (1073)..(1148): n is a, c, g, or t
cccggaggcgtgaggccagaagaattggcggagctcttgggcgggtggaccttcaccgagatcggggattaacgcccatggcccttccagcttgggcgaacagaggcgagatcccctttttcccagctgggcttgggttcccttcctcccagcaaagggtggttgagcttttcccatggcacccacttggacctcttttggttccccttttttccagtgaaaagacttatgggccaggagcagtggctcgccctnnnnnnnnnnnnnnnnnnnnnnnnnnnnnnnnnnnnnnnnnnnnnnnnnnnnnnnnnnnnnnnnnnnnnnnnnnnnnnnnnnnnnnnnnnnngtagtctcagctttccaggagactgaggcgggaggaccacttgagcctgagatcgcgccagcctgggtgacagaccatgtctcnnnnnnnnnnnngatttgtgattaggattcttagtcctcaccnnnnnnnnnnnnnnnnnnnnnnnnnnnnnnnnnnnnnnnnnnnnnnnnnnnnnnnnnnnnnnnnnnnnnnnnnnnnnnnnnnnnnnnnnnnnnnnnnnnnntgacccgagtcagatttgggacacaaagaacagaaaccaagctgtgcaggtttctgacaggcattccggttagggagccctacagcaacccgccggtcctctctctcaggcagttgctgccatggctcattattccaaccggttctcctcagcccagtctatctcagtggctccattcatagggtgatgtgcccggcgggacactaaccctaaccaagcagagagacggtcatgcccgtcacgacctcggccctcgccccggtcgaggcttctcctgcaggtcgcgagaatcatggtgcgtcacgcggcgtccgggaacgccggaagagccagtggagcggctctgtagtccaaagtaccccgtcgaccccagcacggccgctccaccgcctcctactagacccacgtcctagggatctgcgccagtcgcagagctccgtccgagtaccccccggccgtaatggccgaattcccgggcatatgtccgctaccgtcgactgnnnnnnnnnnnnnnnnnnnnnnnnnnnnnnnnnnnnnnnnnnnnnnnnnnnnnnnnnnnnnnnnnnnnnnnnnnnntctactacacctgcgccctatatgatctatccaagtcttg

SEQ ID NO: 147122 - DNA, 946 bp, Homo Sapiens
  misc_feature (335)..(356): n is a, c, g, or t
  misc_feature (840)..(874): n is a, c, g, or t
ttggcccaaactcttgtttaatatagcgcaaatattttactggttaacattttgttaaatcttagccttattaataaaatcctgtagtatcacaaatatagttaatttttataattcacattaaaaatatttatagtctaaatttaaaatgatgaactgttaaggaaaaatcatttattataattttataagattttgcatgatttaatttacttttcccttctaatctccacactttggctcacaattatcacactacacagccagttatgagctcagacacatgaccaacaaagccttccgcacgggatttgctatgagaactaaataaattnnnnnnnnnnnnnnnnnnnnnncttagttgtttattttctcccctaaaccattactcccgacttctaacaaacagtagttgactacctaataaatatttgtagacctggattatggaggaggggtcagcaaggcaaataatttaaaactttaaaagccgaataaatttaactctgcccctaaatcatttaacaaaatagattcccatgttccaatggaaatcaagatttgtttttccataatgatgatcatcactttaccatcaactttcttgtctctgcacgtttagagaataaaatggcatttaatttgtactgagtataacctgaaggtggggtgggaaagtggattgcatcagcaaatgaagaaacaccagacatcagagacctgaacacctctgcactgggtgaaaactttacaattaggtgtttctttaaatggctccacctgccttgccccggccgtaatggccgaattcccgggcatatgtccggtaccgtcgactgnnnnnnnnnnnnnnnnnnnnnnnnnnnnnnnnnnncgccgcttcctcgctcactatctcgctgcgctcgtcgttcgctctagagtaggcccctatagtgatctatca

SEQ ID NO: 147123 - DNA, 1414 bp, Homo Sapiens
  misc_feature (170)..(170): n is a, c, g, or t
cccaaacaaagaaggcatggcggtggtcgcattgttaggggaagggatgtgggttgcccataaccccatgtcaatggtttttagatgggacccccctttttgcccctgggaaaattaagaaatgggagaagttttttaaggtgggtttttgcccctttccttgtttcaanggggggggaaattgtttattttagaaagtgggttaggcgcttcgctttttgggatggggactgagcctgggcatagaagacaagggtttgccacttgcccccgtgtcccgggaatgggacttcaagagcttccaaaacggcaggcaagcgcaacgggaggtctcctggggcgaccatttagcacctttgatttcacttgggcttcatgacttctgttgtctgttcccggcttcttaccaagaaattcttgttcttttggttttctagattgttcttctactcttcctctgtctccgctgccaggtgagcccactcaggaggaggacgctgatcagcaggaaaacacagccggccactgctacctggtactctgttgtaaatatggacgtctccatggttgcagccatttctgtctgtatttgaaaatctgttgttgtgacgaggcaggaagtctcactctcaggacggccttcggggcttgcctgaggcttctcttcacctggaaactgactggtctccatttcacctgtgcatatgagctggggctgggtccaccttgtcttcccgtgggtcattttgcagacgctctcagcaggacctctgtgtagagccctgtatccctggacgcactgataataaaccatctgccccaccacgaaatgataaattctctctgtggcttcattttcccatggtggaggttccctgcagtgacctggaaggctcgcttggtccactggctgcattggactttgcatttctgtggttttcctttctttctgttcttcaggttgaggtgtcacttgtttcgttgtgttccgagtggcagagcttgtgccattgacattggttgtcccaggacgagtggctagagtttcctgtacagagcatatagagtgacccgctttttattctgcggaaacctctcttgcattcacagttcaacatggttccttccttgtaggccatggctttgaatgtggcgtgtgggatctctggcgggtcatcgtcacagagctctgcctggcagccaggcaccatgatgaacgtgagcagtccccacatcagcaggtatgaatccatcttcctgacccttgggaccagccggggcagtgaagcggaggtctttctctgcagaaggcccagttgccgtcagcctctttttggcatcgcgccggaggatgtgggatgggaagatcggtccgcctgggctgtcacccttgtgggtccatccagtctctccc

SEQ ID NO: 147124 - DNA, 953 bp, Homo Sapiens
gattgtccaagctccgttccccgggctttttaggggagaccaaccgcttttgctggcccaggttttctgggaccgtttggccctgttccgtactgattgggtccgggggcccacggagttgtttaagaactttttttggggcccagaggcggccgcaacggtgtttgtggtgtgtgcgatgtttttcttttgctcatgtataaaacacatatatccacatatggttattagtattatttgttgaacaccatttttgttttcacacaatgcaccttttcaaaatcaattgttccttcttcccagcattaccccaggctggcaaatgacaaatgaaaataagatccctgctggaaatagtggtataaaaagcattttccattttatgtgcacttttcaacccagagaaaataagaaatttgttttatttttgtgcagtagtttctaaaatataatcggagagatgctagtaaacatttaactttagattagctttctcaaaacttttaagcgctggaatgaaagatttgcttacattctgaagctggtgcagggtatcttttttaagccttctttggcatctcattttcacgcaccatctgagatgacttggaaaacaccagaaaataacaacactacttccacaaaacaactgcctggacagtgcctatttctacagccatcatttatagaactctttttctggggagaagttttattttaagtgtcaatactaaaagatggtatatttggagttggctgcttcaatcagtaaatgtagtcagcaccgactcagaaacagcttatttttaataattggaagaagaaatatttctagctgttagttttaaatggctacaaaggaaagaaattatttttttggaattattagcttgccgtatgtgtcccggccgtaatggccgaattcccgggcatatgtccggtaccgtcgactg

SEQ ID NO: 147125 - DNA, 1198 bp, Homo Sapiens
  misc_feature (590)..(604): n is a, c, g, or t
  misc_feature (682)..(691): n is a, c, g, or t
agaggtggcaataggagagggtccatgtaaataggacgaggtagacagtggatgattgtaggagaagggttgaagggaggacatgattccaaaaaagatcgttctcaatgtgtcgtctgactcaaccagctggcagattacacttgccaagtcgttccctttccttctaagtcagttggctccatattcacttgaatatgcctctgtttgggcaaagcaagatacctccacttaacctttatccaaggaagctcttggtgtcctcttggtcataaagttgtctcctacctaacccagttttaccaaatggaagtaaaaggggacaaactatggaagatggactccatgccattgcagtcagccaccattctcttttccatataaggagccccattacataagctacgggtgaggttggaacagctatgtttcataatttcaagagtgtgaccaccctgctctagtcatcatcattggatgaatccagttgactctttggcaaaagggtgatacttttcactaaaaatgcctactcttcctgttgatgttccttttctgtttttaccttgtccaatttccacactagtcannnnnnnnnnnnnnnagaggatcagattttagcgctggaaaatgagttcaaaaatttcagtgtaatgtcataaggatgttgggatacagagannnnnnnnnnccttggaaacaaatggactgggaagaaacacagcatggctttgctctgagtttcaatctgatgattatgaccatggaagatagtcttatgtaaaggttaaatggtgtttaccagtggatagataaggcgggagatggtgagaaagccgggttttctctatgctaaatgtgtctactaagagcagcacttcctactagctaagcacaatcatagccccccggtgatgagctggtagtctgaaataactttcccttgacttagggaaaggcacacaaaaactttatcacgactatgtctatttcatactgtgtgatactggacagagccatggttttcctaaaatataggtccctctttacctggtgaatcttagccaaatgcgcatttcttccctacattacaaaccatccctgttgttcccaattacacacttgttcagtatgaacttagaaacatcaacttcgtaaaccaggaatacgttccctcagggtacgcatatcgccactc

SEQ ID NO: 147126 - DNA, 645 bp, Homo Sapiens
  misc_feature (53)..(94): n is a, c, g, or t
cttatacagcttttagaattttcatgacaggaggaccgttttctcaaatgagnnnnnnnnnnnnnnnnnnnnnnnnnnnnnnnnnnnnnnnnnnacttgaaccttaacataaccttccaatgcactgaatttaaacactgcctgaaaaggtttacggtcaataggacatgaagccagtgtctctgcccatttaagaatacaagtcatacagaagacatgattacagctttctggaaaaccaacttccttttctaatagacaattaagacatattgggcatctgtcagcctcactgtacaacagaccagtggaaatagtattatctccgttttcttcaccttccatgtcttcatacttcttatctcccatatttagggtacatacagttttcttcttcatttctctttggaaaagggtttcctcagaccgaggtcgaggcgctcggtccggccgcggccccacagtaggttcccaggtcccagtcactccgctgccaagttccccaacatggactccttcgtccgctttgtggtgttacagggtctctaggacactgactccgctggctcggtccggaggcggcggcgaagcagggagcgacccaggttgcgctgctccgcgcggcttaagccaccgctactcccc

SEQ ID NO: 147127 - DNA, 1890 bp, Homo Sapiens
  misc_feature (250)..(260): n is a, c, g, or t
  misc_feature (426)..(472): n is a, c, g, or t
  misc_feature (510)..(523): n is a, c, g, or t
  misc_feature (569)..(585): n is a, c, g, or t
  misc_feature (592)..(597): n is a, c, g, or t
  misc_feature (601)..(740): n is a, c, g, or t
  misc_feature (784)..(792): n is a, c, g, or t
cccttcgaaagatttctgagacccgtaccggttaaatgcagagggtggaacgccttctaaggttgagatttgtccccccccggggtgcccccttttaagggcgcaagggagtttttgccccccgttcccggggaaatatttcccccggccccgcgtggtttcccccggggaaataaaatgttcccacaacccgggttgggagggtccccccccgccgccgccggcgagaaagggctaataaagataattnnnnnnnnnnnattctcccctaaaaagagggcccccgggggggcggcgggaataattggtttattgagacccccgcgcaaggggcccccctgtttagaaaggcaccccaaaaaaagccccgccaggagaccccccgtggggggggttttgtaaaaaaaccctccgtggttccccgcnnnnnnnnnnnnnnnnnnnnnnnnnnnnnnnnnnnnnnnnnnnnnnngggcgggattttcttttgaggaacaaattatgcccccnnnnnnnnnnnnnnctggggggggcgccccccccaacaaaggtgttttaaaaattttttnnnnnnnnnnnnnnnnncgcccgnnnnnngggnnnnnnnnnnnnnnnnnnnnnnnnnnnnnnnnnnnnnnnnnnnnnnnnnnnnnnnnnnnnnnnnnnnnnnnnnnnnnnnnnnnnnnnnnnnnnnnnnnnnnnnnnnnnnnnnnnnnnnnnnnnnnnnnnnnnnnnnnnnnatgttctggtatttttaattttcttactgggtccattttacttnnnnnnnnntataaaacatttttaatgtatcttagaaaaattagcaaaaaattgagaaagttgagcatattacattgtacaatgttttcatacgaatgttttaaaatcataaatatttggtttcccctcaacatagcacatcacaaaaatacatttcaaaaacttttttcatatataattcctgtaaatgatcatatccctacttattaaggaaaacacctgatgacaagcactcaaacactcttgaaattttctgtacagtaattacaaaagtaaaaccaagagttctgttggccctttaacaggtgaaaccattttaaatagtatcaaaatataattccaaatgggatatacttagttcatttctgtgctatctttgattcacaagtatctatcttagccaaagcactgtttaaaaggatattgcctcctagacatagtgccacctgaaaaccaagatgtaaatcggtaacactatgcattaaacagaaagcttttgcacaaccacatatgtaaccgcttagtcgtatcaaggtccacatgtgaccagaaagcaggcagtccttaggtggatggccaggggccaggcagtgtgaggtctccaagaacccagggctagagcagctaagccccaggtcatgttatcagctacagctgtggaataagccaggtttaaagaaggacattctgcaaaagtgcaggacctatttcacaacttctagaagtagaaattcacatattccatcatgatcctccccaccatgcagagactatttgactcctaaggccacactgtttccatcccatagatttcacagaggtgattaggttctttgtagaatactttttcctcattctggaatgagggatactggagtcttctggtgtgatgtgcagtcaaccacaggaaaggttccattccttacctaagtctcgtttgtctaatacacctgccagctactgaataaaatgataatactgataaatggctgggcagaaatccaacacccaaatcagctgtcaaatttcaaaggcacatgatacaaaaatattttagcccggccgtaatggccgaattcccgggcatatgtccggtaccgtcgactg

SEQ ID NO: 147128 - DNA, 943 bp, Homo Sapiens
  misc_feature (867)..(901): n is a, c, g, or t
ttggaggatgccagtgaagtccatggaagtaaggagcattctttaacaccagattgtgattgcataccttgttaattatttgagattctgagaattctgataaacccccaaggcagaaagattcccttataccccttggaagatgggaaaggctgagggaaatatttgaagcagggtcagaacatccactaagaacatagcacctcagtagagcttacattatagtgccagggtagagttattactgaatagcttaggatgatgaacattaaccttcctacaggagtagtagcagctgatttggtgaccatgattggtcaccttttagtgtaactgcaaactaagaacaattatggcttgacatatactccatgtagggaagtgatgggagaggcagcctctgtgtggtccatccttggaagcactgcatcgattttgctcccctctggttttaaggagatcttttagaccgtttccttgctaactgctttcagtaaattcttgatggccttcgattctggattcagacatctcttctcacccttctttttcattgtagcaatgatctcaacacgtggacaaaattggcttgcaggaataatttcaagtttttctaaagaccttggattaacaggttgattactaatgctgatgcaggtacagcgtacagttctagagagaggtactccttgaatgccacttagagtcagaaagataaggcagcaaatcagaatggcagtttgattcatggtgctgagactggaggttcctctgctgtaggctcagaatatgtctaagcaattgaggaatgtctcccccggccgtaatggccgaattcccgggcatatgtccggtaccgtcgactgnnnnnnnnnnnnnnnnnnnnnnnnnnnnnnnnnnncggccgcttcctcgctcaatgactcgctgcgctcgttcgttc

SEQ ID NO: 147129 - DNA, 939 bp, Homo Sapiens
cgaccttacagcgcctgcctctttctgagcggcatgaagccacctcccagtgcggcgagcggccccggcgcgctatctgggcgaggtgaccggtcccgcgagctggagcgctcgcgagaagcggcagctagtgcgactcctgcagtgcgcggctagggccagaccggagccggtacgccaccgagctggcccgggagctgcggggccggagcgaggctgagatccgggtcttcctccagcagctcaagggccgcgtagcccgggaggccattcagaaagtgcatccgggtggccttcagggaccaaggcgccgggaggcacagcccccagcccccatagaggtctggacggatctggctgagaagataacagggccactggaagaagccctggcagttggctttctcgcaggtgctcaccatcgcggccacggaaccggtcaccctcctgcactccaagccccccaagcccacgcaggcccgtggaaagcctttgctcctgagcgcccctggaggacaggaagaccccgcccctgaaatacctagctctgcccctgctgcacctagctccgcacccaggactcctgaccctggcccctgagaaagcttctgagtcgtcggctggtccctccactgaagaagactttgctggtggactttgagaagatctacaagtacttgtcctctgtctcccgaagttggcgcagccccgagctctcagcagctgagtcccgcgggggccctcgaccgggtcctgggcactttccgaaagagtgtgcacctccggccctgtaaaggcccggggttgagccttttggacgggaaaacgttccttagcccctggacaagcccccccaagcccattttccccctggggaggggacctctgggggccccgccacacaaaaagggggaaatggggggtttggcctcccaaggt

SEQ ID NO: 147130 - DNA, 1018 bp, Homo Sapiens
tgggataggaacatggtccattgcggaacgttaatggctccttcatccaaggaggacagctggtgactgccaaatggaagggacctcagttgttacgcaagtggagccttctgttgccatggaggccggtctttcgtgctaaggaagttggggcctggttttccaacagcaggcagagccttggttgccagggagcctgagacctctgttaccaagaaagccggaatcccccgttgctagggaagaaggagtacccattttcctagagtctgatgcttcagtcgcccggaaggatggggcctcagttaccaggtaaggcaaatcctgagcatcttccgggcttccgatgggttcacagagggagttcttgcagtggtagccagagggacattgggagcacggagtcccctcctggtagggccgtttccccttcacgttccccggaggctcatagttgcacaccagtaattcgatgttggtctcctcaacaccctggagcttctcacagaagtgggaaccacagccgatcctctctgtcttggcccataccacctgcgtgtagtggccgcacatctggcctgggctgcaggtggcggcgctgaggttgtagtgctcacgctcgtggtgccactcctccatggccagcggcacgtccatgccctcgtctgtgatggcgaacagattctcgccgcggcgcccgcgctccttgttgtggccccacacgcactgccgtgcgtaggccttggcgaaggcggccagctcctcgtcccatctcatgtgcagcatgtctgaggccgtcggggatacctgggcccggtagaggttgtgcagctccaccatcaaacgtttctcctcatctgtgagggctccaacggggcctgtggtggccaccagcagtagcagtagcggcagcagaagcatcaggaaactgcaggagccgtgcatggtggccagccgtctctccttcccccggccgtaatggccgaattcccgggcatatgtccggtaccgtcgactg

SEQ ID NO: 147131 - DNA, 992 bp, Homo Sapiens
  misc_feature (863)..(897): n is a, c, g, or t
  misc_feature (901)..(939): n is a, c, g, or t
tggacttgtcccccaggcagtgtgaacgtaggagatttcaataaagtggtctccaacttccctgaaatcttaatgagagtagcccaccgaggtcctatttggacaagagcagcatcgtgtttcaaggatctgagagttccgaaccaatccgatatcccaatggttgaaaggaaacacgtgtccacaaatgttggcttttgggatgataccctggtgtactaaagatctgaattaagagttctgtttaaccaaagcataattgtggtaattcatcaaaagcagggtcaaaagaccaagggccgagaacctttcagacagtttcccagtcatcttcagttcagcgagggtatgaatattttgaacaaggaatttagcagatggtccgtgagctgaatttgaaagccacatatagagatcctgttttttcttagcttcaaaatagatgcatttattacagttcttcatgtcacaacctcgttaatcacaaatagcttatccttacgatccattttagtatctgctttagaatgaggcatcaacattctcaagtcctgcattaaatgtcttgttctaaaatttattcctctggaagaaaagatgagaatccgttccttatttgtccactgtgtcccttgcaaaacggggcctgggatccggtccctctcttcttcctgcacctcctctgctgtggcggtgccgcttagctggcggctccgcatctatttcgtttctttttggcttcttcgcctgaactgcaaagcctgccacgccgtttcctcttggttgccgccatcttgcctcgccgcccgccccccggccgtaatggccgaattcccgggcatatgtccggtaccgtcgactgnnnnnnnnnnnnnnnnnnnnnnnnnnnnnnnnnnncggnnnnnnnnnnnnnnnnnnnnnnnnnnnnnnnnnnnnnnnctaaaaccgtagcccctataggagtcggttgcagttgggggggttttgtttcc

SEQ ID NO: 147132 - DNA, 1220 bp, Homo Sapiens
  misc_feature (1100)..(1134): n is a, c, g, or t
gcccacgaccagccggggcggaggagtcaccatctgctgcactctcctcgtcactcggggctccttgggctttttggggctggggcgggtgcggggtctcttccccatgatgcgggccacgtcctacagggtgcggccctcttcttccaggaactgggtcagccgctcccgaaattctgcttccttggtggcgggcttagagatgactctccagacgcccccagccagcctgacctcccgggggatgagcaaatagtcgacgtcctccccgatctggcagcatccccagccgtggagtcctcctccttgcggaacaccttgccgatcttcttaaatgtccccacgggctttagggcttccacgaggacgtccaaatccacatctttgcagacatcggggacgctccaaagaatgaggcagtcgggggacggcaggaagccccaggggaaccagccccccacgtggcttttctcgagagtctttaagatctccagggtgatatctggggtgagggggcaatgagccccaacaaactactgtagcccttagtcttgagggagggactggatggggggagttccagcaacgctgaccggagagtctcacctccctagccagggacgagccaaacgcctccaatctcttcgcctgcaacaagtacagtcttgaccaagtccggctcccccaccaaggacttgggggaatcaatttccaggatgcctacgtgagccgggggcgaggtcagtcccaagggctacaaggcccactccaagctggaaacgtggtgtcccagctccaagttggggcgcgcgggctgccagcgactctgtcctgccccaggccccagggacgcggctggaacttgggacaggacttctgcagacaaagacggtccagtcgaagctattcaatatggccgaggcgctgggaggccccagcccgggcctccagtagggtcccccgcccccaggcaggccgccacccagctccaggctgaccttgacgcgccgcagcctgccagcccgcgcgcttagagctctgcaccgtcccccggccgtaatggccgaattcccgggcatatgtccggtaccgtcgactgnnnnnnnnnnnnnnnnnnnnnnnnnnnnnnnnnnncgccgcttcctcgctaactactcgctgcgctcgtcgttcgactataacacggggccccatatgtgcgtcagtatactttctttttg

SEQ ID NO: 147133 - DNA, 949 bp, Homo Sapiens
  misc_feature (839)..(873): n is a, c, g, or t
agcgaacagagaaataagtccaactatgtaagcacaaggcagtcatttcccagtgggtctatcagtgatcggtcatctgtgaggaaatgtgacgctcattgctttcatggccacaaatgctcttctttcctccacatgtcctaagtagatggcacataaaatcataatcataatcattgctaatacttattgagttattcattgtataccactcataatgcgtaggtagcgtgttacctgcatgaggttcatttatcattacatgtaatacattcatatcagttagggtttccatttggagatgcgaaattacaattcgagattatacttgtctaaaggagcacacttagtaaaccagaacagaagtgaacttagctgggggtgtgaacacaggtcaataaattcattcattcaataaaaatatcacctgagaatctagttaggtaccaggcattttcttaactttgggaatcaaatacaaaataataaaactgtctgctctcatgaattttaatatcatagtgggcaacatgaaaattttatatttatataaaactccatgatacctactttcagggggaaaaaagctacaaaaatcttttttttaaagtaaaaacaaacatgaagttccaaaatacatacttccactttgcttttattctttagagataatgatactgttggcatagcatagcttccattgactggaaacatgagtaagaactgtatgaagtatatgatattcttacaatcctatagtgagagaggttaagaattatccgcatcatcccggccgtaatggccgaattcccgggcatatgtccggtaccgtcgactgnnnnnnnnnnnnnnnnnnnnnnnnnnnnnnnnnnncgccgcttcctcgctcaatacctcgctgcgctcgtcgtcgctgttaccaggtagccctatatgagtctatacatgt

SEQ ID NO: 147134 - DNA, 778 bp, Homo Sapiens
aactttgcaggtcaattttaataaacagaagcaattaagtcaataaatgtccagtagggtcaaaaagcacacttttcagaagagaagtacaatccaatgggatttcatttcagttttgtatttgaactactgtaagaagagaagcattaatttaacatgttttcttgaggtgctgcttagctgcctgagagttacctctgcattggtgttccccaatcacagctcacagtatatgcaggcttcatatagtacagcctccaaacaccgcccacatctaccagaaaaccccagataagcagcacttcccgggataagccaacagcagtcccaggagtccagcttacatggcagcatcaaccaacaagcaccacagcccctttctctgtcttttcctttatttcagctacccatccagtgggatcttatgaaacaaaacaaaacctttcatgccaaacttggagtgtcttgccaacttaagcagaaacagcattaccaaaaggcaaaatcccaccacagacgcaatcaccaccacagcatagaccgagagatgttcccgaccggttttatcagtgacgtctgtggaagggatttcattacttctgttcgtggtgtccccgatgtcattcgctgcagttccataatcttcataaattacatcaggataatttgggtttgcaccatcgtcaattccaggccagcccatgaagtgagcagaaatctgtttctcacccggccgtaatggccgaattcccgggcatatgtccggtaccgtcgactg

SEQ ID NO: 147135 - DNA, 566 bp, Homo Sapiens
ttgtaagaacccagataagcagcacttccgggataagccaacagcagtgccaggagttcagcttacatggcagcatccacacaaccagcaccacagcccctttctctgtcttttcctttatttcagctacccatccagtgggatcttatgaaacaaaacaaaacctttcatgccaaacttggagtgtcttgccaacttaagcagaaacagcattaccaaaaggcaaaatcccaccacagacgcaatcaccaccacagcatagaccgagagatgttcccgaccggttttatcagtgacgtctgtggaagggatttcattacttctgttcgtggtgtccccgatgtcattcgctgcagttccataatcttcataaattacatcaggataatttgggtttgcaccatcgtcaattccaggccagcccatgaagtgagcagaaatctgtttctcatccttcccatactcattcttggctattagagtgtagtccccattgttcatgtgagtgggattatccagctggagccatcgtgtactccgtgtgtttgggaacagtgaggatcggc

SEQ ID NO: 147136 - DNA, 946 bp, Homo Sapiens
  misc_feature (37)..(37): n is a, c, g, or t
  misc_feature (679)..(783): n is a, c, g, or t
  misc_feature (831)..(865): n is a, c, g, or t
cacttcacacctagtagatgggttaaaaatgttaaanctgaccataccaagtgttggtaaggatgttgaacaactggaactcttacacactgttcacaggaatgtgaaatagaataaccactttggaaaacagtaagttaaacatttaccaactgtgatggtttatacagagtgtcaacttgattggattgaaggattcaaagtattgatcctgggtgtgtctgtgagggtgttgccaaaggagattaacatttgagtcagtgggctggggaaggcagattcacccttaatctgagtgggcgccatctattcggctgccagcacggctataatgtaagcaggcagaaaaatgtgaaaaggagagtctggcctggcttcgcagcttccatctttctcctgtgctggatgcttcctggcctcgaacatcagactccaagttcttcggttttgggatttggactggctctcctttctcctcagcctgcagatggcctattgtgggaccttgtgattgtgtgagttaatacttaataaactcccctttatataaatctatagagagagagatatcctattagttctgtccctctagagaaccctgactaatacatataccaaggaagggatgtcaagaaaaattaactgtttcaggggtcaaatacagtagccacagccttgnnnnnnnnnnnnnnnnnnnnnnnnnnnnnnnnnnnnnnnnnnnnnnnnnnnnnnnnnnnnnnnnnnnnnnnnnnnnnnnnnnnnnnnnnnnnnnnnnnnnnnnnnggccgtaatggccgaattcccgggcatatgtccggtaccgtcgactgnnnnnnnnnnnnnnnnnnnnnnnnnnnnnnnnnnncggccgcttcctcgctcaatacttcgctgcgctcggtcgttcggctgctacgcggagcgccctatagtgatgatcgtcttt

SEQ ID NO: 147137 - DNA, 1082 bp, Homo Sapiens
  misc_feature (143)..(255): n is a, c, g, or t
acaccatccctaaccagctcacatattcaggtgtttcctggagatgcctctgagttccctggagatgcggtgaccaacaggcaaagcgtggtctcattcctggccagcactctggttcatatgatgtactgagcacttccagnnnnnnnnnnnnnnnnnnnnnnnnnnnnnnnnnnnnnnnnnnnnnnnnnnnnnnnnnnnnnnnnnnnnnnnnnnnnnnnnnnnnnnnnnnnnnnnnnnnnnnnnnnnnnnnnntttgatttctgagagaaggtagcagttgggtgtttcaaatggcagagctgatctttcctgctgacgccagtcttcgcaacatccctgtcagaatcctggagcttttttcccaaattagcatctgtttcccgaagtctttcacgtgctcgctgtatcttttctctgtcatgactaaggttttccaacatctcctgaccaatttgctcggtttccactgctatttggtatccagcctctagtctccgagatgacctttccagcctctctgtgttatcgagcagatgtgccctctggttctctgaggaattcccatcatcccccaggagctcattccgtacttcgtcactgtaggcgatccgtgaccttgttaaaatctgtttcgagttttcccatttcttgtttgtagcttctcattctgttgctgtacatccctcgactttggggtggtatctctcggacttccaaatccatctgttcaagcagttctttcgcttcttcaagctgtttctccacatttgcaaccatctgtttcttttcatcaggcgggagtcgtgggaccctcgcaatcttgctggtgatctctgcagtgagcaccgcgaagtcctgctcgtaaccttcgaagtcggacgacatggcggctccggaacgagtagcccaggccaagcctaggtcagggaaagggcctcgaggggcagcgaggggccccgcggcttaggaaccccggaaggtgcccccgagagcagaacgcggacgcgtgggtcgacgatatcccgggattccggaccgtaccacctgctttttgtgacgactgtttatagtcactatgg

SEQ ID NO: 147138 - DNA, 522 bp, Homo Sapiens
atgcgcgttgatctagaggatcccggctcgcgagcagatacatcagtgtcttctgacagaaaaagtgatcgccatcaggatggtgatgaccacgatgatccctaggatgacgagcaggatgcggttctggatgattcttcgcaacatccctgtcagaatcctggagctttttcccaaattagcatctgtttcccgaagtctttcacgtgctcgctgtatcttttctctgtcatgactaaggttttccaacatctcctgaccaatttgctcggtttccactgctatttggtatccagcctctagtctccgagatgacctttccagcctctctgtgttatcgagcagatgtgccctctggttctctgaggaattcccatcatcccccaggagctcattccgtacttcgtcactgtaggcgatccgtgaccttttaaaatctgtttcgagttttcccatttcttgtttgtagcttctcattctgttgctgtacatccctcgactttggggtggtatctgctcgct

SEQ ID NO: 147139 - DNA, 1198 bp, Homo Sapiens
  misc_feature (944)..(1036): n is a, c, g, or t
  misc_feature (1086)..(1120): n is a, c, g, or t
cttgagaatcttaattctgtcatctgtgaattagttatttctcctaggcttgtgatctgtatgtaaatttgataaacttttcaaagccattgattagaatacttgaacagaacaggagcctcatagcataccatgcaaggctaaagagtagattaatgatgttattcaaagctctctggatgcaacaactagcaagaattagctacaaattcatttatctatactattatctagttgataatttctaatttcacccatgaagatttcagggctttcttaaagacattttaagtttactgcatttccttgatttactatagtaataaaactaccaatatataccaaatattcatttaggcagcttgtaagaaaaagatacaccaaggtaagtttgtaatttgaaatgcaaagtaatattctgaacagttctccagaagtcaaaccaagaaatttatagtccaaaaagttctggagattggttttaggggaggggaaggtgaggagatcaaatatgaatgagtgcctgccattggcaataaaaagaaatgccaactcttcataagaaaaaattttatataaccttcaaggtccaaatacgaggagaaagctcaatcacccatttgttaatctccgcagctgggatgaacattttcctaaggatggagaagagattatactcactaatacacgagtcagtagttttactttcagtggctttttatctgatgtttatcttatatgatgacagctgggggacagagaaatgttccacttctacctatgtatcaactagatacctaagcccttcccttccaacagaacacagagaaatgctggataaaatgtagaaaacattcttttaaatacatagcagaacttacaagaaaggggaaatccttacggtcaaaaatgaggggaatgagccgggcgcggtggctcacacnnnnnnnnnnnnnnnnnnnnnnnnnnnnnnnnnnnnnnnnnnnnnnnnnnnnnnnnnnnnnnnnnnnnnnnnnnnnnnnnnnnnnnnnnnnnnccggccgtaatggccgaattcccgggcatatgtccggtaccgtcgactgnnnnnnnnnnnnnnnnnnnnnnnnnnnnnnnnnnncggccgcttcctcgctcactgacttcgctgcgctcgtcgttcggctcgagagctaggccctatagtgagttatcgatc

SEQ ID NO: 147140 - DNA, 1465 bp, Homo Sapiens
gttccttcctggggcttgcccaggagacacgtaacgttctggaaggaactctcattaggagtcagaaacagcacgacgaactctactttagcccacctcgaagaacacgcaaccttctaaaaccagaaccccggtgtgaacccttagacatttcagaacaggaccccatgcccacttccaaccagagcaaacacaatgcatttgcaggctccagtactctccaaaagcaaggtaaccgtttagtcttcctttctatcgatcccgaattccacaacttaaggcttggcttggggacccgcgtcctaaacaaagcctccttggatagactcagccctgcaaatccttcccatcttcaacacctcgaacacttacattgcctggtttatcttctagttttacagaagtgtcagctccccaggtactgctacttctttgaggatggggccatttcttgaacgtctttgttctaaacccatggtgagacccgcagcagggggcatgataaatgctttttaaatgaatgaaaaagaggatcaggtcaacactgggagaagacacagacacattcttgggtcacaagcctcttccaggatatgcctagaagactggctccctgcagtccgaggtcctttttctgttgtcgaaatgaaaatcaaatgcggctacttcctgctggtggaaagaacaacacttgaaaatctgagcagcacctctcatgtgatgtccgggagttgggggtgtggatgcttccttttaaacaggaggagagctcagtgtggtccccgagtcaggctggagaatctgggctgtgctaccggtttgcactccaatctctatcagctttaaaagttctgcttcctcactggagtacacggtggtgtctgtgtcatcggagtgatatccggactggtagccgcttgtctggtttgagccttcagatgccacagactccctgcttttgctgggcaccattccaccaaaagatggagataatttggttctgtcttccaaagttttcagctcttctgaggcaagaaccataccactgtccgtctggttgtcatctgggattacttttacttctggttcttctaacgggatatcttcaaatgtttttacactcacaggccggctctttcgcttactgttctgcagatactgactgattcctgctgtgttgtcataatggaatttggggtcacatacttcctcctcctccatacaggaaacaggtgaggtaggcagagagagtccagtatcctcttccatgctcaaagtctctgatatcggaagaacaatgtagtctttgccatcctgctgagcattagcttgcaagagatttcccaaatgttccgccaactctgaaaacgtgggtctctgactgggctccccgtgccagcagtacagcatggtctggtatatttctggtgtagtatagtcaggggccctcagtccagtcctgtcc

SEQ ID NO: 147141 - DNA, 1249 bp, Homo Sapiens
  misc_feature (1143)..(1177): n is a, c, g, or t
tatttttttccctcggttgaggaaaatttaaggtggccccttgtgggccaattatgtgttaaaaggtttggcattcttcgcccagtgatgggggaccagtatttttttcctaaaaaattgatattctgtcccagtgaaatagtaaacatgttggttggtttaaaaaccagaaacctgtttaagtttgacatgggcatgtctcttcggatttaaaaaagttatctttaaggtatggcttttgggaaatcattaataaactagccctctggaaaaggaatacaaatttcaagatgctaactaaatagaactcagacacaaggcaggtatttgtataatatgtctttcaattacaaattcatctacagtagaaacagaaaggaacataaaagtatgatctactttacagtaagctgtttttaaaataaaaattacagatcaatagtgaaggtgaggaaatttaactgagaaaattttcaaaatattaaaatattcaaaaacattgacacatgaataatacctatcttaaagtaataataataaatgacatgtgttatacgaacacatttaacatgaatcaggatttcttgttcttgatgtcagcacctactgtctaacgggtcgagacaaaatactgtgccttcaagagttagtcccattttgaacccctcctgcatctcatctaattttgattgaatatctggagggaaatctgctgctccacagttaaatgggtcaaaaggttctgctccaaacaggtcccgtttaatctcagtagatctactaggtactggaggtggctgtgtgccattgcgagtaggcatcgaagactggtgtgatattggagaaaatggaatcatatcaaagatgtcagtggagggcgacttaggtgtcatactgcctgctggaggtgctgatacttgagttattctcagttggttttccaaatcttgtactttatttttaagttccatattttctgtttccaagtcttggattcttttttgtaaccctgcgatctgttttcttgtttcaacatcttttcctcctgattctagaaatttcctgtatgccaggtcaaatgcttggccaatccccggccgtaatggccgaattcccgggcatatgtccggtaccgtcgactgnnnnnnnnnnnnnnnnnnnnnnnnnnnnnnnnnnncggccgcttcctcgctcactactcgctgcgctcgtcgttcgctcgacggtagcgccaatgaaggtcatatat

SEQ ID NO: 147142 - DNA, 844 bp, Homo Sapiens
  misc_feature (742)..(776): n is a, c, g, or t
gagttgaccagagggttacacagccagccctttccttttggtccggggtcccatgcaatctacacctgggtcgcaaagtcttctgcagcccacagttttgcacacgtggggcacagaacggcattgggtgcatgcctgtcgggctggggccacactggggaaagggcctcatggcaacatgcactggaagctcctcgtggcggaccatcctcagggccgccgaccaggaatgggaagaaaaagaagtcgaaggcgaacttcacggcgccatgcacggtgctgcgccagtcgtgctcgatcttcacgtgccgcctggtgggcgagagctgggccatgcagttgaggcagctgatggccttgagctcgaagacaggccacttgctgcccaggcggccctccaggatggtgctgaactcgatgaggctgccctggcgcaggctgagcagcacgcttttgaactcgctgctggcccgcagcacgatgtccttggtgacgtcgtcctcctcgcggctgcgcgagccgtcagcgccgctgctgaatggcatgcccacggtaatctcaaacttgtagcggtcgaacttcttgatgtggcaggggtgcttggccagcagcttaaggcgacagagctcctcctcggccgtggaggtgttgccagggctgcaggcagggtaggcctcgccgtagaggcagccccggccgtaatggccgaattcccgggcatatgtccggtaccgtcgactgnnnnnnnnnnnnnnnnnnnnnnnnnnnnnnnnnnncggccggttcctcgctcactacttcgctgcgctcgtcgttcgctcggcagagctagcgccctatatgg

SEQ ID NO: 147143 - DNA, 1558 bp, Homo Sapiens
  misc_feature (1252)..(1252): n is a, c, g, or t
tccggtgttatgatccgctgccgcggtggcgcctggagatcgtcttcgtgtcctcggaccaggaccagcggcagtggcaggacttcgtgcgggacatgccgtggctggcgctgccctacaaggagaagcacaggaagctcaaactttggaacaaataccgaatttccaacattccatcactaatattcctcgacgccaccactgggaaggttgtgtgcaggaacgggctgctggtgatccgagatgacccagaaggtctggagttcccctggggaccgaaacccttcagggaagtcattgcagggcccttgcttagaaacaatgggcagtctctggagagcagcagcctggaggggtctcacgtgggcgtctatttctccgcacattggtgtccgccctgccgaagcctcacccgggtcctggtggaatcctaccggaagatcaaggaggcaggccagaacttcgagatcatcttcgttagtgcagacaggtcggaggagtccttcaaacagtacttcagtgagatgccctggctcgccgtcccctacacggatgaggcccggcggtcgcgcctcaaccggctgtacggaatccaaggcatccccacgctcatcatgctggacccgcagggcgaggtgatcacgcggcaggggcgggtggaggtgctgaacgacgaggactgccgggagttcccctggcaccccaagcccgtgctggagctctccgactccaacgccgcgcagcttaacgagggcccctgcctcgtcctttttgtagattctgaggatgacggagagtccgaggcggccaagcagctgattcagccgatagctgagaaaatcattgccaagtacaaagccaaagaggaggaggcaccccttctgttcttcgtagccggggaggatgacatgactgactccctgcgagattacaccaacctgcctgaggctgcccctttgctcaccatcctggacatgtcagcccgggccaagtacgtgatggacgtggaggagatcacccccgccatcgtggaggcctttgtgaatgacttcctagcagagaagctcaaaccggagcccatctagcgtggctccggcctcctgagacgttatttaaaactcagccttctcctcctccccctccttccttccgcccttggacttacccagcgtgccccgaatcccaccacccaagtgtccagcctctctgtggtgccttgtttctgcagtaaactcctcagccagcaccctgnggtgtggaatcagcagcggcagagtccaccgtgtttggagactctgtttgggagcacgggatggccggggggccggccagagcggggctgcatggctttcgcaaagtcactagctttttggtgaaggatctgccagggtgtccccgctcgggctcttactctgacgtcggcacacacgggccccggacagcccagaggggaaccggccgggtggacccctgcggtgggaggctggaacctgagaaaagggccctcccgctttaaaagcttgggggggtggaggaacttcccctttttctaaagcaa

SEQ ID NO: 147144 - DNA, 776 bp, Homo Sapiens
  misc_feature (661)..(695): n is a, c, g, or t
ttcgctcttatatttcttcacaaactgctccatctccttcacctctctgggagacaactcatggcactttgaagggtccctggtcatgtgcaggggaggctggttttgccagctgcttgcttccggtactggtgccccctgctgagcctgctactggctgcttttccttgggtagcatctgcatgtactgcctggccaatgcttgattctggacaggaggagcccactcataggtaactgtattgatggagacattcttcttggcagcaactggattcgtcaatatcataacattgcgtttatacatgggaattccatctgactttagttttgcaatcagagtggtatacttggtgtcttcaaaaaagttttcccacttttcgatcctcttcattgctcaagaggacatcatgctcttcttggccacacttgcagttacgacatatttttcttcttcactttgttttccaggtccatgttaacgcgtcctatgggtcccctcctcctcctatccgggatcccacggccgggttcagctggcctccggctccgctgcgaacacgggaaacctgcggaactcccgcggcgccgctcaacagccactcgcccccccggccgtaatggccgaattcccgggcatatgtccggtaccgtcgactgnnnnnnnnnnnnnnnnnnnnnnnnnnnnnnnnnnncggccgcttcctcgctcaatacttcgctgcgctcgtcgttcggctgcaaagagctagcgccctatagtgattatacacttt

SEQ ID NO: 147145 - DNA, 859 bp, Homo Sapiens
catggcccccactgctgctggggtgcttctatcccctccaggaatgttcatttgttttggggccttgggcatccatctcacagggaagtttgacatctcctactcccagagcttcgctcttatatttcttcacaaactgctccatctccttcacctctctgggagacaactcatggcactttgaaggggtcctggtcatgtgcagggagctgctttgccagctgcttcttccggtactgtgccccctctgagcctgctactggctgcttttccttgggtagcatctgcatgtactgcctggccaatgcttgattctggacaggaggagcccactcataggtaactgtattgatggagacattcttcttggcagcaactggattcgtcaatatcataacattgcgtttatacatgggaattccatctgactttagttttgcaatcagagtggtatacttggtgtcttcaaaaagttttcccacttttcgatcctcttcattgctcaagaggacatcatgctcttcttggccacacttgcagttacgacatatttttctccagaagtgcagttcgaatccttcacatttttctttgcattttaaacaaggggctccaaatccttgctcgtgacctaagcccatcttcttcactttgttttccaggtccatgttaacgcgtcctatgggtcccctcctcctcctatccgggatcccacggccgggttcagctggcctccggctccgctgcgaacacgggaaacctgcggaactcccgcggcgccgctcaacagccactcgcccggcgccgtcgaacttccgccgcccagtccgccgcagcgggcctgcggcccggacccccc

SEQ ID NO: 147146 - DNA, 1090 bp, Homo Sapiens
  misc_feature (965)..(974): n is a, c, g, or t
gggggatacaagccatatcttatactgggggtgacggtcattcaaagagcaaattactgcagcttatatctttcccactatgtgcaagaaaatgaatctatcctgacccctaatatgaaagatgggacgcacatgcattcccgaggctctaaaatcccatttaaaagaaccgtttcccaattcctcgtggagtggagagtggtccacttgacttggtggaggtcagaagttcctgaggatccctgtcgtccccgttggcgggggagccccttgtggagctgtggggactgccacactccaccatgcacctgttggtttgcagggacagaggtgcggccctgactcttctcacccctgtgtcatccgggcttgtctttcgtctgtcaagtcagtcctcctgcgtgactgatgggtgcaccacgcttaggtcacccgttgcagggaccggaagtccatggctctgccgcaaccctgagcggtttgcagtcccccccggggaagaagcagtcagagaggctcacgctcacctactttaaaaacccaaagccacttcctcttcacctgcctgggcctcagcgtctctgcgcttgtggtttctcgtccccgagggctgactgagctgctccggaagggtggtgtgtggtcaaccttggttggctgagaggagcaatttcctggtttccacaagtaaagacagccccatcccttgggacctgtcctttccgtccctgtccctttggcttctataggacttccttgtcttagattcataaacagcaagaggaactgaggatgcttgaggggaccacctagttaccaaagccaagcaaagaataaagctgcccgacatcatccccaggcttccgtggcgctctcggtcacaggagctctaggccaatggttcctcttgactgtttctgcaccaaatgagaggaggggctgctctgctctaaggcgtggcggcnnnnnnnnnntggtggccacagattaggggacctcaggttttcctcaaaaacccacacagggaaagaaacttggctctaaaagcaaactcaacgaattccatcccgggaattccggaccggtccac

SEQ ID NO: 147147 - DNA, 841 bp, Homo Sapiens
  misc_feature (157)..(157): n is a, c, g, or t
  misc_feature (210)..(210): n is a, c, g, or t
ggaaagatttaccagaaggaggaaaatggggcttggttacaggaccaattagccctgttagagggatgttgcctgggtggattacagtacttgagggtggtgaaggtactgcctgctgaataattacacttgagtcagacttgtaaagcagcacatngggaacctgtaatgatgctggacgaccaatagctgatgtgggctgtgcagttngtgccaatggtacttcttcctcatcactggtagtagactctgggtgaggtaaaggactatcctggtgagttgtttctacaacagaaggctcctcaattttgcttcttatgataggtgttgcaagaggggataaatctagaggcatttttttaatgtcatcttctgaagctttcttgaattcattctcaaatggactcgccaactcattaaacaaacccacttcttcacagtttttcaagaatcttgttggtgttggggtctgatctggccacatccaggcgcagtacatagaaagggtttgtcatcactcatattccacaggtccttgtattgcctggcagaattcacatgtaacttgaatttcataagttgaataacttatcacattctttttctcatggcaagaatactttctagctggtgggccatgagctttatttactctgcttccaggaataccttagctgttatcaataagcagtcctttctcaagtttccatctagtaccctttccaggtcactagttcatgatcctttcggtcacccgcgagccctgagcacagccgtgtttacaaagcacccctggaggaaaaggctgaacggcactttaaaggccacgggctcccacccc

SEQ ID NO: 147148 - DNA, 684 bp, Homo Sapiens
  misc_feature (545)..(607): n is a, c, g, or t
ttttgggaagcccaaggcaacgtggatcaccccaaggtctggagttcccgaccccgccttagtatgagtgtgaaaccccgtgctcccctgttgagcgccttgtgtcccgccaatgccccggttggcaccaagcccgtatattctcagcccactcgggaagctgtaggacacggagggactgcctgggaccccggaattcggaaggtttcacatgagccgagagtcattcccctgcaactgcccgccctgggtgacccaaaggtagaatctattccccaaataataaaaaacaaagttattatttctgaagattgtatgaaatttataaaagtctgctggccctgatatgatgctgtcagtcatgattctgattactgtcttaaaatgctgcacataagtaattaaatttccttgtgaactgggaagtttcatcagacttttatcataactattgtttccatcatccacagttactgttttgaattcttctctaagaatatttgtaattggcaatagtccaaattttcttttgttttctttcctgnnnnnnnnnnnnnnnnnnnnnnnnnnnnnnnnnnnnnnnnnnnnnnnnnnnnnnnnnnnnnnnactagtgcactccagcctggctgatagcccggccgtaatggccgaattcccgggcatatgtccggtaccgtcgactg

SEQ ID NO: 147149 - DNA, 741 bp, Homo Sapiens
  misc_feature (637)..(671): n is a, c, g, or t
aggttgttcagccaaaagaagagactgcaggaagacaaccccattaaaagaatattccactagtgcaggcatgagccccatgatgacgtggaagaggaagacaacacatgggaatcaaagaggacagagaccagatatattatagtattccagtccaccttaactagcacccagaaataggagagaaaaagctaagaggaatatgaaataccaagcctcagaaagaaactaatttgaatgaagagaaatttagatttagacctcagtatgaggtatctataagatgaaattcagatccgacaggcaagtgtaggtcctaatgttagggtcctggtctctcacaaaaaatatggtaatttctaaatgtttccatagaattttcccaaactattcagaatattatttactgaattggtaaaccagtttactctctatagtcatctatttccattcactggtataggaaaataccagaattggaaatgtacattttgaggctctggagatacagaaaaataaaaataaatagaacttcgttattacttttaaagaaagaacagccgggagtggtgtcccatgtctgtaacccggccgtaatggccgaattcccgggcatatgtccggtaccgtcgactgnnnnnnnnnnnnnnnnnnnnnnnnnnnnnnnnnnncggccgcttcctcgctcactactcctgcgctcgtcttcgctcgacgagctacctatatgatttatcattt

SEQ ID NO: 147150 - DNA, 1614 bp, Homo Sapiens
  misc_feature (1498)..(1532): n is a, c, g, or t
ggaaagaggttttagtgcggccgcagggagcaccacctcagcctcaggcgctagtgaggacacaggccgtcctccggcggggagcacggtggggtcagggtgctgtgtggtcccgcaaagaggcagctgagcttgggcctcaggtcgttccacaccttgctcatctccttgtgcccttggatctgagagttgacgaaggcgcggaggatgtgggaggtgaggggcaggtagacgtggatgagctgcgtctcctggtgcaggcagtacagggagaagtagttccgcagctccatcgtctgaatcgcgttctcctgctccacgatgcgggactccagctgctccacggactccggctcgcggttctgcgcggtggcgctcatcatctgcctcttcatcaggctgtacttgtgcagggcccgctggtgcttgtgcaacacgcccttctcatgccgctcgcacaggtccttataggactgcagcagatccaagaagaggttcagcttctccaccacgtcgttctcttcctgcttaccctgttgtgcagccttgtcggcgagcagcgcgaattccacagacaggcctttcagagcctgtttcagggacccccacgtgctgctattcagagcggcccaggagggcagccggggtcgtgtcagcccctattgcacttagctccttcccgaatatgagaagatctgccgcattgtcgatggcccgcgacgcgatccgctcggccctgtcgcgaagcttgtgaaagctattgtagatgttccggatcagctcccggctgatggcaaactgagcctggatgtcagctgggaggaagtccttggccctggtagccagcttacagttcaggaattcgtccccgacgcactgtgctgactcctttaacttgttctgcacatccgagccgctgaaggacaggaagagcttgaggaccacatcctcggagaacagggggtgtcgcgccaccaggttgacgaagcgcttcagggctctcctcctggcctcgatgaactccctgtcagctcccagcattctcttgggtggcagggcaggcaccatacggtaggggaacttgtgcaggagcatctcctggaagaccacgaagtcattgtaccgtctgtataccgaggacttgaagcgctggctggaaacctcatactccacatgcttcaggaagaggcccttcttctccggaatgagctccacctgcacggtgtccctggccagcagctcctgcagggtgtgggacagcagcagcgggttcccctgcggcatctgcattcgactgggggctgggacctgctgcacgatggcctggggctcgatggcctggggtgtcggcagatctgacgccgggggatccgcctcctcgtcagcctccgcctcagctgccgccccgactgcagccgcgggcagcgggtccatcgcgcggccagtccccggccgtaatggccgaattcccgggcatatgtccggtaccgtcgactgnnnnnnnnnnnnnnnnnnnnnnnnnnnnnnnnnnncggccgcttcctcgctcactgactctgctgcgctcgtcgttcgctacgcgagctagcccctatatgactacagcaagttttt

SEQ ID NO: 147151 - DNA, 924 bp, Homo Sapiens
  misc_feature (32)..(34): n is a, c, g, or t
  misc_feature (60)..(60): n is a, c, g, or t
  misc_feature (63)..(64): n is a, c, g, or t
  misc_feature (814)..(848): n is a, c, g, or t
aggggcccggaggcgggccccgaacattgtgnnnttttatgttacgttgcaggatagggnggnngtgggccatttcttccacctgctgtggcccagaatttcgggctgggggggagaaattttcttgggggggcctttggttcacgctttcaggggtcttctttcggggtttcttcggtagaattgtttggggttccgctttctttgggattgctgcttctcccagcccccaagggtgggggtccttggtggtcggccagcccctgctgctccctcccctgttcatcgtttcttcacagtgagtagctggacagtgtcaggcttctctgtcttatcctttttcacagtgaatttaaagccaaccaacttaaacaccttcttaaatcccatatcattagcctgggactcagtgggttgtgttagctcttctaaattgctttctgaagaaggaatctgttcgattatttcgggtgtctcctcctgcccatcatctgtgatgtcgtgaacaaccgctgacttagtagccatctctttatcggagtctcttttgctcacatcttcagagtctctctgtccaactgtgatggtgatggtccccagcatattttaagtagcactactgtacaggagatcagcttagcgggtccctgccctccccggcagacgcctagtctcctgcctgccaaccgcaggtggtttcggcgggatcagagcggactgagcgcccagacactcccggaggatgggggagaaccggaggtgcccccgccgtaatggccgaattcccgggcatatgtccggtaccgtcgactgnnnnnnnnnnnnnnnnnnnnnnnnnnnnnnnnnnncgccgcttcctcgctcactactcctgcgctcgtcttcgctcagacgagctagcgccctatatgatctatacatctt

SEQ ID NO: 147152 - DNA, 976 bp, Homo Sapiens
gcgtcctccaggctgcacagtcttagtgcacagggttgtcttgggtcgcgtgtctgtgagcagtcgcgtcttcagggctcctcggaccctggcgcacaggccggtatatcccggtggcccggtgtacaggtcctggagtgtgcgccctcagggcagctgcccagccatgtctgtgttccattcccccagcttagtcctcatcataggagtcatcagttggagtcctcgccatccaccgtagaccatgctcggagcttggcttccgcgatggccaactgctcagccactcttgctgcaagtcgagcctcttgttcgccctcgctgaggtctgaataggaggttaatggctgattccagggtcagtcagtgtgagtcactcggcttgcgtccagcccttccactcaatgaggtgatccactctggcctgggccatggcggtaggcttggtcacgtggtccttcaccacctgggaaataccatgcagggaggacctggccagcgcagcgatctcctggatagttagggctcgccgggacttgggcagcatcgcgactgtgtctccaacattcacctgtggcaagtcctgactgtccaccgaggaaggtcgggaggacctgcttccagcctcggagggttcgagcagatcccaaagaggatagagagagaccccgaggaagttcgatccgctccacagcccaagcggggtccgaggacactttagctggagcagccgtctctatccctgagcctcggccagctgttggtccccagaaatgcctgacccgccgggctccgagagccgatgcagcccatggccgggcacccaggcacgctagcgtgcgctcggggcgcgggccatcgccttgcagagggtagggtcgcggtcacactggggaggggagagcccatcccgggaataccgagccgggccaggaagagaggaaggatcgacgaaggtggagagtggggggtgtag

SEQ ID NO: 147153 - DNA, 1031 bp, Homo Sapiens
  misc_feature (43)..(77): n is a, c, g, or t
aacgaccgagcgcagcagagcttatgagcgaggaagcggccgnnnnnnnnnnnnnnnnnnnnnnnnnnnnnnnnnnncagtcgacggtaccggacatatgcccgggaattcggccattacggccggggacttaccagcactcctggaccaagagctctttgagttactttttaattggtccatgtctcttccctgcaatatggttttgaagaaagctgttgacagtctactttgctcaatgtgtcacgtacacccaaactatttttctttgctcatgggctggatgggaattacccctcctccagtgcaatgtcatcatagactgtccatgacagatgatagcaaaaagcaggatcttagttcatctttaacagatgactctaaaaatgcacaagcacctctcgcattaactgaatcacatttggctacccttgcttcctcttctcaatctcctgaagctattaaacaattactagactcaggtttgccttctcttcttgtgaggagtctggctagtttctgctttagccacatttctagctcagaaagcattgcccagtcaatagatatttcccaggacaaactcaggcgccatcatgtcccacaacaatgtaataagatgcctatcacagccgacctagttgctcctattcttaggtttttgacagaagttggcaatagccatattatgaaagattggcttggtggttctgaagtcaatccactatggacagcacttctgtttttattgtgtcactctgggtccacttctggaagccataatttaggtgcacaacagaccagtgcaagatcagcttctctttcttcagctgctacaacaggactgactactcaacagcgcacagcaattgagaatgcaactgttgcgttctttctacagtgcatttcatgccatccctaataatccaaagctgatggcacaggttcctttgttgaactattttccgacatcttcctcaagaggggaacccttccaacatctgggaaccattttcaggggtttatacgaa

SEQ ID NO: 147154 - DNA, 508 bp, Homo Sapiens
  misc_feature (353)..(365): n is a, c, g, or t
  misc_feature (372)..(445): n is a, c, g, or t
agacgatgcagataacccctaggataactgctttcttctttcctttactcctggctcaagccctgaatttcttcttttcctgcaggggtgagagctttctgccttagcctaccatgtgaaactctaccctgaagaaagggatggataggaagtagacctctttttcttaccagtctcctcccctactctgcccctaagctggctgtacctgttcctcccccataaaatgatcctgccaatctaatgtgagtgtgaagctttgcacactagtttatgctacctagtctccactttctcaatgcttaggagacagatcactcctggaggctggggatggtaggattgctggggannnnnnnnnnnnnaaacagnnnnnnnnnnnnnnnnnnnnnnnnnnnnnnnnnnnnnnnnnnnnnnnnnnnnnnnnnnnnnnnnnnnnnnnnnnaagcaatcctcctacctcagcctcctgggtagctagcaccatggcatgcgccaccatgcccta

SEQ ID NO: 147155 - DNA, 870 bp, Homo Sapiens
  misc_feature (292)..(292): n is a, c, g, or t
attttatcctatgccacccatagtgcatgtcaatcagaatattcttttggacaatcagtggaattcatacatacttaaataacgccatatttatgcacaaataaattatttgtccagtaagacctaatctgtcctttaagaagactttcccacaatattcacaatacataatatcacagaacacccatatttggcctaaatgcctctgaattgtagcattacaagatggaagttcattgtgcctaatgaatttgattgagttttgtcccaaatgtcttccagagtttggctngttacaaatagtgtgttctattgtccatcttgctctataaagtgagtgtaaatttagtgcctttaaactatcttgcaattttttagacaaaggagaaacgtttttagtacaattattgctgggaagggaaatactccaagatctcctcttgtgctgttttcccttttctgattgtttacccagatttccagaattagtctgttccttcagtgtgtgtgaccaggttaaatgctgctttttcaagctaggttgaaactcccaatagatctactgtgcaatcataactgtgtgacttagcatcatgttctgaaatggttaagtactgtttcacatcttcagctgcctcttcagaaatcacaggtggtgatcttttaggtgtgagtggaagcttggacccatcatatggaaaccaaggtataaatcttgatagcggccgcgtaggaaagtcttgaattgctttttctgcaatttttggcagttgtgtgggatcactctcacatggtcgataatgtaatattacttctgtagcccggccgtaatggccgaattcccgggcatatgtccggtaccgtcgactg

SEQ ID NO: 147156 - DNA, 1335 bp, Homo Sapiens
  misc_feature (47)..(47): n is a, c, g, or t
  misc_feature (100)..(160): n is a, c, g, or t
tggccaccatgcaaaaaccccgtcttttccaaaaatacaaaaattancccggggatggtggtgtgcgcctgtagtcccagctattcgggaggcttgagcnnnnnnnnnnnnnnnnnnnnnnnnnnnnnnnnnnnnnnnnnnnnnnnnnnnnnnnnnnnnngagtgagatcctgtctcaaaaaacaaacaaacatttaaaagggaatgtttacctaatgggtgaatgacaccatcagtaatgaaaaatgttattgaccatacaacacacaaaagtgttttgaaacactagaattctaaatgagtggcctgttctggggctgccgctcctgtcctgagcattactatctcttctgagttttctgtgatcaagaagccctcaatatttcctgcttcaatttcccatatgaaatcaagtggtacctgatttttaaaaaattcaacccagaattcaagttttggactccgatatgacaggagttttgtcacggctgcaggccattggtccgtggcctgtgggaccaagcctctggttctgatgctctgtcagataagaaattccttagaatccagtaatttaaataacgatacaagtcctataatagtgcaattttggcaagagcaaagaatatcgatggccttttaaaggtcaggcagtgaaaaaaccattggacaaagtgtggactgttgctttgacatagtactagcactatgatgtctcccagaaggaggctggtcgtgtgtccacctcatcatcagcgttatcttctgatgacaacagagaaggatatggagcgacacattttacgttcacataagtagcgttcacatggacatagtgctccccaatgaaagtagagaagattgctgatatccgggacaccagttcagaaaaggatgggcgcatttcggctttagggtgccagcattttagcattacttcatataaggggtctgggcagtattcgggttgtaggagtcttctcccttgcaacaagtaaacagttatatcaaaggtgtttacgtcaggataaggtggggctcctcttgtcatcagctcccagaggagcacgccaaaggaccacacatctgacttggtggtaaacttttgagtttgcagactttccaaagccatccacttcactggcagctttgcacctgttttgttgtgtacactatagtattctttatcatacatgtctctggcaagaccaaaatcagcaaccttgactgtgaatttttcatccagcatacagtttcttgcagccaagtctctgtggacaaactttttgcttgcaagatatttcatgcctttggctacttgaagaccaaagcccc

SEQ ID NO: 147157 - DNA, 1076 bp, Homo Sapiens
tctgctctttgctcgattatttagtgtcgaattggtgctatgattagcggcgtaataaggttaaagcttattgtgggttatagggtcggagtgcccacagggtcgcaagacatggggcggtaggattgataacgggtagtgcaacgggaaattgtccgccatttattttggttcgcagccgggggcacacccctcgggcgggggcaccggattgtctaagaccccaggaatccccgcgggccaggacccatgtccagaggggcaagcaggatccaggtgtgcgcgcttggccttatacgggtgggcggcgtgggacccagagagccctggtggcgtttctgctggcggtacatgcagcagaggctgaggttgaccgagccgttgcagaggaaggatggcagccaccagcagggcccaccagggccggcgtaggccagcgagaaggcggcgccgcccggctgggcccagcgcatgcggaggaagcaccagctgccggggcagtactgctggtgttggcccaggcccagcaggggcagcgcgcagaagaggacgcagaaggcgtagatggctggcagcgccaggcgggcgcagcggggcccgtccagctgcgcgtagaggtaggggtggctcagcgccaggcagcgctccacggccatggcaaagaggatgagcatggacgccaggccgaagaaggtcatggcgaaggcgaaggcatcgcacagggcggggccgcctcgggccaggcccagcagggagctgttgcgcgcataggccacgaacacggccgggctcaggaagctggtgcccagcaggtcggtggccgccagtccggtgaccagcaccgcgaaggccgaggggcgcgccggtcgccgtgcgctcaggatgcccagggccagcccgttgcccaccacaccggccacgaacatcagggtgctggtggccggccccaccgagccccgcacgtaggtgaggttcctgcacgaatccgccatcccaggtctgggctctccagtcttgcccaggctctcctgtcccgtgcgtctgtgccttcacttgcttgctcctcgatcccggga

SEQ ID NO: 147158 - DNA, 957 bp, Homo Sapiens
  misc_feature (17)..(17): n is a, c, g, or t
  misc_feature (63)..(64): n is a, c, g, or t
  misc_feature (97)..(97): n is a, c, g, or t
  misc_feature (128)..(128): n is a, c, g, or t
aattcccatagaaaaanccttcatgtaccccaaatgtcaccactggcttgtaatcaaatcgcnnccaagaatagtcaccattagatttcactgggtntaattttatctatatcatcttccatcttgcncaggtttccagcacacaatggcattttcacaagaagcacttagaacttcatctctgtgcccttctacgcctccaaatattgccaccagagtgtccgtctggatattccataatcgtaaagcatgatctttacttactgacaagagaagatttggatctcttggatggaatttcagctcattgatagcatttccatggccaacatagtgctttatacactgcattgttataggatttattatcctaattatgcctctagatccagctacagccagcagaggatggctcgtattgctatcataggtccatgcacaagtgtaaaagttttcatcagcatcagcatccacgtaagattgcaacaaccggatttctccttgtgaatgacattcatacaaggtaactctgttgcttcctacagttgcaaacactaatggatctccttctttactgtgccagttaaactgaactccaaacaatggttggttatgatcttccttgagactatttacacatttgaaagaatatttgcatttctttgacttccattgttccctttccccaacttttccttccaggtgcatttggcgtgtttgtaggtgtatcagggcgttcagtgtttgtaccactttctatactgacagcgtcatcattctcgtctccagagaggtctggattgctgttctcgtcactgctcagcttctgcttcttggccgcaggcatgtctgttcccgccggcgcagtcgacacttccctctcggacatattcctccgcctccctcccccggccgtaatggccgaattcccgggcatatgtccggtaccgtcgactg

SEQ ID NO: 147159 - DNA, 871 bp, Homo Sapiens
  misc_feature (794)..(828): n is a, c, g, or t
aattacctattgggtacaatgtacatcactcaggtgacaagtacattaaaagccgagtcttcaccactacacaattcacccctgtaagcaaaaagtgtgtacccctaaagctattaaaataaaaaattttaaagatactatatccataacaggcatacatttgaagaatattaatccttaagaggggaaaataattacattttttcactggtaaaaagcgcagaactgcagtgttcagtttgtagactgaccaacaccctctccattccaaagggttactcagagacaattataggaacctcgttgttgttggcagtgactggtgaaatggccacattacccatttctgaacaataagacatgaggagacatgaggagaggtttgctgtgagaagctctgaaaaagagttattcaagtctatgaaggagactcaaaaaatggctcattttcttcctctggttgctatgaggtttgaaggggcccatgaaacagctacagccatcatgctaccagagtctgagaatgaagccagcgctaaagatggcagagcagagagctgggaagaacccagatccctggtgacgtactgaagtgctggagcctggcctgtttgaacgtctagttatgtgggaatatacatttccttattgcttaagccatttgaattaggagtttctgttacttgcagccaaaagcttcccaactgaaacaaggaagaaaggtagagaaaaagcaagcattacccggccgtaatggccgaattcccgggcatatgtccggtaccgtcgactgnnnnnnnnnnnnnnnnnnnnnnnnnnnnnnnnnnncggccgcttcctcgctcaaagactccgctgcgctcggtcgttc

SEQ ID NO: 147160 - DNA, 861 bp, Homo Sapiens
gttccctggggaccccctgtgccccagtttacccgtcctttatggggtccccgcgccccaacgaaatggtgttcaaaaccttttcaaagggcctagggccgcccaacacaatgtttgtgttgtagtatttatgtggatttttgccaacaaaggagaaggcctttatgttcttgtaaacggtcgtagcctgcaagtgcggccatctgtctgaggctgggaatctgtctcccaccaaggccagagacaggcacgtccaaggaggaggggttggggcaggagcgctatgctgaagggattggctaaacatacatatgtcaacaggtaacaggaggagctatgaatattcatgaaggtggtcctgacacatgccctcttattgagcaaagcatgtaatatatgacccatgttcactttggggtggagacttaacatgttacacatcttacaattagggcctttatggccaaacgtcttttcaggacacaaaggcatgcaggtgcatcatctctctctattaacgggtcagctggtcggcatggtcagctggtcggtggtctcttatcaggagaaagtcactgaaatcagtctcttgtccaatcacagctgctatggctgatcgtttatggaggatcctcttcgccccgggacgtgagccctaggaccaagaactgtgtctgttttgctccttgcggtgcaccggcgcctggacatacgctccatcaatgtgcgtcgcgagccgctgaagccccatttgccgagggggaaactgaggcacgatgctccaggtgatgagcctggcgcgttctccgcccccggccgtaatggccgaattcccgggcatatgtccggtaccgtcgactg

SEQ ID NO: 147161 - DNA, 924 bp, Homo Sapiens
cccccctcttttttgcccccaagaagggacttggccccagggggcccagggtttgcccccgcccaagaaagctttttttaataagaaatttcccattcccacccacaaggcaattagggttggcagaagaagggaagggcccgtggcgggcggtcccaggcccagggactcccacgggcagggaggtgagaagaaatccttgggaggaagggcgttaggcccaccaaaagcctgcccacttgctgcccaccaaggttgaaggccgccccgtaaattcatgggggcctgcatggagcccccaggggtgtacttggcacccacgcccagtgcccaggtccctgccaggcaagctggggccagcaggggcgtgcacggcagtggtactgctttccaggtacaccacttccctggccaaggcgaacttctgggcttcacgggacaaggtcagggaagctctcagccgggcgcctgctgggctccgccagtccactgtatgcccatgtatgaccacgggatggttagtgttgatcactaggtctcccaagaaactggcagggatgcccaccacagccccagcagggagtcttgggaagcctgcactcacaggctggaaggtgaaggtggtgaagggcttgtagcaatggcctgaaggaacacctatgtcctgtagcacctcttggaagaggctctgcagctgtggagggagcggagctggctggccctgaggccagtactggtagagccattggaccacgggatccgggaagaggtggtacgagactggaactccaaacaggcctgcacaggaacccaccaagaggcctgtcctgtgtctctgcacaaatgctgcggtccgccacaggggacctgccatgagtgtagtcactgcggacaatctccgccgccgctcggaacgcctacccc

SEQ ID NO: 147162 - DNA, 740 bp, Homo Sapiens
gctatgatttggctttgtgtccccacccacatctcatcttgaattgtgatcccataatccctatgtatcacgggagggacctggtaggaggtaactgaatcatggggatggtttccccatgctgttctcatgatagcgagtgagttctcaagagatctgatgagttttctacttccattttctctgctgacactcattctctctcctgttgccctgtgaaaaggtgctttctgccatgattgtaagtttcctgaggcctccccagccatgtggaactgtgagttaattaaacctcttttctttataaatcacacagttttgggtatttcttcatagcagcatgagaatggattaatacatgcagtctcatctgaaagcttgagtagggaaggattctattccaggctcacacggttcttggtaggattcagtgccttgtggcccaagggccccagctgttagctggctgtttgctcagtgactattttttcctaataaaaatagtgagcctgaaaaagctacttctaacccagcatgaggaaaagggctatggagtccacagtataagtctgcaccatgaaactttcaggctaaataggacagtataaatttagtgttttaagaacgatacctggaaccagactgccagcttcaaatccttgttctgccacttacaaagttttatgatttagggcaaatttcttcacctttctgtgatgttccctttcctccgccgccgc

SEQ ID NO: 147163 - DNA, 1126 bp, Homo Sapiens
ccgggggcagtgtcatgtgcctggccagggctacctctgtttctgaggacaaagccaccttctcagcagaggatatttctgtgtatgatataatgtcattagcctgtgcacacctctatttctgagagtaataccaaatccttggctgggactatcttgttttctttgggtggtcccatgtctttggaaggagccaagtccatttttataggagatgccctctctgtctctttcttgttttctttgggtggtcccatgtccttggaaggggctaagtccatttttataggagatgccctctctgtttcatttcaacagtgtcacatccttggctggggctacctctgtttctgtgggcagtaccacattcttggctgaagatacatctgtttctgtgggccatctgacatcccttaaccagggccacttctttttctgtgggtagttccatgtccttgactagggccatatctgagttccactggatggctgcaatgtccttggccagtgtcacatctaattttgtgggtgattccatatctttacgccaatgccacctcggtttttgtagctagtgccatgtccttggcgagggccatctctgtttctttagatggtgccatgtcagtagtcttcagtcccatcattatttccaatgcttgtgctggtggcctctcttctgatgcccatttctatctccttggctagctctaagggactgccgttggctgaggaggttctgcaacagcctctggggaaacaaaggactctgagtgtggagagtttaaggcttccacagaccacccctgaggtacaacagctgtgttgcagggagacataccgtaactgtctttcaagggatcattttgtcctgcaaatattgaagtatcagctgtcgcactggagggaaagaccaaatctgccaggtcatcatcatggtacatcttaaagggatcagtctggataggatcgaccacttgctcaggttggaaacacaaagttggtatcttctggccagttctggctatttgggtattcctggtaggccattttctcttcaaggaattcagttggagcccggccgtaatggccgaattcccgggcatatgtccggtaccgtcgactg

SEQ ID NO: 147164 - DNA, 804 bp, Homo Sapiens
gaccattgtgaggacaatgttaatttaaaataataacaataatagcaagaagaagtccggccccatgacaagaaaatctgctcccacctcagggcttttaaattttgacacagaattgtcaactaaagaaatgaggaacaactgggaaaaggaaatcgcagctgtgatttctcctgaactggagcatctagataaaacccttcccaccatgaataatctcatcagccaagataagcgtatcagctctaaccctgtggccaaaataatatatggtgacccagtgaccttcctgccccacctgccccggaaaagtgtggtccattgctctaagatttggagctgcaggaaaagaattacagttgagtacctccatcacattgtggaacagaaaaatggcaaagaaagagtgcccatcctctggcatttcctgcagaaggaagcagagctgaggctggtaaagttcctgcctgagattttggccttgcaaagggatctagtgaagcagttccagaacgtaccagcaagttgaatacagctccatcagaggcttcctcagcaagcacagctcagatgggttgaggcagctgcttcacaacaggatcacagtctttctgtccacatgggacaagctgaggagatcgcttgagacgaacggtgagatcaacctacccaaagactactgcagcactgacttggatctggacactgagtctgagatcctcttgccacgccgacggggcctgggcctctgtgctaccggtctcgtcagctacttgattccgcctacacaatgaacattgtcta

SEQ ID NO: 147165 - DNA, 881 bp, Homo Sapiens
cggcggctgagccatgggtgctgggcctgcggggcgcggggtcgcgaggacctgcgggcgggcggcagagaaggctgcgggacggcctagacactgagccgcggtgggatccccaccggctctgcgaggccctgcgagcgccagggaggcgccacgagggagccgggcagccgcgggccacttcaggggggcccgcctcgccgcccgggcggtcgagagatccttgggggcacatctcggggtgcggtgacccgcccggcgcatttcgggggtcggggcgcaattgccaggggacatctggagcccggccctgcttcttgtcgggctccagggtacccctggatggctgcgctgtgccctcgccggccgcccgggcgccgcagcggctgagttcgccgggatcgccgggccgccgcccttgccacccgctgcatgctcggcgcccgggtcgcggccacctggacgcactgggccccctggtcccctacgtgccgccgccgctgctgccctctatgttctacgtgggcctgttcttcgtcaatgttgctgatcctgtactacgccttcctcatggagtacatcgtcctcaacgtgggcctcgtcttcctgcccgaggacatggaccaggcgctcgtggacctcggcgtgctctccgaccccggctcgggcctttacgatgctgactcggagctcgacgtctttgatgcggtacttggagtagaggtctcgacttggtgttcccctcttccctacacgatccgcaaaaccactgccctggaccagacgccagatcatgccgcgcagctggttggggggcaccatctggacggggatggttcccaggaggagaaccctcccctgcctccgaggctacctgtccc

SEQ ID NO: 147166 - DNA, 1214 bp, Homo Sapiens
  misc_feature (1113)..(1147): n is a, c, g, or t
gctcagtaaattttgtatgaaactttaaaaggacttatggcatgtaaacattatttataaagtaagtcatggttataattatttttctcctgcctccttatgtatttatttcagaaatgagccgtcagactgctacagcattacctaccggtacctcgaagtgtccaccatcccagagggtgcctgccctgactggcacaactgcatccaacaatgacttggcgagtctttttgagtgtccagtctgctttgactatgtgttaccgcccattcttcaatgtcagagtggccatcttgtttgtagcaactgtcgcccaaagctcacatgttgtccaacttgccggggccctttgggatccattcgcaacttggctatggagaaagtggctaattcagtacttttcccctgtaaatatgcgtcttctggatgtgaaataactctgccacacacagaaaaagcagaccatgaagagctctgtgagtttaggccttattcctgtccgtgccctggtgcttcctgtaaatggcaaggctctctggatgctgtaatgccccatctgatgcatcagcataagtccattacaaccctacagggagaggatatagtttttcttgctacagacattaatcttcctggtgctgttgactgggtgatgatgcagtcctgttttggctttcacttcatgttagtcttagagaaacaggaaaaatacgatggtcaccagcagttcttcgcaatcgtacagctgataggaacacgcaagcaagctgaaaattttgcttaccgacttgagctaaatggtcataggcgacgattgacttgggaagcgactcctcgatctattcatgaaggaattgcaacagccattatgaatagcgactgtctagtctttgacaccagcattgcacagctttttgcagaaaatggcaatttaggcatcaatgtaactatttccatgtgttgaaatggcaatcaaacattttctggccagtgtttaaaacttcagtttcacagaaaataaggcacccatctgtctgccaacctaaaactctttcggtaggtcctggccgtaatggccgaattcccgggcatatgtccgtaccgtcgactgnnnnnnnnnnnnnnnnnnnnnnnnnnnnnnnnnnncgccgcttcctcgctcaatactcgctgcgctcgtcgttcggcagtacggatggcgccccaattgatt

SEQ ID NO: 147167 - DNA, 895 bp, Homo Sapiens
aatctatgtgtcgtgaccttttcttcagtaaatataacttttcaaagctcccactcaatgcccgactttaaatgtcgttcttccaagccatcaacccttgtcaagacaaccgtatttggcatagtttacccaacccacctgtccagttcagccattggaaccattaaattgcgtggacctggatgtttagttggatcataagaaagaacacacaggagatactgaaacttctttcccaggagggaaaacattgtatctgcatagcatttgcgatcacctggattaatggcaactaatgctcctctatcccaaatcatgtcaaatttgccaatatttgtcctgggaagatcaaaaatactgcaacagtacaatgaaatgttccccgaagaactcttaaatactttggttccaggaatttcggtgattggttcttctgagtaagaaagattctgctctgtaaaaaattcttgtatcccaagttcactgatttccacaccaactacactgtgtccccggtctgcaaaccatttcatctcaaccgcttttccgcaaagaggaaaaaataccctcagtccactcttgcctttaaggaaagtatctaaatgcttctttaatagctgatgtccttgttcctgatgaaaagcagtcttgccgttcacccacttgtcttgccattcttccagagttagtacttggtttttctgtacctcagtatccgagtactcttcaatgtcaagtgaagttcttgtaccatccatagtttcagagacacctttgtctcacaagcatatgtcttccgtgcctcgcttacagctggttgccggccattgcctccgccaccaatccccggccgtaatggccgaattcccgggcatatgtccggtaccgtcgactg

SEQ ID NO: 147168 - DNA, 787 bp, Homo Sapiens
gatcttatcggtagttatctaatagagatacttcttggacttcaacaggtaaagaagctatcctctgatgaactgctgcatcacctgaggctgcattttccagatcttgtaatgctctaacgagatctagagtctgtggtggttcacttggagatcccagagaggaacagttttcattttcatccacctttatctgttcataagttcgcttcctaggcttcttatcaccatacagagcttgtttaagttgttctaatacatcattttcataaacagacctttcttcccaaatagatagcactcttccaaggtgcttcttacaactttcatcagtttcacttgaaacatgcttaaaagcctccactataactggtgcaaaatcttttgtaaactctggccccttcctcttgctgttctgtatgacatcattggctaggtagagaaaagtaagcttcctgtttggtttggctttccgcagctcccgctcccacacggtgacgatgggccgcgagtgtttacggtggtgaatgagccacagggacaaggtctgcacgctctgctgcgagttgctcaactccgacagcttcttctccagcgccgcctcagagaaggctgacatccctccgacaccacgttcacgccgtcccacgcggtggggccgaggggaggagagtttcgccgccctagctgcggcctcgccccctcaccccacccttccccacgctctcaccacggccgccgcttcatccaagaccggccctcgtccgatttcagccgggctcactgc

SEQ ID NO: 147169 - DNA, 745 bp, Homo Sapiens
ccactctagtcatggtatgtgctctaaggaggttttattgaggtttgtacctctgaacttaaatctctacattttcctttccactaatctctatccaaaatgtcatatactttgctagttgctctgggagaagtcatggacatttaaacagcttatcatgcagttcaagattatatggcaaaataatgaggaaagtgccttaagaggtaggaagtaggctctcatcccaaccctcggtatgccctgttatgaacagttaagaaaactagaatctaagtggtaaatgtgaggctgatagtaataccaggcttaagaaaattaagttgacttagttactagaaatctttgagaacactcagtcacattggaaccagctgcaaatcacttgatcacacagaatacagcagtgtcaatacacataaagcacaccgtagatacaaattcttcttggccatccatatttgggcattatcattctggagattcttcattggaaaaagtggttaagtgtggctctgttgaataccacagtcccaataaagtgaatttcattccttcattaattggtctccaccaatggtcacttggggagaccagcaaaatgtaagcaacctggggttgaaaagaggactgttttcattaattgaaataaaaatactgagttaagtcaacttatctgtgaattaagtaaggctcccggccgtaatggccgaattcccgggcatatgtccggtaccgtcgactg

SEQ ID NO: 147170 - DNA, 894 bp, Homo Sapiens
  misc_feature (768)..(802): n is a, c, g, or t
  misc_feature (806)..(846): n is a, c, g, or t
ggtctgtgttctagattggtgtactaggtggtcatgtgaattagcgccgtgtgtgcttgtcccttggggaaggggtttcacagtcacagactggcgttgccccaggtccaggatgtttccagtctggctgcatgtcccgaaaggaatgcgatgcaatcttctgttgaagtctataatgttagaatttttggtatttttctgaactgcccattccttgggaatttacagaactccagctcagaagcttccgtaatcacagagacgttaggaaagggccatggagggaggatcgggaaatcttgctagcttgggatttggggaaacggaacaatccttcttggttttggtttcctcctctgcaactacaggatattgataataatagtagtaacggtaataactgtcatcattagctacccagcataccactgccatttgtactgaggatcgactgtacccacatggcttatcaggtacataagtgttgaccaactgtcaccaacaaattttgtataggataagccacctctttcttagagatactaatacatattatgcccatggcctgtcacagacagtctgttacacgttggtagatagtctcatgaggggccactcgggaggatatccaggctctcggtagacagagagtctccccggttctcctggtaggctcgcaggcctcctccccattcatcagccctgtacagctgaggacccggccgtaatggccgaattcccgggcatatgtccggtaccgtcgactgnnnnnnnnnnnnnnnnnnnnnnnnnnnnnnnnnnncggnnnnnnnnnnnnnnnnnnnnnnnnnnnnnnnnnnnnnnnnntatagccgcgctagcgccctatagtagtcttacattttgttgtgtgtc

SEQ ID NO: 147171 - DNA, 937 bp, Homo Sapiens
tatccagcagtaatcagtgattgcaggattaatggaactttttccttgttactacgcccattcccggcgatgaacgttaccttaaccgccaaggaagtcattgttattgcaccatacatgaggacctggagcttttccgaaagcgttgaaaaatatacatatacaaaatggaattatatttgacattttcctgacacctgcattaatactgtatgactaataaaagcatgtcagttgcctggactgaaccagcgatcaacatgcgcccagaatgcacacgagtaaaaatgcagtaaaaggaagtagtcttcattgcctataggtcacttccagtcaaaggttaaagttcaaagactgaatgatcaaagtgctcattttctcagtaggactatcttctgctaggaggatgataacagtggcatcaacaagtatcatcatgataccaccattttgttttctttggattcttgttacatgttcgcacataaaaagaattatccggtggtcgtctcttttccttgcagctggaaagcatgctaataatgctaagacaaactgattggactgagagcgctggggaccagtcttctgttagaatggataaacagatatgaccattgctataaacatgaggatgaacaggaatattttcaccagtaaacatgacctgaggagagtcaaaaggatatcgactactaaatttaaatagaagttgaaatttttccccttcatataaggtacctggtgcaccttccatgtctacaatccactgtgtaattgaattttgaacactcttctcatttaaggtcattccaggaggtgggtcattttgcaaagccaacagttctttctgtagtcgtttctgcattgacgccatgatggaaccccccggccgtaatggccgaattcccgggcatatgtccggtaccgtcgactg

SEQ ID NO: 147172 - DNA, 825 bp, Homo Sapiens
gacgcgtctggccaagtgcacgcctgcttggggctttctggatctcatagtagaagacggagtagttaagagcaggcctaatcggatgggtgggtgggctgcatgtgctctttgctgatctcgtgggcttcgctgtaggccttctcggaggactccaccaccgtcgcccttttctctccggtggccacttcagccaggtagcggtagtagtcccctttcatcttcaggtagaacactttgctctcgtactgggtctcgctgcaattcttgatcaggtagttatccagcaggctcagcacatcctggcacacagcctccaactccttctctatcttctcccggtacgcacggaccatctcaatcttcttctcattgccgtctgcagatgtcttctgctcaatgctactgatgaccctccaggaagagcggcgtgcccccacaacgttcttgtaggccacagacagaaggtttcgttcctcattcgacagtggctcattcagctctgtcacgttcttcatggccgcggccatgtcgtcgtagcgctccgcctgctcggccatccgggctttctgcaccagttgctcgcggtccaccatcttcgcggggctgggtctggccggagaaggaggaggacactggggcggcctgaagggcttggagggcgcgactggagcccaagtgccggagaggaccgacccacagagcgagcagctgaggcggcggctgcgcggaggaggcggctggagctagcgaccgcgggaccgggcgcgagcggctgcggcagctgtgcgtgccaccctcgtgccgattaaccccaggcctcac

SEQ ID NO: 147173 - DNA, 694 bp, Homo Sapiens
  misc_feature (47)..(64): n is a, c, g, or t
tctttttctctttgtgttgtatgtggttgtggctttaaattaaaccnnnnnnnnnnnnnnnnnngaagggataagcactccagcttaggaacgtgtggtcatcatacagccttaggctgcatgtcttcccctacttcttttttgtgaaagaaagctctagtcccatccaaagaaagatggcttcgtttctgcagctcaattcacagatcagactggagaggagccctttgctttccagaggcctcagggtggctgaacttcaggagaaggatcaaagagtaagcgcttcatcgcctctgctgtgcatatactgggtaggctagtgtgacattgagggagtcgttgtgctgcacaagggaggtgtgttggtaatgtagcaccagttctttcagagagctgtacaagttatagggctcggcaaagccatagccagttgctgttttgtttatgacacaatgctttacttcgccgtccaccactacagagcaggcatagcagccctgtttactgctctcccggacaagaaaagtgccatctcgcttccctcgcaacaggttttcagctttgtttcggttgctgcttccaacattccatgtcttctcatcatgatggggcaaatcttcatcatcttccaccagtgaatattggtcttcagtgttttcattgcccaaccactcgttcaacttcttttgcc

SEQ ID NO: 147174 - DNA, 947 bp, Homo Sapiens
  misc_feature (49)..(62): n is a, c, g, or t
  misc_feature (864)..(898): n is a, c, g, or t
tttttttgttgttcaaagagcatttctgccttgtttattctgcataacnnnnnnnnnnnnnntgaaacattttcaggattttgaattattactgctggtaatatatgccctttcactatgcattgttatttttactttgcccataaaatactgaggaaagtactgaataaatatatattttattaaacacacacaaatacaactctgttaaaattcatataaatcagttatgtctcactcccatccaaattttggcttatacatctttaaattaaaaaaactacagcatagcggtttaggctaccaaaagcctggttgataaggatgattaagtgctgaagttcagaactgaaccagaaatagctataaaccaaaatagaaaacaaaataataaagaaaagtgataattcacgtcaaagcctggcttaattttaatatactccatcctgaaaaaagaactttcctaaaatgttggtttttcaagaggacctttctaggttaaactgaacacaaaagagaatttccccaaatgagttttctgagccaaaggaaaatcaaattatgcttgcaaaacaaaaggaaagaccagtaatgcctctttccccctgccccacttcttcggatttgctttagtgtaggttttcctactgaaggccatttattaattctatattgtggggtttcaatgcgaccaaatctagacttaacccttcacatcctagtgggttgatgaataagactattttcagtccctcatgagctgggaaactgtatccaggatgtactcaaacacatgtagacatattgtctactcccggccgtaatggccgaattcccgggcatatgtccggtaccgtcgactgnnnnnnnnnnnnnnnnnnnnnnnnnnnnnnnnnnncggccgcttcctcgctcatatacttcgctgcgctcggtccggttttacg

SEQ ID NO: 147175 - DNA, 1219 bp, Homo Sapiens
  misc_feature (123)..(123): n is a, c, g, or t
  misc_feature (159)..(159): n is a, c, g, or t
  misc_feature (1109)..(1143): n is a, c, g, or t
ttattccagggggttttgccaaagccccccagaattttttaatttgaagggactcttggttattaaggaattttccaagattactttctcccacgccttttttcagggggcatggaatatgancgaaaaaatttcctctcaagtgcatttgggcagganactgatttctaaaaatttatgcaatggttacaaggttcatcccaagacatctctccctttcatcaagatagattctcagtttttccaaatttagtgttcttgtacagaagataaactttgctatttcctttggcgaatcatccaggatacccttggacataaagtagttcactccctcatctgggttggcattaaaggtgaggctgccttcatccagctgcatatacaattttctaaaagaaaatcctaaaggtgggttcttattgtatatggaacagtgaccccaagtggatttgcacaacccttgccagagaagttcatcattcgcaaggtcctgccaaacacatgaagccaagcaaaggtcagttgcattcaggtaggacaagatggtaaagcttagctcaggaggcaacatttccgagattaatgaatccttcctgttctttcgatttccttgccttcaaaagatgatatatgtcaatgcctccttggacttgtttacgatgattggtgttagaaatgttgctcgcagccattctcctgctctgctctctggtgaggtagccttgctcactgtagccttcttgttgcagctgctggtttctgaccactctccacaacccttgacccatctgcaagcctgagcgacctgcgatctccaccgccgccgcgacgaattggcctctgggcggggacttttagccaaaaggaaaatggctcagccgggaactggtgcccaggccatggagaagctgattcaaactttacttgtccacaccggtagaggtgaccgcgatgagaataccagaaacagcactacgaccctcagaactcagggtacctccagctgcaggggccagaactgccgactatcccaattttgacgtttcctattgttccccggccgtaatggccgaattcccgggcatatgtccggtaccgtcgactgnnnnnnnnnnnnnnnnnnnnnnnnnnnnnnnnnnncgccgcttcctcgctcacaaactcgctgcgctcgtcgttcgctgcaaaagtgaggccctatagtagttatcactgg

SEQ ID NO: 147176 - DNA, 865 bp, Homo Sapiens
gagagagtatgaagtcacggcgcgccgaattcggcacgaggcggtgacgcttttccccagcttttccgagtaatcaagtgaaaaaatgagcttcatctgtggattgcagtctgctgctagaaaccatgttttcttccgatttaattcactgtctaactggagaaaatgtaacacattagcatccacctcacggggctgtcatcaagtacaagttaaccatatagtaaataagtatcagggactgggagtaaatcagtgtgacaggtggagttttctgcctggaaactttcatttttatagtacttttaacaacaaaagaacaggaggcctctcaagtaccaaaagtaaggaaatttggaggattaccagcaaatgtactgtatggaatgatgctttttcaagacagctgctaataaaagaagttacagcagtccctagtctgtcagtattgcatcctctaagccctgcttccataagagctattaggaatttccatacttctccacggtttcaagctgctccggttcctctcttgttgatgattcttaaaccagtacagaagttatttgcaatcattgtaggcaggggcataaggaaatggtggcaggcacttcctcctaacaagaaggaagtagttaaagaaaatataaggaagataaatggagctattcctggttgagtagtttggatgctcttgtgtgtttatttaccactggagtagtcatcacagaggacagctactattatgggaagacgtcaacttttcgactgatagagctgatgagattaaagaagctactaaagagcgaacgcgtagatgctgccatgagaaaagtagatccaaatgtatcggtatcataagtcg

SEQ ID NO: 147177 - DNA, 1036 bp, Homo Sapiens
  misc_feature (961)..(995): n is a, c, g, or t
gggtgtggtgtggcggtggggtggtgcggggttcggtttttcctgtttgtgggcctgtgttaggggttgactgggtgggcggggatgcgtaggtttgtgatgatgttcgtgtgccccgtgctgggtgagggttgtttggttggagcgcaggcgccctggagggacaggtcggccgtgagccgtcgtttctcctgttcagttcgtcatgttggttggcttcgttggcctattcccgttaagttgatgggtggtagatttgttgccgttcgtttaaggtcggtactctgctgtgcgtgaatgcccagagcatcagtttagtgtgtaatgtctagtctgtaaggtcatggagattgtttgtcagcgatagacgtcagcagttttgagaatgctgtgatggcggaaggggagagcagcgagtgttacgctcagagtgaaagagggtgagggtagaggtcagtaactgagttaacctagagactgccacctgtccactgccactcaggtacaggctgttatgagagcgtagagtgcaagtcagacaatagcctgagaggtgtgaattcacgagtactttatgagtggtgagagtttgtaagaaaggatgtagtaaagcggtataagtgttgagtactgtgagggtccaaggtcttcgtaccagtaaaagtgttgagaatgttcgaaagcgtaaagtttgtgaaactagttataaaatggtgccatccccaaagtcagaagccacacatgcactacaagtactttctaaaatcatctttcactacaagtactttctaaaatcatctttctcttggttcattttaggcttaagaaataccaaataaaattaaattccttgggtttaagaattctgataatgttttaaacaacacctgactataagcttctttaggaccccggccgtaatggccgaattcccgggcatatgtccggtaccgtcgactgnnnnnnnnnnnnnnnnnnnnnnnnnnnnnnnnnnncgccgcttcctcgctcataaactcgcgtgcgctcgtcgtta

SEQ ID NO: 147178 - DNA, 728 bp, Homo Sapiens
cgacagaacgagactctgtcctgtgtcctgggcctccggggctcctgcgctgcaaccttccgctgcaggggccagcgccggctccgacgctcgggcgagcagttcccagggaggtgagctgtgcagacccagggcctccaccgaacgctctcttgagatctgctgataagcggggtggcttctgatgagttctgcaagtgcttctgtaaacttaaaagggagtccgctcaaaggcaggaatgactctacaagggtgaattttcaaatctgccataggggcctcgggcctcagcagcatccagagccctacggacgggcaggttcttacgtctcaactcccatcgcaccagtcctgcagctttctaaaggtatccagcactttctaccttgcattctatcttcatcttcgctaggcctcacagcaccgcatgattccgggggagggtgcttatcagactcgcgtgtggccccacggcacctagggcaccgtcgagcacacggtccgggaagctccaatgaaacggaacaaaccgcgagatcaggggaggtaggaggcccaccctacgccctgcccccgcggagcacaagccccgcctgcgtcccgagctcccgggtccgcaaagctgggccccaaagagctccaacgcgacgcgtgggtcgacgatatcccgggaatccggaccgtaccagcctgcttttttgtacacactggtttatattcacactgc

SEQ ID NO: 147179 - DNA, 989 bp, Homo Sapiens
ggctgcgtgtgcccgctattgtttttacgtgttgttggtgccgggttgtcgccgttgtgatctcgtgtgggtctcgatcgcctggcttctgtgtttgttctcgtcctcttgtcctccttgatgtgctgggtttgtctacgctgtgatccctcctgtccccatcgtcgcataggttgttagtattctcttcacaatgggcgctaatggtatctctggttaacactaattgtgtcttccgattagcattcatgtagattcactatatcccatcatatgtgtactcatgtaatattcctattagaatatacatcccatagattactatagtagcagtattttctatcgtgtatgtcttatcacaactattgctcaaatgtaagagtttccttggggatatttctctcacagacagagaagagtgaatatgatcagcctatgagtgagtgggtaggagtatataccttggagttctaaaaatgatttaaaaaatagttaacactttagacaattgtaaatacattatcctgtaaataatagtgtataaaatagtttgaggcaacaggtattatgaatactctcataggaattaggaaatgttgttctagtaaccaatagaattatatctttatgattgatcaaagacgtgtacagaattcagtgcagatcattccctaagaaagcaagaatgaggaaactgtcacatatagcacacacattgaacaatgagtcaagagacaccaagtgaaatatgagtaaatatgctaaatagagtaagtgatcaagtaagtcaccaagtaaacaattcaaccagtttcctcaccctgtggattgtggattgcagagtctgaagtaatcaaatgctggtggtgggaaatggggcaacagaaagacaaagcagcacctgggcaggtccctggagcatgcttacctccaaaagtgcccggccgtaatggccgaattcccgggcatatgtccggtaccgtcgactg

SEQ ID NO: 147180 - DNA, 727 bp, Homo Sapiens
tgtcctcttatttggtttctgtgatttttccagtatgtgacgtcctttttggttgcagtataagcaagcgctattgttgagttcaatgtgcgtatgaatgcggaaatcctggatacagtggtgctgttcgatgctttgaacttccaaaaggcgtatgacattggctcttctcaaatattttagaatttcatttcagctatttccgtttttacgttcagaagattgggtgcagacactttcactgttgccaggaatgtttcttgataaatctgtgtcctttacgctgcggaataagtctttttctcttgctgttgcttctttggaatgcatgaaactattcaaggctgtttttgcagcttttccctttttctgcactccaggagtaagtttcactttatatttgtagtttgtcatggtggtgtaaggggcacatattggaatggcaaacagtagtacatcttcaggatgtggctggcctgtcaaagaatcaaataggttttcctaaaaagggaaaataacagttacaaaggcaattttataccgccctttacaaaaaatgctaaaacacttgaattagtatctcgaacatattttttatcttttcctgatatacataccatctaagctggaacagtggtacttaaactctgcttcatagttccaaagagttgaagacccccggccgtaatggccgaattcccgggcatatgtccggtaccgtcgactg

SEQ ID NO: 147181 - DNA, 845 bp, Homo Sapiens
attcccgggatctcaggcctgacggtccgagtggagctgcgggacagcccgaacctccaggtcagccccgcggccctccatggcgctggtgcgcgcactcgtctgctgcctgctgactgcctggcactgccgctccggcctcgggctgcccgtggcgcccgcaggcggcaggaatcctcctccggcgataggacagttttggcatgtgactgacttacacttagaccctacttaccacatcacagatgaccacacaaaagtgtgtgcttcatctaaaggtgcaaatgcctccaaccctggcccttttggagatgttctgtgtgattctccatatcaacttattttgtcagcatttgattttattaaaaattctggacaagaagcatctttcatgatatggacaggggatagcccacctcatgttcctgtacctgaactctcaacagacactgttataaatgtgatcactaatatgacaaccaccatccagagtctctttccaaatctccaggttttccctgcgctgggtaatcatgactattggccacaggatcaactgcctgtagtcaccagtaaagtgtaccatgcagtagcaaacctctggaaaccatgggctagatgaagaagctattagtactttaaggaaaggtggtttttattcaccgaaagttacaactaaatccaaaccttaggatcatcagtctaaacacaaacttgtactacggcccaaatataatgacactgaacaacgactgacccagccaaccagtttcgaatggctacgaaagtacattgaacaactctcagcagaactacggcgacacgtgtctatcatagcacatgtc

SEQ ID NO: 147182 - DNA, 771 bp, Homo Sapiens
cagtcgacggtagcggcggacatatgcccgggaattcggccattacaggccgggagcgtcagctgactcacttctcaaaaacggagctccccgagtgagcaattcctgtcccttttaagagcttacaactctaagggggtccgcgctgagagggtcgtgattgattgagcaagcagggggtacgtgactgattaccggctgcaccggtaatcagaacggaacagaacaggacagggattttacacaatgcttttccatacaatgtctggaatctatagataatataaccggttagagtcaggaggggtcgatctttaattaccaggcctggaatgcatcgccgggctgtctgacctactgatttcacttctgtactttctttataactcctacattttctttgaggcaagaacattgggcataagaccaatatgaaggggctgcgtctgactccacattcacttacgcggactattcgcagatatagcacaaacacaagattaactatgataagaatcagataattaaagggagagagcacagcgtgagacccttacagaatctacggtccacaaacagaacgtaatcgcaccataattatgtacgatcgtcgatgtaacaaaccacactcctcggcaaggtctttcaccgagtaggcatggtacagaaccaaggggcgaagggatcggacccagggatcaatgcccaggcgcacaagtgcacatagcgaaaattacaagcgcaaccacgcggaccagtgactagccacac

SEQ ID NO: 147183 - DNA, 1001 bp, Homo Sapiens
  misc_feature (347)..(347): n is a, c, g, or t
  misc_feature (360)..(422): n is a, c, g, or t
  misc_feature (469)..(507): n is a, c, g, or t
  misc_feature (516)..(533): n is a, c, g, or t
tgttgtgcgctgtgcggggcgcttcgctgtcgtgctcccgggacgtgcgtgtcgagtgcgctccgggtacggttgcggtcgtgtcagcggtctccgattgctggagcgtggcctattcggttacttgtgcctctactgtggttctgccgtcttcgcaggccgttacccttcggtgactagagtttgggtgcttcgtggatccggcctgcacgtctcccgcgtggtatcgggtgggattttttggttttggctaccactgcggatagtgtcgcaggatacaaaggattttcacgacggatcccttgtggatcacacttgttaagcgcccgctagcggtattccgggtntttccggtttcannnnnnnnnnnnnnnnnnnnnnnnnnnnnnnnnnnnnnnnnnnnnnnnnnnnnnnnnnnnnnnaccactttgtacaagaaagctgggtcaggaaacagctatgaccatgnnnnnnnnnnnnnnnnnnnnnnnnnnnnnnnnnnnnnnngcctcgagnnnnnnnnnnnnnnnnnnctggagtttaagctttttaacaagccggtaagaatgctttttatatccatatcgcttatgatttgtccacagggatctcgcatggaaacgttggatttttgaaacctttctacgaatcacatcaatcttcttatccaggttttgcagagcatcatatataacctggcaatgaataaggacatcatcaactgtcttcagttgctcttcagtattacaggatgcgtcagatacaatattcggttcctattttagtgacagagcctgtcacgccggcctccggaggtcgcggtaaaactgctcgcagtagtcctgcctctccgatgggcgacagctgtgaccgttaggccactcgacgcttcggaaaggtcctggcaccggaaaccgggcctggtcaccgcgcacgcgagaccagtgatgccccctcggtgccgaattcgacaccaggcctcgtactagcctattttgcca

SEQ ID NO: 147184 - DNA, 746 bp, Homo Sapiens
tgctcaggtctctgctggttggctctcctcttagccatgctgggcgtgctcatgaaggtttgcagagaccttggactttgacggactccatggagttgctgtactggaagcagtcagacacatctaagtcctcgacagtcactatgtcctggatggtttgcagggtgtcctccattgtcttctttacctcttcgttttcaatctttagactggataagcgagactgcagttcgttggcatctctgtaccagctcactctggacaggctgctgggcacagagctgggaagccatatcccccatgtggggctgaaactcaaacttcataggggggcagaagacgttgttgtacatctccatgaggcgctgcttgtcactggtggcatccaggttttctactgcattctcgatggcatccagaccctcatgcttcgactgttccaggtttaactcagcagagaggaaggtgcgtagagcccggttcagacttgcatggtagcctaagtcacatcactgatccataaggtcagataggtcatggatgtagtacttgaagacagatgcattggttgcctccaaagccagcaagtactcattctgggctttgatggccttcagcttattctccgtgtacttggcttggtgcttctccttcatcttctcaatcttcttcactgagctcctccggacatgtttccccggccgtaatggccgaattcccgggcatatgtccggtaccgtcgactg

SEQ ID NO: 147185 - DNA, 917 bp, Homo Sapiens
  misc_feature (778)..(812): n is a, c, g, or t
  misc_feature (815)..(854): n is a, c, g, or t
cacgaatcaactgcgcaaggcggcaggcaacagcggtgaccagggccgcacctttgccggacccatcctctgactgcaggaacgtgaccacacagcgaggggccagctcccgcactgtggccgccaccaggctggagaagcgcgggtgcagcttgtagagcgttccatccacccccacagacactgccagctcttccaggccccggttctcccggatcttctccaccacggccgctccacccgccccacagagctgggcagccctctgggacacagcctggcacacctctagcaccatcagggcgtcatctgaggtcaggggtagccccagatcctctaggatggctcggacctgccgcagggccaggctgtcactttcgatctcagagaggaacttggtcttgaagatgtccctggtctgaaggcgctggatctgctggccccggaagagaacgccaaggctggttaaatgtaaaaggatgtggcggacgatctcccccaggtacatgccgctgatcatcttttcaaacctctgcttgccggggttgatggacgcctggtccacacttgcatcaaagcgggtgctgagcatggccagagagccatcgtccccaaaggcgccccactccatgttgatgcacatgcggcctgagtccccaggcacgcccgccacattccggagctcctccatgtagcaggcattggtgccggttccgacaatgaggcccccggccgtaatggccgaattcccgggcatatgtccggtaccgtcgactgnnnnnnnnnnnnnnnnnnnnnnnnnnnnnnnnnnncgnnnnnnnnnnnnnnnnnnnnnnnnnnnnnnnnnnnnnnnnactaaaatgaaaccagccggcttaggcgcccccttagtaggttggagttccgtttttccagtt

SEQ ID NO: 147186 - DNA, 866 bp, Homo Sapiens
  misc_feature (747)..(781): n is a, c, g, or t
ctctcttcccgacatgattccacttagaattcggtggagggtgtcaacatcatttatcacacagatgcaactagggagtagcacctcaggtgtttgagggacacatcggttaaataagggaaatgacttgcttggaggaactggtagcctgggacacagtgagtctgcttttggactgtgggtatagttgaaggaattcaaactatagacacacaggaaggacccactggtgtttgcaaagaactggacctcttccagggagtcaagctgctcttcagggcagttggatacacagagggccatgcggttgagctgcgtacctttgacttccaggttgcaggaattcataaagaacacgtgtttttttagggtcatgtcctgccctgaaagaggggccccttccacgggggagttcttcttgccacacatgttgccaaagctgtcatagccaaagaggagtcttcccgcggctccagccaccaccgagtagcccatgataaacaccaaaccagtccaaaagagaaagaacaggaataaccatgccgtatctgtgcatttcctataaatctggggtcgccactccctttgcctaggggctccttctgcagaaaccaggtactcggcgcccaggcagtgcatcgtgcgctcgccggcgggggccggtgactgggagccgccgccgcctcctgtacgcccccggaccgtaatggccgaattcccgggcatatgtccggtaccgtcgactgnnnnnnnnnnnnnnnnnnnnnnnnnnnnnnnnnnncggccgcttcctcgctcatatacttcgctgcgctcggtcgttcgtatattacgacgctagcgccctatagtgatcgatacatacc

SEQ ID NO: 147187 - DNA, 801 bp, Homo Sapiens
ccctttcaattttgctaattgtttttgcaagggaaaagtctgagaaatcctctggaatggcaacatcgtcggcagtttggacatcagagtatttcaatttaacacttgaatttgttttccttcctttatttgcagagtgtaatttgttttgaaccttgtttacaggatcaatgtttttggtctttggcttagtttctgaatgaagatgaactatcccttcagatggtaacagacctcttaaactgtaatcatcttcgtcatcacatgatttcatttgtgttgaaacaggcctagatcgtacttcttgccgatctcgttattatttccttagcttgttgaaccacgtcagctgtttttgcctgcaattctgcatttaaacgcttgggctaaattttcgcccacttcaaatatcttctaatacgcaggcgaactactcagatcaaagacaaagaaaggataaacggcaggtgaacgagatgacgagaagggaatgctgcagagtgagtggtcccgaagatccagccagtctccagaaaaaagtacttgtaagcagcctcattcagatgaaagaaagaaggaaaagttcaaccgccgaatttcttacttatattcttcctccaggtcgaggaggtcgggtccaggtgtagagggttgctgaacgggtggtcgggatacggagtgcctggaacgctgcttctcgtgagacacagacttcgccccgccatcttcggcgactgcgacgcggttaccccccggccgtaatggccgaattcccgggcatatgtccggtaccgtcgactg

SEQ ID NO: 147188 - DNA, 896 bp, Homo Sapiens
gcattgggttgtgctgtgagtgtctggttctgttcgtctcccgggctcccgtgtgtgtctcggtctgctccttaccttgtgcgcctctgttttttggtgtgtgtccaccaagcgtgtcccccctggggctttgcgccgcatgtcgggaccatcgttggatgcctggtggatgtcccatctcacgttgctccattggtgccggtcctttactggtatgtagctccagtccccggctggccgtggccacgagttggctgatgtcttgattgcccattgcaggccatggcctgggtagaggtcccgttggcctcaggatcatgctgatgtgagtgtgctggtgtcgccgttattcggggcaggactggccatagtaaccgcgcttggtgagtgtttctgaccagtcgtgcctggcggtacttcctcgctcctcggcatcctggccatgacttcctctggtatccttgataaggtctggaaggagctttctgtggctcagggggtctggtactcgtgtgctggggcgtgccagggtctggcttgtgcgttttgattggaactgcatagatatcaggatgcttctgggcaatttcgatccttgcattctgtgcttcctggagctcctgcattctctgtaacctggccttgtgatccatcttcgtcaaatattttgactttgcccaggactgatttgggagcattatcttgctcctcactgctctctcccacctcctcaccctcttgaggagggatgggagtggagggcttcagtatagaccgcccaaaggtaggttttgctgcaacaggaggaggataacctttggtagatgccccaggagtttcattacccccggccgtaatggccgaattcccgggcatatgtccggtaccgtcgactg

SEQ ID NO: 147189 - DNA, 999 bp, Homo Sapiens
  misc_feature (902)..(936): n is a, c, g, or t
gtgccaatcaggagggtattttcagcaggggggaccaaatattcaggtgtcaaatcccaggtcatcatcatacccaaatcgtcgaagcacagtccaagtagtttcgtgtctccctctctggataaaaagtgtgtgtaaaaagagaaaacctttcagggtcaacccactgtcagccacaccatcacttatatgttttctgactacattcttgacatcctccagagcttgaggagctaatggagtggttgaaacaaatcctctgaaagaagttgagttcagcatcattgagagtaccatcattatcttgatcagatattttaaatatacgagtaagggcttttatacaagctggtttcatctccttctcctctgggcagtacaggggccctgtaggatgaagaacagctttctgtgcgtaataaaagagctctgatatgttcttcaggtttttcgctgaacactccacacaggtttctattttctgtatactggttcataataggaaggatggtctccatactactatattccacccagatcagatttgttcccaaccaatattaaaggcagcctgctgtctttgtctgttctttcatttatgagaggaatccatcgacttgttaccttatcaatagaatgcttgttgttaacggcatacactatacagatgacattagcctgagatatttcttgatgaagttgttcatcactctgttctgcttctgagtaatctacaatgtgtgttggaactctctctggggtgacatcagctggaatggtgatttcttctgcccggggaggaacctcttctggaaattcttcactgaccagagacataatcagtgatgtccccggaccgtaatggccgaattcccgggcatatgtccggtaccgtcgactgnnnnnnnnnnnnnnnnnnnnnnnnnnnnnnnnnnncgccgcttcctcgctcacagactcgctgcgctcgtcgttctgctatcagcgtggccctatatg

SEQ ID NO: 147190 - DNA, 790 bp, Homo Sapiens
  misc_feature (101)..(143): n is a, c, g, or t
ggaggaagtggaaacagaagtgaggaaacggggccaatcccaggcaggttaaaccgcaagttccttccgggacaagggccaaatccccccaattctaggannnnnnnnnnnnnnnnnnnnnnnnnnnnnnnnnnnnnnnnnnntttaacaattggaagagacagtgccacataggaaggacaataagagagaatattgcagctttatacaaaaagggtcaagaacacatgaaatgtgaactacagaaaaagcagaacaattaagccacgttgccaatcttcagagcccttgcctgcccggaggggctggcatctcacacgaaaataaactttcttcttagtcagtgggccaccagagtttgattaaagagcagggctttcaccagcaagaagcagagtgggtcgttaatgtaacacaatgaaccagtacaaacaaaaaggcacttgagaggacatagactagccagtgccaaggatttgtgtttttgttgttgcggttgtcagcagtatacccagtggccagccgtgttcagggatggcaccgttttctgtatggagttcacaagcacgaggtttagtacaacaccggaaaaacagcaagaaaactggacagtattgcttcgtaaacagagctgacacactacaccagtactgaggctacagtactttaaaaagaaaacagcctaatccttctttgcctatgcacgacgcgggcaattatacacaagtacaacttcaggagtccactgaaatgcggtgattctagtatattctggcactggttaaagggc

SEQ ID NO: 147191 - DNA, 926 bp, Homo Sapiens
agctcaaactgggcccaccggggagatatgggtcacaccgccacaggcaccagtggagaaagaggggaacacggggggacgaccaaaaggggcaccccgggtcgaacacgagcgtccagggggaaaagggtgaaacccaggcaaggtccaaaggccggccgtttaccgcccgatcacaatcatataaggtgggttagttcctctaatccaacaactcaagtctgtttcctttgagaccattatactattggctctagtctccaaagcgataaaaaactaaaacttgtttccaagactgggaggtaaagtaggcttataaaacgatacagcaaaagaaagccaagtggcctaattgtttccagtgtgcttgccatcttagcatggttactttccagatgtcactcataagttttattctacaactaaactgtttgtggataagccaccaccaaaaaatgtttcacttactgacagacacttcactagatacagctaccacttatatccatcatttttataattcaacttaagttctaaattgaagagttgtccccatgactttagctaaacaaagtgaaagccaaagctgtaaaatctatgtgaagaaccacaagaacttcctgactacctccacttaccaatttccttaattacttccccttttccatttggtcaattacttgctttaagtaactaccagtcactccctagttatgagtgttaatcaacactgatgccttcctcagatccacaggaacccctgaaggcaaaatctattgcctgcaccaaaccaattctgacagcactgcttatgcaactgtagtgacttattgacaatcagccgccttctgcttcaacaactcttagcatttcttacccggccgtaatggccgaattcccgggcatatgtccggtaccgtcgactg

SEQ ID NO: 147192 - DNA, 1054 bp, Homo Sapiens
  misc_feature (942)..(976): n is a, c, g, or t
aggggggcttctcccaaacttgggagaaaaatttttctggtacaagggttttcccccccttaagtgtccctaagaccccttctcccccgagatttacttccacctattttggttcaaattctgggggccggttttccctttccctggtggggccagggaaggaagggaggaccaattggccctctgctgggggtccccctaagtcttttctgcagggtccaggaggcccggaaggagttgagggacccttctgaccagttccttcacaaagcactcactagcctggcctaggtagttgctctcaaggaggtttgatggagctgttaggccaagggttatctgttcatattcttcccactcccaaggttgaattggggtaaaatcacaggcaagagctgataaagacatagaacttgaacgaaaaaagctattgagaggtgagcaatgccctcctcctttctcattttgtctgcttcaacatgaacgccaggattcagtgaaatattcaggaggcggccagtttagatgatccgatcaaccttgcttgctaggtggccttgggaagagtctgctgcattgtggacgggatggccgtgcgaagtgcagctggtaactggttatacactttagctaagatcaacagttttgaaggaagccaccagaggggctggtgtaatactcgatgactattcgtgtgtcggaatgagaaaagggttgtttgtttgtttccttgctttttaatggttcttagatgtggtcagcacgtacagcattccgttatcagaatacaagattcttgctgagacggatcccttaagctgacaggaaaattagcatagcttcctgctccttctctgtcctgcttccctcggccaaaatcccacaccatcccccggccgtaatggccgaattcccgggcatatgtccggtaccgtcgactgnnnnnnnnnnnnnnnnnnnnnnnnnnnnnnnnnnncggccgcttcctcgctcactacttcgctgcgctcgtcgttcgctgcagagagctagcgccctatagtgagttatacag

SEQ ID NO: 147193 - DNA, 595 bp, Homo Sapiens
  misc_feature (201)..(282): n is a, c, g, or t
catgtgatacatttgaactttggctactatcaagaaccaaaggaaatgtagtacttgatattttgtcttaatataagtacatttaaataattaaaaaattatcaacacataaatgtctgaacatcaagatacataaatatctggggattccttgtgggaatacagtagttaaaaatgacccaaagctgtagctgtttctcnnnnnnnnnnnnnnnnnnnnnnnnnnnnnnnnnnnnnnnnnnnnnnnnnnnnnnnnnnnnnnnnnnnnnnnnnnnnnnnnnngaatcatatttctttccatggtcaaagcaagaaagaagcaagctcaatttatatatgatttatataaacgtatataataaataaaacaccacccaaatgcaaatacgcattttgcaattgataaggtgcggaaaaattaaaaataaggattagatgccaaacagggcgagttgcatccctcctctccccccaccccaaccaaatgtccacactctttggaataaacacacttggttaaaaagttaagtcaagggtataaaatccccggccgtaatggccgaattcccgggcatatgtccggtaccgtcgactg

SEQ ID NO: 147194 - DNA, 1072 bp, Homo Sapiens
  misc_feature (86)..(120): n is a, c, g, or t
  misc_feature (570)..(630): n is a, c, g, or t
aactgatacgatcactatagggcgctaccgccttagtagccgaacgacgagcgcagcgaaggtcagttgagcgaggaagcggccgnnnnnnnnnnnnnnnnnnnnnnnnnnnnnnnnnnncagtcgacggtaccggacatatgcccgggaattcggccattacggccgggcggcaggacatttcttaaccatggggctgtgatgggaggagaggagaggctgggaaagccgggtctctggggacgtgcttcctatgggtttcagctggcccaagcccctcccgaatctctctgctagtggtgggtggaagagggtgaggtggggtataggagaagaatgacagcttcctgagaggtttcacccaagttccaagtgagaagcaggtgtagtccctggcattctgtctgtatccaaaccagagcccagccatccctccggtatcggggtgggtcagaaaaagtctcacctcaatttgccgacagtgtcacctgcttgccttaggaatggtcatccttaacctgcagtgccagatttagactcgtctttaggcaaaacctacagcgccccccnnnnnnnnnnnnnnnnnnnnnnnnnnnnnnnnnnnnnnnnnnnnnnnnnnnnnnnnnnnnnctaatgcgctccctgggcaacgcttcagatgcgttgaagttggggaccacggtgcctgggccaggtcagcagagctgcctcgtaaatgctggggtatcgtcctgtggagatgggaaggtgactgcaccccacagaggcaaaacttggcctccatcgcacagctggttacatctagggcccaaagtcatctgagccatgtgaacttcattgacgcttcgctgtgggtaagcctcttccatctatcccgaaggtctccttttggcaggcttatgtaaactggtgcttacctatttaaagcaagaccctccagattatatactgatggcaaaaaataaggcggggcaggggggacccagaaactcggggcagggagaaaaaaggggggaatacaaggagggggggccgcgctctaaaggctgtctgcgcctctctcatcccctcc

SEQ ID NO: 147195 - DNA, 828 bp, Homo Sapiens
  misc_feature (228)..(228): n is a, c, g, or t
  misc_feature (717)..(751): n is a, c, g, or t
accttaatagtccaggttcttaaaaaatttgaaaaggaatgtcccacacaaagccttgattataccctttaccctttagtcacaaaaggttacgtagaaaagcaaggacatttaagtattaccaagaatctaacttatctccataaatttctcttcatatattcatttgcttacttgtgacacagagtccccactaactcacgaagcattctctaagctggcctcctncactggctctgagactgtttgctgccccacagttcgtaattcccatttggaaaggaaagaggaagtacaggagaaggagggtcatgcagggccacatccagtcagaactctcacaaaaccttgagaaacagggcaagatatcccttccaggcaagatatcctttacagaagaaaagttctggagaacttaaggcagctctagaagggaagggagcaagggttaaggcggccctcacagcacagcctgagaacaaattacaatgcactcatccatgaacagaggtcacggcaatacagatcctcttcaacgcgcatgcacacgacacccctcctagcacccatcaacacctacggcatgcacacactgcagtgcccacgcacacactgacttgtatatggcctgcccagtgacagccctcggaaggcacccagtgacttcccggccgtaatggccgaattcccgggcatatgtccggtaccgtcgactgnnnnnnnnnnnnnnnnnnnnnnnnnnnnnnnnnnncggccgcttcctcgctcactgacttcgctgcgctcgtcgttcagaacagcgcgtagccctatatggtgctaacaagg

SEQ ID NO: 147196 - DNA, 1003 bp, Homo Sapiens
taaggcggttatctttctgtggcccccccttcttcttttttggccccaggggtttccatcaatcccaggccatggaaggccccagcgtgaggtgatcccaggagggcagttccccaattgttgacctaaacgtgtaccttgccctaagtgaggtggtgtccctatgggaaactcagggccttagaaatggttttcaaaagtaggtggctttcaaaaattactggtttgccttctttcaaacttcacacctaagggaaaatggaaacatgcagagcagggacacagaaggggcattagctggcgtggggtaggggcaagagctaattgtgaaggaagaaggcctgagatcacgtagccatgtcggagaacagctgtgctcgctgccctgcctctttgcgcgcatgtcaggcagccccaggctccagctgcttgagtttctcttggagtccccggagctggcttcgaccccagtcaatgcggttctggaggctggctatgtctgcggccagctgcaggccatcccggaagcttgcttgagcctgacgtagactgtgaggaactaggattccaaaccagttcagggggtcctgaggggcctcagaggactccggttctggggtcttagtggggcccttgcgcctccgcagacctgcttcgcgaggccccacctcctctggggcgtggacaccagctctcaccaccttgaacttctggagtccctcctgggcctcgctggcgtggaggcagacctggggctccatgtgggaagcatactgcaggggccctaccgacttggcgcccatcgcgtagcgagccttggcgagcgagagccagccctcctccacccgggcgttcaacaccgttcgtttcccctccagctcctccaggtccccaagcagctgcaggaccagcgaatccagctccgctcgcaggtcaagcgccgccatggacacacctccagatctgcctcgtgccgaattcgccacccaggcctcgcttcgtt

SEQ ID NO: 147197 - DNA, 856 bp, Homo Sapiens
gggcattactgcgtggggtaggggccagactaattgtgaaggaagaaggcctgagatcacgtagccatgtcggagaacagctgtgctcgctgccctgcctctttgcgcgcatgtcaggcagcccccaggctccagctgcttgagtttctctttggagtaccccggagctggcttcgaccccagtcaatgcggttctggaggctggctatgtctgcggccagctgcaggcctgctctccctccacttctgtttctctgttagtccacactctggatccacctctagatggcttttgctgatgtctctgctggaacagctgctgcccagtcctccgggcagctctcgtcttcggcctcctgttcagcagcagggctgaccacacattggatcactcgctccaggaaacactttctcttcttggcctccaggacaccatcccggaagcttgcttgagcctgacgtagactgtgaggaactaggattccaaaccagttcagggggtcctgaggggcctcagaggactccggttctggggtcttagtggggcccttgcgcctccgcagacctgcttcgcgaggccccacctcctctggggcgtggacaccagctctcaccaccttgaacttctggagtccctcctgggcctcgctggcgtggaggcagacctggggctccatgtgggaagcatactgcaggggccctaccgacttggcgcccatcgcgtagcgagcccttggcgagcgagagccagccctcctccacccgggcgttcaacaccgttcgtttcccctccagctcctccaggtccccaagcagctgcaggaccagcgaatccagctccgctcgcaggtcaagc

SEQ ID NO: 147198 - DNA, 467 bp, Homo Sapiens
tcatcttttaaggatttatttttagaagatcatagggtataaacattcttatgacagagggcatgacataagaatttagaaaacagagaatttagaaaatagtccagaattgctgtccagaaaatattaactattgaaaaggaaataagcatttgaaatagaaatataaagttaagcataaaagtattaacatctaattattataaactttctgtaattgaagttgaactgttaggacaatttttaaaggcagtatagtggttaagcattgcctttgaagccatcctttatgggtttaattccattctgctatttgcttgttgggtattgtataattttctatggttttcataagcgaataccacagatttggtggcataaacaacagaattttattttcctaactctgaaggctggaagtccatgatcatggtgcagggttaggttctaatgaggcctctcctctt

SEQ ID NO: 147199 - DNA, 885 bp, Homo Sapiens
  misc_feature (696)..(759): n is a, c, g, or t
  misc_feature (809)..(843): n is a, c, g, or t
ctaatctcgtaccatacctcctccacttaccatctcattctatgagccagcactccctgacactaaagccagagacactataaaacccaaagctacagaccaatatcatatcccttatgaacagtgatgtaacaatcctcaataaaaaactaggaaattgaattcagcagcatattaaaaggattatacaccatgaccagggtggtgatttattcctggaatgcaaggatggttgaacacatagaaactgggtaaatgcaatacaccacatgagacagaatgaagggcgaaaggacacatgatcatctcaattgatgcagaaaaagcatctgacagaattcaacatcctttcagaatgaaaacagctcaacgagctagaaatacaaggaaaatacctcaccataataaaagccacatatgaaaaccccacagcaaatatcatactcaatggtgaaacacttaaagactttgcttctaagatcaagaacatggcaaggatgcccactttcactgcttctattcaacatagtactggaagttttagccagggcaatcaggcaagaaaaagaaataaaaggcatccaagatggaaagaaagagataaaattatctgtgtttgacaagatatgatctcatatgtgaacatgctaagaattccaccaaaaaaagaaatcctgatagaattcataaatgagnnnnnnnnnnnnnnnnnnnnnnnnnnnnnnnnnnnnnnnnnnnnnnnnnnnnnnnnnnnnnnnnccggccgtaatggccgaattcccgggcatatgtccggtaccgtcgactgnnnnnnnnnnnnnnnnnnnnnnnnnnnnnnnnnnncggccgcttcctcgctcataaactgcgctgcgctacaggtgc

SEQ ID NO: 147200 - DNA, 807 bp, Homo Sapiens
  misc_feature (87)..(121): n is a, c, g, or t
tgaggagactgaatcgacttactatagggcgctactcgtcgcagcgaacgacgagcgcagcgaagtcagtgagcgaggaagcggcgnnnnnnnnnnnnnnnnnnnnnnnnnnnnnnnnnnncagtcgacggtaccggacatatgcccgggaattcggccattacggccggggaccacgcaaggcatggggtgaaattttttgctggcacggagagaccaagtccttggccatgctcaaatcagccctgtgtcaagagtccggatggcataagagaaaagcacatgtcacacctctcgcaagttatctttaatttgctgttccgcccggagaactccaccaatagcaagctccaagtccctccgtgcatcactacacctcaaaaggggttctctattactggagctgccactctggtccttggaagggtattcattctccttcactggctcctttaacaggaacaaccacgttcttttttaattagcacccataattttacaacccaaaaaaccaccttttggaattcatatccttcaaaatgggatccattccccaagccaaaatttcccaatttatattttaacgcatactttaggagtaattctacctttttccccaaataaacccaaaatgccttatgaggtccaacatttagaggataatgacctccttatatagtaaactattttgtggggttccctcgcctccgtattgcccacgttttttacacccgggtttggttccctcgtggccaaaataaaacacgctttctatataaccgtacaaacttatgtctggtgcacctt

SEQ ID NO: 147201 - DNA, 915 bp, Homo Sapiens
tggaagagaaaaattgcccagggtctctgtggaagagaatttttggaacttgtttctcccaagaggttcttgcttttgagggtaaggcacaattccctggggggttcggttgcttgggtaatttaaaggaagccttgataaacccccttggccaggtttgctttcccaaagaagccatttcggtgaaaagggaacagttacaataccgggagggtgacttctgttctggccagggagatacagcctctcttttccagggaaggggcccaatatttgttgaactagccatgagcccatcaagtgctcaggaatttgaaatggttttgagagaccccaaatgtggtgatggtctggcgcagagtaattgtgtcagcttcaaagagcaggacagttgaatcttcaggcttaagggtcaaactgcccagtctctccaggcacacagagacttgattggctagatctttgttttgggtacactccagttgatgagtaagacaattgaactggcccaataacgagtagagctgctgagcctgctgttgaagtgtctcctctttaagctgataaataaggtccacctgttcatacagccatacctcacggcttctaagacattccaggtgacggcttatgcaactgtgaatctgagctttgacctctcgcaagttatctttaatttgctgttcagcccggagaactccaccaatagcaagctccaagtccctccgtgcatcactacacctcaaaaggggttctctattactggagctgccactctggtcttggaaggtattcattctcctcactgctccaggtccgagtgcctctccaggcgatccgaggagaccttgggtggactgagacacggccccacactaacctacggcccaaaggcagagttctcgcgacaacccc

SEQ ID NO: 147202 - DNA, 971 bp, Homo Sapiens
agtagggtgtgactgtgtgctgagtatgggtgtctcgtgtggctcgaatttggcagttttgcggcgctttcagtgatacggggtgtcgcgtgtaaatggggtcccgggagcagggatagcgagagttgcggcccggcgagtagtgtgtggttaccgggtgtgccccgccgctatgagaggccattgaaagattgtgtgaagcaatgtgaatagcaggtgccgtattggtccgaagacagatcaagcttaatgcaataagttataatttccaggacttccgccaaattaacatttatatatacatatgggttttgtttatagaactgtattttgcaatcaacaagtttttagagacaacatatttggttacagttccacatatctgtagtaaagacaaagccagataatgttcatgatgttaaatctgggctctaagtaacctaaggtacaaaattttgaccaaatatcagaaatgataatctgatcttaaaaatacaacccatatgaaactactttttagagagaaaatgtgctgttcagtaattatgttcaataaccttttctgagtatctgcaaactgatccttttctttaatctttgtgactcaccaatatttcaaagtgacctcttcacttccatgttaccatttcagtacccagggatttctgaggcagcataagtttgacttcataaaaacagtagatactctaacagtgacaatttttaaatctgtaaactcaataatcacattagttagctcagcaactataaaaacattgagattggggcactgtaagccagaatctctttgtgctttttaaattaagctgcttttgaatctttttggtatttatcagccatctgtatttcccttataataataaaagaatacatttaaaataaattttaaggttaaatgtccccggccgtaatggccgaattcccgggcatatgtccggtaccgtcgactg

SEQ ID NO: 147203 - DNA, 978 bp, Homo Sapiens
tcgttgtcttcttggtcgctttcagtggacacgtcgtcaaggtgcggttgcaccaatagtgttccactgcggtgacatatccaaagggcactctgattgccccccgaagtgatggatgagaccgtggacgtgtcgtatccagcggttgtgcccaggatacaatgcttctagcctaatcccatgtgggaaaatttaatcgtccggcaatatccagtgcctctcccccagcttaattctctattgtgggggtcgcacgggctttccaagagcagtagggataaaacactggtttctttcatgtccacaggcataaatgtaatgcggtgcagccataacaatctgtagcattaacgttcgacgccagcatcaagtagcattcgtacaagagcgtcattctgcttgtgtcttttgataccatgaggaaatacccaataagcagaacaggcattaagaggataattagtagataatcaatgaaggtaaatgtgttgttctgtcacagcataaatgcaagcaggttctctctgttctggtttttgaggttgacatttagcatttcttcttaaaaggaaggaaacgattctcacatgccctcgccctgcaagcacagatcaggggcgtgtctccattaaagccatcttgaacgttggcatagctgctgtcttcttttcacccaccgccacacttgtccaaagtcattctgataggctgcttggcagatgggctcagggtataggattcccatgctggtccttcacaggcttacttcacctctacagctccttgaatcttctggaggtatttctgatgaatatcaaaatccttcctggctgagaggaaagtccctagaagtccaagctggtggcaagctccaggagtgcttttctagcaaacacctgtcagtgcttttccagcagctcaggcagcccccggccgtaatggccgaattcccgggcatatgtccggtaccgtcgactg

SEQ ID NO: 147204 - DNA, 987 bp, Homo Sapiens
  misc_feature (304)..(329): n is a, c, g, or t
ccagtcgaacatgaaatttggcgtggtcacccgtcttgggagccatggccacccagattgcacggcatctaaaggtcgagtccccgtgggtcaaggcagactgcacatattggtacagacatctatggctataaaacgcctttggtacattaattatcaaaagggaaagcaattgtttgtaaaattcacaagcataattgtgaggcaaaaagcagtcacataaattctgcattttttaaaatgttcaggatgaacagaagacatctttgtgcagaagaaatggtggagataccacgtgccgagnnnnnnnnnnnnnnnnnnnnnnnnnncaggaagggacacagctgtagctatttccatcaaagcaaaccactacttctgtgaccttcaaccaataaggaagtcaactttatgacacacgcaaagtgaccttgcaataccttacaattagtgggtcacaaaagtctattttaaaagaaaggcctcttgaattacccattctctgtgttttcagcattaaggactgtctgcaaaagcatgtccaaaagtgattgcatctgaaatggtaggctcttctaatttcgagtccaaatccataaggccaaaggttatcccaaagaccaccactcagacctccccaggactggccacgaccgacccgttgattgcttctcagtgcaccttggttaggagaccagtcacgttccatcctatcttcctgtggcctctgcaacgggagagccacaggatcccatgtaattgctgctttgctcctcagtaggttcagataggagagttctgatccccgccactcagcatgcttactgtgcctgacaaacttcaccacaaccgtccctttcatacagctgaagatggtgtttgtggaagctggaggtccctcttccttacagtactgcatttccgtgcccaagtgtgtttagaggacttacctcgtgccgaattcaaaccaggcctcgctacctagcc

SEQ ID NO: 147205 - DNA, 871 bp, Homo Sapiens
ctcttttacctctctttatcctcccctccttgtttcaacctccccgctctttttgtaaaccaccctttgcccgttctctggccctttcccttacaaccctgggccccgccccactgtgttttaaaactttttggccccgcccccaaaatttttttctttatcttttctacacaatatgatgttatttaggaaaataaacttgaagaaggttcttctattaaaaaaacataagaatcatatccaaattttagactctccatcttctttggtatgaaaatcaacattcataatagaaaatattttcttttgaaaggtttagttgttattgggtctataacggttttccatataaggaaaatacaagtattaagttatctgtaatcatctcacttattgaacaaccaatgaaatgcatgcaagtaaccaagcatatgtgtgcagagaccagcatcaaggaaatattcattcatagataaatgttttctaataaaatatattttaagtttttaatgatcttctgctatcattttttgccatgttatctgaatagccattcagatctgtagtaaaacatcctgttagttacataactcaagaagtacttccccaaggaagctcacaccatcataccaggacttagcaacatttatctttcaacatgagtataccattaaaattttttttgtatttctcagaattgtattcttcagtcttttccacaatatagtatatggaaattgctaatagcattaaattaatattaataaaacccattctatctaaacctttttctcataagaaaaaacattactttaaaaaaccccggccgtaatggccgaattcccgggcatatgtccggtaccgtcgactg

SEQ ID NO: 147206 - DNA, 882 bp, Homo Sapiens
  misc_feature (248)..(398): n is a, c, g, or t
tccgtcccgcagcggtgttttgggagggagtggtcggcctcacgccgggggtgtctggattagcggcgctgccacttcgcgggtccatgctgccgagccatgaaagagaggtccaaaggttctgacgagagccgtgtgcaagtgtgttttgagaaagttatgtagagatggtgtttttattaaacccgataggcccgaacatattcggtgtgaaaatgtggtcgaagtacatgattagtgtggggagnnnnnnnnnnnnnnnnnnnnnnnnnnnnnnnnnnnnnnnnnnnnnnnnnnnnnnnnnnnnnnnnnnnnnnnnnnnnnnnnnnnnnnnnnnnnnnnnnnnnnnnnnnnnnnnnnnnnnnnnnnnnnnnnnnnnnnnnnnnnnnnnnnnnnnnccttgaagtccactcaacaccttttctaaagacaaaacacatggtttttatccagcatttaaatgattaattatggctttaaagcagaaggcaagttctagtgcattaacacaactgattctgtatttgagggttttttcctgatttatttccaagccatggctctagcaacgttgtattagaagctttgatatgaaattttaaatataatgtttcatctcttctgactcacactttttgagacttatataccaaaagttatataaaatcattttttactgtagaactacaggtgaaatgcaaatcagcaggttcaagaatcctacactcagagaccactaggcatgactgccctagcccatgaccctgaactctgcctgcctgcctgcttgtccacaaaacaggaaagaccatctctgcatcatccctagtgccccggccgtaatggccgaattcccgggcatatgtccggtaccgtcgactg

SEQ ID NO: 147207 - DNA, 912 bp, Homo Sapiens
tcttgaatctcgaaccactgcatctccgactctgcccagactcttcactccgcggcaccctcaaaccccagcccaggccggggcgcacgagccagccagcgcacctgcagtcctcgcccggacgcgccgcgccccctcggaaccaggctctgctccgagcagccttcgcccctcaagccagccacagtccccgccaggccgggtgggcgtcaagatgaaggcggcccgcttcgtgctgcgcagcgctggctcgctcaacggcgccggcctggtgccccgagaggtggagcatttctcgcgctacagcccgtccccgctgtccatgaagcagctactggactttggttcagaaaatgcatgtgaaagaacttcttttgcatttttgcgacaagaattgcctgtgagactcgccaagcattctgaaggaaattgatatcctcccgacccaattagtaaatacctcttcagtgcaattggttaaaagctggtatatacagagcctgatggatttggtggaattccatgagaaaagcccagatgaccagaaagcattatcagactttgtagatacactcatcaaagttcgaaatagacaccataatgtagtccctacaatggcacaaggaatcatagagtataaagatgcctgtaacagtttgacccagtcaccaatcaaaatcttcaatatttcttggatcgatttttccatggacccgtatttctactcgggatggtgatgaaccagcacattccttatattttagtggactccccagacggggaaaccccaaggccacattggggaagcaatgggatcccaaacctgtggaatgggggtaagccaggggggtccaaaggaagggcccttttgaagggggttcaagaggaatggcctcctggggggataacaat

SEQ ID NO: 147208 - DNA, 1026 bp, Homo Sapiens
  misc_feature (893)..(893): n is a, c, g, or t
tcgtatcactctgtctttctcttctatcttgtgtctctctctattgtctgttgtcgagtagtgtgagtgtggctgtgtgtcttgctctctcgttgtcgtctcgttctgtccctgtattctggtgtgtgtctttttgtgtgttgctacttattccttcttgttcttcttgtttctctttatctcttgacgtgcctgaatgctaatatgtcgtacggttgtcaaactggatgcgcttcaccgggcatttctggaacctcgtgttagacctggtgacagtgaccaccgaaatgtgattgcactacggtgacgagggggtgtgccaggcgtggtaagtagtagtagatggacagaattatgaagtgagtagttaagtaaaaagtaaacccagtaaacatgaagggtttcgaaggatgatttctcttatttggttgtcttttaatctgtttcattatccacattttttatatgttactattgtaacgacgtggtggcatatattgggctttttattctatgttctagctctatgtttagcatctttattttatctaatttcattacaattatagtatgaggtatgaagcatgtgtattctttttattttgtcagtatcagtttatctgcagtctggggatctgtaacttgacctaggtcaaagagcttgaaatttcaacttgggaccatcagactgaaaacctgcaatctgaaacactttgctgtgctgccttcctattatttcaccaaacatatgagcacataagaaatttcctagggtcttagcattaattttaaggttctctaaaactcaaaaaattactttcctattttttttgttgggattgatgatgtttcttttatctttttgtatatgtgcttgtctctttatgactctntacagatacaaatacaggatgcccggataaatttgaatttcagatgaacaatgaaaaccaattgttaatataaatatgtcccccggccgtaatggccgaattcccgggcatatgtccggtaccgtcgactgat

SEQ ID NO: 147209 - DNA, 1015 bp, Homo Sapiens
gctagtcgtgcctttgtggccttatgttcagcttcttcttgttctaggctctgctgtataacttttagttggtatgtcatatctatttccatgttgcttttttccttttccaaatcagtaaatctctcctgaagttgtctcttctccagttctactttcgctagtaagattttgccgttctttaaatcttcttctaggccacatattctaccttgtaaatcattaattatctctgatccatgggttcgatccctcctttcagattctagagctgactgaagattgataaattccttttcaagttttaacttggcagtctccagcaggcagtttttatcttgtagatctctattgttagattccagctgctgaatctgttttgaactttctgcctgggttttccttaaccgggctgcagtatcagactctgttcgcagtaaagcattggtttcatccagttgtctctggagttgattcactttctcagtggatatttgagagttttgatttctttttttcaaatcttcaagttgatcttttaagctgttaacatcattttccaaattgcgttttttgtctgctttcatgatcagctttcctctgatattctgcatttttgtgctgaagaagcgccttttctctttctaactgtcttaatgctgattccacacttttccgtaaggtaatctcctcttctagctcctttgctgttttttctaggcgagtattaacagatttgcacttctgttccagttcctctttggcttgcatctcattgctaagatgttcttctaatgtatacagttttttctgaatctcttgactttcttcatttttccttgattgtatggaatcagtttctctacaagatggagagtcacttaataataaattttctctatagtaggtaaatccgatgaaaggcagctgatttccaacaaagctttaggaattgggaaggtttccccggccgtaatggccgaattcccgggcatatgtccggtaccgtcgactg

SEQ ID NO: 147210 - DNA, 879 bp, Homo Sapiens
ttcgtcaaaggaaattttgatgtcggcacggtaagctgctgcgtgcaatacaggacaacctgctcaacatcaactttggatgccaaagatgagtgcacagaatattctgatttaggaatcgtgatcactccttcgttccatatgttgactctttatcacaagctgaagatatcactccagaaagctctgaagcctgattcttagaaatgcaggccatgttatttcctggatttgattttgatgttatcatttgatttaaaacctgaacattatgcagaggttctgaggttctagcttgagctggcaaatgggtttcagtgaggcgtgtctgaaataacctgtattgttgttgcaggaactctctgggttcagcctggttttgaattcctctctgaaggacagcactggcatgctgcagctctccttgggcttccagatgccccgcccaggcaatgtacagaggggatgacagggttccaatcccatggttgtacagaaactcaaaaaattgatggaggtcactgttgtactcagcaaattttaaacaataactgatgaatcttgggtcattgtggtatttcttcttatctaaaaattccttcattaaatgttctagtaaagttatcaagtattctttattctcaggaaaattctcttctacccactgtatgtatctttcccattcaccaagagggtcattgcccttgtagctctgcatgtgggcttcaagcatctgaaggacattttccggggtgtccatggccagaggacgctggccggcagcggccaaacctgaaccgcaaactagaagccgccgccgattcgaatccccggccgtaatggccgaattcccgggcatatgtccggtaccgtcgactg

SEQ ID NO: 147211 - DNA, 1013 bp, Homo Sapiens
  misc_feature (336)..(632): n is a, c, g, or t
  misc_feature (896)..(930): n is a, c, g, or t
ctcgcgctccggggcttctcttatttgtgtcttctctttgtactctcttgtatttgtgtcgcctgttgtgtgttgcgtggtcgcttcgggggtatgttcacgtacgctgtcgcgtttgccttccgcgccggtttgtatcatcgtgggttctgcccctgcgtctttgttttgtttccccggttgttccttagtgggtcccgtatgtggcccgtgtctgcgtatgtctttggggcccgccggtgtcccctcccgtgatggtttttcgagaagagtctttctgagggccctgtgagtgcgcgcccctaaacgtggtttgtgttgtctgtttgttttgcnnnnnnnnnnnnnnnnnnnnnnnnnnnnnnnnnnnnnnnnnnnnnnnnnnnnnnnnnnnnnnnnnnnnnnnnnnnnnnnnnnnnnnnnnnnnnnnnnnnnnnnnnnnnnnnnnnnnnnnnnnnnnnnnnnnnnnnnnnnnnnnnnnnnnnnnnnnnnnnnnnnnnnnnnnnnnnnnnnnnnnnnnnnnnnnnnnnnnnnnnnnnnnnnnnnnnnnnnnnnnnnnnnnnnnnnnnnnnnnnnnnnnnnnnnnnnnnnnnnnnnnnnnnnnnnnnnnnnnnnnnnnnnnnnnnnnnnnntggccacaaataatctaattatgtcactgcccctgaaaatcggtcaccaaagggtctcatagccccaggccccaaggcctccccgctgagtgtgccatcaaacactgcagccttaaaaacccatggaccccagatgcccccagtcctgtccacccctttcagcgtcctgaagcttgttccgtggctcccactgcctgaaatcagcccatcgcccccggccgtaatggccgaattcccgggcatatgtccggtaccgtcgactgnnnnnnnnnnnnnnnnnnnnnnnnnnnnnnnnnnncggccgcttcctcgctcaacatactcgctgcgctcggtcgttcggatataacgcgctagcgccctatagtgatgacagttttt

SEQ ID NO: 147212 - DNA, 777 bp, Homo Sapiens
  misc_feature (271)..(447): n is a, c, g, or t
  misc_feature (458)..(507): n is a, c, g, or t
tctccccagagagtcatcttccggcagtgtgttcacagcacaaccgatcttgttggtggtggcccaaactatctgaaaagatgacatttgtgtgtcacagctcgagggataaggcacaaaagggtgatatcatttggcctggatgtataaggtgctggcactaaagaggtacgcggtgaagggttggggaagcagatattagtccctaacccattgaagatacatacattttcttaaaaagcaaagcaagtgggccggtgcggtggctcannnnnnnnnnnnnnnnnnnnnnnnnnnnnnnnnnnnnnnnnnnnnnnnnnnnnnnnnnnnnnnnnnnnnnnnnnnnnnnnnnnnnnnnnnnnnnnnnnnnnnnnnnnnnnnnnnnnnnnnnnnnnnnnnnnnnnnnnnnnnnnnnnnnnnnnnnnnnnnnnnnnnnnnnnnnnnnnngcttgaaccannnnnnnnnnnnnnnnnnnnnnnnnnnnnnnnnnnnnnnnnnnnnnnnnnggtggtgcaacaagaatgtgataactctagatcgtcacatacaagcaactcactctagagacctcgcatcgtatgcgccatgaaacgcacgccgtaaatcctggggataagggattggagcacagcatgactgtaccgccagctagggttttggacattggtttcctgagagacctttatgctctgggtccttcgaaccagtcacatggggtttgtgggccccggccgtaatggccgaattcccgggcatatgtccggtaccgtcgactg

SEQ ID NO: 147213 - DNA, 898 bp, Homo Sapiens
  misc_feature (99)..(153): n is a, c, g, or t
  misc_feature (221)..(231): n is a, c, g, or t
ttttgctcagcaacttcaaatctattatttacaaatctgtcacctcctactagactaagctcaggacagaggctgtgtctcaatcaccttttaacaatnnnnnnnnnnnnnnnnnnnnnnnnnnnnnnnnnnnnnnnnnnnnnnnnnnnnnnnttgtataataccatctaattatcataatcagtatcaactcaatatacacattgtgtaaggcacagggnnnnnnnnnnnaaagctaaaaacttttaaaaaatactctgcaagtgtttattattattttcccattagaaaggaacacagtgataagtaaatgttctacaggttcaagatttcagtaacaaagtagagaagggagatccaatgactggttctctgcattttacccttccacagtcagctgttctaccaggcagagattttatgatagggttaaaatattatttcagatagtcaagcattatttttctttaaatcaatctctcaaatatatgataaagaaaacattgtcatttaagaattctaattgagaggtcttttgaggattggtttttcagattacttcaatgaagcaaatgtgttatctaccatcaagctataaaaaatttagaaaccaatttaaaaatactgctagcctctccctctgtgtacttagcccagtggtttatcaagctttttctaagcattctacaagcactggcaagactatgaggaaagtatctgtggtaatataaaaatgaaaggcaagataggaagaatatggtatttaagtagtttgaaagcacacgtttgaagatcgctcatccagattacaggaaaatgctgcaggggattctgcaggcccaaccccccccggccgtaatggccgaattcccgggcatatgtccggtaccgtcgactg

SEQ ID NO: 147214 - DNA, 885 bp, Homo Sapiens
ttcccgttgtgtcctttttgtccctatttcgtccttttattttcgtctttggttaccgtgtgtttgtgcccccgtgtgttgtttgtatcggcgattttgttcgccatgtgatgtctggatgggatttcttgggaactttgctgcccttccacccttccacgtgggtggtaaggacctcccccactcgggcgtatcatgatggtcctgtgtctttgcgttcaaggaaaattgcatagggattctgagcggggtgtgtgcacaggcctgggagaaatgtgctgatttttacccacagatcccccaggctgtttcttgacctgaaacgaatgatttccgatccatgcaagggttgaggccaaataccaggggtgcggacagatgatgtacatttaagtacttggggagccaggagagtatgcttgcgtgactaggagaaaccaactggttcagtttccacgtttcagaatacacagaaacacttgctctgaataaaagaacatcgaatgtgtaatggtatcagggaagaaacatctcagaccaaggtttctaacagaaagccagtacgaccccagtagaggaagacattctatgttggacaagaccctggcctgggggtccaggagactgggatttcaagctctgtcctcacactaagcctgtgatcttaagcgagtgtctctgcctctctgggcctaattgcctttcctcagctgtcatgttgaggctagttgggccagatggtttcggagctacctctgcaagatttctcggcatcctgccacccaggtggggcccgcagactgctgtctaaagccgtttcttccctgtgcaccaccccggccgtaatggccgaattcccgggcatatgtccggtaccgtcgactg

SEQ ID NO: 147215 - DNA, 253 bp, Homo Sapiens
ctttctttcatttagcagcataaataagtttggccactgggagtacagtacagggttgggacaacaatcccatatttgaagacctacttctagcaccagcatcaagaattaaatccatctcaggactcacagaacccaggacaacttgccacctttgagcaacatatgcattgaagaatgtatatggaagcaacagtaaatagattaacagaggctaatactgtgattgattgacattggcaatggttggccc

SEQ ID NO: 147216 - DNA, 842 bp, Homo Sapiens
  misc_feature (448)..(506): n is a, c, g, or t
ttgtagcatcattgcaataaaatccgacaattgctacacaagttctaattttatgtaaactcaaattatggattgtgcatgaatgtatctgtcatgaaaatgtggtacctcttggcataatctgtgtattttgcatggtaggacagaagtgactaagaaaattggagaaaataaactttaatgagattctccattcaaatgatgaggcttctcctctgggtgaagatgacctggacattcctctctctggtgttatcagagctagaccgcttttgactgtgttgatctgcagaggcagcactagatgcaggcggtgactttgttttctccttaaagtctgtaataatgactgtcagatctccaacagtaacttccaaatgctgagcactactccgatccacatttttcaatcttggcctggttttcttatggctattctttttgctannnnnnnnnnnnnnnnnnnnnnnnnnnnnnnnnnnnnnnnnnnnnnnnnnnnnnnnnnnactgtgtaggaggcaccaactgctgagtcacctgctgtgcaaccaactgggagacaggtcgaggtttccgggtggaggtgcccttccgcacatcgcacatcatgcacttgaaggcctcggcgctgttccggaaggtgcagacgctacagtcccagtaaccctcatccgaggacggcttcggctgccgcttcggcctggtggggctcttcttgtctcccatggcttggctatcaccgcacgccgagagtcgccgccgcgaccgctctgtttgtcaataaggaggatccccggccgtaatggccgaattcccgggcatatgtccgctaccgtcgactg

SEQ ID NO: 147217 - DNA, 1196 bp, Homo Sapiens
  misc_feature (129)..(129): n is a, c, g, or t
  misc_feature (146)..(146): n is a, c, g, or t
  misc_feature (1079)..(1113): n is a, c, g, or t
  misc_feature (1116)..(1154): n is a, c, g, or t
gcaattcccacaattttaatggtggtgtgggtgggaataatgggagccataccatgatcttgcccggaaaaggccagccacaaaggctttcccagttgaatccctttagcagggctttgtacaaagagnccctgactccatattanaatgatgattctgcttcacataacctggagcattttctctctgctggagtcagaaaaaggcataatgttctgactatcttatttactttctctgcactgctacctactacaacggaacagccacaggtttgcaagtgtgagctgatggcattgagaagaaagccttcatgccagctgtcaccaatatcattcatcattgattacctgtatcagctatatctatttcttcaggaacactgtgtgatttcatagatgaaagcagttccattacaggaatcacttctccagtaagcattggaataatactctgaccctgatcttccattctctctgtgccttctaagataatcttctggacattttcttgtctttcctttatgcatccatattcttcctttccggattatatgtgttaatctatcgacacacactctatgaagtgggaggtagaaactaagttctgtctgtggaagtataattgatagtccatatgtgctgcgatccccattccagtttccatcaaagattaatgaaacaataatcactcccttttcagacaagacaaaaaactttacatctatagcaccactctctgcatttcgaaggatttcgtccatttagagtgtggttggcaagaaaagttatttctccatcactgagaagtacctgttctgtctttggagcccaaatgtgccttactctaggaccaagaatattgtcccagtaagcaaaagtagctgctaataaaggtgatttgccacttaaagcgatctctgtcttggcaacagctggagatggcggtgggcaaagagtcgacatcactgcattccaactgtcacattatccaaatgctccggagatatccactcgccaccgcctgcccccggccgtaatggccgaattcccgggcatatgtccggtaccgtcgactgnnnnnnnnnnnnnnnnnnnnnnnnnnnnnnnnnnncgnnnnnnnnnnnnnnnnnnnnnnnnnnnnnnnnnnnnnnnactgacgaagagctagcgccctatatgatctatacagtcttt

SEQ ID NO: 147218 - DNA, 701 bp, Homo Sapiens
ttattataccgtggcggcatttgctgtccaacaaggctctgaagcatatctgaatgttttcaagcagcttttgctgtgctctctgttttgtttcctgactttgctctttgcttctgatttgtggtcggtggtgccaacttcccatttggccaaaaagcatcccggaaaatattgatgtagtaaaccacatttgctcactgaaaatccagctgactgtgtcccggatttgttttttgatggttcttccaaaagtgacctgaacgagggcaattaatgttcttctcacccatttaaacattcctcgaagttcaaaaatctccccaatcaacatgaaacatggttcagccaaggcgtctttcctcccatccacatcatcaccataatctgacaggtcactgtcctcctctgtctcctcctcctggtgggagaagaagtcgcgaggaagtctttccaaaaacgaggataatgaaaaagaattttttttcccctgcacgtcgatgagccttgaggtagtcaggagaagggctcaagaaggcataaagtgcttcactctgcccacagtctttcatctgaaagcagattctgtaaaaacttatttaattgattcttcgacttttccataaacttttgatctatagatttgaaaggcagcccggccgtaatggccgaattcccgggcatatgtccggtaccgtcgactg

SEQ ID NO: 147219 - DNA, 991 bp, Homo Sapiens
ggtcctttcggacacccgtcagctgtaatggtctgctcctggtctccaggatgattttggtatctcgttgatgtaggttatctccttcacttttattttcagggcaaatcattgtgtacaaagcgtttccattatgtcgttgtcatccatcagcttttattgtttgcaggcttcacaatacctttggagcttcctcggtggctggcacggagctggtcgctgctagcgagggggatgcaaaggtcgttgtcctgggggaaacggtcgcactcaagcatgtcgggccaggggaagccgaaggcggacatgaccggggcgcagcggtccttcacctgcacgcagagcgagtggcatggctggatggtctcgtctaggtcatcgaggcagacgggggcgaagagcgagcacaggaacttcttggtgtccgggtggcactgcttcatgaccagcgggatccaagcgccggcctgctccagcacctccttcatggtctcgtggcccagcaggttgggcagccgcatgttctggtattcgatgccgtggcacagctgcaggttggccgggatgggcttgcaattgctgcgcttgtaggagaagtcgggctggccaaagaggaagagcccgcgcgccgagcccaggcagcagtgcgaggcgaggaagagcagcagcagcgagccagggccctgcagcatcgtgggcgcgcgaccccgagggggcagagggagcggagccggggaagggcgaggcggccggagttcgagcttgtcccgggcccgctctcttcgctgggtgcgactcggggccccgaaaagctggcagccggcggctggggcgcggagaagcgggacaccgggaggacagcgcgggcgaggcgctgcaagcccgcgcgcagctccggggggctccgacccgggggagcagaatgagccgttgctggggcccccggccgtaatggccgaattcccgggcatatgtccggtaccgtcgactg

SEQ ID NO: 147220 - DNA, 1057 bp, Homo Sapiens
tgtggcgcaggctcgattggggtgcgcttggttggtttttctgtgggtgctttgggttgttggggccgcggttccgggtctgcggtggtggtcttaggtcgtttggcgagtgcggtggtgcgcttggtgtgttctcatgggtcctctgtgggggtccgctgtcttctccgcccgttggtctcgcgcatcgtggtgcccgtgtgtggcgctctggtttggactgaattgctggtgttcgcggttcgcacgggcatttgtcatcccatgtgggcttctcgatgccgctggtctcgtttcgcccatgggtcggggagttggttgtggggatctatcgtcctgcattgtcggtattaggcgcgggaaaggggggaagtgtctggcttctacggcctgttcgcttgtgtgcgagtagtgtttttctctgtccctgacgctttggttcgccgagggtgaagtctgcttggggtacttggctgtcgcgagtgtggcgtgggtctcgagtgttggtgtttctgatgacagtgtcgccaggtgcatagagtgtgttggctcgcccagggttccactcccaggatcgtcggtgtcaaccagtttgggcttcggttttggtcattgggttgcgtgtccgtggccagttagagtgtttttgctagcctttcttgtgtaaagcctctttcaggcgtttgccctcattgctggcccttgtgcaaggtgtgttcacaatagggctatgtagcttgtgttatgtcccacactgtatttggtgtctaggaatgtcagatctgatccagagactctgtttttctaaatcaggcatgttcatcggtcatcaatggataactcccagtgtaaagtgacatctcaattgctccagactatccttgacctgatgatcatcaccatttgtactcatggttgctgtaaattaggcagccgttctgacagggttttgcttagccaggctcctctgagatctggctattctgtcttgtggattttcagttacccccgtccgtaatggccgaattcccgggcatatgtccggtaccgtcgactg

SEQ ID NO: 147221 - DNA, 912 bp, Homo Sapiens
gttaatggcaggaggctgtgtttgatttctgctttatgggacagccaggaagagataacggttttggctagctgagctgattgcccctcatccttaccatgcacagctttattccttctttactatagcattgcagttatatctcccctttaacacactggctggataattataaaatgattttactgtttctaaaactacagccatacccatcaagcatgacaacagaaaccagtggtaggactctgccagacaagggtgaagaggcctgtggatatttcttgaacccttccttaatgtcaccagaatgtttgccaacaaccacgaaaaagaaaacagaagacatgagtgacctcccctgtgaaagtcaaaggagcatacctctcgctgtgactgatgctttagagcatattatggaacaactcaatgttttgacacagactgtttcaatcttggagcagcgactgactttgacagaggataagctgaaagactgccttgaaaatcagcaaaagcttttcagtgctgtccaacagaaaagctgaataaaaaattcattttcatttgttgggcagaggcccaataaatgaacaaatgtacatacactcaggaaggtagtacaagatactccatacaacacaaccatgtgctatttatcatggcatttcttaaaagggtgagcaacagaacaaaaggcagaaaaggcatacctaaggactaagtttaaacacatatcaatgtgaaggactaatttacattactatcattatgattgcagtaataaagtgataagcattcaagcaactctgtatattccccatattattttcaaatgtccattttcatttattggcaaatcctgcaggaaagtaccagatctctggattcactgtaaggcaattcagatgagct

SEQ ID NO: 147222 - DNA, 725 bp, Homo Sapiens
ccatcggcgttggaggtggcagcctgctcccgtgggtcaggggcacggggccctcgcatcgcaccgccagctgcttgctgctcaggcacgcctgttgctccagcttacacacagagctgtaagtgtggccatctgagccgcagacagaggcaagcctgggccatgtgtcagggcttgcagatggagtctttgtttccatggagtttcacggtcggctgcttgatcctgtgctccagcttcttgcgactgattgcacatggcccgctggtagccctgggcaatgcacaccttgtggcggctgcacttcaccttctggcaggggtccttggtggtatccagggcttcatctccttgctgattgtcctcccagctcttgatatagtcatcctccacttcgtctcggaagcggttccagtgcttgatcttgccgctgtactgcgagatggacgacagccattgctcgtcctccatgaaattgccgggggtcatcagccctccttgagccaccttggcgtcgccttcggccagggctgccagcggccaggagcagcagcggcagcaccagccgcccgcagcccggggcgcgcatcgtggtctgggttcgacctgggggggtcttgacttctgcagtattttaatgtccttcctcccaccccgctgctggcgaagcgcacgcggctgtcctcagctctcctcccgcggtctgcctccggtgactggcggag

SEQ ID NO: 147223 - DNA, 990 bp, Homo Sapiens
  misc_feature (914)..(948): n is a, c, g, or t
agctcggacccagagttaggatcgtggctggtggagaaagggcatatgccttagtgctatctccatacagaactcaaggtgggaatggcttgcttgggacacaggccatccctgagtaacccaaatgctagttgcagggcccttcacatacctgcttccaggagagctggagtgattctcgggagcttgggggtctgactgtgtagaccatgtcgggccactaggactgatgatgggtcggagggttgggggagctgaagcactgcttctgtttatgatgccagttgccaaattcaggtttgttacctgttgggtgaggaggttgatgtggctggatggagaatactgtctcgctgcctgcttctcagctagccgctgaagttcagctgtagccatactttggttgtcccgtttgctatataaagaagcgtcttctccctctttttgtgttttggctattcctgaatgatgcttgtttaggtagcacgatcctgctgcctttgctgaagagggacgagacagtttctggctatagatgtgtgcagcactttggaaggaagaaaagggaccaatggtgtgacttcctgatcgacagcgtggcaggccagtagggcttgggatgttctgtgccccgggatgtaggcagggagaagcactggcagagactgtgttcagtaaaattgttggctggtgaggcatgctggggatagctgaaggaatttgagataaagaagaatggtggcaaggccctggagagaggtcagaggttgtaacagatgacaaatgggtgttgggaattttctgcagagtagcagtaggaccagaggaggaattgctataaactaattttgccgccgccggcccccggccgtaatggccgaattcccgggcatatgtccggtaccgtcgactgnnnnnnnnnnnnnnnnnnnnnnnnnnnnnnnnnnncggccgcttcctcgctcatactccactgcgctgcgctcggtc

SEQ ID NO: 147224 - DNA, 622 bp, Homo Sapiens
tttcttggttccctgaccaggaaacgaggtaactgatggacagccgaggcagccccttaggcggcttaggcctcccctgtggagcatccctgaggcggactccggccagcccgagtgacgcgatccaaagagcactcccgggtaggaaattgccccggtggaatgcctcaccagagcagcgtgtagcagttccctgtggaggattaacacagtggctgaacaccgggaaggaactggcacttggagtccggacatctgaaacttgagaacatcaccaccctgaagccagagactaacactgcaggactcagcaggactatttaagaaacaactgaggcatcagaccaactttccccacaagtcctcggatctttcctgccatgctgatgccatatattccaacgtgatcaacctggctccccagaaggaggacgactttgctgtctacaccaacatgccccccttttcatcaccccaggaggacattgccagaccaagtggaatatgtctccattgtattccactgatgggaagctaatgagatgctcagaagtgggggtccagaccctggccccagcctgaatcttggcataccctttgctttagatttatgtgtgtgttt

SEQ ID NO: 147225 - DNA, 1508 bp, Homo Sapiens
  misc_feature (444)..(485): n is a, c, g, or t
  misc_feature (1209)..(1209): n is a, c, g, or t
  misc_feature (1391)..(1425): n is a, c, g, or t
  misc_feature (1483)..(1483): n is a, c, g, or t
gcccgtcaaacaagatttaggttttagtggaactgacttcatttaatagagaaagactcacttctgatacttaaaacgtaggcattatccaattaaatgagacttggaaggagtccatatccagtcacctgctttgcaaattgtagatgtcctatgatgaactttaagtcaccttgacctttagccaaatatgcctcataagctgagtttcatgttcattgctggtgtccaaatgtccacagttgaattctcaggtttgtggtgaacagatttggtaacttctttttaggaagcatctgctgctgctcttgtttctttattttacttattttaaagatgattcgttaggtaaggagaagaaagtcactgaggcctttgtataaggtaattaatttaccaccacaaactgatatgctagaaatatcacctttcatcctttctgannnnnnnnnnnnnnnnnnnnnnnnnnnnnnnnnnnnnnnnnnaaaaatttattctaatcccatggtgtctcactgggtgatggaaattgaatctgtttcattattgaggtttgctctccctctgatcacataggactcaaggatacttctgcagtgcccagaaaattgggtgtagaagtcactattgttttggctaacccagcagacattctcaaataccttctactttgccactttccttgcagctaggagtggacaagtggtcaagtgatggtgctggcccaatgagaggtaagcaagtttcggagctgtctggaaaggctttgcttttcctgacaaaatgaatgtaacatcccagtgctccctcttcctttcttcctcctgacattaacatgcacatgatgccgagaattgcagcagtcatcttacaaccatgaagaacaggtagggagaattgcagacttggtggccccaacatcactgagccactgttcaattcccagagccactttcctccagaattctgtatctttgtggtagggtaaacatacaacgtggctctttcctaaacagggactttagtatcctggctcagagaacctgctcttccaagtcatttgaatgtagcgtgcctaaatcgaatccgtgtgtatcattttctgcgttggtaagtagatccacgttttcctttgggaggctcactttaatatccttctgcttctttaagattgggaaaccacccaggcctcccagctcttggcaagcnacactctgacttcatgttgttactcagcattttgttccttattgaaatgcctggctctgcacaactggtttgtaaagtctgaagatcccctggccatgcccagaaacagcagcctcaggaagacagaactccccggccgtaatggccgaattcccgggcatatgtccggtaccgtcgactgnnnnnnnnnnnnnnnnnnnnnnnnnnnnnnnnnnncggccgcttcctcgctcaactacttcgctgcgctcgtcgttcgctatcacgcgtaggnccctatatagtctatacagttcttt

SEQ ID NO: 147226 - DNA, 773 bp, Homo Sapiens
tggggagggacctgaaactggcttccccaggagaatgacgatcaaaggcagggtcagccccccaccccacagtggacactgacagggttgagtgggacccttcttcttaggacccccactccagactgtagtaaggactgcagggtctgtctccttgtctccctatttgccacagcagtccatggccccctttctctgactggccagcccccggacaccctggctgcagggacagcctagggctgagccaggccagctcctttcccactcttccatccgtgtcaccttctctctccctctgcttctctccccctcccttgcagagagcggtctcccaagccagggaggccctcccaccacatttctgagtccctgtccactgtcccccttgaaaaccatggctggactcagggcagcagtgaggacacccaggttttggtcccaacacaaccactaagtgaaatgtgacctcaggcctgtttccccatccgtgaactgggtttcactagtcttcccacccactcttttagtttcggaaggccaggcacccccaggcccaaccagaggtgggggcatctcttcagtgcaatttctcagcaggacggtcccgtaagtcacagacagccaaacctagctttgaatcctgggagggtttggagggcatattggcacaataagagcagtttccaagatgaggggtgccctcttctcccccaacagctgcccggccgtaatggccgaattcccgggcatatgtccggtaccgtcgactg

SEQ ID NO: 147227 - DNA, 2334 bp, Homo Sapiens
  misc_feature (186)..(186): n is a, c, g, or t
  misc_feature (244)..(255): n is a, c, g, or t
  misc_feature (374)..(374): n is a, c, g, or t
  misc_feature (384)..(398): n is a, c, g, or t
  misc_feature (422)..(437): n is a, c, g, or t
  misc_feature (617)..(627): n is a, c, g, or t
  misc_feature (783)..(783): n is a, c, g, or t
cagcgcccagagcgcgcgcggagcgtcggctgcgtcgatcggcgggaggagaacccccccgctgggaggtcaccccattctgtctacaccccacaaggctttctcgttcacccacgagggcgtggcgtcctgccacaccagaaacagggagctgtgatccgggcagactccatcctcgttgaagtnagtgacgggggtgacaccactagcgcgggagcacacgcccaagaaacaccctaaacannnnnnnnnnnncgcagcccggttaggagcttgttgacgttgtcctcccggggccggggaggccgcacaccaccggggcgttggtcctcccccctttttgcattcgtctgcggcaccaagggggggagganatgccatttnnnnnnnnnnnnnnnaacagcggtgtgtgtggctttttnnnnnnnnnnnnnnnntttagtccgcgcggaggaagggccaccttgctgggcggcgccctttcatcgcgccgctgtagaaccgtcttttttccccccccgcgcttggggggggaaacggcccccgggcacgaacgagcggcggcgggcgggttcttatatttcaccccgggtttattcgctcggacgaaaaaatgnnnnnnnnnnnccgccggccaaggggaggaaggaatttggaaaggcccccaaacgcgttgttttgtttccgccagaaaatatttcccccaaagggtatacaggaaggggcccccccgcttgtccggcgtgggcagctttcggcgcccccgcacgaaccttggctatntatcggaggcctccgcctcgcgggcctcccaccccccgggctgggcggctctccaggcgccattctccgcggcgtgtggaggccttcaaaccttctttcggttgttaaagggcggtcgcgccgtcttcccctcaaaattttgggttcgccccaaaaatttttgtgctttttgcccactggttcttttttttctcccccgccctttcgagaaactcccaggggccgccaagctctggccagttgctccagggtcctgcctgggccccagccttctttggtgtcacgtggtgcagctcctgagcatccagggattcggcccatctgcattcatctgcacttcattcagtacatcagggacaaggagttcttccacatcttctgtgcctccctcgtcttcctcactctcagaggctgcgtggagtttctgtgtcagttctttgttcttagacaactgttcctgcatagcttggcgagcctccaggtcatatttggccataattgcctttgacttggcccatttcccactgttttggtgcttaaggctcattctttccatcattctggccttttcaatttttttccagttcttctagtgctgcagctggattaaccttccgcagctgctcaaactcttttagggcttttcttggcctttcctttcttcacgactttgtgatactttttacttttgattttcttctctcttcgagccttggcctcatagtaggactgcagagcccgagccctctgaagctctgctcgtcgcatctttgcctcttctaggctcatggctcggagagaggccttttccacaggggtcagtaaagggtctgtcactggctgcttgttcttatggaggaggttgaaaatttcctgctccaggggagttcttgccttccagccactgagcacatgttcaatgggagcaatggctggctcctctttctccaggggaaaaaccagctgctctgcctgccggttcttcaggacgacagggtcccatttggagaggacttgtgcggttttattgaatgctacttctctgtggatccgttcaatctcttctttgttcagaggtaactccactgtcttctttgatttgactctactcagttgctttttcacagtggccaaagaagatgaagttttaacaggctcaagcagatctgcaaggaccagcttttctcctgatccttcagaactgacattgaactctgacaccttcagactagcctcagacctctcagccaatttccgcctattctttccatcaagggaactgattgcttccagaagcttttgatgctttctctctccatcattgtccccctcatcttcactctcactcaagaggtagtcttttggcaaatccgctagttcttcctgttggctcaaagccagaaggctctctgcaagccggttcgcagtcatttcagcagccagcttctctcacatggaccaagaacggaagccgaaggaaagcaatttccgtgcgggccgccctcgtgccgaattcgccacccaggcctcgctacttaggaccggataggg

SEQ ID NO: 147228 - DNA, 1039 bp, Homo Sapiens
  misc_feature (926)..(960): n is a, c, g, or t
ttgtcgttcctgtgtggcgtcgtcccgttctctgcttttgcgtgggtctctctcgggttcccgtggtacgccctgtcccacccgtggaattctggctacaccaggcgcggcccccggctgggcctccaatttgttggcgtcccctgttctgtcgctattgcaaccggccttgcggggttacttccgatttctgtttctgttgagcccgtgtgtttgccaaggacctgctttggttcaatgcacatttaaggaacggtccgcttcttttctcagaaccatgagcttacccattccagtaatctttatatggcactcacaagatgctaggagactgagaattcaaactggcatactggcccatggaattattcatctctttgttcaggtagaggaagcaaaagttaccaacattaaaaaaaatgtttttaaagaacaaatacaaaggttctatccaacaagaaagaacatccagttttgtcttcccttcaaggccacatatgtcctgttgagtccaaagcatccagtaagtgtgcaggatgggcttcagctagaaggccactgatgagtaagcttctagtagtagctgcctaagtgtgaaggcacgtgggtgttaggatggcgggggacgttggggttggggtagattccccccgtgggggaggtccagtattgtgatgcggctccaaagaagctggagatgtcagaagggtacttgtacatggacgactcggtcggatgtggctgcagagcctgggcaatgccgtggaagtcaaatttgtaagcatatcttttgccgtgcactttggtcataatgtttttatcatagtaataacggagggcccggctcagcttgtcgtaattcatgttgggcttgccccggccgtaatggccgaattcccgggcatatgtccggtaccgtcgactgnnnnnnnnnnnnnnnnnnnnnnnnnnnnnnnnnnncggccgcttcctcgcttcactgactttcgctgcgctcgtcgttcggctgagccggctgcgcccatggagctatatcagt

SEQ ID NO: 147229 - DNA, 1051 bp, Homo Sapiens
  misc_feature (942)..(976): n is a, c, g, or t
ccgcacactttttttgttgtaaaacccccccctttgggtttcacattccccacaagggagtgctctttaaccctctctcgctgcttcccaaccccctgtcctgaagcctcggtccgtttgtataccccagctttccattctcaacttgatcctcccacaatggatagttaagcctgaataccaccatgtcaagggcattgccaaatccaaacgtccatctactattcaacccatcattttaccataattgttttaggaacagttatactaatacctctaccataaataaggattttaaaaatgtgttggcttagccccttgaactaaattcaattactagcttattctaagtactccagttaataaacgtttgattgtaaagaactctgacttctccaaagataaaacaaattagttgtcatgacaaaaaattaagcttaaaaagcacattcacacttgtccttaaaagcaagtttacatcatatatgagaaaacttttcatgcctgatgacatggcttatatggcaaaaaacagtcatatgcaaaggacaactagagggcaatcgtcccatccccacttcctccaaaagccacactcggcctcagtgtaaaagttatattttattgccatgctacaaatgtatgaagttggcactgatagggagaaatagagaacaagggtgggaagggatagagggaaaattatgttgttacatatacaacaaggttttattttaattaacagtggttacgttttgccaatattaaaaatgcaaaccaaaatttaaaatgctgatctgaaacagcattaagatacaatgtatgcatagtacagtatcacttatgtctttttattagagaaatatggaatgtttataaaagaaattaacccccggccgtaatggccgaattcccgggcatatgtccggtaccgtcgactgnnnnnnnnnnnnnnnnnnnnnnnnnnnnnnnnnnncggccgcttcctcgctcactgctcgctgcgctcgtcgttcggctagaaccgcgtaccccctaatatgtctgtcat

SEQ ID NO: 147230 - DNA, 965 bp, Homo Sapiens
  misc_feature (854)..(888): n is a, c, g, or t
ccttttctccaacttaaccaccccaatctctccttttggacgccacaaccttaagaattccattaatttcccctgccttttcataaacccgtcctatgatccactttgtataaacgttcgggacaaaaaacacataaatgcccactcgtgctctcccaattgttctctctggctttcctcctggccttcttccctgagtagttagccaaccggcctctgtgccttcaggaaagcatctccaagttcatcctcatccatatcaattggatcaggccgcgctgtttttgttttctggatttggatctattttctccaggtttaagttttcgtggatcatctgttgttttcctcttcattgtctctttgggcagctttatccagaagaaaattcatagtgttctaagcactgggctgctgttcttccaatgattggagcaatggtcctccactgagttggcatcaacttggccaagtgcaagagtttttcctcttcttctctggaccattctgtcttcttaatgcttggatccagccattcataccatctggctttgcactgctttgctgattttctatgcagcaatgaggcaatcctagaccactgatttttcccatatttcattaccgctgctttcagaatttcatcctcggtattcctccatacgccccccttgatcataattcgaggcatcttggcggcagggtgtctcggcaagcagccgagaggagcttcagagaagtagtaacagcgattgggccaccggactcaaagccgccacttcctccaagcgcgaccttctgcccccggccgtaatggccgaattcccgggcatatgtccggtaccgtcgactgnnnnnnnnnnnnnnnnnnnnnnnnnnnnnnnnnnncggccgcttcctcgctcactgacttcgctgcgctcgtcgttcggctcaaagagctagcgccctatagtgattatcgt

SEQ ID NO: 147231 - DNA, 704 bp, Homo Sapiens
  misc_feature (78)..(95): n is a, c, g, or t
  misc_feature (588)..(623): n is a, c, g, or t
caaaggggagtgtgtgttttgtaagagtttttgctggggccggccgggcccacaaagtgtttggtgtgggttgtgtgnnnnnnnnnnnnnnnnnnggcaagaaggaggaaagggttttaaatgaggcccctgttcccagggggcccttttcagtgggggaggccctccctttctttcttgcccctttcgtccgtttcgtgcccttctccgtcttcttcactttgggcttcttgggccttgcccgggatgctctcgtgctgcttggagccagcagcgtgggacttcacatccgtgtccgaatcgctggagctgctgctggagtcggaagagctgtggtgtccttgctttggacccggacctgcccctgcctccgaccggccctgaactttgtggggactgagcttgggatctcccccgtggcccgcccccacaccgggcttctgggaggtgggctccagggctgctcccaggtcgaactccatggcggtaagagaagttgggtcctaaggccaagggcgcctgggccctgcagaggaccccggccgtaatggccgaattcccgggcatatgtccggtaccgtcgactgnnnnnnnnnnnnnnnnnnnnnnnnnnnnnnnnnnnncgcccgcttcctcgctcactgagcttcgctgcgctcgttcgttcgctgcgccgagtagcgccctatagtgattctatacac

SEQ ID NO: 147232 - DNA, 1151 bp, Homo Sapiens
gatatctttgaggcaggtttcagatttggcagtacaacatgaaagatctaggaaaagcattaataacgtgtggcgtggaaagcttgttaaaaatctgagagtgaagtttgagttaaaagttgtttgaacatggcattgactgggaggccaaagatttaaagaagcggaagattcttctcttaagacatgaggagtaagttgtgtgataatggtatgtgttttgtgtgcatgaatggacattgtaaatgttgaattctaggctccgacaatcattgtcaacagaagatcaagctgcaaatatttatgttttaaaacttaaattataaagctagttaagtctttctaatgactagttttaatgttcatgggtacattttacctaagttaccgtttacattgtatagaaaaagatacatcttaagcacagattggttattaggaattagtttggggaagaggtttttttgtggattctttcatactgcaaagaaaaaccatttgcctttggggaattgagctaacttctaatctagtcttaagactagaatgctaaaaacaaaaacatgaaggaaattaaaaccccttattattaaattgatttgtaaaaacattgttactggaaatttattggacttgaggccttcctccagaaaataaggacttgattgtcaggcctatattaggttctgaaccttaatgccatgtatttgtacttactaaaaattgtttcaatgaaaagtacattagcagtatgaacttctggtccagttggaagtttttccatttgaaaaatgtgatgtttgcatggaactgtttgaaacttttttattttctagtccccctcccccacactggatagaatttagcctagaattttccctttggataaaagaacaaaaattgaacatgttatttgtaaattgatgtttagtaattagtgataaacttgaaatactagcatatattataagccttaatcttaggtagtcttatgaaaatgaatctcttaactatcttttgaacctgtattcacattggtttccaagatattttaagttatattttttcctcttttcagagctgcttcttattctggggctacttttttttagttgtgtaattcacaaagggctgccatttttttaaagttt

SEQ ID NO: 147233 - DNA, 1027 bp, Homo Sapiens
  misc_feature (714)..(823): n is a, c, g, or t
  misc_feature (874)..(908): n is a, c, g, or t
  misc_feature (912)..(952): n is a, c, g, or t
gagggaagattatgtcactaagcatagctacaaaaggaaaagccacatggaagcagagacaaaggcaatcccgacacacagaggcatgtttgttgcggctcagggtttctgtttttcaagtgttcagagtcgaattccaggcgagacgttctggtttgagtcaagcctttcaaccgaggtgcttggcatacttaacggcaatagcgagtacattcagatttagttttgctagatattaaactagtttaactggatgacattaatacctatacagaaacttatagtcatgtttccagtaaagaaccgtacacactagcaggttttgcttattaatgtagcaggagagcatggaaatcggagttcagactctttagtaaagatcttatagtcatggggatggggagagaagtaaatggtggaatgcagagaagccctccaagaatgatgagtgattcgtgcaggatgagggaaatacagacgttccgtccatgtgagattctgcttcaggtattggacatcgttccctccacctgcacctagaggatatgtgttcaggatctcgctatggttagttacccatgtgctagacataggttgctagctagaagttttgccagccatcttcccccctcctagtgctaatgcctaatttcctaaagtaatctgaatccttataagccagggtagctcaggaggttctatttacttatttannnnnnnnnnnnnnnnnnnnnnnnnnnnnnnnnnnnnnnnnnnnnnnnnnnnnnnnnnnnnnnnnnnnnnnnnnnnnnnnnnnnnnnnnnnnnnnnnnnnnnnnnnnnnncccggccgtaatggccgaattcccgggcatatgtccggtaccgtcgactgnnnnnnnnnnnnnnnnnnnnnnnnnnnnnnnnnnncggnnnnnnnnnnnnnnnnnnnnnnnnnnnnnnnnnnnnnnnnntctataacgcgctagcgccctatagtgatcgatacgactgtgctgccccgtcggcccgtgggtgtgtgtgcctca

SEQ ID NO: 147234 - DNA, 867 bp, Homo Sapiens
cttagatatgctctttgatctagatttcctgccttttgatcgagaacgtgatcgacctttgctccgcgacctggaacgggagcgactttttgagatacttcgagatctactgcggctgctcctgcgactcctacttcgtgaccgtcttctagatcgagaccctggatctgcttccagagtaagatcgcctatggcttgtgcgtggcttatctgtcaataagcctaatatgttctgccatttatttctgtgccatccagtttgtccaaagcacgcttcatgtcagagtaggagcgaaactcaagttacaccctcatttgttcgttccttgtgggcatccgcataggttacttcacctgcttgtcgcataaaatcctttaaatcttgccaactgcaccgactagaaagattttctacaataagcctgtattctgtacgaacaggtggtccgtatttgtttctgccagatgttctccgactgctgtatccacctccaccactgcggcttccgtagctgtagccgtcgcgatcgcgacgcgggccccgggcgtgctctacgatcacgcgctcgccgcagagctccttgccgttcagctcgtaaacggcgtcgtcggcgtcgcgggagtcctcgaactccacgaagccgtacccatttttgaggtctacttcgaggaggcggccatagccactgaaaaagcgctggatgtccttctcccggacgttgtagctcaggcgtcctatgtagacgcgcggcatgtccgtggcgggcggggacccaagggctggttgtcgaacggcggaccgcaagccagtaaccgcggtgcgggtgcggggacggcaagagcccgaacacgcgcctcacaccacag

SEQ ID NO: 147235 - DNA, 946 bp, Homo Sapiens
  misc_feature (83)..(117): n is a, c, g, or t
aatctgataggatcctatagggcgctcgctctttgcagccgaacgacccgagcgcagcgagtagtgagcgaggaagcggccgnnnnnnnnnnnnnnnnnnnnnnnnnnnnnnnnnnncagtcgacggtaccggacatatgcccgggaattcggccattacggccggggggctctggaataggatgtaagagtggaaaactagatatgaatagagggatctgaaacgtagggttgggtacaattatgtcacgtttaatttgccaaagagatctggtttttcctactaaatttcaccaaatgaacagtttggacagccatcttatccaaactattcaaatgcacatgtaaatctaggatagtctatcgtggaacctaaggtatgttcaggctcaggatgtcagatttccaagttgctaaagcttccagaatggcaaaataatatacctcgctttcagcagctgtggcagccactgccctctcatattaggtttgtctctctgttaaattaagttgcctgtcttgcttcccttcattaaagggttttcagttacttggaatgctgctgacccagctgatatggccccgccttctaagccataagtctggctgcgcctcatgccaagcatgcggatgcattttagagagcacctagaggatcccagccctgcaaatgccccagacacctgccaggaaatagaaaatgtaagttctgggggtgacggccagctcacaggccataaaaagggcatttaaggtttgacgaaacagaacggatgtcgcgcagtacacttagaactctaaatagtaaacgagtctagtcaacatacggtaaattgactctaatcataaatgtggctctaaaatcagaaaggttctcctctcttttcggcgcaggtcatgttctatacttaagccagggaaatcgaagacctgggcgcccctaagg

SEQ ID NO: 147236 - DNA, 1193 bp, Homo Sapiens
  misc_feature (1068)..(1102): n is a, c, g, or t
  misc_feature (1106)..(1149): n is a, c, g, or t
cgggacacgccagaggggcaagcagggggcaacacgtggcgcgggacaccgggacaagggggcccaagacccgggaacccaggggtctgcccgacctcgatgaagagaaggccccctcagaggccccagaagaactgtatgccagctagtcccaggtggaccaatctggtccagtctacctgtttaaaggagaaccagtaacacttggtctgtaaccctctgatcctgtgtccgcctttgtctgcctcctaccaccacttctcaaaagcaaatgtgttctttgggtacatgcttgttttccagttgcttggagacccaagtctgtcatttggaggtgggccacaaatataggacaagtctcttttgaaatatgatctcgttatctccttctccggttattcgttccttccgtggatgtatggcttgagttccgcattgatttgtgtagtctgttttgtaacatgcacaactgcatgcaatcttctcaggagaattcatttacttaaatcaaggatatttttcttaaacaggagttcgctggtattttttgcactgtagaatagttttattgttcctatctcatatccatttcttttgtttgcctgctctctgaggagatctgctgcgtgccgcaggatggaaagcagagggttaattccgactcctcctgcaatcaacacgaggtttctagaggcatccgcaggctgagggtcaaagaagaactctccacccactctcacagccacttcacagtcaagtgtacacgtattgtgaacccagagggcaggagggtggttcgtatatttcactgccaattctatcactctctcttgttctagcagtctgggactggagcatattgaaaacccaccaaccacagagactcctggaataaagaaatcaacccactggccagctttaaaggaaaagtcttgatcagccaccaagcaagcggaggctcttcactgacggtgactcactggcagctccacacaccttagctgctgccacaatctccccggccgtaatggccgaattcccgggcatatgtccggtaccgtcgactgnnnnnnnnnnnnnnnnnnnnnnnnnnnnnnnnnnncggnnnnnnnnnnnnnnnnnnnnnnnnnnnnnnnnnnnnnnnnnnnnacaacgacgctagcgccctatagtgagtctatacatcgggcctt

SEQ ID NO: 147237 - DNA, 782 bp, Homo Sapiens
aggccggccgccaattttttgttgtgcgttttcgttttgttttaaacttaaaaaaaatttaatgataaatacatattgatagaaattattcaattctcctatgaatgcagcatccaaggatattctccatgttcatggctcccagcccttccctccaggctgatggggcaacttgagacccaccaagccagcagactcctccaccgagcgctcacccttgccatgaaattcctgatgtagggccacatgtttccggatgctacgcaggaggcagagataggtggcagcttggaaatgaagctcatgttgggctctgcacaacttttcactggtgacccgatgtgcacggaaagccttcacaaggtaccgataggccgcggtgtcgcgatagggtcggccggtggccgcgctcaggtagcgcaactcccgcagaagtcctcgaaaagtgtgcgacggggaccctaaggccgccattgtcctgtccttctccgagcgtggtgcccaacggcgtcctacgaccctgaaaacccctcctccggcccaggcgcctaatggtacggtcggacagactaccgactccccctatcgactgacgagcagtggaaccgctcacttgtccgttgaccgaaccttattaatcgaaggcccaggggcgccgtaacaaatcaaacgaaacccgactgttaactgaaggtaccaggacctctaacccagaacaagggtttgcctcgtgccgattcgccacccaggcctcgctaccttagaaccgttagagttactgc

SEQ ID NO: 147238 - DNA, 467 bp, Homo Sapiens
ttcttaaaaaaaatttaatgataaatacatattgatagaaattattcaattctcctatgaatgcagcatccaaggatattctccatgttcatggctcccagcccttccctccaggctgatggggcaacttgagacccaccaagccagcagactcctccaccgagcgctcacccttgccatgaaattcctgatgtagggccacatgtttccggatgctacgcaggaggcagagataggtggcagcttggaaatgaagctcatgttgggctctgcacaacttttcactggtgaccctatcccacgaaaccacacctagcgcccacgtgaggggtgacgtatgctgggagttgtagttagagaacaaaagtccacatcaccgcgccaaaggctttaccctcgaaactgcaccgatgctccggacgttgaacgggcgcgcgcacgcttctgcgtacgcgcttgcctgcccc

SEQ ID NO: 147239 - DNA, 1579 bp, Homo Sapiens
tgcgtatgccctttttatgttaaaagccgtgaatacttacaggacagtgggaatttaaaactaaatgaagggaagcatacaaaaggctgaaagcaagactgctttaaaaccggaggaaaatgaggaactgctaaggcaacctggcctgagttcagctgtgcaacaggcactttgggttttaatcttttgcgttcttcaatgctgttttcagactccagatatactttggtattgttttctctcttcctgcaaagctgaggcagagtcggactcctttactgtgagttgaaagatgtgagaataaggcattgctggaagcaacagtttggcagcctggggtacactcaggttattcgttacaactattattatttgatgtctttttttaaactcaggtcatccacttttgactgtcatccatggaagagctcttattaaaagcctcagactttcgggacctatgattctttggcacaaccttttggaaaattcttaagcagggatgaagcaaacttgatcggagctggggaaaaagaagacagattagtatttttcatgctgacaaaaaatagctgctatgacttttcccgcaacgtggacaggggccaagtgaagctgaacttggtcatggtctgtcgcccagtgttcccttgtcgtcggccgattttgccccggaccttcttggtgggcttagtggtggcaatctgtctcttctaccagactctgagcctccgagggtcgaggaagctcacagccgcttgcccctggggctgtcccacacacatccactgaaacccaggcaagcagatgcaagaaaggattctctcaggactaacagtgcttccttctctctggtaatgcccaggaaaccagaaaggtcatagaatcaatggagacacactttggcagccatggccgaagggccatactctacaggcctcctttctacagcaaaacagagcttcagctacaccagcacatttctgactcaacatggctatacggttgtcatcgctgaagaaaggctcaatgctggcctagggccggggctactagaacaaggtgatctgggctcttgggatctgtcatttgcctgtcttctaagaaagcagaaggaacaccctgtatatccaagggaagtcatgtgccagttaggtttacatcaaaaggcaacagatttccagaaataagcagccactttgcagacacggagggctttatggtccacaatacgtgcgaaagatttcccaggattgcactttccagtgcagtcccttctgtggtgttcggatcaggggaattgcactaaagccgggtatttcgcgtcaccttttaaaaccagtgaagcccgtgtgtggaacccgggactgggtctgaacgtcgatgaagtaggtcgttcccattgaaaattttgagggagatattgggatttaaagatggtgggaagctaacctggggtataatataggggtgggatcacaaaaggcggtgtaatttggatcagaggcacaagtgatgtagaggcaacgggaaacaaggcgacaaacagatatgaaacggggcaagagaattcacttag

SEQ ID NO: 147240 - DNA, 1023 bp, Homo Sapiens
  misc_feature (903)..(937): n is a, c, g, or t
caccgatacacaatttttttatacatcaacttttgttggtgcccccccattgcccataggtccacatggtgacaggctattcgcctcctttcattcccaggtcagtgcttagccactaaatagtacctgtttctgcccggagaatgtcttaaaaatttgcaccagatttcgatgcaatctggatatgcactgagagaggacatttatggatgttaaatgacatgcaataagtaaaactagacacatacttttgaaatatagaccattatttgagtgggcttgatacactgctaggaatataaccacacctaaggtgaaagcttacccctacagggtataagtgatacacggaagtcattatttgcactatggcaatattccacgaactctattcataaacatagaaggagaagagaggtgttgtacaaaggattttgctggtttcaaagcacatacaacgtttatttcctttctatgtaaatatttgacatagcttcaaaatatattgatttggggagcagagaagagctctatgagaactgtttgcaggagtggtcgtcaaggtgaaaacactgaactggctttaaaagagacacatactgcaaactgctgtgtactttgttgccatgtgagagaccattatctgggtacatgaatttgactggtaggtctgtcagttcatggtacaatcagtgaggctaggaaactattacttatactcgatccatactcaagtcaaaagtggatggtcttggtcatttcctatcacttccctttcccatgaaaaataattcaaacttcaaacaattagcagtttgtccatagcctgggaccaaccctcctctaccctgccccggccgtaatggccgaattcccgggcatatgtccggtaccgtcgactgnnnnnnnnnnnnnnnnnnnnnnnnnnnnnnnnnnncgccgcttcctcgctcactagactcgctgcgctcgtcgttcgcttacggtagccccatatatcatcagttttttctttctttccct

SEQ ID NO: 147241 - DNA, 1072 bp, Homo Sapiens
  misc_feature (959)..(994): n is a, c, g, or t
tcttccatctttctcctttttgttttcttctgctcactcctcgtccctccgtggactagccgatcctgtttgctctgtgtcgtatctctttgtgttttatgtgcggcgttgttgttaccttcctgttctgtgccctattactatgacgcagctgaaccgaccggttttccagaaactctgtatatgatcacgaaaatcctggtgtcaattaaagttccaatgtttgaagtgtgaaataggtcgtaatgcaaccacgtgaagtgttaaatatttattgctgcgtataatccatgaaaaatttcaatgtatgcaaacaatccccttcacttaaaagtatcctgccaataaagttgcatggaatacagggatgactggtcaattggccatacgtgaggtcgtggtctgtttccttcataaatctccaacatttatgcagggtaattataaaaataagagcgtcttaggatttttcttgtcgcctgtaagcattgagaatgaaaagcttagaaatgcgtacatgcaaacaattgtatcttttgaatctgtctcattaaatgattcagattatgaatgaatcttataacaaacttatttacaagagtggtcatttgtggcatacgtaatacatttaagtattttactttctattgaatcatttaggcaagaactaagaaactgtatataccaaatattttaaataaaaaccttaaaatggcctctatttttgattggtcaaaatacctgcacgattggttgaaaccaattgagaattgcttgtgtaaatatcattttagtagcttcagaaatggagctgcgacgactttggagcacttataaatggcataaaagcattctgctgctcatcatagagagaatgtgtaggccacaagaggtatctttgaaacccccccggccgtaatggccgaattcccgggcatatgtccggtaccgtcgactgnnnnnnnnnnnnnnnnnnnnnnnnnnnnnnnnnnnnccgcttcctcgctcaatgacttcgctgcgctcgtcgttcgcaagaacggcgcagcgccctatagtgatcaggcagtct

SEQ ID NO: 147242 - DNA, 939 bp, Homo Sapiens
cagtcgacggtaccggacatatgcccgggaattcggccattacggccgggggttgatcttgatactatattctttgaaaattcttgaagttctttaatttgaaattgaaacattaatttttgaggtttttggaagttactatttggccatttttacaaatggattttgcattaacaggaagattggaatgacttgtggctggattaattcccagaaccctctccctcctttcttttctaagtgagttgttgattttaggagtttgctttgtgctgttacctaaaatcagagactggtgtacagtatgacttccatctgaacttgaaaagtattaaaatgggtcaatattcacattcttttagatctcaggatgggaaaatgggtttgttcagatggatatggtaaatcttacccaattaaggaaggctaattttagagttcttctaatttgcttgtgtcaactcttaacttgtaaaactgctgttaactcggtttaaatttttaaattaatataatagaaagaacactaaaatacttactggtaactgcttagagccatttatctgatcctgtggattacagaatgcattccctcttctgctgtagcttatcattgctttgtttgtagctctgcatatttggccaccttgtcttcccggtagttaagacgtttcaggaaaagctcagggctgatagttcttagcaaatgctattcttttgccttaattaaaatagtctttattgggttttatcctaagttcgacgaaacttgtggttcctaagaggccgattccggacgttgaattcccacttcctggcattggcaacagtcggtttccctaaatttcaggttgggctgtttgtgggaataacacccatgggatgggagaagaaagaagcgggtaactggagaacaatggggagaccaggcggcgcctt

SEQ ID NO: 147243 - DNA, 592 bp, Homo Sapiens
tttgttttttcttcgccgcttctcgtttttctttgtgaacaggactgttttcaccattgtagaaaacatctactttctcttgtaggattttccgagctagctttctgttctgatcaactgatcttgtctgatggcactttacaacgatgcctgaggggatgtgcttcagcaccacgcagttgctggttttgttggttgcctggccccctggaccgtgtcctttcacaaactgctcttcgagttcattctcatccaaggaaagcagtgcagggtagtccttcttgcctgccatctggaccggagtgacagctattcctggggataacaacgtcagcttctcccaaagccggagtccccatggcgccgggcatattcgggtcagtggtgtaggaaaatgaaataaacccacggtgctcataaggaacgtggctctgctggctgaggacctggtctcaggacccgactcgtgccctcaacgttctagggatatccaaatcacctcagcggaggattcgcaatcgcgatccctgatctgcgcacgccccggccgtaatggccgaattcccgggcatatgtccggtaccgtcgactg

SEQ ID NO: 147244 - DNA, 865 bp, Homo Sapiens
ttgtcggggccggggttggtgtcacccttccagacagccaccgtggtgaattgagttcacgccatttagattgggcgtcatctccctcacttaaattttagagaatcgagtgaaccacagccttggttccttattatttggggtcctcctttgtagaaaattgtcttgtgtaccgaatactggtctgatagagctcatggcatttgtgaactcaattgaaattggtctgtatgttcacaggattctttctacgaagccaggaagcttcagatcctgggtaacattagcttctaatgcctccttctgaggtggcaaactctgtttcttgtttcagtgtactcaagttctgttcatcgccatctctagttttattctgagttgtcttcgcgttcctgctctggcactgttcctgttcagctcgaactttactccagtttttctctccagttggcagtgcagtccgaccaccaccgcatggtcttttccatctgagcagctctggccttgacttcttcaagctcccgcaggcgaagttcttcacaaatatcccatttgttggtgttatatgagtgagcacagaaattgtgagcagcatgagattgtagcccatgaagtgggaagcaggtattacaggtatccctggggggtgaggcaggggccaccatgtcgccgcgtgacttaattgatgattgttgcatctggaagatctgtgtttcctcaattaatcgatgtatggaatctaaattcatatttatttttaagaccctctgggcttgctgggctgctccagtgtctcagttgcagccacatgtgtccccggccgtaatggccgaattcccgggcatatgtccggtaccgtcgactg

SEQ ID NO: 147245 - DNA, 1195 bp, Homo Sapiens
  misc_feature (121)..(224): n is a, c, g, or t
  misc_feature (248)..(261): n is a, c, g, or t
  misc_feature (950)..(1080): n is a, c, g, or t
  misc_feature (1082)..(1145): n is a, c, g, or t
ctgggacccgaggcgggtggtcaccctggaggttcaggagttcaagaccagccggccaaaaagggcaaaatccaatgtgctactaaaatacaaaattagctgggcatgttggtgccagccnnnnnnnnnnnnnnnnnnnnnnnnnnnnnnnnnnnnnnnnnnnnnnnnnnnnnnnnnnnnnnnnnnnnnnnnnnnnnnnnnnnnnnnnnnnnnnnnnnnnnnnntgcgatagcgtgagacaccatctnnnnnnnnnnnnnnttaaccccccgaaatgagaaattaaatagtttaaacatattcaattacaatttttactagacaaatcttataatccacatgccttctctgaggttttcatctgtttgtttttttaaaaataattatagcaaatgctttagtacaaagacttagtccaagactattattgttttccaatttaaggtgaagcattctattaataaaactcactgtaaaaacatttacaattcagtgtaaaattactacttagtaaaaatgccatataattgccttgttcctactgtctacgcaaaaaggaaatttccactttttatgttgttacaattgagttcagaacacttgtataagaggatttattaaacctgctcataaccacttcatagaaagtgtcagcaccatctcatactggtgcatcacggtaaaagaaaacattttagaaacaaaaccacttaaaccaacagctttaaatgactatttacagagcattaggtctccaagttaatatctccccactagagttttacaggcttcctcatatttctgaggcttaacaaaaataattttatagctgccactttgttccaaagacaaatttcctaataaaataaatttctatagaactggttcagtaaaataaaatctctcccctaaaccagagatcttaaaactgaatttttaaaaaatagctnnnnnnnnnnnnnnnnnnnnnnnnnnnnnnnnnnnnnnnnnnnnnnnnnnnnnnnnnnnnnnnnnnnnnnnnnnnnnnnnnnnnnnnnnnnnnnnnnnnnnnnnnnnnnnnnnnnnnnnnnnnnnnnnnnntnnnnnnnnnnnnnnnnnnnnnnnnnnnnnnnnnnnnnnnnnnnnnnnnnnnnnnnnnnnnnnnncccggccgtaatggccgaattcccgggcatatgtccggtaccgtcgactg

SEQ ID NO: 147246 - DNA, 1234 bp, Homo Sapiens
  misc_feature (1124)..(1158): n is a, c, g, or t
tgaaggggtgaaaataaaccaactttatttgaatcagtcaataccaatcaagactggaacacaaattggtaattggttcagattcatgaggaaaacactcagctgtatcttcattaaaaggcattttacatttattaaggcttgaaagcaagtcctgttattcatcaccatagttaaaggtctcgagaaaatcaagtaactatcatttggagtgtctttgtaaaatgaaacacttgttcttttacaaaagctaagcatcttttgttaagctagttaactccccagcttataaaataggacaacgaggtggccaggaaagtaagacaaattcaaacatcagctggataatttatattttaaatatatgtatagtcaatattgtgaaatctctaactctacataaaatacttcagatgactggatccttaaaagtacattttaccaaaaacagattgcttctatagaacacagaatagcccaaaccttatattggaggcaacgtattttatttatttttggttgcaagaaaggaattggatctatttctttaacgttaaatgaaattatgcacactttggatcatacataattatgaatcgaaagtatcctgacactaagctgggagatgcatactgacaaaggggaagaatgtgtgttgatgaggagggcacatgttgcttgatttgaatgataaagagaaatggatagaagacaatggggctgtgtgcagcaggtcctgttcgcttaagttttcctaacatcagaatcagggtgcttcacatgcacatgtctttctctgatgctttcttaagattctccttaatgtcatttaaaaaaataagaaagtgatcccttgggaatcattgtacttagttttaaccatgagttaacatttcctttttccaaggaggatgacaccagcatcttgattcaccgtgcagttgagatggccctggccagtgggaattgaggcgagtcacagaagtacttaccaaatactcacctgctgcttctagtttaatttaattttagacacacactctcacagtgatgctaaactctttacaagatagcccggccgtaatggccgaattcccgggcatatgtccggtaccgtcgactgnnnnnnnnnnnnnnnnnnnnnnnnnnnnnnnnnnncggccgcttcctcgctcaatgactcgctgcgctcgtcgttcggctatacagccgctacgccctatagtgatcgata

SEQ ID NO: 147247 - DNA, 821 bp, Homo Sapiens
tgactcccgtcgatccatagccagtgatgcccagccatgcagttgctggtgcctctcgctccgggtgggtgcggggtcgatgccatcctttgcagctaagtgtcgagaccccatagagagaatcttgaggagaccagtgaagaaaagcctcttcaccatcaaagaagatcagctggagtgacaaatctggcttggagtctgaaacagtctttaaggaaaggagtttcttgtctaaggcacgagcaagttccaacatcattgcacatggcacggctgaatcagtggctcctacaaacactctgttgttccagtgggaaaaatacttggagtcatagtggcaggcgaggaccaaatgtcgtttagcagtgggattgagggtgctgatgatatttgagaaagaccggtacccatagggtgtctgactcaagaaggtgtctatttccaagacccagtcagcctgaagcctctgaattcgctgcatgatgtgctgacgagcagcatagcttccaggggatcccgggtatcgctctatcagcaatggctgtaagtcattttgccacatttcagagatactggtgccttctgcaatttgccgaagagccgatgaattcaaaatggctggctggtggtaattcttctcctctggccaggctgaggcactcggactgacccccctggatgcccagggcagggcggccaccagcagcagcaggtggagggtgcccacgacgcgccggtgtcttccgcctgccatctctccgagtctgtctccccggccgtaatggccgaattcccgggcatatgtccggtaccgtcgactg

SEQ ID NO: 147248 - DNA, 1055 bp, Homo Sapiens
gttgtctggtccacgtgctcgtctttccctttcgtcctggcggttctctgctcctctgggtgctttcgtctctctatcctttgggtggtccggtttgtgctcagtgctcgccccatgtcttgccctctcctgttgcacatgtccatgcttggggttcaccaccttgttggtatctcttctctccttgttttcgcacagactgcttacaagtgcgcgaagttgctgacgggccgctagttttcgtgaaagtatttagtgtttcccagtgggcataatgtcaccaggcccagtaatttattgggaaaatatgtggaagctaatgaagcaatcgcttggttttcaagtacagtatgtgttttttgggggtaggtatcttctgtagaaagtccctagtcacctaattatatgttagtaggctgcttgtgattggctggggttgtcttatttctaacataagcatttaccagaaatgatccaagttaagttttgcttatgcttgtatgtagtatgaccccgtgaagttttgcttgtgtttgtagtttaagcaaagttaaagctatttctaagggccaggtggttttgtttgctcaggatttttccagtctccatttaagttttcctttaacaattcccctctttttgtcatccactcagcaagctgagagtatgaccacatggcataacgttactctttagttattactgttgacatggtcgttgggaggaagagtcaggtagatgtttttatcatcgtcagtaggtgccctggggttcagagtcatgtagccgccgtcagctgtttcatagtcattgttggtttcttcaagttgtctctttctgatggcaatcatttgacgtccaggtggctcaaattgggcagccttcacaggatcagtggaattggcacatcaggaagagaaggctgagggccatttccacattgtccaaatgtagtgcatctttgttggaactttgaagaatatagtactccatggcattaaaaaggaagacagaaagagaaagtaacatgagagagaaaaagagaggcagggagg

SEQ ID NO: 147249 - DNA, 382 bp, Homo Sapiens
cattttatctgaaggctgcccaatttgagccacctggacgtcaaatgattgtcatcagaaagagacaacttgaagtaacctactatgactatgagacagctgacggcggctacatgactctgtaccccagggcacctactgacgatgataaatacatctacctgactcttcctcccaacgaccatgtcaacagtaataagtaaagagtaacgttatgccatgtggtcacactctcagcttgctgagtggatgacacaaagaggggaattgttcaaggtctatgtatatgtgtactggctgtattcctgcgcacaccgggccacctggcccctcagagatagcattgtaactctgcttaaactacaatacactagctaaactt

SEQ ID NO: 147250 - DNA, 1038 bp, Homo Sapiens
  misc_feature (925)..(959): n is a, c, g, or t
ctgaggtcttgatgctactgcccgcttgtttgtccacttcgtgtggatatagggattgtgcaggtagtgagttttggaatgtcttctgttgtcgtaaggagtttatgctatgccgtacctatgccttatggcagacctgtggcgagttaggcaaggcagccgttcaatattgcgtcggtgtaaatggtatgttctgtaagaaatgacattgaagcagtgttcattctgttgacatgatgtgtcagcaagagccatgcaaatttgtgcttgccttttataccgtgagacaaattgtttagacaccagaggagagagatcagcaaagaattgcaatgagtttatttaatggaccattatttcccatttgatttttttatgtttcgacaatggtttgttagttagactcgtgtaaaaaaagagttaacagcaggcttgaggctgctatctttcaaagggcctgcttgcagggttagttcttggctggtgtccgggaacatggctttcggaatgtgtgctccattactaactgataaggtcattttgctgggcttaggctgtttatacaatgtgatctatggtgaacacctgctttccctctggcatctggaattttggtggttgctaggtagaaaatgcctatgtgaccagccctcgaaatatccttaaactctgagcctcaaactggctcatctgggcagaaacatcacataggcatagttgcattttcactgctggaaggaaggcgaactcgacgtgacttatcacaggagagagatcctaggaaccgtgcaaatgaatttctccagactccacttatctttcccattactgatcttgctgtgcatgtttactttgccaccataataaatattagcccggccgtaatggccgaattcccgggcatatgtccggtaccgtcgactgnnnnnnnnnnnnnnnnnnnnnnnnnnnnnnnnnnncggccgcttcctcgctcaatacgtcgctgcgctcggtcgttcgctataagcgtgagcccctatatgatgatacattttt

SEQ ID NO: 147251 - DNA, 1059 bp, Homo Sapiens
tcgggtaatgagatacctttggattattccccccttacaataactgtatattactgttttaatgagaaaatggtaaaaagatttttcctttttttgtggaaattgtggatttcaagataaaatcaagagaatctacttcatacagctgtagaggcacatcacattggttgaaggttgctgtagacacttcctcactgctcctttacctaattttatgagcatgggaagggctcaagcagctttctccaagcccccaagccaaggcactactaacacattcagtgctattccaggcagaccccgtcctgagagcgatgattttcaaggatgctgctttccactttatttagcccttgattagcattcacgaacttcctttattttcctttcttcttcaattgttctacaaagtaatcattacaagcaactgtcagagctgccaccatgaccacgaattcattaaaatccacttcgttgtccttattggcatccaggtcctgcactatcttatcaaccaactgggtttccttttggcacgagaggaattccgtgagctctcgctgcaggagcagtttcagttcccccttgctgagcttgaatctcttcctttccttgccagaatagcggtggaagattctaatcatggtgtccatggccatctcgagctgggtgggcatgtcggcagcagaactgaccactccagaagcaggccaccaaacccggggagaagacactattaaggaatgcgatgactcagccgagacacgggactgtatgctgtatcctttgtcttcaaagcatttttctggagagctgggtgtctacacagagtcaggggcttgtgaaattacacttagacctgcttcctgtgcagatgagataaggagaatgctcttgtctgaatttctgggcgtggagattagcaagccgttttcctcccagcagctagagcgagcaagaggccctgctgtgagtagtgctgttctgagtctgcgtggtccagactccccccggccgtaatggccgaattcccgggcatatgtccggtcccgtcgactg

SEQ ID NO: 147252 - DNA, 955 bp, Homo Sapiens
  misc_feature (881)..(915): n is a, c, g, or t
tggaatactagtactggagtatggatgctatcaggcttttgagcccacggtcgggccatgggctggcactcaggttcctctgaggctctggggtaccacttctgtgccttggtagaaggcacaggaaacctgcgctgggccacttggggttgaaaagggtttcgcaagatgtggatcttcctcccggtggcaacaatggtggtcggcgttcctccagaatcattatccctgttgaccgtggatctcagcttcggcagtccagcctggaacaatgcctcccagacctggaggtccgcgggccgtcgcagaacttccagccgcctccgccaccacctcctccgccaaatccgccgcctccaccaaagccaccaccaccgcctccagcaccagctcctttaggtttgtccagtattggtgcacttctgtcaattggtgaccgtcttctttagtttcttccctttgcgtgatatcagaaaggagagcatttctgcccagcctgctctgtcttattcaaggtaggcttctctgtattggccagtgcttacgtcgggggcgtcgggggatgctggagggggagggacaggcatcttgggcagttatgcgttcaacagtcttgctgataaatcgttaaagggtactgcagggagccatggtcagggacacaggcagacagagggccagcgggacaggagccaagagagaaaactgtccctgaaaaaggtatcatcttctaacgcaagtgtggggtcgtttttggacagccattttggacaagctctggcctcttgttaaatgtgacatactgagtcagaggcagacgtccttctgtccccggccgtaatggccgaattcccgggcatatgtccggtaccgtcgactgnnnnnnnnnnnnnnnnnnnnnnnnnnnnnnnnnnncgccgcttcctcgctcaaatgactcgctgcgctcggtcgt

SEQ ID NO: 147253 - DNA, 794 bp, Homo Sapiens
cgatccaccctaatgccacagtgaacaccgcaattacaaaaaataaccaccatagtataatcaaagttaggccacgatggagaatacagttttcacagtaatgttatctcctagagtctggttcatatctctaaagtctttgtagcttataaatgcaatcagtattttcacatcaggaaattcagatctgttacctgagggaggaaataggacactgttattgacaactaacattgcttcagcacctcctgttctgtgcaattctggctttttcaagaaaatggcagcttccccatggaaccacaactgctttgctctttatgccaacaggaggaatatcagaaaggttgcatagtggtgtggaagtcagattcatcaaactaatggaagttgcattttctagggtacttggaagagctgtccaataagggttataaagcatgcagtagtccttggttgtgccatttccagacgcatgcaagattgcttcctgagcggctgtcagctggagcaggaagccccagagtagggcggccccggcaggggacagccgccgctgcggccccatcggactggtgggtgccgggtgggacggcacggtgcggcgcagctcactcggcggggtaggctcggagtcccgccgctgcgctgcctccgtggccggaccggaccggacaggcgcgggcggccgggctacgactggaccgccgctgctacagcggccgccacagcagcgcgacttcccccggccgtaatggccgaattcccgggcatatgtccggtaccgtcgactg

SEQ ID NO: 147254 - DNA, 861 bp, Homo Sapiens
  misc_feature (787)..(821): n is a, c, g, or t
ctctcgtgataaaagccacgtctccagccccgtctcccagacacttgaaggcaccagagtagctgaagtacggttcctgggaggagaaggcacattttgttttcgccctgtccccgcacacaggcgacacaggttggggaactgtcctttatctgcaccgggaacacagctggctgagaagaacctggccacagctgcctcaatgggctcaggtggacccgtccaattcaagaatggacgaagtgtccctatagggacattccatccagcggtcctgcgaaggcctgtgtggcaggacttcagaccttgcagttcgttcagctgaaagctgccgcccttcttcaccacagccacggcataatagtgagttcgtggctgtctttcggtcccgtagacttccgccgctacaggtcgcagtttgtagggggccaggcctgcctcgtatatgaaaccaccatcaagggtcacagcatcggccctgttttccgcaatggcctggatacactggatgggggagtctctctttatgcagctgacaggagggccacgcacttttctcatattcctttgccattggaagcattttggtggcctcgggttgggatacggtgcaccactggacactccttctcctacggccagccagacacagtccgagggccccgaggaacagcaggacgaggaagacaagtttcatgtctgcggtctggaggcgacttggcaaacgaaggctctccccggccgtaatggccgaattcccgggcatatgtccggtaccgtcgactgnnnnnnnnnnnnnnnnnnnnnnnnnnnnnnnnnnncgccgcttcctcgaatcactgactcgctgcgctctgtcgg

SEQ ID NO: 147255 - DNA, 978 bp, Homo Sapiens
gcgcttcccgggagctctgtgaatgtctgtttcctgtttctcccccatcaggagcagtttcagtctcaacttcaaaagaacaaacgcgcactcaaaacaaaggaagaccgtcctcgactgcagaggaagcaggaagctgtcggcccagctctgagcccagctgctggagccccgagcagcggcatggagtccgtggccctgtacagctttcaggctacagagagcgacgagctggccttcaacaagggagacacactcaagatcctgaacatggaggatgaccagaactggtacaaggccgagctccggggtgtcgagggatttattcccaagaactacatccgcgtcaagccccatccgtggtactcgggcaggatttcccggcagctggccgaagagattctgatgaagcggaaccatctgggagccttcctgatccgggagagtgagagctccccaggggagttctctgtgtctgtgaactatggagaccaggtgcagcacttcaaggtgctgcgtgaggcctcggggaagtacttcctgtgggaggagaagttcaactccctcaacgagctggtcgacttctaccgcaccaccaccatcgccaagaagcggcagatcttcctgcgcgacgaggagcccttgctcaagtcacctggggcctgctttgcccaggcccagtttgacttctcaggccaggacccctcgcagctcagcttccgccgtggcgacatcattgaggtcctggagcgcccagacccccactggtggctggggccggtacctgcgggcgcgttggcttcttcccacggagttacgtgcagcccgtgcacctgtgagcagcccggcggccgatctggccaacgggcctttttacaggaactgaggtccagagaggacatggacacccccggctctgtcagagtcacacggggctcagtggacggccttggactgaacgtgggctcctaactgcca

SEQ ID NO: 147256 - DNA, 718 bp, Homo Sapiens
  misc_feature (177)..(177): n is a, c, g, or t
  misc_feature (640)..(674): n is a, c, g, or t
acggttccttgttttaaagtgcatttattcaacaagcaaagtacccgattccctttaactatgaatacaatacaaacttcgaatccagagagttgtaaaacttgtgtgcaaagaactgtcaaggtgactttctcaaattaataaattgtcttacaatgattttctgtaaagctttcntgggtctgggaaacagacctgaagtattaacacaacttgggttaattgtggaaaaagtgtcacttcaggtcacccatttccaaaagagcagcgggtcaccaaggggcccacagccacagaccggtctcagtcaaccggtctgctggctgcttttggatgagctgaagtaaaaatggattacattttaaaatacaaaattggacaccaggtgtaaacatacttgcaactgcaggcactcgagataccaggtgcctccctgttttcagcaacctaggcaagcgctaaggggtgtgctatgggtcccgcgtgctggggcagctggggtgggaaaaaccacgagaagccaagtagatactcaaggaaaacaccagaactgaagttacagagaatgaaataccagcagcacagggaccccggccgtaatggccgaattcccgggcatatgtccggtaccgtcgactgnnnnnnnnnnnnnnnnnnnnnnnnnnnnnnnnnnncgccgcttcctcgctaacctgacttcgctgcgctcgtccgggtt

SEQ ID NO: 147257 - DNA, 931 bp, Homo Sapiens
atacaaatcctgtaattaataatttatattaaaaaaccccaaagggatagcagtggagatgggacagctcaaacaatgcctttttttaacctaaaacagaattgtgcataagctgaagatgacaaacaacttctagactctgcacagttttggttatctttttttaacatctttatattacatgttttaaatcatatcaggaatgcaaactagaactgcacactacttcagtggaaaaaagttcaatattgtgcaattttctgcctcttaatagttaaaaagtggcagcaatccctgcatttgtgtttgaaacaaggatctgagaaactttatcaaaaaaggtaatgaaggcaaaaattggcagacatccagcatcttgtttctttttaaaacaatgtggatgataagtaatttcatgattaaaaatgaatcttttaaataaatacattgtatctgacatttgcactgactgatttgataaatctttaagtaaacaacggctttactacactccctgtagcctcaagccactggctttagatctctggagtccttattcactgggtttcataccctgaccactcgatacccagaaggctgacttgggcaacatgcgtgccattttgagcccttgaggcggtatgcactcacataatttggtcccaatccagtggctagcagaacgactgtgtctgaataaaaaccattcctggtaccagtagcctggactataacattaccataatgcgaggaacttgtcaaacactgttaaggcataatacgtgggccacaaatagaatagacattaacacgagtacgcatttggccccgaacgtggaccagtaacgggtagagggaaaaaacaatatagaaaaacatgcgtggtgcccagggcattatatcataaataacagagtatatctttagccgc

SEQ ID NO: 147258 - DNA, 1029 bp, Homo Sapiens
  misc_feature (917)..(951): n is a, c, g, or t
ggacttcccatcctgacaggcatgtaccatccagccgtgttcacgcaattctatagtaatggtaaaggatgcatggggacgggaactatgttcgttcatattagttgcaccacagaacgatttttggtgcccaagcgtcataattcgatcgcatatcatcagcatttatttaccacataagctgatagatctttgatataaactcccacatcaggtcttttctttaacctctaacctttttttctgatccttgcccaaaggttcacggccttcttcattatatatttcccaataagacactcgaacccaaatcttgtatcaccctccgcttttgcaatatgaccaaatatgtgagcaaatgaattgggaattattcctctaagttcaggaatagctcgaacaccttgccatggtaaaagttttgcctgtttccggtttgtccatatgccataaatagtcccattgtagccttcaagtacagaatcaataataggtcttgcagttaagttatcaacatcaagttgtttactctctggtcccataaccagtatccaaagtaaatgtctttggaggttcattggaagaatcagtcttatgtacagtgatagttcccctcatctcatccacactgacagcctgtttgtagcacattgatttctctctctcattgagggtccggcacctaacacaaccttcacattatcgcagctttctggcttctctgatttattgatcggcatcttggccccctcccgtgcccggcggacgtccccgcccggggtgcagcccagcgacaccgggtgcgcagaaaggatggccagagactaccgaaacacctcgttgacgctctcgagactgcggcttcccccggccgtaatggccgaattcccgggcatatgtccggtaccgtcgactgnnnnnnnnnnnnnnnnnnnnnnnnnnnnnnnnnnncggccgcttcctcgctcacagactcgctgcgctcgtcgttcgctaataagcgctacgccctataggatctatcatttc

SEQ ID NO: 147259 - DNA, 1534 bp, Homo Sapiens
  misc_feature (123)..(280): n is a, c, g, or t
cttccaattttggcaaaggtttcccccccttccctggggtttccaccattttttccctggccttcaagccctccctgaagtaagcttgggaattaccagggcggcccgcccaccaagccccannnnnnnnnnnnnnnnnnnnnnnnnnnnnnnnnnnnnnnnnnnnnnnnnnnnnnnnnnnnnnnnnnnnnnnnnnnnnnnnnnnnnnnnnnnnnnnnnnnnnnnnnnnnnnnnnnnnnnnnnnnnnnnnnnnnnnnnnnnnnnnnnnnnnnnnnnnnnntactgtgactgggtcgttttttaagaaaggttatcagctttgtgtttggtttcccacagttgataaaaatctatcaaaaacattataatttgcaaggaaaaaggtttttcaatggctgcaggaaccagaaagaaatagcatttcttatctgtataaacacaaacatttaaagctagtcacaccgcaggtaaatccaatatagtatgcaaaagttctataaaaatgaacaagagatacacgtttactttcattgctccaacagtcaaatgtaaatctgcatgagagttgcgctgcagcagtttgctggtccaatttaagagttcaaggtcctttttgtacatctggcccactgatgtccacatcccagataaattttcaaaagacggaaatcagggcaaagactccatataacaaagcgcaaggatatgctactaaaagttgctgtccttccatggctaatgcagaaataaatattttggaagcagaaaaactacaccatccaataatcccagcagtgagaatgattcctaccattccttgcaaagaaaatatcactgcaaagctggaaagtaggatcatgggcagaagacaatatccaaggacacttgccacacaaccaaatgaaacacctgtcatactcattaagtttaataaacaaaacattcctagacatccaattgcactgatcccgtatacatagccaaactggattttgccagccagtagcaatgtggctccaaaagcaaggcaaaaaaccattggacctgccaaatcagtttcattcatgatgctgccatctgctacttttaacggatgtaatactgttagtgttttttgccagatgtggtcaaaattgatacctaactcttctaataaaggtggctcatcctcaaagttgtttccatagaaaggctgaggtgaaagctggagtatatgcctgagttggctggtaaatctgcccggtgtatggctgttgtggctgcatcatgtctggagggacaaatctgccttgctgcgaatagtcatagccagcatactgtttgctatagggtcctccacttcctccataatcataggactgctgtgactgatcatcgatgctgtaacttgtctggtagaaatccgtgtttaagttttcaaagcctgacattgcaaataatcaaactctgaggctgcgctggcggcaaaggcagtagcttcactaatcccaaacaacccccaaactctgtttcagacctgaaccagccccgttgg

SEQ ID NO: 147260 - DNA, 1008 bp, Homo Sapiens
  misc_feature (406)..(485): n is a, c, g, or t
  misc_feature (534)..(591): n is a, c, g, or t
  misc_feature (892)..(926): n is a, c, g, or t
ttctcttactgcacattctttcaaactgtgctcttaatttggcttcccattttacatttcatgtatcttctcaacactgcttcttgcttgtttcaagcaactgcttgggcacttgtatctatgtttcttcccatcatatcactttttgtcgtcattttccgtgaactgatgttcttttaggcttcacctctggtgtaactgcacaagcatagcagacaacctggcagatcttctctttggctcctgcctcatatcaccttgacctgcagcctttcttttgggcattgttgtagctctctataggagattcttagtcagcagaaaaaaagccgaaggcagtcactgcctgactgctccaagagcaaatgagttttcaatggaactaactgcagcacgacctgtactnnnnnnnnnnnnnnnnnnnnnnnnnnnnnnnnnnnnnnnnnnnnnnnnnnnnnnnnnnnnnnnnnnnnnnnnnnnnnnnnctcaaaaatagggaagccgacagtgcagccttcagtctgtggtcgaagnnnnnnnnnnnnnnnnnnnnnnnnnnnnnnnnnnnnnnnnnnnnnnnnnnnnnnnnnntggagactcttagttctgagtgaggggtgagagcatagcagtgtccacttgagaagggaaagggatgtcataagcttgctctttcaggatctgtcttcttatttgcatatatttctgagcaggaagttatgcgcagtacttttagtctccgcgtgaaaaggtccttcatgctaatctaattcaattcagttctcctttttctttcttcttctcctcgccctcttctcagggaaggaatcgtcaaaaatcccccggccgtaatggccgaattcccgggcatatgtccggtaccgtcgactgnnnnnnnnnnnnnnnnnnnnnnnnnnnnnnnnnnncggccgcttcctcgctcactacttcgctgcgctcgtcgttcgacacagagcgacgtagcgccctatagtgagtctatacatt

SEQ ID NO: 147261 - DNA, 939 bp, Homo Sapiens
gccgagtttcgccctgtgacaggctggagcgaacctttgtctgtaagtgagtgattaattatttaccgccccccctcttaccactatttcaccgccataaaggtaggaatattctcggttaccggtccttagtttaaagctgggttaaatgcagaaaggaagttctggtaattgcaagtttttaaagtagaatttgtggacatttgtaaggattgaattatttggcattagttgtgatgtttgttcctgcgttatggtttttgttgcagggcagcctttaaggatctgtatattttcttctagactctatatattccctgtgagtattattgtatggtcaaactggcaaattttaccataggtataaataatagagaatgtggaagaatagtgaatagtgtcagagatagttaaaagtccatacaatagtagagaaggtagtaagtaatagtggcttggactaaatatttgttgaataaatgttttaaaaaacaggctatctacaatttgtgttgaagatatgaatgaatgaagtttccacacctttatgtggagacctgataagtaagcaacaataaggaagggtccccaggttggggagagccccaagttgagaacaataatgaacaattattgtatgaacaattgttagagacagctactcacaaacaacctgcgggcacaatgacctcattccacacgtagcacccttcagcaggaccctataaaactttcctccagcccttgcctctttgcaggtagccccttctctgctgagctgcccactgcaacatattttcacaatttctctaataaatctgcccttctttacctacaactatcttggtaaatggctttaccacctgcaaaactgaccctaggttgttgccccggccgtaatggccgaattcccgggcatatgtccggtaccgtcgactg

SEQ ID NO: 147262 - DNA, 830 bp, Homo Sapiens
  misc_feature (198)..(249): n is a, c, g, or t
  misc_feature (305)..(313): n is a, c, g, or t
cagtcgacggtaccggacatatgcccgggaattcggccattacggccggggttttgggtgaggactcattactgcagtatattgatctcttcaccaaatgctttttctttttctgaataaatgctgtattagaggttctatttatatatgatttttaaaactttggtttccttctatccaccaaatactgtgaattgnnnnnnnnnnnnnnnnnnnnnnnnnnnnnnnnnnnnnnnnnnnnnnnnnnnnagccctagacttcctagattttctgtggcattctgtaggacattgtattgcttggnnnnnnnnngatcaaaatcattctggggcaaatgctctattatccttatttatgacaagagaataatgaaattcataagaaattaataacattcagatattgctataaatgtacttgagtcatgtttcatttggggatagtaataatggctagtggcagctttaatggagaaatcctgtgattggcctctttttctggcattaggatctcttgtcatagaactattggtaaagtacaggtttgatagcagagttcctgaattacagcatatacatcagaatttccatttaccttatgtcttttcttttcatggtatcttttaaccttttggtttctattcctactcccatgagtaacattgatttctgtgaagttagaattggtgttaagaattgatttaaatttctgaaatagttgaatattagaaggtgggttcagttggcatgaaatgattggtttcttttctttattttccttaattaaaaattatgcagacttattatatgtctcttcccctcagaatgtg

SEQ ID NO: 147263 - DNA, 1079 bp, Homo Sapiens
  misc_feature (265)..(265): n is a, c, g, or t
  misc_feature (968)..(1002): n is a, c, g, or t
gtgttccccaaattgtaccgttccgaaagttcttataacctggtacagagggtttacagtaatggggttaacgtacagtagccctaacagtgtctggccagacaactattcgtctgacaggaatgatgctttctgaccaaaatggggacccaccattaacttctgtagaattttaagtggccacaagtcggctacatggttatactgtaagtcaaagaaagtggacattgagtgttaatccaagtttttaaaggttataaaatgnagggaagggcattcttctgcaataatttcccgtttgaatccaagttcaaaaatcactatgcagagatgaattaaatttatgttttagaacttatttataatttgtcttatcttttcaatattctgtaaaagtaaatccaaatgtccttgacatttacaaaaagggtctctgtagacatctgggcatataaaataaacttatgtttgtataggtaagcacagagatgatgcaattactaaacactaatttgtcttcacccaaacgtattattaagaggaaaataggggtgtggagcaggaattaccaaactgaccaaatgatccagataagtgctcagccttctgatgtcactttgtctgtgtaaacggagtccagggttaaataaagtcttgggcagggaaaataacatgaataataatccttccccccattttatcctaatgaatgttgtcttcttaaattgtcgcaacatttgccgctttctttggatttttcctgcatatactcctaaaaatagagcaaaaccagtattacttctcaatgggaggttttctataatgataccatttaatgagtttttactctggaacaaacactgagctaggcaatatacattatcatatttaatccttatatgaatcatcctgaggtacccggccgtaatggccgaattcccgggcatatgtccggtaccgtcgactgnnnnnnnnnnnnnnnnnnnnnnnnnnnnnnnnnnncgccgcttcctcgctcatatgctcgctgcgctcgtcgttcggtattacgacgtagcgccctatagtggttatacatt

SEQ ID NO: 147264 - DNA, 556 bp, Homo Sapiens
  misc_feature (166)..(421): n is a, c, g, or t
ttttgacagtgatcaaagttttcagtgcatttattgtacattttaagaaaaaggtgaaaatcatttggggagtaaaaaaatgaaaaagctgaaacgagtaattttcctcaccatcaataaaccaaaaacaggaaagataaagaatgtataaatttcacgtaaattnnnnnnnnnnnnnnnnnnnnnnnnnnnnnnnnnnnnnnnnnnnnnnnnnnnnnnnnnnnnnnnnnnnnnnnnnnnnnnnnnnnnnnnnnnnnnnnnnnnnnnnnnnnnnnnnnnnnnnnnnnnnnnnnnnnnnnnnnnnnnnnnnnnnnnnnnnnnnnnnnnnnnnnnnnnnnnnnnnnnnnnnnnnnnnnnnnnnnnnnnnnnnnnnnnnnnnnnnnnnnnnnnnnnnnnnnnnnnnnnnnnnnnnnnnnnnnnngtatactgtctagaagtctgaggctcaaagaaaagtaatccctcttctgaatccacaccccatcaattatcttactttcttctggggagatagatagatatactatctcactagcttgactaatggcaacaaagt

SEQ ID NO: 147265 - DNA, 733 bp, Homo Sapiens
tttttgattatgcagcaatcttttattactgtcccagatcttgcttaatgaagatctctgtcatcaaatcaagtacggtatttcatgactataagaatgataatcactagcaaaaggatagcagcacccaaagccatgatggcttttattttgcatccacgccaccacatttgccttcgaagttgtttggatctgttgctaaaagctgttgcattatccgataagctttctgatttgtcctgtagttcatctagtctctcccctctctcaattacctttgtaatattttcttgcatgacatcaataacttcatccacttgattctgaacatgcttaattttatcatttctaggtccaaatcttggtccagatggtccccttagaaaaaagtcctcttcttcatctgaatcatcttccaaaagatttctcctttcacttttcacagaacctgtgacatcatcatcattgaggtggcgcttaaacttgggaggcatattttttacttgcaaagtatcttttgcttctcaacaggatagtcaccacctgaggctcccggggaactcccggcagctctcccgggctggcggtgctgggcgggcgggggaaggagtaggaagccgaggtaagaagctgggagggggagacagttggtgcggacccggcgtcggccgcagcgccgcagccccggccgtaatggccgaattcccgggcatatgtccggtaccgtcgactg

SEQ ID NO: 147266 - DNA, 1027 bp, Homo Sapiens
  misc_feature (916)..(950): n is a, c, g, or t
ggacaaaaagggtggcggttccagaaagggggagggtttttcccccggggggaaaataagggttccagcccaggttaaagttgtaatgagagggttcccgtggcgttggtttgtttgccgaacttgttccttccttaagccatttgtccccattccccgggactctacatttcttaagggggtaagggatggcctgagagccaagaatggattccaaaggatcatgggtcagggataaatgagggattttttcagaggtaagggttcacatctgggggccctgtttaacttccaattgtgtccagatccagaaaaggctgagccccataaagtcatcctgtagtccaaaaatcataggtccaaatgcctttattatgcaaatggctccctaagatggatcaaccagaatacaagctttttcttcccacacagggttgaggttcttgtgtattatattacttctaaaaacttattttcctccgattttaaacttcacatatggatcactcgtccctcctcgatctcgagcagctaaactttgaccccttcttaatgtaatgtccagctggtacattccgggatcagccaaggggaccttctgcattacttggttccagcagttgtcttattattttcttattacaaataaactggcaaattgcaggcacttttcagcttgcagctgtctagcatagttgattagaaatgaacataacatcgtttcactccagtgagagaaactgcatatttagacttgctttcttcactgaataccggcacaaagaggactgttcacctaccaagtgaatagcaacagaccctgcacggagcacttgctgctctgcacagcagcgacttggaatgccccggccgtaatggccgaattcccgggcatatgtccggtaccgtcgactgnnnnnnnnnnnnnnnnnnnnnnnnnnnnnnnnnnncggccgcttcctcgctcactacttcgctgcgctcgtcgttcggctcaagagctagcgcctatagtgatctatacgac

SEQ ID NO: 147267 - DNA, 1054 bp, Homo Sapiens
ctaggtatccccctttaaggccagttaggattaaaaatgaatggccgggtccctttattagggggaagttaggggttaaaaggaccccggaagggtttaaaaaaacccatgagttagcccgtaaagggcccttttggggtggggggattccggttcttttttaactaccaacatttccacattccccttttaagccagagaaaagggggtttgaagggggagttttaataaaggggacttaaataatcctccttccccccttgggggggatcttgataaaaggatagccaccccacatggaaggcctaatataaactggtttggcagaatgcacttgagctgggagccccaagcgggccaggctttcttgattcctattttatccccctttaccctaggatagctaggtctatagtgcagactcagacctaacttacactttcatttgcagctgaagtttcggaacaaagacaaagatagccagatcatattaattacacggataggcaagaaagcatgagccctgaggaggaaggaagggactgtccaggtgtacttacctcaaagatgagaaatatcaaagacaggaaaccctaggttcttgcccttcagtcgctatctccttgccattagtaaaatgcggccgatgaatgtcctcacttctgtccatctgggcaggaggtgggaagggtgacgtgcaaatggatgggaggaacccttttttcggcagcacccaccacacccagcctagtgccacgcaccgcaagcgctccataaacgcacacagcgtcgcctctaccaggatcccgggcggccttcgcgggatttctcctggcgtcggctttcagactcccgagggtgggataaatcgagagggtggcatcctttggcttttcttctcccaggcagctctgaaccatgtttatgcaacgtttaatgggctctaataaaacggctaataattttgatccgcggaagcaccgactcgctcgctaagccgagtctgcgagggtgaagctgcaactatcccgggaattccggaccggtaccagcc

SEQ ID NO: 147268 - DNA, 891 bp, Homo Sapiens
  misc_feature (69)..(98): n is a, c, g, or t
ccccggcggccggggcctttttaaggcccatattctaaaggatttgccacccccaccctcccaaatttnnnnnnnnnnnnnnnnnnnnnnnnnnnnnngtgatttcatctcctaggccccaatcaatcatctaagtaaagctttttctttggtccttttatcctcaaagtcatctcttgttcccacaacccactgcacctgggaagctggacagcaggcccagctgaaacaaggaggtctctttggttcaggttggcactaaggtgcccagtggtcagatgagcagcctcaggtttgcaggagccagtagttcctgtcttgctcctgggggtacttccagaaaaagccagaagcggataaagctggtgacgattcctggaaagttggacaccatgatatagggatctctgagtcgaaacccatagaggcaccaggaggcagaggtgagaagggtagcaatggtgagtgggtaggagagacattgggttgatttagtttgaatcaccttagccaagtcagccagtggtgagaggtacatgctgatggtgaagacactgcagaagaggcccaactgctgaagccgggcctcagggttgggtaccaggagccaaaagtagccataacccaggagaaggacccctagcagggttgcagtctgtaggagcacaacacgttgacttccgtggtgagaaagggcaggaactggacgttgtccacactccgggtcattcgcatgtgcctgaggtccgagaggccggcggagaacatgccaagggtgaagaccacgcatgctccgtaaatgagcgagtccagaaagccgcccgcctccattacgactagagtcggatcccgcgcccagcgcccgccgcgagcctgcggttgccgggacct

SEQ ID NO: 147269 - DNA, 792 bp, Homo Sapiens
cccacagaaccaccaggccccctgggggaaggttggccagccagggcccaaggtgaaacaaaggagggttttctttggtttaaggtgggcactaagggtgccccagtggtcacgatgagccagctccaggtttgcaaggggccagtagttcccggtctggctcctgggggtagttccagaaaagccagaagcggataaagctggtgacgattcctggaaagttggacccctgaaatcacaagaacggcatgatatagggatctttgagtcgaaacccatagaggcaccaggaggcagaggtgagaagggtagcaatggtgagtgggtaggagagacattgggttgatttagtttgaatcaccttagccaagtcagccagtggtgagaggtacatgctgatggtgaagacactgcagaagaggcccaactgctgaagccgggcctcagggttgggtaccaggtagccaatatatgtagcctataacgccaggagaaggacccctagctagggttgcagtctgtaggagcacaacacgttgacgttccgtggtgagaaagggcaggaactggacgttgtccacactccgggtcattcgcatgtgcctgtaggtctcgagaggccgtgcggtagatacatgcgcatagggtgatagaccacgcatgctccgtaaatgagcgagtccagaatagccgcccgcctccattacgatctagagtcggatcccgcgcccagcgcccgccgcgagcctgcggttgccgggacctactgcagcccagacctgcggctctccc

SEQ ID NO: 147270 - DNA, 788 bp, Homo Sapiens
  misc_feature (154)..(214): n is a, c, g, or t
  misc_feature (254)..(288): n is a, c, g, or t
atgtgtggccccattcccactaggccccggggggctgtaaattttgggtaaatttttttaagataggaggaattggggggttttccccccatggtttaggtcccagggtgggttccttggaaattccctggaccctccaggggggattccgccnnnnnnnnnnnnnnnnnnnnnnnnnnnnnnnnnnnnnnnnnnnnnnnnnnnnnnnnnnnnntttttaagggcatattttaaagattgcaccccaacctccnnnnnnnnnnnnnnnnnnnnnnnnnnnnnnnnnnngtgattttcatctcttaggccccaatcaatcatctaagtaaagctttttctttgggtccttttatcctcaaagtcatctcttgttcccacaacccactgcacctgggaagctggacagcaggccctgctgaaacaaggaggtctctttggttcaggttggcactaaggtgcccagtggtcagatgagcagcctcaggtttgcaggagccagtagttcctgtcttgctcctgggggtacttccagaaaagccagaagcggataaagctggtgacgattcctggaaagttggacaccatgatatagggatctctgagtcgaaacccatagaggcaccaggaggcagaggtgagaagggtagcaatggtgagtgggtaggagagacattgggttgatttagtttgaatcaccttagcttgacttccgtggtgagaaagggcaggaactggacgttgtccacactccgggtcattcgcatgtgcctgaggtccgagctgtgtcc

SEQ ID NO: 147271 - DNA, 945 bp, Homo Sapiens
ctttgcactttggtttacaggtctggactactgccatttccttaatttcaaagattttcaacttgaatcctcaatttcttcacatgaaaaaatggaccatctagattagatggtttctaaggtctgctgtgattttaaagttatgtagcattgtggttgtatgtcttcacagcagttcaagaatattgcttttaaaggaatttgtagttctttgttgggaaaattttctattattttgcttcctcataagtgatgctcatcttttcaaagaaatacatatacatttttaagtgtatgtatgagtagtatgtgtatttctgtctacaaaattataaaatgatgaaaccattctgtcatacctagaatataaaagggaaaaaagtgtgaattctttaaatatttttctatgtcctaatcactggaagtcctatagttgtttcaaactgttctgtaaaatttgtcttgttgcttatgttcaaaatatatttccatgttttagtgaagaaaagtacaaagtggcttgacagaaagtgaaattaagactgctggtaatcctttgaagagacttagtaataggagttggcaaatatttaagagtggcattggagacaaatggcagattcaggataggctgtttctgtaggaagcatggttctggatgagtgctgctcataaagtcattgaaagttattccagatagtttaatagaagtgttgtgtttagcaaagacaacagattttggtaattttgactggtttgattgtattagttcagatttatgaaaagaaagagccgaataccgaaataagataacatagaacattttagcatgtcaagaactctaatggtcgggatggtcaccaggaacacaaaattattggcgcttatagaatcctaaaattagaaaaaatgggaatgttagcaaaatgtcattttaggacttag

SEQ ID NO: 147272 - DNA, 846 bp, Homo Sapiens
  misc_feature (338)..(346): n is a, c, g, or t
cagtcgacggtaccggacatatgcccgggaattcggccattacggccgggctctcctcctggggccacccaagtggggagaacccctagtgtcctgccacaacctgccttgtataaacatgtacattttttcataacattttgaacaaggtttatattgactcaagtttaaaaacaaaaagtgtgactgaaaaatttttacagagtctagtgcaccaatgctgatgtgaggggttgtgtatgcgagtgaagaaaatgtgtattctggtggcctgaagctttactggacaaggatgtgtgagagtgcagagatatatttagtgacacagtagagaggcnnnnnnnnngctaaaattccaaatgtatattttttcgtattgccctgtcctcacccagaaatgatcaattcctgttactgtattaacccttgttattaggaactctaagccatgccagaacaccgtccctccccttggaccgtgtaggattctgccctggggtccctagccccttgcagtggataaataactccagctaaaagtgttcggtgttcttatctccaccctctttcctactttgcttaccctcatcctcagacagatgcctcttgcttttaaaagtcggatttaacgacgtgttgtagggtcttggtctgtgtgaagggcagagaccagagagaaggaagtgagcccaatttctcctgggagcaatgtgggtgagtccacagaaggcctgctgtgtgtgggccatacattttagtcttccccagcctcgaaggcagtgtgtgtggattgtattgcgttgtggacatatcgatctatgtaaccctggcatccatgaatgtctg

SEQ ID NO: 147273 - DNA, 934 bp, Homo Sapiens
gcacctggtcacccaaatgattagccgggaaagacctgttcagtaacatcattaaatgaagtggaaagtgaaccatcgccagttaagtgtgttcctctaatttggtatgtactaagtatgaaatttattgcaggcaatctctgtggttttaaatttattctcatggttaagacattttataaggactattgaagtgtttcattagaatttgaaatttattatgttaaaaatatctcgatagtctcaaagtttttgcataccattgaaagaagcaacatactcttaaagaaatatagacatatgcaaatctgttatctacatatctatgacatacatagacagctgttaacctgctttcagactataaaattttgttatctaatttaaatgcatttttttatagtcttaaaatattaaaagagagtagaaacctgttgtgtgatttactgtcaagtttgggaaaagttactatttatacacaaaatatatatacaaatttaataacatgtttaggtagttattaaactctataacgtataagcagaaagtttaagaacaagtgaatgtcaagaatcactcatgattataaaatttatccttaaaaataatttcagtgttaataatagaaaattgtagttaaatatataaactttgcaacaagaaaataaaattagtaaaaatataaatattaattcttaccagtgggggaaggtgttgggctttgccctgtcacaaatacttctgtgtccagaaaggcaaagccaaatgccaagagtttaagccacaaatacatggtcatatctggaagtcagccgtgtccctaagaaacagcatgcgtcctttctccactgttgtcttatcagacgaggaacatttcctcctcccccggccgtaatggccgaattcccgggcatatgtccggtaccgtcgactg

SEQ ID NO: 147274 - DNA, 1001 bp, Homo Sapiens
  misc_feature (32)..(33): n is a, c, g, or t
  misc_feature (49)..(49): n is a, c, g, or t
  misc_feature (876)..(910): n is a, c, g, or t
  misc_feature (914)..(955): n is a, c, g, or t
ttcacactttctcccggtttctggtggaattnnccttcccattttttcnttctccatccattagtttttgactttaagggatggattctttctgtctttgtgccactgctggatgctcccagaacttatgttcttaatattgtcaaaaaaatcatcctttatcaagctgagggctttatctggcttggacttatcaactgaaattacatgtttcatgttctgataatgatcatgaacattcagcatttcctctaatacatcagaagtgataagtttcatcacacgatcacttgggtccttaaattcttctgtaacttcagctcggtgaatttttttcttcatcctatatgacagcaatttgggcattgctgtaaagtgaaatgctctgtctagtcgtagcttcctaaaaatataagctgcatcaaaatgctgtgcatttactaaatcttgctgaaattttaaaacttcatcccaatccttcagggcaactctgatcttttgttttggttgacacagttgggtattatataatccatatagcagatacaaagcaccaactctgatctggaaggtgtatggaggtaaaaaatatcgccaagccaaagctaaagcttcttttgtaaacatgttcttttctaaatttctcattctgccacagaagatagtcccgaacttcatgtttctccagagctccgtgaagtcctcgaagcgtacactgtccgtctcctggaagcggctgagcagcgcctcgcagtcggtctgcaggccgggaggagtccccatggcacccgaagcccgcacgcctccgaagcccgcacgcctctccccggccgtaatggccgaattcccgggcatatgtccggtaccgtcgactgnnnnnnnnnnnnnnnnnnnnnnnnnnnnnnnnnnncggnnnnnnnnnnnnnnnnnnnnnnnnnnnnnnnnnnnnnnnnnntacggccgggagcttagcccccccactgatttagttgaagttcgca

SEQ ID NO: 147275 - DNA, 1238 bp, Homo Sapiens
  misc_feature (1125)..(1159): n is a, c, g, or t
acacttgccacccctcattctgtttggttctgccaccccgttcttcccaccacttttggggcagtagctggctaccagctgctggaagccctccttctagtgaccagcactggaactccccccagctgttgggtgcccaccagcagcaggtccccagtgggtagcacgtggcaggaggccgaggcattgacgggggccccgttgcgtagccagagtcgggtcgccaggttggagaggagcgggcaggccaaagtgttcactgtgttgggctggaactggacttgctcacatggcttctcccctgttggtacaaaagacggggacacaaccgaagacgcgctgcaaaggtccttggcgctggctccctcgatgtcctggatccacggcctggtggccagctgaggctggtagaggctgacgtgcttgcagctggagccgctccaagcacagtaggggtcccgggcgaggaggcagtccccacagctcctgtacaggctgcagttggccatgggcacctggactacgcccgagtgtgaggccgcatacagcagccccctgtgggtgtccaggagcagattctgcacgggctgtcccgatgagaagatctgcagctcctcaatgatgtgcacccgggggcccacgctcactgccttgtggagccggccgtcaccagtgcccaggaagaggacatcgtaggtgtggtgcaggccagggacgcggtgtacagccacgcgctggtagcgagcctggggctgcagcagcagcatgcggcttcggacctgcccgtccatcaggaagtggtccttgagaaagttcagcacgcggtctgggagctgcagggatgagttgatcttcctttcccgggcactggttggtgatgcacgctccaggccggggtgtgggcaccgggtggttcacggttgtaccactgctgtgtctcacggttcacctccttgtagaggccgctgaagactctctgcacatccttcattgtgaagacacagacggcagagccttctgtagttcccctgtgccactgggaagtgaagaccccatagaaaacgggtgtcacgccccggccgtaatggccgaattcccgggcatatgtccggtaccgtcgactgnnnnnnnnnnnnnnnnnnnnnnnnnnnnnnnnnnncgccgctgcctcgctcactgactcgctgcgctcgtgcttcgcataaaaccgactacgccctatagtgatctatacattc

SEQ ID NO: 147276 - DNA, 811 bp, Homo Sapiens
  misc_feature (72)..(106): n is a, c, g, or t
cagtcgacggtaccggacatatgcccgggaattcggccattacggccggggaactcctgacctcgtgattgnnnnnnnnnnnnnnnnnnnnnnnnnnnnnnnnnnnatgtgagccaccgcacccagcctgagtttctctttctctctttttaactttattttttgaaaaacccggtagactttttgtggggagcatttttgttgataattttactgatctaaagctgagtgattttttaaaagaatttgaatttggcttcctcaccagtaatatgtctccttgcttctttgatgtgatagttttgagatgggtgagaatctaatagatctgtggttgaatttgctgtgttgttatgaagtccaccctgtgggcacaataacataactgttggtaggagttgtttgagctattctggagattatttggtaaagtatactaaaagccttaaaaccatgtatgtgcgctgtttgaaccagtaagccacttctttgtgacattcagacagcacattcagaagcacataatcagccttgcataaaacttatggcatgacagtattcatcacaatattatctcatactcacaaaattggccaatgtcctaaatgaaccattggggacatgggttaaaggaatgtcgatggtgcatggtgtggtagaatatcatgcattatgtttaacgaatcatcattctctaagatcatcggcagcatgtcgtaatgtcccgtggagtaccccagatactttcacgacattatccgcatcatctgtctgagtggacggcggtcagacaggttaaagtcttatacgg

SEQ ID NO: 147277 - DNA, 1021 bp, Homo Sapiens
cagtggtccccgccctggtcacccgtgttcgaggggacaccgcaggggatggcgggtcccagagggggcttgtttcttgcccctctggccacgtggcccacacccacactcttgccctgggccttgggggacctcacaaagtgcttgctcccgtcctgggtgccccggagccgttgctggagctctgagaccttggcgattggggtgtcaaggaagtggaaggaggccgggtccacgccttggggctttcggtgtgggatgtggatggcttccggctcatgggagcgagatcgagtgggattggaggtgcgggggggcagttctgacttctgggccacggaaggggagccaggcccaaattgggacgtgtagttttctatcccggcgagatctaagtagtggtttctcctctcgatgttctcatctacgcaatggtggtagcagccagactgctccaggcggctgtcaccctggaacctgagcggggctcgctgcttcttctcccagctccgcaggtcctcagtgggcttggtctctgctcggggccttgcgctctgcaggtcaggcctgattgacaaggacgctcctcttgctctggctgccatcgggggccacggtgagctttacccgcagcatcttgctggatgttggggactggttgacagaggagtccaccacctcatagatggtgtgcagcaagctggtgatgtcctctcgggtgaccttgccgttgttgtcaaagtcatacagggtgaaggtccactcctgccggctgtcctcctccatggacacgtcgcactggagctcttcaaacttcagctgcttcttggagcctgggcagggttcgctcactctctccatcttcttctcatctccgctgcccagcccgtcagtcttctcaggaggcagggccacttccagccgaaagtcgtcctcctcttcctcgctgagcgtgtctctcaacacgtcgccccggccgtaatggccgaattcccgggcatatgtccggtaccgtcgactg

SEQ ID NO: 147278 - DNA, 1134 bp, Homo Sapiens
tttcacttcccaggcaggacaaatatgcttttttattgtgtctgtgagatgaaatgaggagtcctggctgggtctgaccctggcctctggcctccaatccccagaggctgtctccctggttcagggagggtggcggtccagactgtccaagctcatgccaggctgggagctgggagtgggttagttcaaggtagatggtcaaggaaggcaagcaggacaaggtggaagtcttgcggcttgtggaggtaacaggcatggcctgcattgcgtagcttcaccacagagtggttgggcaggtggcggagctgccgcagtgactctcgagccaggatgtggtccagctctccatacaggataagggttggagtcttcacagcccagaattgctcctggggtgtagttctgggtggaggtgggtgcgatgggcacaaatccatgtagctggtggtggcctcgcatcaggaagggcagggcatagtggccactcagcgaggggctcaccaacacggcattctgtacctccaggtcccgcagcgcccgctccagcagcgctgcccgccctgcctctgtgcttgcctcctttgaaggtgccgagttcccaaaacctggaaggtcaagggccacggcccggtagcccctctgtgacagtagctgcagtgtgcccagctgctcccacgtgtgagagttaaaggcctttccatgaagcagcaccacctccaccctgtgtgcctggttgagtgggagcacctcgcggtaaaagatgggcgagttgccaggggtgagaccagccaggactgtgacattggggtctccccagaggcaggaagtctgctcaggggggcctggcagccccacatacagtaggagcatgagcagcagactcaggcccagcagggctacctgggaccggctcatggaggtctgtaccacagtcgggcccaacgggatgagcgggcgggccccgcccaggcggaaccagcagccgcacagcgccccgaccatggctgcctccgcagctccgcgggccgctccggctctaggcggccaggagcgcggccatctcggcgcgcctgcccccggccgtaatggccgaattcccgggcatatgtccggtaccgtcgactgataacctct

SEQ ID NO: 147279 - DNA, 782 bp, Homo Sapiens
  misc_feature (702)..(736): n is a, c, g, or t
cgtttttggtcaatcccaattcttcttcatacagtaagactttatatttaccaaatcttatttaagtagttgatagtcaaaagccatgtgcttatctgcaaaaccacagccagttatcatgggtttgaaatgaatattatacacagcagaactacatatacactcataacctacaactattctgagatttaggcaaaactgctggttactgcttaacccactatgtaattaatctgctgtttctcagccatgaacaagttgcttgattgtctaacctgaatatccaactttacctgcagtgcttgttcttggatatcacgaaataattccatatctttctcagtcatgatttcctggctcccataaagtcgctcctcattttcttgtttgccatcccagccatcctgattgtctgtgggccaatctgaagtgcttgatttcctgttgcccctctttctgattcgatattgctcagagtagtccaccacttccccccgagctttccgcccatcaggggaaggggtaaaaaatttggtaaggccatcaatgagccctttggttttcttgttgaacttcaaggagacattgctatctctgcagaagtccaagccatctatccgctctaaatatccttcttctgatgatgatgatcccggccgtaatggccgaattcccgggcatatgtccggtaccgtcgactgnnnnnnnnnnnnnnnnnnnnnnnnnnnnnnnnnnncggccgcttcctcgcatcactgactcgctgcgctcggtcgttcgga

SEQ ID NO: 147280 - DNA, 1154 bp, Homo Sapiens
  misc_feature (356)..(423): n is a, c, g, or t
  misc_feature (1043)..(1077): n is a, c, g, or t
tttctttttgtcgccccggccttcctgcgtctcctccgtcctccctttcctgtggttctgtcgttgtggagctcgacgtttcgcttctgggcccccctaggctgactcctttgctcgcttttctgggcttcctcctgccatcctgcttccctcccggatgcgtcgatgcgtgattcttgcccgtcctgcacgcttccccgtatgtatctggtgagttatccatgcttgactgccatccacggctcggtctaacgtttcaccccggcttattgtgtttgtcattgtttacgtagagacctggtgtgttcgcccatggctagtccctgtcttggttcttcaacttcttttaccgtcannnnnnnnnnnnnnnnnnnnnnnnnnnnnnnnnnnnnnnnnnnnnnnnnnnnnnnnnnnnnnnnnnnnaagacatatgtaacccttgtaatatagcacagcgttcctcataatggaaacagttgcaaagaacataaagtacagctgcgttacatgtgacataagatgcaaacaacatagattcaagttgttttgcagacagcacaatgatacaatattaggactacagaatctcagagtaaaccacaatgatttaaaggtaagatacacagaaatacaatgattttaacagaaaaatatgacattcctgaccttaggtctgggcacatgatgtctgacccctatagaggcaccttggctaaaatgggaatgacctagtgccatggctgacctcacttgtgcgttgctgagcccatatgtgaacaaatccccttgatacagcaccatggtaggcatgagaggagaagtgttttaactattctcttatgaacttgtaaccaacccttattatgtatctgatggatggacagggggtggggtgatcatacaggatggcagacattccaagtactcttcaccccagtgtggacggaacagaatctggctacacggtggccagtgatggactgctgggaaatcccggccgtaatggccgaattcccgggcatatgtccggtaccgtcgactgnnnnnnnnnnnnnnnnnnnnnnnnnnnnnnnnnnncgccgcttcctcgctaactagctcgctgcgctcgtcgttcgctaaacgcggaggcgccataagaggtcagatacgcg

SEQ ID NO: 147281 - DNA, 907 bp, Homo Sapiens
  misc_feature (439)..(747): n is a, c, g, or t
gcgtcgacctgccaaactattttcccacgtccatgcaccatttcacattcccaccagtaagtaagagggttccaatttctgcgcattcttgccaacactagttattatctgactttctggttataatcattctaatgagtgtgaagtagcctctggtgtcatttggatttgcatttctctgatgagtgatgctatcaagcacctttgctggtgctgttggccatatgtgtatgttccctggagaagtgtctgtgctgagccttggcccactttttaattaggcgtttgtctttttattactgagttgtaagagttctttatatattctggattctagacccttatcagatacatggtttgcaaatattttctcccattctgtgggtagtgttttcactttatcgataatgtccttagacatataataaatctgtatttnnnnnnnnnnnnnnnnnnnnnnnnnnnnnnnnnnnnnnnnnnnnnnnnnnnnnnnnnnnnnnnnnnnnnnnnnnnnnnnnnnnnnnnnnnnnnnnnnnnnnnnnnnnnnnnnnnnnnnnnnnnnnnnnnnnnnnnnnnnnnnnnnnnnnnnnnnnnnnnnnnnnnnnnnnnnnnnnnnnnnnnnnnnnnnnnnnnnnnnnnnnnnnnnnnnnnnnnnnnnnnnnnnnnnnnnnnnnnnnnnnnnnnnnnnnnnnnnnnnnnnnnnnnnnnnnnnnnnnnnnnnnnnnnnnnnnnnnnnnnnnnnnnnnntaaaattaaatatataaaaagcatgggtttccggttaagaactacggtcaggtaggttcctatacaggtcttatgttctatatcttaagtggttggtgctaaggaagcttggtctttgtcttctttccacttgtttctttaatcatattagggattgtcc

SEQ ID NO: 147282 - DNA, 1022 bp, Homo Sapiens
  misc_feature (910)..(944): n is a, c, g, or t
gcatgaggatattgtttttaaggttaaagtggtgccatttttcaaaaaggataattgggggaggcagaaattccagggatttggaccattctataaaattgtgtggtccccctggggttatgggggtagtaagttgatcattctaaccccattgtgggtcttatccattggaggaaggcttagtttggtggttttcttcaaacgcagcggactacaacttcataaagcaagagctgggtacagcttctccgcttctttattagcacctgtaattgagacagatcatgtcttctgatctatacattttgactagtttttagcctccgaagaaggtcttctttctccctgtaacctgcttcaaccattttggctttttcacgcgtttaatctttgtttagggaagcttctcactcacagactcagttttggagatgctctgcatgatccagaatcaagtgactgagattcacagacattgagattcttcaaagtattttgtcaaatttgtattttcttcagattcactgtctatatgtttaaaactttcttgaaattccaaacagttttcctctgtggaagatgctggttttctctgaaaaggtctgatcattttcttcactctctactttaagacgtttcaccacattgtaagaggaattaaatgaaaatcttgttttccttaatctttctctaagtgttgcactcataggttgttttcgggaactatttgtatagggagatgatggattcgcagaggcctgaggagtgctaggtaaaaccacagctgagcctgacggactttccatcttgaaagtgaaatcttggtttttctctgcggccgtaaatcgatcctgtggcccccggccgtaatggccgaattcccgggcatatgtccggtaccgtcgactgnnnnnnnnnnnnnnnnnnnnnnnnnnnnnnnnnnncgccgcttcctcgctctactaactcgctgcgctcggtcgttcgacataaacgcgggcgccatatgaggtcgatacttc

SEQ ID NO: 147283 - DNA, 847 bp, Homo Sapiens
  misc_feature (248)..(417): n is a, c, g, or t
ttcgggcacgaagtgccaatggtctttaggtcaaggtttccaacccaagatttcactgtggatacaattatttggcagctggcggtacaatccccagaactcctcggaagctgggcgtggcaggagtgatgggggtcatgggagtcatggggaggggatacagtggagtggtgcccggcaagggtgcagttgtgagagtctgtgagtggaagagctgtggtgcctggcctgaggttccctgtgttgcnnnnnnnnnnnnnnnnnnnnnnnnnnnnnnnnnnnnnnnnnnnnnnnnnnnnnnnnnnnnnnnnnnnnnnnnnnnnnnnnnnnnnnnnnnnnnnnnnnnnnnnnnnnnnnnnnnnnnnnnnnnnnnnnnnnnnnnnnnnnnnnnnnnnnnnnnnnnnnnnnnnnnnnnnncttccaaaatagacagactattggtgttctgaataggctgtggggtcagtccagtgccataaggcatcattggactaaagatagggattccgggagtcatggcacctctgaggggaggccaagccctgagcgtaaggtggcaggctgttgttctgatccatgatgttcactttcttcttggcaaaccagaaacccttgcgctggaactcgtctcactattcaattttttcctagagcatctccagcacactcttctcagcaacttcctcaattccttgggttatcttcacacgccaagaaacagtgatgctgggtcactgcaaagatcactatgggccagcggaagcgaagttaaacagccggcggcccaggcgcccgccacagcgaacctgcccgacctcactgaacacctggcgcgcgttgataatgt

SEQ ID NO: 147284 - DNA, 1033 bp, Homo Sapiens
  misc_feature (891)..(925): n is a, c, g, or t
  misc_feature (929)..(968): n is a, c, g, or t
gtgtcccgaagttgagtcctgtcctcgaatttctggagaattatcaatcaggctctttgacaggctgttgatttggaattcgttgtgagtagaaccggcaagttcgtgcatccgttatctagtggatatgtatagcctgtgacgtagttgtctggacaatttagatgctaggcttccctgtacagatgactttcacactacgattttctcagctcatcttgattttttgcacagccacatcatgtacttgttaaagtagggactgatcttgctgcttgtacttccctttttgctgaatcactttggccaggggttaaatttgtctttggtgttggtgacttcttagggtgttacatcgttctaaggtaacactggttaaatctaccatagacacatttgaatttattaagccaacctgccctggatccacttgaacgaagtcattgttagcacacagtttcatcaaggtgccggtttaagtcatatctaggcaccattttactgcaaacggggcaggcaagtttagcaggtggtgcattgttaaaacacgaaataatagaattagatgctttgtttcttattcttgctgattgataagcgttctacgagggccctcttttttgtcacggaggtttcccttctgacaatcaatgaggtaattaggaaaaacctggatgttctgagcaataaaacacaggatatttaaggtgaaagatagcaatggtttacttttactttcttgacttgaaatcaccaaaagtgggattctatatgacctcatgttattcgtctcgacaatttcttcttcctcccacctggctccgcgcgccggcgcttccccccggccgtaatggccgaattcccgggcatatgtccggtaccgtcgactgnnnnnnnnnnnnnnnnnnnnnnnnnnnnnnnnnnncggnnnnnnnnnnnnnnnnnnnnnnnnnnnnnnnnnnnnnnnncaacaaaaaacccggccggcattggccgtctcctttatttgaggaggttcagtattacagtcttc

SEQ ID NO: 147285 - DNA, 1112 bp, Homo Sapiens
  misc_feature (307)..(307): n is a, c, g, or t
  misc_feature (681)..(921): n is a, c, g, or t
  misc_feature (998)..(1032): n is a, c, g, or t
aaaaaaaagggtttttcttgaaaaccaacccaactttggaaaccattggtccagttcccaaggattggggctgaaagatttgtttacccaattaatcactccctttttaaccgggtttcctttccccattctataaaattggagagggaaaaatgctttaaactttcctaggggttcaatgttaaaaatatacttattggatattgcttgcaagattatggggagcaaaccttgggattcaaaacaaaccaatttgtgtgagccacccctttggtggtgtgtgaacagcccactattaactagttanttggtaccatgccagaggtaaaacaaaatagaataaggaccttgccccttatgcatgtattttcagtgagaagcagctcttctcagagtatcacattgcaaagctgaccttaaaaattagagttcccagtggaggatgatcagagtggtggtgaggaacctcaagatcatggcaaaggggaaaggcaacgggaaggcatcgtccggagaaaagtcaagggagagaaacaccctaagggcagtcatgggaaaagaagaagattggaggtagatttgctcttttggaatacagagagtagaatgggggcaggagttgtaagaaggcagatttcagctttaaaaggagggcattttggctgggcatggtggctcatnnnnnnnnnnnnnnnnnnnnnnnnnnnnnnnnnnnnnnnnnnnnnnnnnnnnnnnnnnnnnnnnnnnnnnnnnnnnnnnnnnnnnnnnnnnnnnnnnnnnnnnnnnnnnnnnnnnnnnnnnnnnnnnnnnnnnnnnnnnnnnnnnnnnnnnnnnnnnnnnnnnnnnnnnnnnnnnnnnnnnnnnnnnnnnnnnnnnnnnnnnnnnnnnnnnnnnnnnnnnnnnnnnnnnnnnnnnnnnnnnacgagagtgaaagtctgtctcaaaaccccggccgtaatggccgaattcccgggcatatgtccggtaccgtcgactgnnnnnnnnnnnnnnnnnnnnnnnnnnnnnnnnnnnccggccgcttcctcgctaacagcttcgctgcgctcggttcgttcgactatataggatgcgccatatgaggtagatagtcg

SEQ ID NO: 147286 - DNA, 735 bp, Homo Sapiens
ggctcggtccttcctaccagcaagacgattaagccacagcctctaattggaacggcatttgtacagtcagagactcttaccagacatctccaggaatctgtgagccattgtcaaaacgtccattttcatctggctgtgaaagtgaggaccacaacaggtaggtattggtagaaacaggagtcctcagagaagccccaagatgcagcctgagggagcagaaaagggaaaaagcttcaagcagagactggtcttgaagagcagcttagcgaaagaaaccctctctgagttcttgggcacgttcatcttgattgtccttggatgtggctgtgttgcccaagctattctcagtcgaggacgttttggaggggtcatcactatcaatgttggattttcaatggcagttgcaatggccatttatgtggctggcggtgtctctggtggtcacatcaacccagctgtgtctttagcaatgtgtctctttggacggatgaaatggttcaaattgccattttatgtgggagcccagttcttgggagcctttgtgggggctgcaacgtctttggcatttactatgatggacttatgtcctttgcttggtggaaaactgctgatcgtgggagaaaatgcaacaggacacattttggcaacatacccagctccgtatctatctctggcgaacgcatttgcaagatccaaaacttgggagcccccagagggctagagcccatggccatc

SEQ ID NO: 147287 - DNA, 761 bp, Homo Sapiens
cgctatctgtgcctcctctagtcgtcttttgggttcagaagtttcgtcaatatgcctctgaaggaggttaagacatcttttcctaggaccctctgaatttttcacaagatgtctgtatttgtgaagttagatcaggcttaacttgaccaataggttttttatttctctgactcttgggctcagtactcttttccacctgcctgaacttttcactggattctgtccttacccctgagaaactgattgtattctttgttacgttcaagtttcaacctttccttagcagataacctctcaccaataggaagagaaactcccaaagtagatggatctgtttcactcgtagatagaaaatttttctttcttttcccttgtgtaatgccctgagtaagataacgtctgtaatcttgccgcaattcttcttttaatttatgtttcttccgttcatagtcttctccaagtggtaaacttaatccataatcaattcctaaggaacccctggtctgttgactatttggtggtatgttttccttagccatagagatcagtatcttactgttttcagaaagcttcgctgacaactttcccttcatttccatgtaaggtggatcacgtttccaactctgctttgtcttcggccaatctggctttttgctcttcaataaattcatccaaattatcagccattttgcagatttcaggggcgcgggctcgcgtccggggagacacacagtgctctagaggatcgtcgcggaccgaag

SEQ ID NO: 147288 - DNA, 934 bp, Homo Sapiens
  misc_feature (161)..(232): n is a, c, g, or t
gctggtaccggtccggaattctcgggatatcgtcgacccacgcgtccgcgaggcgggccgcgcggtgggcgcggagaggagcggagcggcgcggcaggccgggcgggtggcggcagcagcggaggaggccgcagctgcgggtccgaggagcggaggcgacnnnnnnnnnnnnnnnnnnnnnnnnnnnnnnnnnnnnnnnnnnnnnnnnnnnnnnnnnnnnnnnnnnnnnnnnaggatgatcaagctgttctcgctgaagcagcagaagaaggaggaggagtcggcgggcggcaccaagggcagcagcaagaaggcgtcggcggcgcagctgcggatccagaaggacataaacgagctgaacctgcccaagacgtgtgatatcagcttctcagatccagacgacctcctcaacttcaagctggtcatctgtcctgatgagggcttctacaagagtgggaagtttgtgttcagttttaaggtgggccagggttacccgcatgatccccccaaggtgaagtgtgagacaatggtctatcaccccaacattgacctcgagggcaacgtctgcctcaacatcctcagagaggactggaagccagtccttacgataaactccataatttatggcctgcagtatctcttcttggagcccaaccccgaggacccactgaacaaggaggccgcagaggtcctgcagaacaaccggcggctgtttgagcagaacgtgcagcgctccatgcggggtggctacatcggctccacctactttgagcgctgcctgaaatagggttggcgcattacccacccccgccacggccacaagcccttggcatccctgcaaaatattattgggggccatgggtagagggattggagagccggctgtgggggattccctgccttggccttgcctccccttctgccactgccctag

SEQ ID NO: 147289 - DNA, 906 bp, Homo Sapiens
actgcattaaatatagatatatgtgcatctacaaatattgccaggagaaattaaagaccgcgttaaataaatggtgggggaagaatgatattcatggattgaaaggacttgttgtttaagatactaggttttcccaaacagatctatagattccatgcgagccccataaaaaatcccccccctttgtaacaagctaattccacagattcacctagaaatacaaaggccgtagaataagccaaacatcttgggagaataagttacaggacttaaagatttattataaaactacattaaattaacatagtttggtactggtataaagttagacaaagactactccctcccgctcctcaatctgcccccatccctagaacgtgctggcagctttctccatccgatctgcaagggttaaagggcgctgaggaagggctgaccgactggggtgggaaacaaagcggcactgagataacttcaggccaccttcctcccctcagtaccttcggatgaaaggtttcccttcttggtctgggaagcccactaagaagaaagcctgggctgtggcgttctggggaagtgaatagtacggccgccgggcgcgtcgccccaggaaccagaaggctttttgccgctattagtgcagaatggcttccggcaagtcccagtcgtttagaattcccagcccaaagatcgcggggatccacgcgtcatccgggcctctgctcccggaagagaccacgcagccgctaaagacgtaatggaggcgaaagggcttggctagctgtggcagccatgataaaaactagggaaaatgggagctcgaagtagcttgcgttattaacagacatacaaacgcccctaaccgccacacgttccttagggatgacagtacgttacaaaagtccc

SEQ ID NO: 147290 - DNA, 508 bp, Homo Sapiens
  misc_feature (433)..(467): n is a, c, g, or t
acttacataaaagaaccgaagatttgaatttaactaatcacaaggacgaataaggacaggcctagtttaatgcagatacaatttatcaaaaatatagagatttcattctttcttcattcacatccgaaaattagggaaaatccagtagacacaaactcttagattctcccattaaatgaaaaactttgatatattcacttattctaaaaaccatagtactggctctgaattgccaccatgcaggttttctcatgtcaccatataatacagctcatattatacatatcagaggatctgtaccacctgtattaaaactattttatagtgttgaagacaaggacacaaaaagctaaataagttgaggaaagggtgaagatttttcccggccgtaatggccgaattcccgggcatatgtccggtaccgtccgactgnnnnnnnnnnnnnnnnnnnnnnnnnnnnnnnnnnncggccgcttcctcgctcacagactcgctgcgctcgtcagtt

SEQ ID NO: 147291 - DNA, 1050 bp, Homo Sapiens
  misc_feature (939)..(973): n is a, c, g, or t
gctagtgtccggaatgaatggtatgtgtgcgaccgtgattagcatgatgtcggcctgcccaaagtgaatttaggacgtggaccggagttgtccaaggttcactggtcgttgaccgcttcaccaaattcttgcctggatgtgtggacaccgagagtgcaatgcgttttgccagctttgcttgcttcattgcttcctggtagatctccttttgctttgtatatcgttctctgtgcatcaaaactgcagctagattactgagtaccatgtttagctcaggatgatttatctgtcttgccagatctgatgcccgtttgcatataaatataggcctcatcaaaggcggccctgtgcatccagggtagtagccaggtcactcatcagcacaatggtctgtgggtgtctttctccttgtatttcttcagaaatctgcagagcttttgtcatacatcctttgtgcctgtgacggctgcttggagaacagaaggtagcgagcacaggcgtctaagcacatgcccaagaggaggtgggtattggctttctcttccactaaggagaaaagaggaatcagcaaatctacccaaatggttgttaccaggacccacaaatatgtcagcagaatgggacccacatgtcacttagggaacaatgtaggtgaattaacatccagttaaatgacctattccagactagctggaatcatggaacttcagcccacattttaagtagattaagagtccgcacatctaattaaaatgtggaatgttatttttagtttgaaacaaataatattcagctagaaacaaatgaaaataaacccaaataagaatgagttaacacagaaagtcaaggccaatgaaaaacctgtatggtataagaaaaacaatgcagcccggccgtaatggccgaattcccgggcatatgtccggtaccgtcgactgnnnnnnnnnnnnnnnnnnnnnnnnnnnnnnnnnnncggccgcttcctcgctcactgactcgcttgcgctcgtcgttcgcttcgcgactacccctatagtgatctatacattc

SEQ ID NO: 147292 - DNA, 730 bp, Homo Sapiens
tatgtacatagttgttcacaagctggaatttaaaattcagccttttcctttagtctcctcttcccggtggtgggtaaaaagaggtgaatggacagcctatgttgaagacactgtgcttttctcaagaaggacatccaaacagcaagtctacttctttctctttaacgatgtgctcattatcaccaagaagaagagtgaagaaagttacaacgtcaatgattattccttaagagatcagctattggtggactcttgtgacaatgaagagcttaattcttctccagggaagaccagctccacaatgctctattcaagacagagctctgccagtcacctctttactctgaacagtccttagtaaccacgcgaatgagaacgtggagatgctactaggagctgagacgcagagcgagcgagcccgctggataactggcctgggaccacagcagcgggaagccgcttgcagaccgaacctcactgacccaggtggacatcgttaggtcctttcactgctaagccgccagatgaactctccctgcaggtggctgacgtcgtcctcatctatcaacgtgtcagcgatggctggtatgagggggaacgactacgagatggagaaagaggctggtttcctatggaatgtgccaaggagataacatgtcaagctacaattgataagaatgtggagagaatgggacgcttgctaggactggagaccaacgtgtagtctctc

SEQ ID NO: 147293 - DNA, 730 bp, Homo Sapiens
ggggaggcttcaatttttgttttctcatccttgtagaagaaacataacgcccacatccatggcagcccacttgtgctctaaattatctccatcttttcatggaagtggttggcttgaattctttcactaaacaggcttttcttcttgtaatctgccaattctgattcccagtgaagtgcctctttccctattgtggttgccttctgttttatgcatttcattgtttccttttctttctgacttcccccagcatgtttttaagttcaccacagtaccttggatgttttaaaaaggataaagcaagcaaacacatgaaaaagtaaataagcattgtaaaggggaatgtattcctgaggtgctcctgtgcccacagagggcaatggtgcatgctgggcatgcatctaccgaaccaccgtacgctgtctctgcagtccacgtccacccggccgctgttcaacagcagcttcagcagcgccaggtttcctctcctggctgcccagaatgcagcattggcaagtggagtttccttcttgaaggacatcctgcacatgtccgcggccgcccgagcgggagccggcgcgctttgggcccggggcgccttgtcctccccggcccttcactctcccggggctctcggcgttccgcagaggggcggcctccgacgccgcgcgctcccgccccccggccgtaatggccgaattcccgggcatatgtccggtaccgtcgactg

SEQ ID NO: 147294 - DNA, 973 bp, Homo Sapiens
tttttttcctgtaaacagcattttattttatgacactctgtgttaatacaataaatatacaaaacttccaacccactgaaacatgcaacattagagggacacatggagggcatttctgtagaaccatgacagtcaccatgatggcagcgcagtattagttactgacaaaatatacaaacatctctagataaataatccaagtcccaaattacaaatcactgagtaatgactttccggtgttcaaactttagtttgaaataaaattgccataatttaatattacaaaatgataaatgacacggatgactgctgtgtgaagaccattttatgactatgatttcatgactgtgattttagtactaaatatagaacacttaacaaatgccaatcttttgctgagtgaaaatttaacaatttactgagagaaaagtaaatataagaatttaaagttcctttcatacttgatcatactataagcattgccatcatttcaatgcacatatatttttaaaaaacaattttctctctcaaactcatattaaataactggattttaaaacattttccccatccacacaaaaaaagatatgtgggttctaattattctgttgctatttaataatgctacctttgaagatttctaacataatataaacattccaattctgaagcaaagtatttcagcatttttcaaaaagtctctaatatatcttttgtttgtagtgtacaggaaaaaatggacttgggatataagttacatggtgaatataggtgcacttgctgtattttgtggttaatgttttgaatgtatgccaatccacactcaataaagcacactgataaaatagatttccaataagactacaggctcccgtaatactaactggctaatttggttgagaacataggtagatattctcgctgattagaaatcgacgcgtgggtcgacatactcccgggaatccgcgcgtac

SEQ ID NO: 147295 - DNA, 996 bp, Homo Sapiens
tgagagcctgcggcttggaccggagtggggagcgcggcgtggaggtgccacccggcgcgggtggcggagagatcagaagcctcttccccaagccgagccaacctcagcggggacccgggctcaggtacgcggcggcggcggcggcgactgcagtggctggacgatggcagcgtccgccggagccggggcggtgattgcagccccagacagccggcgctggctgtggtcggtgctggcggcggcgcttgggctcttgacagctggagtatcagccttggaagtatatacgccaaaagaaatcttcgtggcaaatggtacacaagggaagctgacctgcaagttcaagtctactagtacgactggcgggttgacctcagtctcctggagcttccagccagagggggccgacactactgtgtcgtttttccactactcccaagggcaagtgtaccttgggaattatccaccatttaaagacagaatcagctgggctggagaccttgacaagaaagatgcatcaatcaacatagaaaatatgcagtttatacacaatggcacctatatctgtgatgtcaaaaaccctcctgacatcgttgtccagcctggacacattaggctctatgtcgtagaaaaagagaatttgcctgtgtttccagtttgggtagtggtgggcatagttactgctgtggtcctaggtctcactctgctcatcagcatgattctggctgtcctctatagaaggaagaagtctaaacgggattacactggctgcagtacatcagagagttcggtcccaaggtcaagcaggctcctcgggaaagttccccctgccgaccacttgaaggctcttgtaacagacgtctgccttctggcatctcacccagggcccaagtcatatcttgcacaggtaagaccattccggcgaccttcccagcgaccaacatcaccaagtcacagactcggcgactgcgctattccccaacattagacgactcc

SEQ ID NO: 147296 - DNA, 684 bp, Homo Sapiens
ctccctgcctttgggtgtgttctcccctttgcccggtttttgtgttgttttgcttttttcttctttggcttattgtatactaacatgatagaatgcttttgatgaaaaacaggacccagtagaattaagccaagaagaaaaatgtactgaaatttttaccaatcagtattaaaatattttggtagtttgctttcaatacttaatctttaaatctttctaattgtgtttatccacacagatcagatttatcacagatctttattttttccattatattagattttgcttctgttgaataaaataaacttatgatgaaaagtcttataaaaaaacatgtcttttgttacctttgccaaatcaagactccgaatccagtctaatctgtctcctcccaagcaaaaaatcttggggaaaaagctgaaatgctattacctgaaaatttatgtaagattgtacatttactttccaaccagtctgaaggctgaggagtttgcaaggaaagcaagaaaaagttaaaatgtctaaacaaaagcctgactggctccaaatctagttgcttaatcaccagggcccaagtgggcagtaagagacatctgtggggttgaaagcagcagaacttacaaacttcaaacaccccggccgtaatggccgaattcccgggcatatgtccggtaccgtcgactg

SEQ ID NO: 147297 - DNA, 633 bp, Homo Sapiens
  misc_feature (126)..(134): n is a, c, g, or t
attaagtgggttgttttagatgtatagagtatttatatgatttaacactttttattagatggcaaagtgggcttgatgttcaaaagtaatgttcgagttagggttcatggtccctttctcagtaannnnnnnnnaataaaagtaaacactggttcaaagacaaatagcaagtattccctcctgtgctatttatagatggctcaattcgtagaaaggcataccctccaattcaattctgtggctgtcccttacagtggtttcagaatcacgaaaaaacagctagtaaataggatagaaacaataaaagaaagagtttagaagttccctgtgagcaatctgtgtgtcttcagcgagcttgaaccaaagtcttcatatcctgacccactgaattataagcaattgctacttgcccatcttgccaaagtagtccaaacacacttcaatgaggacagttatatttagcaggtcctcacccctgcaagagacagcatatcctcactattattattcatgtgttattggcaaaaacatagcttgcatctttccagaggcagagtttcaaagacagggttttctttgagacataagcacattgcttaagtacataacaaggttattaacacttgcactcag

SEQ ID NO: 147298 - DNA, 1045 bp, Homo Sapiens
  misc_feature (147)..(147): n is a, c, g, or t
  misc_feature (969)..(1003): n is a, c, g, or t
cttctcccgcttgtcagtcaacaccgaacggatgacaatgccagagtctcaatgaccatctcccccgcgtcgatgatgcgcttacagaacaggcctcgcccgtggatggctgatctgtagacacccacagcttctttggacgtcttncttaaggtgacgaaaacgcatggcacatgggcagctcccaggctggtggcacgtctggttgacctgagctgcacctcatcctcttcctcatcacaggtggccccctcagggagcacccggtgctgggaggccaggaagttgaacatgtcaaaggtgcacttccggagatagacctctgcccgagcagccccatggggattcaggggcggctcctcctggccctctccctgctggtggtaacggaacttatagtgctggcaacgctgggctccggggagctgctcggccaggaagatgacagcatcatggtggatgcccaggagtctcgccccactcattccactaaaggagagatgtctgagtcgggcatgccctcgggcctcttgcactttctcgatcagagttctccacgccccctccaagctctctgcctcaacgctggaacccatcctcactgctgatctcgaagcgcagatgtgggccagtccgttttggggcctggttctctttatcatctggggatggaggctcttcctcagagctcgaagcctcacctgaatagtggtgccactgggactcaagcagcaggtctgggggaccatcggggacctggggaggaccatcttccggaagtggcagcaaaggggaccgttcctggaggggcccaggactttcttccccagcgggctccccaggccgatccaggtcaaggaccccacgcactgtgggggttttcatcctcacacggctaaacccgccactgccaagccccccggccgtaatggccgaattcccgggcatatgtccggtaccgtcgactgnnnnnnnnnnnnnnnnnnnnnnnnnnnnnnnnnnncgccgcttcctcgctaaacgactcgctgcgtcgtcgttttta

SEQ ID NO: 147299 - DNA, 1313 bp, Homo Sapiens
  misc_feature (1239)..(1273): n is a, c, g, or t
ggtgtatgtgtatttattatgttctgtattagatagtacatcaattgggagtgttactatgtgtgttgtagatgttgacagagtggtgttgatatttgtcgtattgagtgtgtcgtaatgttgtatgagtgttgtagtaggtcttgttgtggtaagtgttgctttatggttgtaaggtttgtgtatgtgttgtcgggtgtgtgtgccgtgacttgtgttgcatttgttaacacggttgggtatgcatggtttttatgatttttactgggcgttgtgttggttctcggggtcctctttcgcgcaaccagcttctcggatgttgggccatgcgctcgaagcgcgtcacgtcctgggatagtggttttgactattggccaccaggtccaacgttgaccgaagagaatgtcctgcgggtatgttaccgaggtccactgacgattacccggctgctgacatgaaggtacagcataaactcgcccttttcgacggtcgactggaagcacgttttacactagcgtttgtttacatcgggagggtgacgggctccacgaggatttccatgcagatcccgcactggcactcgtacagcgaggggatggcgtctttgggtagagccatttcaatatgttagtaaagccgactatatcgactgacacctgcacgtataaggatcctattttcggcctaccatcagagagagcaaaagcagttttgtgtttcagtattatgcccagaagcgtatcagaattcggagaacaggagcatccaacacgtcttgaagctaaaaggcgctctcagggtcaggcatacaggaataccccggagggcggcgtctttgtccattttcaaggcagacgtcccgccagcaaataaatgcaggttttcgtcggaggagcctggctgctccgcggcatgaacaccgcaggctgcggctcccggggcagtcgaggggaacgcagcacaagtcctctcctcccctcacccggaaaggatgctccgctcagctcggggcagccgggccccgggacgcggctccgggaggaagcccgggctccggctgcagcataacttccgctttaccgctgctgcgggggagacgcgcgactcccgtgttcacctttcgggcgcctggcgcagtttcccacagctccgcgcccccgtccctcctacgcagccagaaaccctatccccggccgtaatggccgaattcccgggcatatgtccggtaccgtcgactgnnnnnnnnnnnnnnnnnnnnnnnnnnnnnnnnnnncgccgcttcctcgctcatactgattccttccgcctgtcgg

SEQ ID NO: 147300 - DNA, 619 bp, Homo Sapiens
  misc_feature (561)..(561): n is a, c, g, or t
  misc_feature (596)..(596): n is a, c, g, or t
aacccgtcctcttttttctctctacgttcagttcagttcttccagtctgtcatcctggatttgtggtcatgggtaatatgtaagatcgttagtctgtctctgcttttgcaaccttgactgccatctgacaattcaggataaggcctctctgctttcatgatgctgggcacatctgattgaggtaagagctcttgacgggattgatggagggctttgcagcttcgttattgatgggtaaaatgtctcccagcaaatgtgggtgtctaagagtatgcaggggaacccacctccatggcatgtggggtgagggcctggtatcatttctttgaacaaaccatggctcccagtggagagggaatgtattagtcaggctagggctgctataacagattacaggcatgagccaccgtgcccggcatacacacctgttaattttgcctgttttgcatttctttccttactttggggtagttgggaatgttaatcactttagccccttccctagcacaattattgtttcaaagattggcatattaagtcattccagtgggagcatcacanagaaaatctgatattcttttctttctgtgaatcanctgtatcttcctgcaagttgtcc

SEQ ID NO: 147301 - DNA, 285 bp, Homo Sapiens
gtggcatcccacttattcttctgcatactcataacgaaaggagacacatctctagaagctgacttctccaatgccttttctttcctctgggcacagggtgaagatacctgcttttttggttgtctagtgcccttctttggcttctcctttttccttcttttgcttcctttgacttgactcggtccagatcccccaatctcatttttattaggtgccctgtaatttcagtcattcgcccttctgtcgtcttctcgcagccgtatagtagtagtagtaggcgcccgc

SEQ ID NO: 147302 - DNA, 975 bp, Homo Sapiens
  misc_feature (923)..(923): n is a, c, g, or t
ggttgctttacattctttcaattaaactttacatttgatttccaaggaagtcacaggcataaaaatctcaaatcaagtttcccctgaataaaaatggacagacatttctctgacgcaaaatcctcttgctcaggaaagctaaagtctgtgttgaattcagttcacagatactgcacacttactttgtacaatactttggaggcattctgtagttgttaaatagaatatacaagtctgtttcacaaatattctcctcaatcaaatatatcctgggctattgataaagcatggaacaaaatttcatattaaaggaaaattatcaagaaaaccccttcaggtaagttattaaatctacggatcaagaaaggaagcagtttgtgcgaatgcagtgcagggaggattcgctaacaagtgtgctccgtctcttccatgctcatactgctcctccggctgcttgttttggaagctccgggggacactgaggaaaggagtggatcagtgacaccgacgggagaaagggtgtcgtccatcaggatgtcttccagtttggatcccatttttgtggggacactataggcttggttggcctcagtcccagttccgaggttgttgttgaaggtgatggtgccatccgtgagatcgagagttgttgtacaggttaggtctgcatgatgctgaaggaggtcttggctgcagttctcaagaacgggttcttgcttgatgattcgattcaccaaatctggagagcagagacccgtggatggataagggaagtcatgagctcagctgcattcaagttctgtatctgagcacaatgccggtgggtgctcagttctctgtcgtttcagtctttgccgtgctgtccgtgcacttcgataatcacgagcttaaaggtcctgtcacgagtcggtcatgctggacangacagtcttagcgcatagtaactctctctcacagtggatgtcttcgccctgg

SEQ ID NO: 147303 - DNA, 724 bp, Homo Sapiens
aatcctcttcacagagtacaccaagtcagaataagtctacagtcagttctctggtctttaacagatccaggatctggtacagctaccatgatgaacagcagctcaagaggctcttcccctaccagggtactcgatgaaggcaaggtaaatgcacccattttgaataattagttatttcaggaacatttagctcttcctacaactctctctttgcctcatctcctatttgtgtgttctatctgtactatctcatttattttttaaaaaagcaaactgttctccaagagcctgaagtcccctcagttcccagcattacatctttggctgagcgtccagtagcagtaagtacttagaagtgtggactgaactgggctataagttgcatggcaatattgatcttacttttatccttgacttgggagtgttgctgaaatctgacggattcattggccttttctcctctctcctgtttggttagacatttaacctgtgtagagcatctgctgtaactgtaattaacttaaacaaaagtgaaaagtccccactcttgtgtgtctcagtgtttaatgctcttaggcaaagtaaattcattgtaaattgtgtaattcattattatgtcttcatttggaagtgtgctatttaagaatacctacagttgtatactaggcaaaccccccggccgtaatggccgaattcccgggcatatgtccggtaccgtcgactg

SEQ ID NO: 147304 - DNA, 974 bp, Homo Sapiens
  misc_feature (811)..(811): n is a, c, g, or t
  misc_feature (887)..(887): n is a, c, g, or t
  misc_feature (918)..(918): n is a, c, g, or t
  misc_feature (927)..(927): n is a, c, g, or t
  misc_feature (948)..(948): n is a, c, g, or t
  misc_feature (954)..(954): n is a, c, g, or t
cggtctaggtagcgaggcctgggtggcgttttcggcacgaggccgcaactcactacaagctgccaaagctggactggaagatgaatgcaaaaccttgaggcagaaagtggagattctgaatgagctctatcagcagaaggagatggctttgcaaaagaaactgagtcaagaagagtatgaacggcaagaaagagagcacaggctgtcagctgcagatgaaaaggcagtttcggctgcagaggaagtaaaaacttacaagcggagaattgaagaaatggaggatgaattacagaagacagagcggtcatttaaaaaccagatcgctacccatgagaagaaagctcatgaaaactggctcaaagctcgtgctgcagaaagagctatagctgaagagaaaagggaagctgccaatttgagacacaaattattagaattaacacaaaagatggcaatgctgcaagaagaacctgtgattgtaaaaccaatgccaggaaaaccaaatacacaaaaccctccacggagaggtcctctgagccagaatggctcttttggcccatcccctgtgagtggtggagaatgctcccctccattgacagtggagccacccgtgagacctctctctgctactctcaatcgaagagatatgcctagaagtgaatttggatcagtggacgggcctctacctcatcctcgatggtcagctgaggcatctgggaaaccctctccttctgatccaggatctggtacagctaccatgatgaacagcagctcaagaggctcttcccctacccaggtactcgatgaaggcaanggttaatatggctcccaaaggggccccctcctttcccaggagtccctctcatgagcacccccatgggaggccctgntaccaccaccccattcgatatggacccacanctcagctcntgcggacttttggggctcggncacttncctccaccctttggccctgg

SEQ ID NO: 147305 - DNA, 1075 bp, Homo Sapiens
  misc_feature (45)..(45): n is a, c, g, or t
  misc_feature (962)..(996): n is a, c, g, or t
agggcctccatgcacactcattccacaggccccactggccctgtnaaactcacacggcacgcacttggcgctgcctgctgtctgccttccacctgggggtacaagaggtcacccaagggggcaggcgtgcagggccttcttggatcttttctggcggcaataggagtacttctgcaggatctggcggaggtgctcctcctccttcccgctgcaggatacgtaggaagttatgtagttcaggcatgctgaaggcgtcccagttcacctccccagagtcattttccttcaggacaaagctcagggccttgtcactgggccctgccaggagcccgcagccgcaggggctgctcatcatccaccagcttccgcaagtacacttggccgtgacgctcagcgcgctcaaagagtgcaaacttgcgggggtcatccaccacccaagacctttcgcagcagggcctcaatgacttcacgtgcccttgtgcgtgacagcacatgcaggtgcttgacagcatccttgggcaggtaaaaggaagtgcggcgcctgacacttgtgccccgtcctgggccccgccgggcatcctgcaaggagggtggcttcttgctggagggcacagagacagggcgcaccagcttcagctgaaccttgatgaagcctgtgtaagaaccgtccttgttcaagctcatgaagaggttgctgttgatctgggcattgtactccttgatcttctgctcaatctcagcttgagaaaggtcaggtgtctcccactccacaggctcgtcctggtcccggcgcggcctgcgagctagcgaggttcgcgcggtgaagtactgctcgagctccgagtccgagtcctcttggctgcagtagccactgctcgtcgtgctgctccaggtcatttcgaaagaaggcccccggccgtaatggccgaattcccgggcatatgtccggtaccgtcgactgnnnnnnnnnnnnnnnnnnnnnnnnnnnnnnnnnnncggccgcttcctcgctcactactcgctgcgctcgtcgttcggctaaggcgagctagcgcccataataattcaaagtctt

SEQ ID NO: 147306 - DNA, 1153 bp, Homo Sapiens
  misc_feature (1035)..(1069): n is a, c, g, or t
  misc_feature (1073)..(1113): n is a, c, g, or t
gacgcacctcatttccgggaagggtccccctggcctttttgcccaggacccccttttgactcttcgtttttcactagtccgaattttcccccccaattggatgtgccctaccaaggttaatcgaaagcctgcactggcgattaaatccattcccatcaggtcccccctatcggaacagaaggtcaggcttgattctaccaggatagattaaggtgagaatagacaggatgagaacacgagccacaagccccacatcccaggccacagcgccagaggctagtttgtccagaggaatgaagagatcacaggcatttctgaccacgtctagcagaagtgggggatgacctctaaaggactcgagccaggagcaggacttgcagccgaagtttcagagccaagttggggcagacctcctcctggagtcctggttccccaagtcccccagtttcacgttcctcctgggactcctcctccagaacctttcagtcgccggctacaagcagaagactcttgctccatcagtaggcgaatctcataagcatcacggctcaaattcatgatgagggaaaacaaatagtacctgaatgaacgctgggcccacttctcctgatccacacggggagccagtccagactttccagcccacaggacattgtcacaggcgaagtacaaggctcgattgaggtgactaacagtgatgcagaatctcaggacaacatctgataggtgaacagctcttttggctgactcaagggcatctgctgagttacccaggcgtagaagctttcttccaaggctcaggtggctctccagttgtcgaatctgtttctgtaactcaggactggctccatgcctctgcagcgcatggccaagaagagagcaagcatactgggcggccctacacagccgctcccgggcttggctctgagcactgaagcggacccaggcgtccatgacagccgcagcccaggctccgcggccctccccggccgtaatggccgaattcccgggcatatgtccggtaccgtcgactgnnnnnnnnnnnnnnnnnnnnnnnnnnnnnnnnnnncggnnnnnnnnnnnnnnnnnnnnnnnnnnnnnnnnnnnnnnnnnattgaccggaggagcgcctatagtataataccaagttctt

SEQ ID NO: 147307 - DNA, 1046 bp, Homo Sapiens
  misc_feature (932)..(966): n is a, c, g, or t
ccattccggcccaaaatgccccaggcttggttccggccaaacttcgcacaaggcttcactggccaaattgctgcggcagcaccatctgaaagtggaacaaacatgggtaagatagtcaaaaatcaaaacttctttagatgcccatcacttcatctaaactgtactcatcttggaactggggaatacgggttattaactgaatgtttatgatttttccagccatttttgcaaagtgttcaattttttggttccatattttgccatatgttcttttccagcatacccaacatctgaggagcaactgggtgagcagacaatccatacttattgatcaggaggtcaacatgcttatcagtgggaatggttctatctgaaaattttagttccaaggcttcccttactcatcttctcaaacccaagagccaagacacattctgccacaccaccctgaatcagctggcgggccataaacaaagccagtagaaccagtagcacagttattgttgacattgattataggaattccagtcattcccaaactgtgatagatagccctctgcccacaggtagagtcaccaaaacatagccaacacatgcctggtccactgctgaataagggatctgtgcatcagctaaagccttcttgcctgcttcttctgccaagtcagggtagtctcttgaattctcagctccaggcttcacaaacttggtcatgccaacccccaccacgaacacccggcgcagggtcgcaggctcccacggggaagaggacatggctgcaccagtgcgggaccggggcgggcgccgcggacgactgccggcactgacaggcggagactgcaccagagctccctgaagcccgaagccaggccgcgggcggccccggccgtaatggccgaattcccgggcatatgtccggtaccgtcgactgnnnnnnnnnnnnnnnnnnnnnnnnnnnnnnnnnnncgccgcttcctcgctcactgacttcgctgcgctcgttgttcggctccgcgcgagctagcgcccatagaataattcaaagt

SEQ ID NO: 147308 - DNA, 903 bp, Homo Sapiens
  misc_feature (651)..(699): n is a, c, g, or t
  misc_feature (724)..(742): n is a, c, g, or t
gggtagaaagagacttaactttttttctatcttccataagaaaacttcaaaaatgtttctttttaaaattgaatttttcaaaaggggaaaaatattatcctgttttgatgggaaatcacttggttttaacacaaaggtaaaataactggcatgttaaccacacaggtggtgctataaattccatgcgtggtactgatatttttaggatttaatcgataacagaagttttttcccttataactataacctcgttgacctcttgatttttataaagtgtacttctctcacatttggaaaaatttaagctaacatgcttcattaattctggaaatatttactgaaactctgattaaattccaaattgtatgtttctgtaggctaccattttaaagttctgatgacccactggtttattagaatactaaaaatgtggcccagcactggtgactcacccctgggattctagcactttgggacatcccggtgggcgagtagctttagctcacgagtttgagaacagactgggcaacatggtgaaaccctgtctctaccaaaataccaaaattagcccaggcatgacggtacaggcctatagtccccagctactcaggaggctgaagccaccagaatcgcttgaactcggtaggccannnnnnnnnnnnnnnnnnnnnnnnnnnnnnnnnnnnnnnnnnnnnnnnncaacagagtgagacccctgtttccnnnnnnnnnnnnnnnnnnncaaaggaattctaaaaatgttttcttaaaagtgatttcttacactgtttcaaattcacaacacaaaaaaatttaagtgatttctactcatataacatattttatatttgaccccggccgtaatggccgaattcccgggcatatgtccggtaccgtcgactg

SEQ ID NO: 147309 - DNA, 1345 bp, Homo Sapiens
tacgttttcccaaagccttttcctggctttcccaaaagaagttaaaaccaccaaccggggtaacttataatcggacaaaagggtagtcttgtaaatcacgtaatattccatgcccaaacctggggaccatgagggaagaaagggaaacgctacaatttccacattgcattgctgctgttttcacaacttctttgcattaggcggcttcctggtggtacctcttcctaccagtagagagtggccccctgcaggccacttagaaacaggaagctctctcctgagctcactgatcaacctgcccttggcacagacagaacttaccagaaaagaacaaggtcaaaacactatcattatctgttttctcaagacagtcccaaatgtccttgtgcgatcaccacaaactcagtgattggcccaagtcattcccgggtgccatgaacagtaactggtgtgcagcattagaacaaggggacacagccttgattctcttctgagcaacatgaactgggatttctgccaccccgatctcggctgccacctccgaagaagtcgtgaccagccacctccacagtaaaagattcctcccgtgagtatgatttggaatgcgtcctcgtcgcgtgccagttcagctgaggtggatcggcgtgtactccggcctcctggtctggataatttttggcttaggtctcctcattctttccatttcctcttcttcctccttctcttgatcactctcacatacatggaccaccacgctgggagtggtgtcagtcgctgcgtgcaattcatacttttcccctggccccagcttggagatggcatataagagatcatagtttatgactggggtcgcatcttccacttgtttccatcccactggcggagaggcgggaggggagatcagaaactgcttgtctggatttggcggagccaggtgtgagcttcctatgtgtaaggtctgagcaaaatataacttcatttcctttcccagaaactcagtcttatgcagctggagcctggcatctgctgcggagaaggggttgctgaagtttattctgactcgtttgaagctcttaaaatactgaaaggtgatgtccttgtcatacgtcctaaagagggactcaaatttggccctggtttcactttcgctgaagatatcactgtttgccacacaggcaatcagggagctaaaactgtagttaaagtttctaaaatgcatcttgctttcttacagtgaaagcgctacagacccacgcagtcaagcccctagtgagattcctttccaagaggctgtccccggccgtaatggccgaattcccgggcatatgtccggtaccgtcgactg

SEQ ID NO: 147310 - DNA, 1218 bp, Homo Sapiens
tttgtatacacagggcccttgttgcaagaaataaacccccctaccctcgaatgtagccaggtttttgttttaaataaaagccctattgccccaataaggcactttttcttcccacccataaaggaaattgatttctcttttggggttcccccggaagacaaaaaaagggggggcaattggtgggaggacttcccattatattttggcaacccaaaaaagttttatttcccttaagtttttctttgccaaaaatagccaatattctttaatactctttggttcggcaatagggcaaatcaattatccccatttaattcccacattatgttcagctcgcatttcgtagtatgccatttttcccccctgcaagtaccccatctctatccaatgtctttagccaaaataaatgagccattttcatataattctccatcccagtcttgtcgacgaggccgtttagctggatttaattcagaggttcggtcacttcacgaactcctttctgaatttcactccatcgaaactgatggcgtctcacaacagagaaaacagaatcatatccttcttctcgaatcatttctgcaactttttgaagatcagtaggatgtaaacatggagaagtagcttgaatatttcctacaatgtcaacctcattatgataattaagaaattctatgatggcatctagtgaggtagagctgtcttttgaaacttcagaacttcttcgatgaacttgtgcaccaaattgtttggccacattctcaatttcatcatggtctgtcgaaacccatacactctggaaggcccctgaatccagggccgcacgcaggacccagccaatgagcgggacccccgccaggtgcttaatgttcttcagggggatgcctttgctgcctccccgggccagaattagggctgccaggtgcgggggcttctccacacctcggccctggccgccgcgagagttgcgctgcagcttcggcggccggccccgggacggtcgcccccgcgggttggagacggaggtggcggcccccttctccaccgagtccatcttcctcccacgccttctccccagcttctccacatccgggagctagtccctcaccacctcagctcggcgccgcccgatccccgcctggcagctggcgcgcgcggccgtccctcccccggccgtaatggccgaattcccgggcatatgtccggtaccgtcgactg

SEQ ID NO: 147311 - DNA, 972 bp, Homo Sapiens
  misc_feature (706)..(748): n is a, c, g, or t
  misc_feature (866)..(896): n is a, c, g, or t
cagttctgaagatacttgtcccaataaaatgccctcccactatgttgacattttggaaagaagtattcagttcaaaaataagtaacaatccagttatttgactttttgctttttttcttgcttgaaactgctctgtttttggtttttaatagatttaatcaaacattgacaaagcaggatcaaatggacttcctttgtgattccttttcgaatctcactctcttttttcttttattgcctgagtaagttcttgttcttttcgttctctttgccgggccttctcctcaaggattttttccatagcttttgttttcttgaaattgggatctgaggggtccaaattgaacaagtgggaagtgtacattgcctgaaaccgtgcatcgttaacatttacctcaaagtcatcctctattaattccttctttttcatgagctgctttttcttctttttgctcagattctggtgctccacaatcttgttgtaattgaagtgtttcttactgtcctcgtcctcatccatcataagcaaagccatttcagccttttgtctttctatttcaatttcttcttctggagatgtgccatcttttgcagattttaccgattttttattatacctatttgtttaacttcttcagcaaagtatgggtcattcaaatcaacatcagagggaagttcctcttcactggcctcttcagcaagagcnnnnnnnnnnnnnnnnnnnnnnnnnnnnnnnnnnnnnnnnnnnaaaaattgttcccaaggggtcagtttatcctttccttccaatttgtttttgaccatctcttctgcaccccggccgtaatggccgaattcccgggcatatgtccggtaccgtcgactgnnnnnnnnnnnnnnnnnnnnnnnnnnnnnnnatgcgccgcttcctcgctcactactcgctgcgctcgtcgtcgattaagagtagcccatagagattaaaaacggtct

SEQ ID NO: 147312 - DNA, 971 bp, Homo Sapiens
  misc_feature (831)..(865): n is a, c, g, or t
  misc_feature (869)..(900): n is a, c, g, or t
  misc_feature (945)..(945): n is a, c, g, or t
gaggtgttggcttgaatctactcttaatgggaagtgaggacgtccagggaaccgtgtaacttgccccttgctgcagagttctagcaatcgagtcaggggcatacctaattgtgagcttccctgccataacgtggctccgacgttgttcccccagtaaagggaacatcgtgtcgacagaatgcttcctttaggtcatagtcctcctatctcctgagaggcacgatgggaaaggggatctttggtcagtattcaggtgcgctctataacggcacagggctttactgggcagccatctggacgcatgtggcctgaatgctgggtgtctggacgaaagcggggagtgtcccggctccgcggggtctttttctcatttaagttggcaaaatgtcacaggggcctcccactttggatacatattttcaaaatcagaatatttgagaaaggctgggaccttctcagagactggaaaagttgtgacacgtggcaaaaattagaatcagaaactggagagaatgtcgaagctggtccccaggcacctaagctcaaggtttctggcctctgcaggaaggttttctcagatcatgctagaatggctctttggcctctcccaaggcttctgaacactcattccccaccagtcaggtcctgccctggagagccttggcagatggctttgaaagcagtggtcaccccaaagaggagcccacaaaagtctgctttgatggtctgtcttgtcctagatttggcagcgtctggtcctcaatatccaagcccagtaagcccggccgtaatggccgaattcccgggcatatgtccggtaccgtcgactgnnnnnnnnnnnnnnnnnnnnnnnnnnnnnnnnnnncggnnnnnnnnnnnnnnnnnnnnnnnnnnnnnnnnttacagtttttcgggacataaaaaaaacggacggcttagccgccngcctatagtgtatgtttttttgcaaa

SEQ ID NO: 147313 - DNA, 571 bp, Homo Sapiens
ctgaagccttgttattgaaacaagcccaatgagaaaaacacattacgagtagctgatggatactaagggagtattttactgaaaaaaatagaaaactacatttttacacgaaataaacttatgtctgcaatactcagccttaaattcacccctcacttcagaagaggtcccaggggcaggaataacacgcacagattgtttgttcacgacttccagccggtccaccagacctctggccaggtaatactgtacaaagtgcttccacgtgatttctcttccaggatctcgaaaatagaggtagaaaaatcccatggcaacgcctgcccccaaaagggccagactgcggaaatcctcgtcatcccaggggaagtccccccttctgcatccgcctccaccaggcaacgttatcctgcttccctcctctcctgcctccgtctcctccagactcagcattctctagttcaccagtctctttgggtggttttgaacacagccaccaggaaaataacgtcggtcttgcctgcagagtcagcttctgaacgtggatcccctggaagcactggaacaggag

SEQ ID NO: 147314 - DNA, 941 bp, Homo Sapiens
  misc_feature (826)..(860): n is a, c, g, or t
tgagcgctctatttccaactcatggcacagatagtgtcatagcccgctccagtttactgcttaagtgtttgaatttctgattggctagaaaagtccacagactctaatttctgttccggattgacaagctgagcctgaattatctctgatttgttcagccagagccttcctttgtgcctccagtgaagatacctgtttgctgataaatcaagcgttgcttctcccagtccagcgatttctgacggaattcctctatttttgcagttaacctctcaatttcagaccgatcttccctgtgatttttggtatttcctctgaattccctcatttgctttttctgaagcttttcatagcttctcttcagtatgcataattcttcatgtagtttcttcaactcctgcttatattccatggtcatctcttgcttgattttttcatgttcttctacctgctgatgcaacattccaacctccttatgtgtcacatccaactgactcctaagactcttaagttcctgttcacggattttcaagcaagtttctagagcatgtgtacgtccttcccattcagattttttatgagccaccattatgtcaatctgtttcatgagctcctgtagttctgcttcacaagatgtcaaaaatcccccaccatgccctcgattttgtattccttctaacaaagcctccatcaccaaatcccctttgttttggcaactcgggccggcgctgcgcacgcgcgccaccgctaagcttacgtccagcctctgtagtcccccggccgtaatggccgaattcccgggcatatgtccggtaccgtcgactgnnnnnnnnnnnnnnnnnnnnnnnnnnnnnnnnnnncggccgcttcctcgctcacatgacttcgctgcgctcgtcgttcggctacaacgagctagcgcccatagatatcaaaggtct

SEQ ID NO: 147315 - DNA, 319 bp, Homo Sapiens
cagcaatcctattctttgcttctggtaatttattaatttacattaatgtcatttaattatttacttcaggtagatttacatctgctatatttttacatgaaaaagatgaaaagccacttgaacatatcttctgtttttttaatgatctgttcttctttataggggatttttgacatcttgtgaagcagaactacaggagctcatgaaacagattgacataatggtggctcataaaaaatctgaatggggaagggacgtacacatgctctaggaactttgcttgaaaatcccgtgaaccagggacttaagagtctttagg

SEQ ID NO: 147316 - DNA, 1192 bp, Homo Sapiens
  misc_feature (149)..(149): n is a, c, g, or t
  misc_feature (155)..(155): n is a, c, g, or t
  misc_feature (162)..(163): n is a, c, g, or t
  misc_feature (208)..(208): n is a, c, g, or t
  misc_feature (266)..(266): n is a, c, g, or t
  misc_feature (275)..(275): n is a, c, g, or t
tccacagcaaggtttctggaaaaggaggtttggtgggccacccccaggggcttggttgggagcaggtccagggcgcctgtggccaggaccccttgggctccttcaagtctccgactggtctgtcttttcaggtggagccatcacttttntccatncattttnngggaatggatggagaggtctccaggggagagccaaccccgggganggggtcggggaaggcaggcaactggcctctgacttggctgtgaccgagttgaccaggncctgggacntgggccagcagccgttccagctcttcatccattgctgggtcgtgcatcagatcccccttgtcagggcaaagctccgagggcttggttgattccacggtgctttgagagagccatgaggaatccatagaaggtcagtctctgaacattgctgagggcctctttgacaagtgctgggggtgggcagctgtacttgtgccgatcacacaggttttccagacactggtagaacagcgacgcctccacgccctccagcgtgccggccccgcccaaggcaggtcgttggcggtgctgcccactggacgacgtcggcacaatcactgtgttggggttcttgcctgacagcaggtcctcatagatggcagccacactgtccaggaattctgagtagtaaaactggatctggaaggcaaagaggaaatctgaaaaagacatcaagcagtccatggcatcgtccatgagcacaatcctggctgctttctgagtgagctccagcgggaaatcaggacacagtaattgcagcaaacagtgatattctttcatggtcagcaaatcgccatttttgcccacagttcggaagcatctccagaaggcccgtaaaaatgataccctattgtggggggtggcttggacgaagctgaattctcgaaagagaatgtgtgttccctggcatacactgttaaaatattcagtgaagaacctggcaattccatattggctaatatcttccctgttttctagcagctggcacactgcatcctccatgtaggtgaggacatgtcgctgagccagatactcgtagtccggtagggctaggcgctccggactcagcatcctttgaccggggtggcttcaaagctccagctctccggcttccggaacccaggttgccgtctctctccgttgccatggcacccacg

SEQ ID NO: 147317 - DNA, 1586 bp, Homo Sapiens
gggaaaccaattaaaaaggggccgtttcccccccgggggggactttcccaggtggtgaaaggaaggcccggaacgggggccccgaaaccctttcccccccattggtttgccattaaaaaggccctttctccaagggagaaactcttctggggaaggaataaagctaattattttatttaaagaatttcccccccttctgccacactcataggggcctttctccaatggtgcactttcccggttccgaaaggagggtagacagacccctgaaggtttttcccacatttggtgcactcgtaaggccctttctccaagtgtgaatcctttggtgtagaacaagtgcgtctttgcggttgaagggttttaccacagtcactacacttaaaaggttttatgcctgtgtgaaccttctggtgtttcctcagcttagacgggtaactgagggccttcccacattcattacacacatgggctgtttctccagtgtgaatttttcgggggttaatatgagctgacttcttgaaagcacttctgcctgttgggcatctgaagggtctctcttcagaatgcgttatcagatggtcaaggagggcaaaggcctttaagaacaccttcccacagtcactgcatttgaacagcttctctgccacatggacttcttgctgttgcccacaactggaaccaggtgggaaggctgccccatgctcagtgtgccttcttggtttcccctcactatgagtgtcctggtgctggatgactctgtagctctttagatgctcaggatgggctctctcatcctccactctacacaaaccatcaagaccaaaacctctcctggcttctgctctgctgactggagtcacatccacctagctgggcacccacgactgttcatcactcctccagctgggtaaaccacaggggatctcgaaggttgcaagtcctccgcctgcgctacacgagtgcacagttcatccagcatggcatccacgactgttcatcatcctccttctgggtacacattggggatctcgcaggtgcatgtcgtccgcctccccggccattggaccgtgcgggccagaacccgtggactggacccacggcctcagccgaaacgcgtcccgggcgccggaaaccctcggccagccgtggaaccttcccgggaagctctccccgcgcgggtgaaatgcgtccgaagacagggaaccgcttcccggagccgctgggaaggaggacggtacggaggcccgggagactcacggcggcctgtccgcgagcgataagtctgaggaagatggagccacatcgccgctggggacacggcgcgtggaaggcgcggcaaaggtccctgcccttcacctcgcgcaggggatcgcgaggaagtcaccccggcccacgcagagctgcctgaggcgccgggacagccttcccgccgaggactagcggacctgccgggcaacgccggaactcccgtggcccgcgcctcccctcgctcggcgcccctcacgccacgacctccattcccggctctcctcccccggccgtaatggccgaattcccgggcatatgtccggtaccgtcgactg

SEQ ID NO: 147318 - DNA, 1042 bp, Homo Sapiens
  misc_feature (929)..(959): n is a, c, g, or t
caatttatagcaagaaaaaagctgggtttaccccaagaatactgacttactttcaccaaaaagaaattgggggacaagagaggaaggagaagactgaaaaaaacaagtatgactctactattttatggtctctgaaatcaagagacaagaggttgcatgaacataaaataataaatggaagggaagaactacagctctgctaaaccaaaacctaccacttgtagatgcaaaacacttgatccctgataattagtgaattgctccagcttacctacagaattagaaccagactgcaggttttgtaaccttagcccccctattaatttagagttttatctattttccttatactgaatataaactaaaggccaggagatgaaatctactctttaacattaatgtactacttagatcttagatattttattgttagtttctctggaagctaaataccaaaagaataacaggctccctgttttatagaaatactatgcactggttagaaggccatctgccctgaacattcttctgttatttatttttagcttatgaaaatcaacaccaaaaatcaattatttcactggtaccttggaaagctaagtagtgttggaacatgacaagttagatgaaagacctttggacatttttcgcagcacaagagatctcctccgttttggcagacagcacaccagtcttcatttgggtcatcatctttattgttgccatctcctccaatccttgccgacctgtgcatgaggcttcgaattggggactttccattaacaaggctgctgagccctgactgtttgcagctttcattcatatctgcaggttcagttttcacatggttttccaggcttgccaatgcatccaattcaccccggccgtaatggccgaattcccgggcatatgtccgtaccgtcgactgnnnnnnnnnnnnnnnnnnnnnnnnnnnnnnnatgcgccgcttccttcgcaatcaactactcgctgcgctcgtcggtcgagaagcagcagcgccatagaatattaacaccgtttt

SEQ ID NO: 147319 - DNA, 809 bp, Homo Sapiens
  misc_feature (63)..(97): n is a, c, g, or t
catcatggggctgcgcgctcttcgaacgacgagcgcagcgagtagtgagcgaggaagcggcgnnnnnnnnnnnnnnnnnnnnnnnnnnnnnnnnnnncagtcgacggtaccggacatatgcccgggaattcggccattacggccgggaatccagtttatagcatgcctgtcctaagttacagtagtttgctattatatatactttgttatatcaaaagaattaggtaaattaacaagtcatcatgagcctgaccaaaacaaaatttgaaattaacctatgggtctggtacttttaaaatgtacagatgtttgtgccttttctttactttgcttatattcttataagcattttttagcagtaatttgtacatattttagaatttgtgtatctgctttgtaataaatgtaatttctttccttttttggacacttggatctaaatgatgtaaagcaaaacagcatcaatatatatgtgaggttgcactaaaacatatttttatatgattaaaactgaacagcttttatgtacagctctgattctgtaatactaatatttatttactttgtttcataaattgtacattttttcttaatgttgtggattgcttttctatgtgaagcatgggatttactgttgcgtaactagaacaaaaatgtacattgtaaaccaagatatttaaactagagtatcttattctgcacttatgcattagttaaaaaaagataaaggatgtatcagtcagttcttaatctcttgtatatttttgtctcttgtttgtggattgactattaattaagtgctgatgtga

SEQ ID NO: 147320 - DNA, 616 bp, Homo Sapiens
tgcactgtgcctggacccattagttttcttcatactattttcttgtctcttttccttcactggctattcccctcaacccccattcttccttgtcgtccctacctctaaatgttggaaggctcccagggctcagtcagtcctacgacgtctttattagtagccactccctgtgtattctcctctgttaagtccagtggctttaagtacctgactctcccatttgtatctccagtccccatatctctcccaaatttctcccttttaatatcttggaggtctaatagggatctcagaattaacatatccaaagctaaatactgtacagtaattgattgccttgtttctcactggcttttccttcagttgactttttaatcagtcagtggcaatgttgttctagaacttttcatctagattgtgtagatttgaatcgctgccattaatattcagttttccatctgtaaagtgggggtaataattcaataactttatgaggtgtagatcctaggatttaaatgtagataaaatttctacatagtccattattaacacttaataccagttgccccggccgtaatggccgaattcccgggcatatgtccggtaccgtcgactg

SEQ ID NO: 147321 - DNA, 727 bp, Homo Sapiens
caggatttacacaagatttttcaatcttgtataaataacaatgactaacatttcaagtggcttaggaatcaccctaacaattgcatctgcacattttatatccacaaaagagctgaagatattaaatgtggccataaacagaacctgggaaagttatacagtcacatctgtgagagacaatgaatccagaggtgtacacagtgtccaccaaggtcctgagatcctcatttctcttccttgctttgaggtatccatgctatcattcattttcgtgcttttgcattcgtgttcgagtagaagtcatttctgccagtttctgctgaaatcttggactctcctgggagatgtttacttccatctgcttcatctgatccttcaatatcaaagcgtagttttttcagtggtttaggagggttgcttccttcagcacttcttttgagcacacggtcgctgttacataccatctgatttattttctggaacttctcagaagtctacaaattacagaattctttactttaaatcattaaatgccagtgtttcatagttagcaacctcaagttatagtttgaggtgtgtcaaaaatcaggcaaaggtaataacttcatttaaattttctgcttcattggaccaaataaaagatatgaaaaatctaaaaatcagaataactacctaattccatccccaattaaacacccactctttgtaaatcctcctgtcttttccc

SEQ ID NO: 147322 - DNA, 427 bp, Homo Sapiens
gccatgagggggttaattggaaagcccacgcttctttgcttcggaccccagaggggggttctttcagacccaggtagatccccggacactagctcctatttccttctgcttcgggggtacagcttctcccatcagttccaaagggccccagatggttttgttgtaactcaaaaatgattttcttactttaagaccgtgtttcaggcaatgttccataacaacaaagaattgctgcaaggggggatagtcagaatccaaggtgcggccaaagctcagagcagattcaatgagtcctttgatactcagtttagccatgtttaacaagtttgctctctctacagctgtggggtcttttgtagccatggcggcggcggctccccggccgtaatggccgaattcccgggcatatgtccggtaccgtcgactg

SEQ ID NO: 147323 - DNA, 628 bp, Homo Sapiens
ccccctgaaaagctttatgatacaacagctctgttttcctgagagatggcctttagggtagatgagcctcagtataagcccagagcatttctctaaggctaccaaggcttgaggaattctgtacttactcccactgtcaccctgctcttcatcccccagctcaggtaaggggaacgcagggaaggctgaagagtgctagctgcggaagcactgaattagggtgtcctcagccctccattcccaactggaagccagtagttcacttagtgtatatagcagagcctcaaaagcacaagcattttgagtgtcgtttttctgtgccctccagcgatgagatggcaaatggtgggaaagtgtcagctgtgtgaaaagatagtgattgtttggttttgctaggacagttttaatgttgataaaaattgtttatacatttctgagaagtacagaccagaagaactgaattcttgttctgtcttcttcataggtagttgtgtgatgctgaagttaagacagattgctgatgtagaacccgattttcctttttgtctgatgtgtgtgtataatttcaaatttgcttccccggccgtaatggccgaattcccgggcatatgtccggtaccgtcgactg

SEQ ID NO: 147324 - DNA, 878 bp, Homo Sapiens
tcccattccctttccggccagtttcagaagacccgggatcctccaaaccaggggagaaggaatcctgcccaattggtttccacagccttttcagagctacttggaggagacgctcaggatgacatgggtcaaaggcctttcccaaacttaggatgtgatgtatctggtcccttaagcgcctggctaaataagagagccagaacaccgtgatagcaggctgatcaaaccgctcacgttcctccctgttttccttcgcaggtcccctctccattgttttctcgcccaatccttccctcttgctccctttgggaaaaagccacgtggagctcactgggcccctcccccagctgaagggacatgaccctcctctgccctcttccctccagacacccagctggacagctggtggcagccacgggactgaacctgctggggtctgcgtcgctgcgatgtccatgactccctggctctttgttgcccatcttctcccagaccctttcccatcccagcccatgttcaaggccagacagcgctctcctggctgacacacagattcaacaataaacaacagtaaaatagattcagggagggagaagacagaagaagataaacatttacaaaataataattagtaaaagtgcttgcttttaaaggaaatctttggcaagaatatactgcagtgcggagtgttgtgtgtgcgtaggtgtgtgcatgggtgcacagcccgccgtgacacagaagggctctggtgcagggcccagaggtggggccactgtggggactggggaacccttccccatcattcgccttgaaaagtcacactctcagcccggccgtaatggccgaattcccgggcatatgtccggtaccgtcgactg

SEQ ID NO: 147325 - DNA, 830 bp, Homo Sapiens
tttgtttgaagttacagctaccttttagagacatggtctatttttgtaaaggacataaccacatgaatgaagaaattccagaatttggaaaaaagggtccgttaatgcctgacaagagaaaaatgttctcctgagggtcttttttggatgttcttctctcttgctgcctgaatctgtgctcctctcctgttcgcaatttctcgttttaatctgtttacatcctttactagtttatctactgcttgttcactgtcttccacttttttgcatatactctttaagttcctcttgtaatgaagcatacatttcatttatcttatgtacctcctttaaggatccatcttcttcaaaaaatttagagctgtgtgtttgtactgctcggctaaaaccagtggacatacaggaacctgatacagttttataacccagttgttcagacatgcccagattggcaaccactaaaggtaccctgtgaaaaagtcctttttgaggtttatataaggaatgttccagtcgatgagtagagcagctttctgttattatacttggtgttaatagcagaaaaacaaggtcttggtttgaaaaatgctcctgcaagtttttgtgaagcagcctctctctaaacgtcatgatctgatctgaatgacgacggaatttgtaccaacctaccacattctttttgacatttgataatattttcttcagtgcttgctcatttacttcgcctgaagaattataaaagctaaaaagctgatagcatggaatatatttctgaatgtccccggccgtaatggccgaattcccgggcatatgtccggtaccgtcgactg

SEQ ID NO: 147326 - DNA, 804 bp, Homo Sapiens
aatattaacaattttatttaaaattgcatcccaaactaccatagttaggaataaatttaacaaggaaagtgtaagacttctacactgaaaactgtaaatcattgttcaaaaaaattaaagaagatattgaaaaatgaagagaccgcatggaaccaaagattttatattgtgaagatggcaatattccccagattgacctttagatttaatgtaatctctatcaaaatcccagaagctgataaattgattctaaaatttattttttaattgcaaggaccccagaagagccaaaatagtcttgaaaagtaaaataaagttggaaaactcaccacttcctaatttcaaaagttactataaaattgtagccatccaacacaagtgtgatactggcataagatacacacataaatcacattgaaccagaaaggaacgtccataaatacattcttatattaaattgatttttgaaaagggttccaagacaaagaaacaggagaatgaatagttttttcagcaactggtgctgggacaaatgaatgaatgcaaaagaatgaaattagaacgttacttcacaccatataaaaaatgatctcaaaatggatcaaagacctaaatgtaagagctaaactataaaacagaataaatagtttgaccttgggttgggcaatgatttctcagctataccaccaaaaatatgtgacaaaagaaaacaatagataaattagactccatcaaaattaaagactcatatgcccccggccgtaatggccgaattcccgggcatatgtccggtaccgtcgactg

SEQ ID NO: 147327 - DNA, 911 bp, Homo Sapiens
aatctagcgaaaatctctattctcattagccttcccacacctgtgtaaagtatagtccccattttatggaggagaaacaggcctaggaagtgggaaaggtagattctctgctcgcaccaccgttattatgtggctaaagctattgaacttgaacttagactttgggactttcatttcaagatatgaaatttgtttgattaaatctttttatctgtgtatggaaaaaaatatctcattaagctgtcagatgttatttacccctgctaactgttaagaaatatttcattaaaaaaattcagcttcatagcctttcagtttccctttaagagtcaaataaaagtattaattttaaactgaagttgcctgaacagaaaatcgttacctgggggaaagtaccagtttctaaatcttttaaaaaacgttgccagacaatccatgatataactggaggttagtagtccttctaatttttaactacaaaaatattatagaaatttgtgtttagcccacatttctaacagttgaatcaaaggtgtttatgaacattataatgaacaagccaaaacctgcaattaagaatgacatgaatatattttctgttaatgataaaaacaaacatgggcttgacatttaaatgaaaatgtttgcatttaggatactactgataaatcttttaaataaccttactttcaaaacttagtttaaggttgaacatcccagtgaccagattatgattaacagattgaaaaatgataaagcctgaagtctaagtttatccagcagggtgactcatgcttctttgtcatcctcccacggcagcaatttgttccatgtgaatgctagtaacaggcatcatacacccccggccgtaatggccgaattcccgggcatatgtccggtaccgtcgactg

SEQ ID NO: 147328 - DNA, 942 bp, Homo Sapiens
  misc_feature (438)..(575): n is a, c, g, or t
  misc_feature (666)..(706): n is a, c, g, or t
  misc_feature (730)..(764): n is a, c, g, or t
atatgaggaccgcccccgcccgcttacagggtgtgggggtgatatagcgacttgcaggagcatggcttccattctcgacaacgtcgctctcgcactgacagcggctatgcgctgctgctgttaggtgggaaccacaggctttatgagggtgtaaaggagggaaaaggaagtgggggagttaggttcggagaggatttatggaatgcctagcatgtcaaatcaaagaattgggctttattctcttaagccatggaaaacccccagaaagttttaagggcagagaggaatggatggtgaaactagttttttaaaatatggagaaagacctggagagggaagagattaaaagtagagtgaagttaggaggctgttaaatagtctaagaaacgatagggggtgaaccagagtaatggggatggagatttataaagattaggnnnnnnnnnnnnnnnnnnnnnnnnnnnnnnnnnnnnnnnnnnnnnnnnnnnnnnnnnnnnnnnnnnnnnnnnnnnnnnnnnnnnnnnnnnnnnnnnnnnnnnnnnnnnnnnnnnnnnnnnnnnnnnnnnnnnnnnnnnctgggtgcagtggtgcacccctccagtcccagctagttgggaggctggggtaagaggttcactcgagcccaggagttcaagtgaacttacnnnnnnnnnnnnnnnnnnnnnnnnnnnnnnnnnnnnnnnnngacggagcaagaccctgtctctgnnnnnnnnnnnnnnnnnnnnnnnnnnnnnnnnnnngatttaggatgtagaaatgccagaacttggtggccatgtagagacaggagataaagaatggcataaaaatgatgcccagctaaatgcaatgttgtatcttggattatatcctagaacagaagaaaattagtggaaaaaccggacgcgtgggtcgacgatatcccgggaattccggacc

SEQ ID NO: 147329 - DNA, 1143 bp, Homo Sapiens
  misc_feature (178)..(194): n is a, c, g, or t
  misc_feature (405)..(428): n is a, c, g, or t
cccgcggggggagaaggggaaggcgccacagccccccctgggggggcacaagcccttccgggtgttagagaccccccgccacggaaatgtgccccctcggggccaagggggcgcaggtcacatggcagccaagccggcaggcccggggtttctttggaccaaggtcggcaagccccannnnnnnnnnnnnnnnncaccatggaggaggggcttttttggttcgcaggggctcgccagtgcaggaagggagcccagggctttggcccggcccccgcataggcggccagcagcaggaggacccgcggtgagcaacaccatcttctcttagtcgcccccctttacctcgggggtggggcaggagagcgagagtgcagggataaaggggccaagagggcccccggagannnnnnnnnnnnnnnnnnnnnnnnaaaatttctggcaggtagagcaggtgccctcccccagacacttgcaaaaatgtagagagaggtggagggctggggtgcctgcgagcaggtcccagttgcaagaattaaagccttgcaacaggttgggggaagcagggcagcgccaggtgcacgcagtgagcggaggccggagaaaccctcaagcctgagcgggtcagaattataggggaaaaaaagccacaaaattgttcacccccaagcaaccaccgaaataatgagatcggatgcagtggagatggcgttgggggtgggagagaaaaatggatttatctttaaaatttttgcttaaaatctaaaatacaccccgctttctaaccctcagctgccagcggtgcgcggcgccgcagaacaggtaagaggcgttggctgcagccgagagggtgggagaaaatgttgaaatcaagaaatttacccaacacactaacacacataaacccccaaaccctaacacctcttttctcccactttgccacctcctcttcgaaattcgcaggttctacgcgaagtccggagaagggtgaaaacggaggaggggtaatgaaaaggagcaaaaaagggaaaaagcccacactgctttgcagctctttcctagctcttttcccctgcagaagtttccaaagggactccccggccgtaatggccgaattcccgggcatatgtccggtaccgtcgactg

SEQ ID NO: 147330 - DNA, 903 bp, Homo Sapiens
  misc_feature (470)..(481): n is a, c, g, or t
gagcccttaaatacttgttattgactggggttatttttatgctgtagcaaatgtgacaggctctttttagcaaaatttttgaaaatttttgtggtattactctgaaacaaaatttaagttggagtttcagggatttagggagtagttttcattctacatgaactgaggtaatattatggtaactccaatatttggttaaaaaaactatacaaatcagaatagtactaaaatactgtagaattttagcatttttattttgcactttgtgtggattgaggtgttcagaaataccaaccataaaaatgtaatctagttggcaaaggtgtgcgctaaaacacggaaccgaacatgcattgatttggataacttttgagggtttttgtcaaatagcatgtgaagagttacatttttcttaaaagattggtggtcccaatgtcagagttcttggaacagataactgaatgatagannnnnnnnnnnnaaaggataaaactttacaacctgccacatttgttatgcatactaaatggtgtgttaaaattagggtttctttgcctctctacactacactaatctgcctaaaggtggttgtttcatatttataatgctaattatcatacctacctactttaaattttaggtagaaacattatctgatttaacatacaaacatatttttctcacattgagtaatatgcataatgtagttccaaatgtatttccattactatagtcacaatatccaagctaaaatattacgctatctaggaattggtaccaaccaaaatctcgtattgggcagatctttgaccaggctggacctgcaagatgtggctcgaaatttaacccattttattacataatctctagtgatcatgcatctagctatcataagaactgatc

SEQ ID NO: 147331 - DNA, 512 bp, Homo Sapiens
ctgactcgagatttgcccgctttttgccgcacaaggctgaccatgccggctggggtctcttccagaacaaaaagggttaagccgactcatgacctaaaggaccctgtgatattttccttctgtgccacatatgtagatgggctctgaagacgatcatcgcccctcgttggaaatcatgaatttttatgaagccagcccagaattcccagaattcagtcgggtgcactttgcaaaccctaaaatgctgtcaccatagaaggtttcattgcttgcacctgctataacatttgaggcatttgagaggcagtgaaacacatttgcttttcattttatctgactttggaaacctttgaagtgtttaatagtagagcccaggaaagatctccgcctcttaatcatttactcgtaaggcacattctcggctggtagcctgtcaagcagaaactgaactgagcccagttttattaagtgtcacatgcccagtcactgttcattaaaggtgttttaaggtt

SEQ ID NO: 147332 - DNA, 432 bp, Homo Sapiens
ttttttccaggtgcatgtaatttattaatggagctttgacagtcacaagttccagcaagtcaggggtgggggctgcagggtggcctcttgccctgtaaccacagtcatcaaatatgcctcgccatctttgaggggctttcctgagatgacagattcctttctggcactgtgtagccaactggagtcacagacctcagcctgggccaaatgagcattttagggagaaggacaatcccttatagcttagccctaggggagctctgggcagggttttacacattctttctgaaagtaaggtcatttggggacagggctgagagcagtttcttggctacacagatgggtctgtcagggttgaagccacatgggtgcctgctcatgtgccatgttgaaggagtccctgtccgcctctcagcagcccgcatgggcttt

SEQ ID NO: 147333 - DNA, 437 bp, Homo Sapiens
  misc_feature (231)..(309): n is a, c, g, or t
tttaagagaaatatatttactatttattaagcaaaagtggtaattataaaggtctttatcctcattatcttcatgttgaataggctgaggaggagaaggaagaggaagggctggtcttgctgtctcaggagtggcagaagcagaagaggtggaaggggaggcaggaaatatttttaggccatacagttcatctgcagattttttcaaattgttgcaaatctcagaaaactnnnnnnnnnnnnnnnnnnnnnnnnnnnnnnnnnnnnnnnnnnnnnnnnnnnnnnnnnnnnnnnnnnnnnnnnnnnnnnnatactttcacggcctcaacagtgtggcttttgcagagcaagaactggcagatggggctgagggcagtggatgattatatacaatagaaactaagtaaatgtaatatgctattgaggcaggagaatagg

SEQ ID NO: 147334 - DNA, 539 bp, Homo Sapiens
aatttttgtgtttttattacagacagggtttcaccatgttgttcaggctggtgtgctccatcatttctaagagattaaataagttttcacttgagggaagttggtgttctcaatgctgaggccaggcatctcctcataattaaaagtggggatgtgttttacccagggcctcactattgatgggatttgggctccaacatgtgcacagctgactgcctggcagccctaggacctggagagtttctcagatgcttggcacagagagtcactggccatctttggaggaagcatcattttgggaaatggaaaaccaggtcctgtgttgggaatatctgtgaggctcccagggtctggggctccagctcctctctgagaaggtgtcgggggagagaacagggcccagccacacccagcccctcctgcatggttcctgctcatcagggtgttagaggggtgggggcactagcagtggtcaggcctgtgtttctgtgggtggggccagggagggaccctcggtgcatcctagggagtctctccca

SEQ ID NO: 147335 - DNA, 526 bp, Homo Sapiens
  misc_feature (196)..(196): n is a, c, g, or t
  misc_feature (267)..(267): n is a, c, g, or t
caaaattcagaccaaagccttgcccacgtagccctggaccaaccgtccttctgggttcctacagcatttccttcgtgtattgtagtctcttgaggcagcctccctaggcagcctgtgagcccctgctgggctcagaagccttgtcttctcaccttccgggtctctgcccagccctgagatctggcacataccttancgttaagcagtgagcagctgaagcaaagacgttttctcccttccagatctataagtagtaaggaaggcagngtggctggggcccctaggagtttgcactatggcaaggcaaagcaaggaggcaatgtgaacaccaagcagaaggagtcctatgaagaggcagatgtgctgtcggggtgcaaaaccacgttcgtattgaggcagttgatataaaggatgttccgcgaatgactttttcccactcatggcctatactatcaaaggggagaggtgtggggtttactgagccccttgtgctgcgtactgtaactcaatcctcagtaccactgcg

SEQ ID NO: 147336 - DNA, 463 bp, Homo Sapiens
taggccaacccactccctgcacagccaggaatacccagccctgctcatggccagaggccttgcttggacagctattctcgatggaccctctggagtggacagtgggtgattcagccagaggccgcagggcctgccctgtcctggcagagccaaattggtgacagtgcccatctgctcccacaggggccctaaccacccaggatgaaaatggccagaccaagcgcaagttgcaggcaggcaagaagagtcaggacaagcagaaaaagcggcagcgagaccgcatggtggaaaggtaaccagcttccctccacccctctgcctctgcctcgctgtggggctgccgccaggagagcagggccatagctctgccagctcgccgccctctggcctcccttgggagccgccacctgctcggccgtgcatggaccctgcttcccgccaggcccagctcccaaggcctgac

SEQ ID NO: 147337 - DNA, 865 bp, Homo Sapiens
  misc_feature (61)..(79): n is a, c, g, or t
gtgccaagctaaaattaaccctcaactaaagggaataagcttgcggccgcatacgcggtcnnnnnnnnnnnnnnnnnnnccgcagtgaaaacatttattttacaacagtaatctttattttaggccaacattcagacatacaagacggagatcaccatgcggaaccagcctggcccttagatgtgtgtgctcgagccaggatcagccggagtctgacagcgcctgcaccccaacacggtcggattccaggacgccagtgacaaaaccagtgcatggacaagcagcttccatgcgtgtgcatttgatttttaaaaacaatacatatttcagtgttaacttcccccctcacctggcttgaaacattttccccattttccagggaaacaaactctaccaaaaggtgccgcctgcaggaccccgggcccagccccttctggaggtggtgctgtgtggactcctctggggcggacccggggccagcacagggccccttcccaggccgcccttcagatgcagctttgccactgaccgtatctgctgctcagaaaatcagctttcatgtttcaaggcagggaagggcttccagtcccctcctcgatttcacaccgggacacacacctgggtcaggtgagcatgacacacagcccccaggatgggcaccccaccctgcagagcagaggccaatgctggtgggggccgtggcagtgccctgggcacacaccctctgcacacattgggctcagcgcttcgttctgtgcacctgctgggaaagcatccagcagttccctgcccgactccacaagaaaaccagaggccatttcagagccaccactgaatagtacttgtcaattcccaaagggggcca

SEQ ID NO: 147338 - DNA, 368 bp, Homo Sapiens
tttttttgggatactggctgagaaatattttgatgttaagaagacatccccattcttccaaatggtggggaacagtggtctggatcagagcttcttacagttggatgtgcacacgaatctcctggaggatcctgttgcaacacagacttgggggtgggggaaggcagagactctatgcgtctaaccagctcccaggtgatgctgatactgctggtcagaggattacactttagcaggactcccaagagaatatctacatttttgcagaacacataggcccctggtgatctggcctctacctatctttccaaccccaggtctcatccttagatacagatgcccttgcacactctgggctgttcttggcc

SEQ ID NO: 147339 - DNA, 824 bp, Homo Sapiens
aagataaatgaatatttatttatttttcacttgaacttctactaccgtaaatattgatagataaactcatatgaatgaaagcccgctgagaccctcagccatttctaagagagggtgaagggttcctgaatgcagtgtgtttgcgatctgtcagtctcaaccaatcattcttgctgtgcagagtagttcttgcacacaactaaaccaccactgtctggcaaccctggcaccactgggcacctgtggtcatggagacaggccaggacgttgcaaaggcagagtgccttcctgggcctctcatctgggccgctctccctgtcattgtggctgacagtgcctggcagtcacctgggcgggcccctgcttctctctttgggccagtgttggctctggaggctcctggtgcatctttgtcttcagtctgaatgctgcactcagactttaccctgcaggccattggctctattgcgtttcaccacgaatctgatctcctccgctttatatcttccagaaattctccaatgttctagtctgtgtgacagcacctgtaagccaggtgggatcagtgcggcctgtcgtctgctgttgtcatgtggagctcagcaaacggtgggagtcctaggggacaacatacacagcttagcagcaggtgcccctctcttcgagcctaatttagccaatgggagtttaatttagccacgggggcgtaattgctaggcatagctgatgccctctggtggggccggggggggtggtgtcccaaatctgatggtggagcagcaggggatcccctgtgggtagagaccaacaggcaggctctgtgc

SEQ ID NO: 147340 - DNA, 870 bp, Homo Sapiens
tttttaccaaaaaatgacaagagaagtttatcaattaaaaagccatttaacaaaagacgaatttatacattcctttgaattatgtccataaaaaatttaaatatacaaattacattatcaaacccaaaagaatctttctaaacaaatgaaatacagatatagacaaagtcaggatccaaattttttttaaaagtttttaaattattttgtaattacaaatgaaacaacaaactgacagttttatacaattgttaaagtttcaaaaaagttcaatgatggagcaatagtatcacaatttatttaagtactgttcacaaatgtttatgcttttgtaatatacctattttaattttgttaatgaatttgaagagttaatgttgaaacaaccaaaaaaatagaaatgtatttattcttaaaaatcctaattttgcccatgtgtctacagttgtgaattacaggaacaccctccagaaaaatcaggtatttggtaaagcaaggcacataggaccagattttgataaaggtgcttgttctctgctcctataactactttaaataacctggagattcttaagatgactttcaatatagcataaataacttttataaaccttttttatgtaaagcatacacccatgataattaaatattataatgtgaatgtgtaaatcaaatgagtgatgctaaaccctttaagaaaaaacccaactcagtttaatgactatacaatgaaatttttaaagttcaataatttgatatgtaagaataatcagtattacagtaagtgtagagaacataattagtttcctttcagattatatcttacaatctaaatatcaagctacctttccttccatgaaattatgtgcc

SEQ ID NO: 147341 - DNA, 707 bp, Homo Sapiens
  misc_feature (383)..(459): n is a, c, g, or t
accattttagggagcttttatttcacaaaacactttgtatatccattccttttttgatcttgataactccataaaaagacttggattattactgttcccacttcacagataagaaaaatgaggttcacagctagtcaatagaagattacatcatgaacccgtttgcctttaaggtgtgtcttctgtgaacacccttggagatggtttgcctgagacttgggaattcttaacatgtactgtgagcacaggtgggtctgtgccatctctcccggcttcctgcacaagttccctggcaactgaggtcacaccacaaacacatttttcctctcatggggaggctcagcttcaggttttatgcacctgaagtcagactgacaataacnnnnnnnnnnnnnnnnnnnnnnnnnnnnnnnnnnnnnnnnnnnnnnnnnnnnnnnnnnnnnnnnnnnnnnnnnnnnntgttggaacgctagcacctaccccccagtcagggtgcacaaagcagttgaggtcacacatgcacagtggcaggtgcccagaagaaactcaaatgctggctcttgcaatgaagcctataattgtgacttctagccacaggagcagccagtggtcctggtgaggaaggctccgcacagcacaagtcactggtgtggtgactttggaagacagcccacctgcacaggctaaggaggctctattttggagat

SEQ ID NO: 147342 - DNA, 373 bp, Homo Sapiens
ttttaaggctgatcagagaacatttttatttaaattgccattttaaatatcagtcgttttatcttaaagcttgtcctgggtttaacaaagtttaactcacatccacgcgttgtctctccaaacacagcaggcagaaattctcctttgattggattaagatagataaagtctgcttaaccgtgaatcgctaattgtcaaatccatgccaattcggtacctaggagtcaatttttttgcctgataaacaagataattgtgtggaccgttttaaggtggttagtcatctgctaaattggctgaaatgcggattacccagttccttcgtcgtacagagctgcattctgaggagtggggctcggggatacagccccca

SEQ ID NO: 147343 - DNA, 494 bp, Homo Sapiens
tttgacttggtgcatatcagggatttattcaacaagtccgaactctgtgccaggagagcagtacagtgtggaactagagttgaggctttggaatcggtcctgtgtttggagactggactcaccacaaatgggttgagtaaacattggcaagctgtttcacttctttgaactccagtttgctcatctcaactcaatatacatggatttcaggaacataaatctgaggcagaacatgatccacctcttgggagtagtcaggacagcaaatggcagtgactgcattcgtactggagttttgatgatgaccaggattgccctgctggaggttccttcccagaggtgtctgttaagggcagagggatcgctgtgccatctctttattcaccagggctgtcaatctgtaatgtgtagcacgtgattctggcatgtctctctttgcataataattctgctttgcctgggcaggggggctcactaggaccactgcaacttct

SEQ ID NO: 147344 - DNA, 387 bp, Homo Sapiens
ttttaagaataaaagctgtgtttactttcacagagttaattaagaatacatgagaaaatggatgttaacaactttgtaattaaaatttaaagttacatgcaaagttttaaagtgagcattttccaggaagaggtgattttctaagttcttgaatgcctctcccttttgtgaggaggctgcgtcgtgggctgttggtgtctttggcagaaggtgagtctagggttcctgttgtgggtcctttgttctcacgaggacagtgcccgttttccccgtctcatgcttgcccagactgttcccgtgcgcagagagactggcctgtttcacctgcagctgtgctgtttgagctgcagctgtgtagcctgcactggcccgtctgcctggcactca

SEQ ID NO: 147345 - DNA, 365 bp, Homo Sapiens
  misc_feature (311)..(311): n is a, c, g, or t
tttttaagattccgctggagagtctctttttattgtgttacggggtctcctagccctctcctttctcctacccacggcagcccatctctctcctccaggaccccttctttttggtatttcctggagtacggatgaaaatgaataggtgagcagcctctgggctaggccaggcacacaagggtcccgagtgaccttgggagacttgcgggcttctggaaggaaggctcgggcggccaagcaggagtcgccgcagcgaggaagcgccaggaggcggcgggggcgaccccgggggaagggcgggcggggatgcnccgaggtttccgtgacttgggactagtcgccccgaggcgcattctaactgtcgg

SEQ ID NO: 147346 - DNA, 810 bp, Homo Sapiens
  misc_feature (561)..(580): n is a, c, g, or t
tttgggatagcttttttaattttcactggagtcgattgtgctagggcttggttttgaggatctgtgggtaaatgctgacaggggtgggtgcagttgcctaggcacaaatatctgaatagagcagatatggatgagtggttccggggaggaaatattatctgccttcttttcattctgcttcatgctaggcagggcaatgatgattggttttcattcagcttgtgctccaagagtacctcagaaaatggggagccatttttccccagttttggtttttagaggtttatatccccaactggctatggttggctggcagcctttagcttcagtgtagccacacatgatttcacgtcctctgtacattctttggcaggaacctgctccttttacttccagtggacacagagcacttcagctatgggcatccataactacttcctcctggatctgaggctttcttggctctgagagcttcctgggtttgctgacctcacccctgtgaggaggaggattggcccggctgctgaaaacatacgtgtaattgaaggaattctattaagnnnnnnnnnnnnnnnnnnnncacaaacaacaaactcaaccagatacatcttccatggccattgttcaatgctgggaatctgtggttcggtgccatggtagggaaggaagagtgactgtgagaggcatttcctcactgaagattataaagagcgggtgaggctggaagtggccgagcggaaatggagaatagtgtctccctccaaatagggtgattcagagggagttgatttgagggaaatatgtacaatg

SEQ ID NO: 147347 - DNA, 560 bp, Homo Sapiens
ttttagacaaaggaagacaaatacttcttaaaacaaagactcaggtcagagaactagaacgccatgagagaaatctctacagggtcgtagttcaaggcaattgcacataagaggggctgggctcttcactcagctggggaaagttctggagctcccacggaaacccccagccagctccctatggatggctctcttgatatctggtccatcccgcggtcccggtagcaggagaagtggcaggtcctggggtggctgggtcacctgctagagctcttcaaagaaggccactcgggacttggcgctctgcaaggtgagctttttaatggtattgtgcttgctgctgccacccctgtcggagttctcattgtgcagaatatccagagctgtctccctctctttcagtttcaaggcctcgatttctgtcttgagttcattgagctgctcctgcagatgcttgctcttttccatgtattccactttttctttctctatctccatggaaagcagcttcatgtcagtatctttgaagtcgaaagacaggctgtcaccaatgaggttga

SEQ ID NO: 147348 - DNA, 580 bp, Homo Sapiens
catttctcagcagatatgtttattgttacccacactctttttctaaaagattcgaggagtatgagatatttatgtatttatttctgaagtctgcctgtgttccagtcatgaccattcagatgctgagatacaggataagcaggaagcagatgtttctgtccacaggaacctccctgtcttgagtagacttctttttgagcaaggatatccagaagtagagtgttaaggcaaagcaaaagattctttagactgcactcaagtctgtctttataggcatttcttgcttgtgtagcatggaaaggaccactgcttgctcagtgtggcttttttttctgctatgctggaccatgtaagtagccattgagataatttattctctgaggtcttgcccaggtctctgcttcttcctccttgttcccagatggcaaacggacatcctcatagtaagactgggctgctttccacctgcgcagccccatggtaagcacctttatcccgtacacaacaggaactacaggaggttttcaagaaagggagtgaagtcagattcatagttgagaaaaacattctagtaactaag

SEQ ID NO: 147349 - DNA, 311 bp, Homo Sapiens
catgaaatgggtgaaggtatacagaagttggcttcagagctggtcatctcggataaacctgttgccctctgagtttttcccatagtaaacgtagcgacacttccccaggacaccttggtgactggtgagttccctggaagcagaaggcaagggcgtgtagtggcgctccggggagctggcaacgtcctcactagaagccttgggcttcaccaccttcatgaagactcctctgaccaacgcctcctctcgttcttgtctggttactttctgggcatccagaaatttcaagttgggcagcttgtacagaacaa

SEQ ID NO: 147350 - DNA, 791 bp, Homo Sapiens
ttaaagagctttgtatttattctgtcttttgaactgaacttaattgcttaaaggatacaacacttaaacttctttaaaaacatcaagattaaagaatatacagtataatgatcacttctctagttaggtcttgcaaaaaaataataataacaacactgggttgtgtgttatttccagaggcatcttgatctttttgcaaatcagagattgtttgaggtttgcctggagtcactgaaaagcccttacattaactttataaagtgaaatgtatgttggtaaagtacaggggccaatatttcagaaacatacagtagaagaatctatttaagtctatctaaaagccctcagtctaaaatcaaaggtgctataaaaaaattataaggaatcctttggagtaacaggaaaggatgttcatttaatttaatcaaggagaaagatgagacttttaagacaaaagctggtaaaaacataatggccagcaaacaaacagaactgaggtgctatatgcctgtcagtgcttgaatatttatctaaacagttgtatttttgtgacttaatctttaatttcataagagtgaattttattagaattttttggttagtagaccttcaaaaattaccgagaaataatcactatatagttatcaaatcgttttcaggatatgtgcaaacagcctcctttatttgattgcaaagtataacaaaaatatcaatccaagactcttacaaaagagtgcctcgtgccgcctcgtgccgaattctggcctcgagggccaaattccctataggag

SEQ ID NO: 147351 - DNA, 357 bp, Homo Sapiens
gtaattggaccaacaataattttacatatttatggggtataaagtgatgtttcaatatacgtacacattgtggaatgatcacaccagagtatagcaattagtatatccattactttaaatatttataatttctttgtggtgagaacatttaaagttctctctttagctatttcgaaatacataatacattattattaactacagtcaacatgctctgcaatagaacaccagaactactcctcctatctaactataagtttctacctgttgaccaatgtatcccttttttctatactcacccctcccctcccagcctctggttatcaccattctactctctacttctctataagttag

SEQ ID NO: 147352 - DNA, 616 bp, Homo Sapiens
tttctctgttttagatatgggatctcactttgttgtccagactgttctcaaactcttgtgctcaagtaatcctcccaccttaacctcccaaatgctagtattataggcatgagccaccatgcgtggcccttcccaagcttggaacttccttacctgggtcgtagatggactctaggagatctccaaacctcctgaaattgtgtgcaaaatattgtgtctgtatatgcattttctagggatgcggtttaatattttcatgtgattcctaaaagaatctgaggctcaagaaaagagggcatcttaatatcctgcactttcagtcattgagggcatgatcacaaagatcaaagccatttttaggcaggtgagttggagtggcagtcagaagtaggtaagattttctatttgtgaggcaggaacaagggattggaccattgttcttaaatactgctttcttacccaaaatgcaaatctgtgcgtaatcagtacacagcaaaaatatttactgtattttgtttttccccttgggtacatttggcaagtgcctttttctactataaccggcgtttttgtatctctttatttgtatctcaaactcactgggacttacaatctt

SEQ ID NO: 147353 - DNA, 364 bp, Homo Sapiens
tttcaagattttgactatcttaggtccttgcatttgcatataacataacatttcatgttagattattaatttccaccaagaacccattctgagttagaagtacgtcaatcttaccgatcacttaggggagaagaacagctttacaatattgagtcttgcaaccaaccaagtgcatgacatatacatacatttattaagcttcttaatttctttttttctgtttcgtggttttcaaagtggagatcctttataccttttcttaaacttatacatttttatatttttgacactattataaagggtatatatttttaaatgttattttccaattattcattgaaacaatatagaaatactgactttg

SEQ ID NO: 147354 - DNA, 466 bp, Homo Sapiens
taaatttttactgaatgaatgaatacacaaatataaagaaaatgtatatttgatattatggaaataaaacataggtatgaagagaaatattttacctaaaatacatatattttaggagtttctacacaggactaggcatcagaaaacatatgttccaaaagtgtgtcaagggtcaccatggaaaccacagggcacaacatttgtgtcccaggcttctggaacactaaggaccgaaagaacgtgagtgagagcaggggaatttaggaatccattgaggatgcctgaatggggttgttggccctgatcacactctagagacaggcatatcatcacaggcaatcagaaatgaagaaggacattaacttgtaccctgtggaattgtcttcagttgataaaaaggacttctctgtgagtgtatattttaattatgctgttagctaggagtcaattaaattacaatacctag

SEQ ID NO: 147355 - DNA, 791 bp, Homo Sapiens
  misc_feature (143)..(488): n is a, c, g, or t
  misc_feature (520)..(537): n is a, c, g, or t
  misc_feature (655)..(693): n is a, c, g, or t
cgcgtatttgtgttcttttcaggggggggcccttggaaaacccccccaacccgcctttttacgggtcctgccctttagttcccttttgccaccatgttctttcttgggtattcccctgattgtgtggttaccggttttccccnnnnnnnnnnnnnnnnnnnnnnnnnnnnnnnnnnnnnnnnnnnnnnnnnnnnnnnnnnnnnnnnnnnnnnnnnnnnnnnnnnnnnnnnnnnnnnnnnnnnnnnnnnnnnnnnnnnnnnnnnnnnnnnnnnnnnnnnnnnnnnnnnnnnnnnnnnnnnnnnnnnnnnnnnnnnnnnnnnnnnnnnnnnnnnnnnnnnnnnnnnnnnnnnnnnnnnnnnnnnnnnnnnnnnnnnnnnnnnnnnnnnnnnnnnnnnnnnnnnnnnnnnnnnnnnnnnnnnnnnnnnnnnnnnnnnnnnnnnnnnnnnnnnnnnnnnnnnnnnnnnnnnnnnnnnnnnnnnnnnnnnnnnaagaattcggcacgaggccgcatacgcggtcnnnnnnnnnnnnnnnnnnaaaatagaaattttgtaagaaggcaatattaacctaatcaccatgtaagcactctggatgatggattccacaaaacttggttttatggttacttcttctcttagattcttaattcatnnnnnnnnnnnnnnnnnnnnnnnnnnnnnnnnnnnnnnntctctattaaaatgcattcgttgtgttttttaagatagtgtaacttgcttaaatttcttatgtgacattaacaaataaaaaagctcttttaatattga

SEQ ID NO: 147356 - DNA, 492 bp, Homo Sapiens
gaaagaataacacgcaatttattgcaagctcattgcaggttagacactgtgtaagtgcttctcatgcattagttcactgagttctcaccaccctctgaggctgacattagtgagatcctcatcttacagaaagagtttacgaggtcagctggtttgcagaatgtcacacagctagtaaatggtgtcactaggacttgtactcaggtctgtctgactccgggccctgaatgcttacccactagactagactaaaatcctaatggcacattagactgactgcgagcagccctcttccctctcaggacctcagcttccctcccagctgatggagaggatgagtaagggactcgatgctgttcagaccccttccagcttgagcaaactctcattcttggaatgaagcttggctgagagcaaattgtgaactcttgaaggaggcacttagtgacagtgccgcatgctgctccctggctgtgagacttttctcctgct

SEQ ID NO: 147357 - DNA, 514 bp, Homo Sapiens
aacaattttcctactctccaggttaagaggccttcatctgcctctttatggacatggggatttcagaatttatactgacaagtaacttgtgccccccatgatttctaccattgtatgttggatgtgtatagggagactgtaggcagattcttagttccgagggctacaaggaaccacattcagacctgacagagaatatccttttattcagagatcctgaacttagagctgtatacggtgatcagatgggactttgactgtttctcttggagaagagtgaatgtcttctatatgcaggtagagtgaaacatatttggtgaccagaggtagagtatagccaagaatgctactgcttggcaatatgagctatagcttccggcctcctttaaaattaggagtggtcaattggctgcattctggtcaactgaatataaatgcaaaaggtttaaaggaaatgattacagttgccaccatctccttgattattaattaaaggcttttcttcaattatcaa

SEQ ID NO: 147358 - DNA, 781 bp, Homo Sapiens
agttgggagagatggaactaatatttattcagtgttttactctgggttagacaccatattatgtgctgagcatatcttctctgcataattataatgactctgcaaggttgccatgctgtcattttcttgtttttactaatcacaaaactatggttcagagagattaattggcccaggatcctacagttaaaaaaagtggttaaaccataatttaactccaagcctgccaggctcccaaacgcattctctttcctctccccatagtgtttttacagcaatactatcaaaatatgggatccaataagatccacttgaagaagtcagatttagttgtgttttcactccagttgaaatttatttttgagaagactcattaggcctagagtttcttctagttgaagtaataatacttgttttcctcatcaagtgtttgaaggcagatctcagttaaccatggccccaggaccatagatgagttgattggcttctttatcttcatgaaattgacataagcagtacctactctgtcaggtctgttcttctagaaattactttacaatacatattttgcaacacaatgtacaatgcaaatatgctatgcatatggactatgttatactaattagattcagcatctatttagagagtgtttctaattggtttctctacttgggaaaataagtcgagggtaaggagtcttactgtgaatttaaatcaaattaattgtagccttttatatcagttatgcctaataaaatgttattttcttgaattaattaaa

SEQ ID NO: 147359 - DNA, 1881 bp, Homo Sapiens
gttctcggggtcctcccttcctgtacggggagtctgtccctttctcaggcggtgccctttactactttgtgtcctggttgttcggtctccagtgttgctcccttctcctccgtatgtgaatggcccccattggtgcgacccttcgctggagccagagtccgctcctacctcgtccctgccccgtgcccctggggattccctgcctcctcagcaccggtatattgcctgacttttcgtgattggcccccgattctcccaattgcgcttccatcactctcacaggaagcaaggcagcccttgagtcctctggtctaaagagcccctctagactcgactttcccaggcggcctctcgaatgtgcttcaatgggacagtccggtgatgcgcacctccggcgcgctcgggaggccttcagcctccgcaggaggctcatcttgccgtcccgtacagcatagaaggccaaggcacggtcagcgtattccaggcagaccccacccgtgggcgagaacggggtggggcaggggagcctccagcccatgaaaccagacggacgaatctgcgtccacttaccacctagcatggcatgcaggagtcgggtcgttgcggcccagccggtcgcggtcgtagggctccttgtgtgggagaacgtcttcggccatgacccccattgctgatcccagccctcgataatctccacctcccagtagtaggtgcctcggtccagggcaccctcgcccagcacctgctcacaatgggtgaagacgggtggagcgacatacgggggtagttgataggacacagcaccctcttgacacctttggttccaaacagctgcaggaacttgtctgctgtgtcgctgtccaaatccacaatataggcaaacttgaggaaatagtccctgggagcttcactctccaagaggttcgtactctcgaggtcttggggctcagcatcagcttccgagtccagcttctgtggcccatcctcgttgccacccggccccctcagctgctcccactggttgacgcaggccacggccagcatgtctctcactgcacggacagcttgggatgatttggtgaagctgagctccctcgggggtccaggcccagggccacacccatcctccagggccagccttagtgccagcagctcctgcaggaagctgactgagtcagcttcagggacctggctgagattctggcgggctcggctcaggcggctgcgctgttcctcctgtcgccgcaggtcaccctgggagcggcctagcatggcagcttccccctcctcgatgaagcccagcacctgggtctggaagccctgcagggcggccgcagcatctgcaaacagccggctcaccctctcccgctctgctacggctgcactcttgatgagggccactgtgcgcctggactgtgcaatgccagcacccagctcgtccatgcggtcctccacggcgctcaggactttggactgctcagcctcctgaagcgcgcgctcctgctccagcggcaccagctcgtggccgcggtgctcctgtgcggcgcaggcctcgcacagacacacgcgctccgcgcggcagtagcgctcgagcggccgtaggtggcgcgggcacaggctctcctctagccggcgcagcggcggcaccaggcggtgtccgcggagggcggggctgcgctcgtgcgggcccaggtgcgcggggcaaaaggaggcgaggcaggagaggcaggacagcgcggcgggcagggccgcgccctcggggcacgcgtcgcagcgcactggctcttcgcccgcgggccacggctcgggagcgcagggggccgacggctccgggacactgggcagcgccctcgtgccgaattcgccacccaggcctcgcta

SEQ ID NO: 147360 - DNA, 489 bp, Homo Sapiens
gtatttattgatctaccaggtgaaaaatttagagcccacaaaggtaaactcaaaagggggattgggaaaatggataattttcaagctatattgaagcatcaccctcacaagtcaaaatcccaatttaacaattaagctaaataaagatgaaattctttctgaatacgtcagtatttatatttattagatcttactgttcaataagtcattcaaatcatgatcaaaagtcgttattttattattaaatacaaatatttaagttgggttttttcttatactagcttaaaattttattctattccatcaaaagctatcatgctcagttttctcacgatcatactcaaatttcaatactatcataacttatttctctgaattatatacatatggtttattttaatgatttgtggcatttaatgaatgttatacagttgttcattgttatttcagaacaatgtaagtttagaaaattaaaatgttcaaaagttt

SEQ ID NO: 147361 - DNA, 462 bp, Homo Sapiens
tatgtttttggtgattttatttaaataattagaagaaattcatcgttgtctataatgaaaacaaatcaggcaatttacttacaatcttgtaactgaaaatacatacaaattctgtgcaatcacaccaagagggaaaattctgtaggggaaaaggacagtaatgactaagaaactccgaagcctcctgtgtaatattttaaaaataaaatgttttcattcaaatattttaaaaaataagccatctaattctgaagaaatcagtttctaaattacatttttcattgattcatcacaactcattttgcaaaatcatcagcatggaccacgccaatgaggagttaaatgcctacactgtatcttaacggtattgtaatattccaatcatttcatgaaactgatataaatgttctgtccagatcaaagaaattactttgtaactgaccaaaccagtgtgactgtctg

SEQ ID NO: 147362 - DNA, 621 bp, Homo Sapiens
tggaagcccctggcctaggagccccattcccccaggaacacatccagtttcaagaatgtcgcagtccagatgtgttgtactaatcacaggtcataagcagtgttgcctgtaatatagctgacattcgacaagatttctaaggaaacagttctggaaagttaacctgtggatgttaagtcctgcttcattgttgggcacttaggttgttttcaatttagtattatcccagataacgctgctctgttgcttcctagggtgcattcctagggatggaattttggctgttgcttcagttgtcataagccttccaaaagatctttattagcttacaggtcctcccaccccgaattgagtcagatgccaagaaatcctgagctcagagactggagcatgcagtgagtcaatgaggcagatgagggtggaaataatgctttcctggatgaaatactggtggctgtgggctgtggatcaagaggagccctaagcctacgacagtgcactgaagctagagatctaggattcaaatttaagataatgaatgggatgatcactggcctcttccctgagcctagttatattgtaggcaggagtctctgaaaggagtttattttaggacaagta

SEQ ID NO: 147363 - DNA, 456 bp, Homo Sapiens
tttgaaaataaaatagacattttattgttttgtatagtataaaatgctttaaatcccttagtgaaaaatattcagtgacatctaaacttactaacagtcttcccctcacacaccatacattggtaattgtcccatgtagcttgaaattttggtagtcttgaaaacctttagttatttctaaaaaatcagcataacttttagatctttgggagagtttttctttcaagttaataacacattctagggctgaaaattgagaatacataaaaagagtaggttttgctcgagcacaggaataaaaccatttttaacattcattgtcccttacagatatgttttgttgcactagtcaaactctcaaggaaatatttctcaaacatgattcatatcacactatctgacatgtttcttcttaaattgaaatagttgtaaaggaatcaatagtaggagaatata

SEQ ID NO: 147364 - DNA, 602 bp, Homo Sapiens
  misc_feature (378)..(410): n is a, c, g, or t
  misc_feature (583)..(583): n is a, c, g, or t
tttgttgattttgtttattgtttaattatggggaccaaatataactacacttggtaaaaagtctctacatcctgctttgtctccttagctctgaagactcaggacaacgaaacaaaaccctaatgccctgaattcccaaggtgagaaagcactggttacctggaagctcttgttgttactgaaaatcttgtcgaggtgcttgacactgctactcagtgtcaaggaaaatcaagtcaggataatcaagaaatttgagttctcctttgctgatgaaagactgcatacagacattatgctaaccacaaactttcagtttcatcattaagaattggaggaagaggagctagtgctgggacagtctaagagacacttagcagnnnnnnnnnnnnnnnnnnnnnnnnnnnnnnnnnaacaataattctcatctcaaaaatgtgtctgtgtttggatgaaaaacagcatgcagatgattaactgaagatcttaaacaaattacatttaaattaattctaattttccttcagtctctgttttccacttagatgcctttctctattgtttgcatgagcttgctgttttcagncttgtgttttccaatttta

SEQ ID NO: 147365 - DNA, 528 bp, Homo Sapiens
ttttgatcttttagattttattattttattgtctatggttggtagcatttaatgattcacctgaacgtgactttgaaacatacgctatggcacaaaaacgaattccaattccaattaatgatgggaagagaatgtgtggcctgggaagacctggagtctgctttggagttatgtcctcacctctaaccctcatggcatacatttgtgtaacttttgcaagcttggaagaacacgcatgcctgatgtccacaccccacccgctggaacctgtggattgcttgcttacaccgcaccagggactctgcatagggaactcggtgatgaatcttgagatgggagatgctcctgatgacctggtggggcccaggtaacctgcagggtcctccaagcatcacaaaccacctcgaaaagcaacaccacacaacctacatgctggaccgctgaggggacatatacccggccactgagcggacgcacgcagggcccctgagtgacgtggggacgcacgcgggggcgctgagggacgtg

SEQ ID NO: 147366 - DNA, 906 bp, Homo Sapiens
  misc_feature (879)..(879): n is a, c, g, or t
ttttaagtgcaaatcatttatttgaaaacttcaggaaaccaataggggaacaaaagagtgagaaagagaagggaaacagctcaaaaagtagcctgggaaattctagggagagtttatttcatttgaaggggtaaaggagttttggaagtttacaaaacaccaactcccatcactggttgtaggatgccatgggacagcattcattcctcacatgcatatgccatgtgtcttagcagaatggcttgtgaagttggggaagccataggcaaagaaatgcaaatactggctgttggaaatagttggaagtcaagtgatttcagtctgagggctacaggcagggcaaggacctgctatcatcttaaaagagcagcaggatttgagctggaattagcaactgcttcgtcctcttcaactcacctgctgccaatgcccagttgtcctttctggtgaatctgagatttgttcacttgttaggctcatggctagaaagggcacttactaagtggtggcttcctgtctttcttgaggcaggcacctacttccctcacagacaccagtgtaggaaagtcagatcgtcctcctctggaaggaggaagatcaagtctgcggggaccaggctgccgatttctggagtttgatcctggtcttgcagacactccttctatgtgcagccatgttatgggacttgccaaactgtcccagctcacagggaactgcaggtcttctgtggatttggtcagttggcccaaattacagttaataattacaagacattgttgaaaatttttgcaacatgtaacttttgtaaccattatttactactctacatttgcaagtattttgggaactgtttgtcctttcaccagactctttagtttncttgggaacgctaaggtacataggatt

SEQ ID NO: 147367 - DNA, 810 bp, Homo Sapiens
  misc_feature (99)..(99): n is a, c, g, or t
gagacaggtgtttgcattgtgtcaaagaaaatgctcacataggtgggtctcttccttgtccactaaaggatccccctcactggtcagggattgctgacnccacaaccatcagcagggtgaccaggtctgctggtgcctggtgactggctgggagaagctaggcaccaggccgtgtggcgagcccgttggtagggccagtggtttcaggggagctgtgctaggagttgggccaagggcagcacccttccacatgccaacgagggctgaaaaaagggccttcctccacagcccaaagagctggtgccatgggaggacatggcctataaccaggtgtaatatggggcagccgctaacaaggaaccaaatcgtagagactgggaaaagcatgatgggccggatgaaaaagcaaaacaccaaactgaatttgtgttgtgtggacaaaggctagacttcaatgtggaacaaaggaaagtttaatttcccgagatgtcaggaccctgggagagcttttttcctctcctttggttacccaggaggcagcacggagcactggagagggagccctggagccaggatgccgtgccgccgccccggcccctctctgcagagctaggaggcagcacccaggccatgagggacaaatgtggagcaagggatggagctggaacttgctattatgggacgttaaagctggcaggacctgaggtagcatctaacccagtggttcttaccttggctacagcactaaaggctcctagagaatctgtttcaccatattgatgcttgaatcttaaattcagctgattagtt

SEQ ID NO: 147368 - DNA, 597 bp, Homo Sapiens
tttgttttcacattatttgtttattattgcaatggccaatatttgctgaggaactctaatgatgctaagcacttcatgagtattaactcacttaaacagcaagaaagaaggtctatgattcgggatgaggaaccagggcatgcagatattaaataacacgcacagctgtaagtgttagtgcgaggctggagcccagactccacgcccacactctgcatccctcactgcaccacctccagggcccacacagccccctcctctgacagaatctggctgtctgtgacttcaacttctgaaagatttcctgagctggagattactgaagaactggttattaaaaactgttattaatcctttctgagtagctgttattagtaaatccaggtgaggtatcttgacaatgctcttaatcacatctcgtcttctactacctgaaattaaaattcgcctttttctagacacaaagaaaaccaaattttcttcatccaactgggaagcaataggatcttcttcagaggagaagtatccaaagatctggatttcatattatgaacatgaaatgagtctacctcacaccagtctgcagatgcatccgtg

SEQ ID NO: 147369 - DNA, 611 bp, Homo Sapiens
cttttaacagcaggtagtttagagttcttaaaataactttataaatatataatatagtaacatagataaccaaagtggaaaaatttcaagccagggtaccagtgtataaaatgaaacttttcaagccatcttaacaacagttaagtgagcaaaccaccaacgctgaactctcaagctgtgttttaaaatacaaagcagcccgcagcaagttctctcttgtccaggcattctgtatgtaaggccaggaggcttctgcttctttcctgggttttgcttgctaggcacagctggaagggcagagggccacagctgagctgaactcgctgtcaaatttgaacttcctagaaaaatcactgcagaggaaaccacatcaacctactgaagatttcagatcttcagaaatgtcacggaaagtccgctgaggctgagcaggccatggggtctggtttggcgtgggaactgaattcgtgggactcactagcatggcactatagatattggaagcaaccacaagtatgcagagaagaataggaccgatgattgctccttccaggcctaggtagtatgctccaccggccactgccaagcctgtcaggtaaggatggccacct

SEQ ID NO: 147370 - DNA, 976 bp, Homo Sapiens
ctccaggcagacccataaagcaagtttttgctgggcatgttatttgcatggtgaaaagaacaaggcatctccttattgagggaaacacacataggggctggggtgggcggggctgggctgatgacccagcttcctttcacggctgcaggcggaggggcagggcctctcgctgatgttctagtgttcttcccggggttgtgggagtgagggtgtcctttccccgggtgcgtgggagtcggtgctgcgccaggactgcactcggaagcggcctgtccctctccaggcgtctgcagtggatggcaatggcttcgggccacagatggcaggcagggcaggcgtgtcctccgcgctcagttattgtctctggtgtccgaggaggcacttccgaacaagatgtcactgtcctgggacacgctcagctgcgacttggttttgatgaggaactgcgccctccggaacatcaccctctcttgctcctgcttgagctccaggtaggagcgggagaaggtgtggaagatggaggtgactgggaaggccatgagcaggatgccgctcagtatgctgctcagggccactacctggcccggggtgctcctggggaccatgtcgccatagcccaccgtcgtcatggtgatgacagcccaccagtagcaggcagggatgctggtgaactcggggctgtcggccatctcgttctcgatgacgtagagcaggggcgcgaagagggcgatggccacgcagaggaagagcagcaggagcccgaactcgcgggtgcagcggcgggccgtgagccccagcgtctgcagccccagggagtggcgcgccaggcgcatcacgtacaggatgcgcagcgcccgcagcacgcgcagcaccagccccaccttgtccaggtagctgttgcccgcgccgggcttgcgacggcccgcggcggcgccgtccaccagcagcgtgatgtagtagggcaggatggccacca

SEQ ID NO: 147371 - DNA, 403 bp, Homo Sapiens
ctttctaagctgagagttttcactgaagggaagaaactgattttacaattaattaagagatgaaaaacctatagcttagcagttaaacacctgggtcctagacccagataggcctgagtttgagcccagtcacctgcaagctgaatgttcttgatcgttatttaaactctcttagcctcaggtcccccatcttcaagtggagaagacttcctgccatagtacacaccacagcagatcaccaaatgtttccagctctctgctgctgtggacacttcctggcttactgatttgtgagtgagtggggccatgtgattggttctagccagtgagttgtatgcaaaatgaagcaaatcacttgcactccaaacacttaactggcagctcaagactattcagagcattc

SEQ ID NO: 147372 - DNA, 378 bp, Homo Sapiens
taatcaaagtcataatatcttacctatcaagtgtatcccttctcatatctattattattataaatgtatctatttttacaactgcatctcttgtgttctttttaatggcttggggcagatagcattttatgcctgaaataatatctgaaagatgtaatcataaaccagtgtaggggtgcctcccacagatatcctgattcttaccctgatccggcacagtgtccagtggttacttttgtcaaaaatgattatcaaattcattttgtaaccatttctctggcgagtagaagagtgttctagagagtgtgtattttacattactaggaagaaaatgttctcaagctacatgtcctgttttacatttatggtaatttcttc

SEQ ID NO: 147373 - DNA, 512 bp, Homo Sapiens
agttcattttgtgtttccaacttttcatgtaaaattttaattatttttgaatgtgtggatgtgagactgaggtgccttttggtactgaaattctttttccatgtacctgaagtgttacttttgtgatataggaaatccttgtatatatactttattggtccctaggcttcctattttgttaccttgctttctctatggcatccaccattttgattgttctacttttatgatatgttttcataagtggttaagcaagtattctcgttacttttgctcttaaatccctattcattacagcaatgttggtggtcaaagaaaatgataaacaacttgaatgttcaatggtcctgaaatacataacaacattttagtacattgtaaagtagaatcctctgttcataatgaacaagatgaaccaatgtggattagaaagaagtccgagatattaattccaaaatatccagacattgttaaagggaaaaaattgcaataaaatatttgtaacataaaaa

SEQ ID NO: 147374 - DNA, 604 bp, Homo Sapiens
cctttcccagtttgacttttgccatctagagtttgtaaattaagtggtcagatctgatctagcttccttgagaggtgccttacttcaaaagttctcagactgaaaaaaaattcgcccattttttcaaatctttgatggtttcatttcgaatgttttagtctttgctcagtctggattcccttgctgtcttcctgtagccccatctgtgacttcctagaactccagcgccgttaccgcagcctcctggtcccctcagattttctgtccgtgcatctgagttggctatcagccttccccctgagccagcccttttccctccatcatccaagccggatccaggtctcttctgaaaaggaggcagctccagacgctggtgctgagcccatcactgcagacagtgaccccgcttatagttcaaaggtactgctgctctcttccccggggttggaggaattgtatcgttgttgcatgctctttgtggatgacatggctgagccaagggagacgccagagcatcctctgaagcagattaaggtaagagctggagagcaggaggagatgcattcacgggtaatgtgcacaacctgtcatgttttgagtgttc

SEQ ID NO: 147375 - DNA, 225 bp, Homo Sapiens
aatacatttttgttatttaagctacccagtctgtggtgctttgttatggcaatcccagaaaactaattaactaattgactgcagccttgcaagggaccctgaaccagaggacccagttaagccatgtgcagattcctgactcacagaactaggagataacaaatgtttgttgttctaaggtgctaaatgttgggaaaatatgttatgtggctatgttgttttgca

SEQ ID NO: 147376 - DNA, 657 bp, Homo Sapiens
ttttttgaaggttttgcaaagcgtgttaaagggccagcatctgtatcagttgaagggcttaagagaagtgggcagtgggagcgggtggggcagcgcgtcctccgtgagtcctcctggtccttcggctgctccaacaccctccacagctccagaatctggagacggcacgtgcaggagccctcctgggtgttccagggtgtctcgggctcactgtgatcaataccggaccacatgccttagtccacccgtctctctccccactcatttgacttccaaatcccatgggttctgcctcctgctccctccaggatgcttccatggtcagcgtgcctacggtgccatcctcttctcccacctgtgaccggcccttgtccactctcaagggtctgctttccagggaagccctccctggctacctgcagggagatgcagtcctcttgggcccctgcctgtgttagagtcggtgacagatggcctggaggatgctggccaccgttacggctgtgtggagaaggggccggggtgggacccacttcacagcagggcgagggaccctgggcagttggcctggagcccagcttcatctgctgcactttgcttcagagcccacacctgtctcttcaaggctgaagctggtgtcagctggactctgtcact

SEQ ID NO: 147377 - DNA, 449 bp, Homo Sapiens
tttcttttttaactttcctatggtgctgaagttcttatcttttgaaagaagtttctttgagttgaggaggaggctccttccctcacccagtccaccaccacgggccgatggagaggctctctgctttctttctgtctctttactctcggctagttgggtctgcccagaatggaataaagaggctgaggtcaaaagagcacatgaaaagccctggcttgctgccactcatgccacggctgtctctgcagggacatgttactcagattattttggcatgaactgtcaccatgaggagagtggtgggaacgcatgggcaggtgctatatcattactaaagggcataaaataatggggattattctctgtggccttattcaatttaaggtacagccataccttgaagatattgtgggtttggttccagaccaccacaatgaagcgaatactgc

SEQ ID NO: 147378 - DNA, 427 bp, Homo Sapiens
tcagccgctcacagcctcctcccagcgcccatcgccttgagctgcccactacctctagactgccctcccgggctggcgtcccacggagtctcagccgcgcaccccttcctcgcgttaccctccttccggacagcaccccctcccttctccaaacctggagtgagaagggcagggtggggaagagggtagggcatccgtgaagttcaatggggcggcacccaccccatcatgactggcggcaaggatgtgggctggtccctcggttaaggacggggccatttctcccttcccactttgggtggaagttgaggcgggtcccgggaccctccggaaaccccctgcctcctgaagggctggggaatgtgctcagtctctttctcctctccccttattaaaaccgcccaaccctggtgttgtgacacacact

SEQ ID NO: 147379 - DNA, 392 bp, Homo Sapiens
  misc_feature (219)..(228): n is a, c, g, or t
atcctttttccatcattttacagtgaccttttcttcattttggtttatttttgtaatgtgaaaagtatcactctaaaaaacatttttaatttaacaaactaaaaatattcctccaaatctcttgcttgtcattgactcttgcgtgtcaatttccctcaggttctattttcttaaaccaacctttaaaattgtcacctctgttaaggttgaactttgccnnnnnnnnnngaagttactttgtaatttttggggaaaaaagcacatacattaaaactaggtaatgttttgtatatacagttattttggatatattattgtaagttgtacaaatgtattttgaagaatatttaagaaaagcacttttgttattccatcaataaatgctctatttt

SEQ ID NO: 147380 - DNA, 614 bp, Homo Sapiens
ttttaaaataaatgtaaatgtttattgtttcctgcatgctaaaatgtatcaaatatctttccagcagagatgggctcagaggtccaaagaaacagctattggtccttattgtgaccaaaatctttggttaaaaactagtaatgattgtacatcaccttcatatctttgttctaatgtcgttaataaggcggctccacaaacaggactaagtagggaagtgatcaggttgcagagttgggagtgttgttttcttctgaccacaggcagaactcatcactcactcatcttgaatgtttgtttctattttgcacatgttcagtacctgggaaatctaggttctttggagaaatctggagtcctttgaaacactgccaattgcaaatgccttatcttgcctcttgacagtgccaattctgttgcgtcttgatccctgtccaatcccacctcagcaagctatgtttcacacccccatttccagcacgcttggaggagcacccagagatttggaagtaggctcaaagcttatctcgactctccagacatcagcagtgtgaaaaacgggactttttaaaataacatttcctactcttcctgcttctggtcaagccaaaaat

SEQ ID NO: 147381 - DNA, 445 bp, Homo Sapiens
ggaatgaataacttcagtctttattcactggggggtggggtgggttggggcagggaacggcatgcccagcatgcaacacaaggcgtgggtggagtggattcacagtctttttggagaagagcaggcaggaagcaggttggctgtgcagtgtggcctgagaatgagctcagaacaggaagaggggaagaggaactgggctggccagaaggcttctttctggaagaggcaggactggagcagggattttgaagcgttggtacaggttggaaaaaaagcaaacataagcgaagagtggagtccggaggttaaaagtctctggataacttttccaagcgggtggaatgggagtagggtgaggaaagggtgctttgtctcagaaccagtcctttagttcctgactctgtgtggatgagaggctcctccagaggtcgcttttccccaagaa

SEQ ID NO: 147382 - DNA, 460 bp, Homo Sapiens
gtgcttttagtgtatcgtttatttgccttttagtgagttaacattttaaaattaagtggtccatgggaacaggaacgaggaatttaaagacagagtttgaagcatctgctttaaattcatgaaaatgctgtggatgatgtggtacctctgaagatactccagggccagtgccagctcacagatgtagagtttcacagtcccctctgtgaaatgcacattctgctgcagatggtagcgcaggtcgcctcccaggagcaggtccaccaccatgaacatgtcctcctcatcctggaaggagtacctgtaggactccagccagctcgagagatctattaatacaattctacccacgattctgctctttcgaaagtgcagctttcttagttgagttcttccagatgcagactttgagatgaggcttcatctgcaagcaatttattaaggagtgcttccctgaaga

SEQ ID NO: 147383 - DNA, 528 bp, Homo Sapiens
gggggtggttctagtctttatttacggatggagagggccgaggcagaggttgtccagctctgtattccgcgtcagagagaagagctgacccctgctcctagccagggtcagctctgtattccgcgtcagagagaagagctgaccctggctaggagcaggggaaggcagaggcagagatggtctttgtgccggcccccgcacacaccaagtaggaggtggtggcagaagctctccctttgatctcacccagcatcctgcagagaactcttcctgcagcgctttcctcaccttcccaatcacagacgccccggcgccgctgggtaggtcggccaagagtgcctcccattggtctccgcactgtcaatcacctgggagtattgaggggcggggcggaggtggagatccggatccggagcggctgcctttggtgagccttaaggaaaccgctatgactgtcctctggcctgtccattctagttgtgggagagaggtaccctaagttccgctccccctgcttccagaatcgga

SEQ ID NO: 147384 - DNA, 525 bp, Homo Sapiens
tattgaattatttttggtgtgtctaggccaaggaaagaggagatcgtgggtggggaaacagactgagggaatcagaagcaccactgtccatccggaattaaatccacatcccagcatcttctgcaaatatttcactaattatttcctctcggaactcctcccctcgtgctccttcctctggtgaggccggcgctcccctcccaggccgcagcggacagacagggattgggttccgtgtgcctgccacaccaggcaggctcttgcggctcccaactaggcggccttgcactccgcgtgcattggccacacatcctcgcctcctccacccgctccgccgccggttttcttggaagttaaatcttggaggatttgtccacacccgctccctgggccccagggcccggatccagcctgggtgggggggtctccgggcgggccgcagcgccctccgtgccccggggatgctggcgcacagtgcggagcggagttgcgcgtctctcgtccctttgttgacaattccctccc

SEQ ID NO: 147385 - DNA, 447 bp, Homo Sapiens
ggagattttgcttttcccttgtgaaagacggttttaaatagtaaacagacttgctgcccaccttggctgggaaaccaagtcccgtgagtaactagtctaaggccactcaggccagtcctcggggagcgcacgccgcccagctcgctcccaccgcacagctcccaacagctaagaagcaacgccaaggactttcttccccgtcagacatgccctcggccacaccaaactgacatcaaaaccccagttagcccagcctgaccccacagaggctcacgatgacaaccgccctacggaaaaactcaaattcctaaacatctaataaagaagtcctggacgtctccaccttaaaaacgggaagcctgaacgctccggcgcgcccggccgtgtaaccgccacagcccccgcacgcggggcgggctgggctagcgggagatttgagcggccgca

SEQ ID NO: 147386 - DNA, 2318 bp, Homo Sapiens
ctacggtgagtacaaccacttctcatgcgaaccatactatgcatgtggtagggcttaacgcactcgccatctttggcttgcacacaagtcgggctccatcaagtgggcgtcacatagctgtacccccgactcaacaggagacctactgcaagagtaggtctgtgtcctccatggcaactgcaaactcatggacttgccaattcgttaagcacgagctgttaatggtctctgaggtccctgagtttggccatatgagcacaagtttgccatcagtgcaacagttctgctatgtggggccacgggttgacctggcactccagagctatagcgtactaggtcaggggccagccctggctgtgcttactaccttgatttcaagcctagttggggcccttagtgtctttctccacgcagagcccaccaggcaccacttctctgagtatatagaaacctggataggtataaggggtcagggttgggcctttggtggcaccgcactaggacagttgccccaggcttcctctccagctgcactgccacgtcggcctacaagagccccgcagccctgggttcctgaggcttggtccttcccagcttctgcaaaatgccctggcactgccctccaattcagagggtataacatcaatccaagcccctgttcctctttccaacaatgggggggaccttggagtgccgctggagggaaggggtcagtctctctggaagaaccagagctgcacccttcaccactggagtgatcacagcttcaggctctacctggctggcttttctcatgaaggatcccgtctcatctcccagatcaaaaagaccttcttctaatgctgtcccagcatctacccaacaggctgacctgagctgccccgtgtcccccgttcctgtagcctgagacctatcagatgtcatcttccacggagccactgtgctcgctaaggaggtaccacttcagcctgtcgggcagaggcagggctttgaccttcacatccacaggccacggctgaaggtagagccggatggccacacggcacaggtgcttgaggggcgggggatagctctccagctgcctcaaggagaagtggagggcctggatcttttccgccaggctgcccacagggtggatatcgaagttttcgggcagctggagtttctgagagttggtcaccatgagatccaggacagtctcagctttgcgcaggaggtccgcatggctctcgtcttccgtgcagcctgggtgggaacagagcctctcaaagatgatgtgaaagccagaccagcaggacgcaccgtgcagggagcagttgtaggcggctccggactccaggaggaagcgcaggagagggaagtgcagtttaaagctcttcaggcagatgtgggtgagggactcgtgggctgggcactcgctggggtcggccccgtgtgccagcagcagccgtgtgacttggaagcagaagcggttgatcatctgggcctcctctttgtcccctcccacggtctcaccaagcaggaagatgatgcaggtgaacactgtgtccccatctttggtggtggccttgacgtctgcccctccttccagtaagagacgaatgttctcagtattgtggatctgcaccccgtcgctgctggccagagcatggagcagagcagtttttccatgcttgtcagcggcattgacatcagctccaaggtccaggaggcgctgcaggcagggcaggcgctcaggctcctcgctggccaggtccaaggggctactctcgtggatccggtccctccgattaacgtcggccccgtgatgcaccagcagctccaccatgtccggctggttccgcaggacggcgatgtgcaaggccgtgtagtaggtgactgggtcttcaaagttgagattggccccatgccgcaagagaacgtcggccgcccgcgtcagccccagctcagccatcttgagcagggcgttgctgacgccttcctggtaaaagggagagtgggctttcctctccagcagctcagtgagaacaaggattcggctctcctcgctggcgacataactgggccggtccagagactcctgccgctcggggtcctggatccccagggagcccagaatcgcatccaccagcggctggtactcgaagatgatcctccggaagccgtgcaggaacggcatcgccgcgggccccgcgcagcagggcggtcgcgctttctgccgaggccgagatgcccagacgccgaccggaacgctccggcggccgcggaccccacctgctccgccagtccagcccctgcgcccggccgggtccgctcct

SEQ ID NO: 147387 - DNA, 697 bp, Homo Sapiens
ctgcctggagctgagccggccctgccctccagccggtgcagtgttctgatagccaggcctctggtgatgccttctggggagccaggatgctccttgagttttcagggagcagcctgggctgagctatccccaggagccagacagcaccccaggaggagcgggtgtggatggtctgcctggtcaacacaaggagttacagagctttatcctgaatacaaaatgaaggtccccagagttcccctgggggctctgctgaaaagcagagattctttcccactgccatgtttgaatagtttggttagcaattccctgtagtagagaaagcatttgagaaatgttcgtgagatcagaagtcaaaggtgggtctgtcccactcacgcagcactggatcagtcgggctccggggcactcgtgcagagaaggccattctagagaggggagtgttctgctgctggctgccttgccgtctgcccgtgcacacagccagacttttccaccaagttaactgagtgaggtatgaggagtgttctgagatttctgtgtgtaggggcttctcccttgagtactgggaggcaaacctgtctgcgaatggcctaggcagggcagagtagggtggattttccctccaggttgtaattcactgtgtctatgacacaaatgttgtagtcaattaaagtttaatgttttgaactccaaa

SEQ ID NO: 147388 - DNA, 476 bp, Homo Sapiens
tttctaataagagttaatatctttgcttttgagttttttttccaaccttaaatattacatacatacaccaaaaattacatagctgcaatgtgctcaacagcatcctctcggcctggagcttcacattatcaaaagcttagaaaacttgtaaacctctgggcctgtctctgggcactaggagagcccccgccggccgtccccttcggattgagcctgcagtttgtaagcgaagggctgacagtaggccttctagtccaagagagggctggctcgcttggagttcagtgagctgcacgcctgtcccagtgtgaccatgtgatgggggaggggccctagcacttgccctggccttgtgcagctgctcttgcccccagcagcctccgacagaagagcaaggcacctatagctgttgctttccctgcagctccctggtcctcaactccatgtgcatgtgtgaaggccaccacctctcctgg

SEQ ID NO: 147389 - DNA, 362 bp, Homo Sapiens
caacttagttttattctagggtatttttaattgactcttggatggttcaccatttctcgagtaggattccttctgcaggtctcatgattcattctgttttggtgagtttagcaacaaatttcaaatttaaatcctatatgcctccccaagcctctgcacatacatatacttggtgttgagtattagtactatttctagcttcaggtttgtcctaaaaatcatcagtctggaaaaacaatgcatttaaatattcattcctagccatgagaaaagtgctttttaactttggaggaaaatatactgtagcctttatataaaaatggctttaaaaaaagtttttgaggccaggtgcggtggttcat

SEQ ID NO: 147390 - DNA, 469 bp, Homo Sapiens
agcagactagacgccactgaaaatagaataatggatatgaagaaattaagatcttttcaaatttgcaaaagctgaaagactgtcacccacaggtctgcactgcaagaaaagttaaaggatgtcctttgggcagaaggaaaatgcctgccttctgaaggaaataagcactggaaatagtaacaacatgggtaaatgtagcatttattatttaaacctctttaaaagacagttatttaaataaaagtcatagtgtaggatttataatatatgtaagagtaaaatggatgaccacaatagcttgaagattaggagaggagaatcatgctattgtaaagttctcatacacaaggtgacgtgctaccatttgaagatagagtgtgataagttacagatatgtgctgtaaaccctaaagcagctgctaaaatgacataccaaaaaatcatacctattaaactatcaattgataaa

SEQ ID NO: 147391 - DNA, 472 bp, Homo Sapiens
  misc_feature (115)..(158): n is a, c, g, or t
aaaaacaagcaccatcttcatacctgctgaaatctaattctcatccagagggatgtgtggaataaagggcgcagtgataccaacagcgggcgtagacagcccatccatcccacgnnnnnnnnnnnnnnnnnnnnnnnnnnnnnnnnnnnnnnnnnnnntgtctctctgacccaggtctgaccaccatactatttcctgcagatgaagaggagcaacatattgtatcctgtgttgctcaagagagcagaattaggacttagaatacccttctaagaattgctctgtccaccaaatgggtggcagacttctagacaagttttctaaacttgtcagcctcaactacaagtgagctggtgagagaaaacaaacatcactatccaggggcttttgctggacttactgaatgtaacagagatcggattggattgtctctaatgtctgtttcacgaatagagttctgtaaatagtcaaa

SEQ ID NO: 147392 - DNA, 1025 bp, Homo Sapiens
  misc_feature (31)..(31): n is a, c, g, or t
  misc_feature (149)..(149): n is a, c, g, or t
taatctgtccatgtcgttagagattgagcantttcttcttcccagccagcaaggttccccaacccccaattctgctggggacattatactgcaggctaatgatctaaacaaaattaagaattcattaaattaacaattcccattgttcntaattaagattttactttgcacttaagatattgaaccatacctagccctgtgtatattttttaatgcaagcaaatattaatgaagcaaatttgtcattttcatttgtgtattttggacaaaggtttgtttatactcagtgaaatgataatttttctggtaatttctccttttcccagcaaagaatgcttaatctcctttctgaaaatgatttgatttgggcagcaaatcctacattgagaattcttcccagatctcaagttatataactgaacagatggtattcgcatggctttgacaggtcaggctgctatcacaggacatcctgaggaagcagctcggaagccttcccgaggagagtgggaagatcccgtgagcaagcaggcacgtgtggctgtgggattgggtgaagaactgcactctgactcagcttcccatcttcatggcccaggagcaaattcctcaggatcctacctctcttcataactttctctgcatcctcctgttagaccaggcatttcatcaggttcctcccatggtttctgcaccttcatttccaaaggcaagtgaaaacagtgccaggctgcgcacatgggttactccagggacttctcttcccgtttcccctaaagcatttgacagttagatcttggaactgagtccagcagcactgaggtcagagagatggctaaagctaaaagcaaactggattctgttcaggaggttctcctttgtcatttttatctccaaatagaagacctctgttttcccagaagattaaatagtagaaaagaagtagcccaaggtgggtgactcgcaaacaggtgggtgaggtctctagcggacgcgtgggtcgacgatatcccgggaattccgga

SEQ ID NO: 147393 - DNA, 760 bp, Homo Sapiens
cttgtaggtgtcttttattgtgtgatgacttcagaagctctgagtgcaacatcttcatgaatacagagacaggaaaatgaaatggctcctcctcacacatccgttttcttttgtaagagcaagacaaacttcccagtagactctctctggcgcctcattgcccaggactgtgccataggccccttcctaaaccaaacattggcattgggaatgacttaggccaagattcacctgaggttggggagggtgaatgctgatatcagagccaggctttgtggcaggaggaaccaccaaaaatactgccaatacagcattcgagagattttgagatttctttttgtagttaattgtgtatatattctgggattcttcagtggtataaaagtatactgttgcttttctagatggttttatttttatatagctaccaactacaaatgagcacatcattttttcagtgtggttgaccaaatccttcccatttccatcaccttctccaatataatttatattcttcttctttacccaaatgttcatctattctaactcttcttcacagtccttccgaatacgactttttccaagaatgtggggaaagtatgattttaatgcaaaatgaagaagaacccaatattccctgtctattagagttagtgtaatttttgcccttaaacaaaaaagagtattgtcttattggagagacttaagtagaataaacatacttttctgtcattaataaataatctgatcatcttgtaaa

SEQ ID NO: 147394 - DNA, 499 bp, Homo Sapiens
tttttctcagaaaataaactgctttattggaattacaggagtgttggtggccggtgggcagagcctagcagggggtgcagccgccaaggcccgggtgtcccagctgttgctcaggagccgtgggccctgcaggagtatggggaggatatgatgtgtggggagcaggggggcaggtgcacgccctccagctgcagcttcctgaggttctagaagtttctcaggctttacaatgtgtagttgggagaatacgatggaagggtgaacccgactcccttcaaaggaatgaatccaaaaatctagtggagctgccgggcacccagaggcaggtgggacagagcaaggtgcagacgggtcacactctccgccggcccgggccgctgcgttctcgcccagctctgtcgcgtattccaacacagacatgttttttcccagcaaaaatgctggctttgccacagctgacaaaaaaattccagaagatgcctttctgcagcagcacgct

SEQ ID NO: 147395 - DNA, 444 bp, Homo Sapiens
ctattttttattctgaaaaatattttaattcaatgtactttataaaatcctatctcacattgccttttagaggactaaagatggttctctgttgttgtactaaaacacaggagagcaaaaagggatttgtctattttaatgccatgattcataaaaggaaattaaggggggaagtaagctggctgaaattaataaaatttcctatgatttgatctatatggggggagagtaagacggagattgtgttactgcaattacttatcccccaaagacttctgaacactaaaacttttctaataaaaaaattacacatttttctaaacagatctaatagagaaatacttccaactaccagatatgaataaatataattcatggtaactaagaatgcttttttctgaagacaaagtatatttgtgcccaacagtatttatatgtgagagc

SEQ ID NO: 147396 - DNA, 483 bp, Homo Sapiens
aaccaacttcccatcctgaatcgcctggcaaaaatcttctacttcctgggaaagcaggatatggccattggaacctgcaacatggccctggatgtcctacgagatccagagctcaactggcaggcgtactgcacaagggccaagatccacatcagagcctacctgcatgacctcaagcgggccaagatgggtctcgggtgcatgcctgacaggaaccacctggcctgtgccaaggctgaccttgaggaagtggtcagggtgtgcccaggcttcaaggcgtacctggacatcggccaggtctactactatatgggcgtggacgctggtgcaggagctgctggcggtggacgaggcggcgctgaaccaggcgctggtgttcctggccaaggcgggcgagtcggagctgggtgccacgctgcccgagctgcagctgctgcgcggcaagtgcctgcgcatcaagggcgaggacgccaacgcggccgc

SEQ ID NO: 147397 - DNA, 418 bp, Homo Sapiens
cttttaagcatcttcttaacatttctgagcctgtcagtaatcactttcccatgtactgggtggtactgagtaattatctccagctctccccaggtccaaggtattctgctgcagaaacgtgacgtgtatgagttagctagtgctgtgtaacaaattatactgagactcagcagtttcaaacaaccaccgttgaacatctctcacagtttttgagagttgggaatccaggagcagctcatctgggtggttctggctcagtcttgctagttaagtggatgtccagggctgcaatccaggattgcatgacggggcctaaaggatccgctgccgagctcactcgtgtggctgctgagatttcagctccttaccatgtggcatggtcacaaggctgatggtgatgtagcagctggtttcccca

SEQ ID NO: 147398 - DNA, 444 bp, Homo Sapiens
tttgcgctaggaatgggaatctttatttagcaaacacatgttcagcttcagctctacagcagggtcttcagcagtggaggaagccggagcgggccggctgcagggtaggcccttgtggaaaagccactggcttggggctgcggccggtgctacttcccttcccggccctgcctgccccaatggccaataccacccctcccaattttacatcttcttgagtgtccgtccccttgggccctagtcagctgcgagggtctctctgttccatccaacagcttgcccgctgccctccaggttttgcctggacaatccccagggattgaggcagggagtccagataagcctgtcgcctgactgcaccctcctctgtcccagggggcctggatgccaggaggaatattcctgaagcctcccgtccctgccactccctgctgggccatctca

SEQ ID NO: 147399 - DNA, 468 bp, Homo Sapiens
  misc_feature (383)..(421): n is a, c, g, or t
aacatttaaaaaaatttttttatttaaggctttaagtttatcctcctttcacattaaagacagggaaagaaaattgtcaaaaccgaaaaccaaaatcatgagcttggcacttttgtgattaatctgaaagggtgtctactttcttacattatttacataggtttataatgacatcaaaaaattttcgaaacttagtacatatatttccatttacataattttgtgtctttgatatgggttattttgttgtttatgtccccccttttatttttggtttaacgcacaccaactttaaactgcacgtgttttgtgcccaaactccctgcatctgtggctatatctgtctttttaagcaagcccaagagtcattgtataacacgttnnnnnnnnnnnnnnnnnnnnnnnnnnnnnnnnnnnnnnnaacaaaaaagatggggagcaaaaaatcaactcatgtttacagagaac

SEQ ID NO: 147400 - DNA, 550 bp, Homo Sapiens
gcgagtttctggcaacccttggaaaacgccgtgggccagccacgttgacacttctttcggtgtggaacgcagggaaatccattgccggcgctgcggcggtcatcagggccatgtgttcgatgacggcccggcacccaccggcctgcgctattgcatgaacggcgcagccatgacgttcaccgcggcttaattcgatgtcttcttataagggaataccccatgtggcttttggttctcgcgtatctgggcggcgtgctgacgattgtcagcccgtgcatcctgccggttctgccttttgtcttcgctcgcaccgggcagccgtttttgcgcagtggcttgccgctgctgctggggatggcgatgacgttcgccctggtcgcctcgctcgcggcggtgggcggcggttgggtggtgcaagtcaatcagtacggtcgctggctcgcgttgctgtttgttgcgctattcgggctgaccttgctgctgcccagtctgtccgaacgcctgacccggccactggtggcggcgggcagtcacctgtcggaagccgccg

SEQ ID NO: 147401 - DNA, 333 bp, Homo Sapiens
tttaatttttaaaaacactttctgtatcttacggcacaacaaaacacttttactacaaaacatgtattgtataacggatgtggctgcgtttgacagtttgagatgacactgaggagtgtgaaagagagcctggaccttcaaagcttgcaaacggcccgggctatttctccacctcttcgctactcaaagcgctggcatcgtttcctgggaacctttccagtccgggccctcggggtgcccgtgtgaaaagatgtgacactgaagcctggggaagaagtttgaacctctcactaattcacgtaacgggagccgccggcagcgctgacggctgca

SEQ ID NO: 147402 - DNA, 360 bp, Homo Sapiens
tgcatagctgggggtggtttgtgtctttaattctttgatgatagtttatagttgccacactttattgattagtacttgacagggtgtaaagcctattttgggtttgatttgttttgggtggggtagacatgtttttaaggaacttattgcttatctttagaaaatgttctagtttggaaacagattcttgagattcagaaggcattttggagtacacttatctcttgtttgtgttgaactgaaggctaagtctcagtggacatggaaaagacttttgggtgatttatttttgaacctgcatttctttcttatgtgtagtgtatgaagaaagactagaatgtagctttaaaaaagtgtggt

SEQ ID NO: 147403 - DNA, 1469 bp, Homo Sapiens
  misc_feature (208)..(259): n is a, c, g, or t
  misc_feature (770)..(820): n is a, c, g, or t
  misc_feature (865)..(926): n is a, c, g, or t
gagagatttaacttttttgccttgctacctcatcagagacttcaaggtggaagatatcagaggaatgcacgtcagtcaaaaccctttgcatccgttgtagctgggtttagtgaacttgcttggcagtgatatttcagcttggacattttacccttcagtcggcccaagaaatcaaaataaaggaaacacatttcatatactgcaggtnnnnnnnnnnnnnnnnnnnnnnnnnnnnnnnnnnnnnnnnnnnnnnnnnnnngggggggccggccccctcaaaaatatctcccaccaggggccccaccatttcgcgacgctacaccccacacgattttcgtgtgcacaaaaggagcggcacccccaatatagaagcgagcgacacatttaatcagaccccacgacaccacccgcgggcccacgccactctaacaacaacactgcaccgccctagcggagaacaacagccgggacgaccactggagcagaatcactttgcgaggacaagacggaggacccccgcttctaccctctccggagagcgcagcgacacacacacccacgccgagccgcgaacaacgccaccccccccaccgagagacacacttatcaaacggccgcccctcacggaggcgacaccacctctacccccacccgtcccaccagcgacggcgaaacacgcccgtgcggaacaccccaccaccccgctcccaccatgtacccgacccgcacgcgcgcgccctacacaaaacaccgctgcctcgcgcgacccnnnnnnnnnnnnnnnnnnnnnnnnnnnnnnnnnnnnnnnnnnnnnnnnnnntcatctacccacccacgcagggagaccgcccaagagcacacacgnnnnnnnnnnnnnnnnnnnnnnnnnnnnnnnnnnnnnnnnnnnnnnnnnnnnnnnnnnnnnngcaccacgcggggaccacggcgacggacgcgcgacggcgcacgtggggagggtgggacaaccgacgcgaacgtggacggtcgggtcggcgcggacggaccgggcggacgacggggacgagcacagacggacgcgaacgccgcggcccgcacacgcgcggacggaccgcacgacaccgagcacgcgcaccgaccacaacgagcaacacccgcgtacgtccccaccgcacggaaccgatcacggtgaccgggtccgaaaaccgctcgcggtcgtcgagccatcccatcccgtagcacgagcgagcgcgcggtgtcggctatcgcgagcgcgagcgggcagagcgaggacggcaccacgcgtaccgaccagcaccgcgcagcgaacgagcaccgccgactacaacgacaacagggacaaccaaccacacgagccacacgcacgcccaccagcacgaggagcaacgcacagcacacgcgactaccaacgaaaaccaccgacaaaccaccgacaggacaccaacgacaaccccgacgaccacacccgc

SEQ ID NO: 147404 - DNA, 542 bp, Homo Sapiens
tttttattatataaaatacaaactattttattgtcacaaggaatatacagtaataaatattacaatatgctatataacatactgtagacacaattttctatagtatgtaatgacaggcacatataaaattaaaatatataaatctagtttttacacttataaatcttttatcaaatgtaattcaagttatcacatggtttacctaaaatacaacagcacttttgagattcatccatgttgtagtaagtgtcaataaatcatttctttatgtctgagcagccctccatagtattggtgtacacaatttgtttaatcactcatccactgatgtacatttgtgttacttcctaatttgggcaattatacaattgctgtgaacatctgagtataggttttcatgtaaacagaatttttctttcatctagggtaaatacctaagtgtggagttgctgagtcatatgataaatgtatggttaatagtataagaagctgccaaacttttgtgcatagtggacagaccgttttacaatcctacaagcaat

SEQ ID NO: 147405 - DNA, 329 bp, Homo Sapiens
  misc_feature (256)..(264): n is a, c, g, or t
ggggttttggccaaacatggaacttttaatgaagttccatgagcacttttaatgagcacttctcttgtgctcctgactgaaaattgcattctcagaggcagctattaggtgagtttgggatcatgttgagtccaacaccagctacttctgatttttaggacgaaagttccgcttcataggacaattgaattcggtccatgggacttcccactgtaataaagaacagggtatatgcctttgaaatcccctctttagnnnnnnnnncccctaaaatgagatcttttcaatcctcttggtttgtgtctgaaaatctcagtggcccctcgtgc

SEQ ID NO: 147406 - DNA, 589 bp, Homo Sapiens
  misc_feature (134)..(245): n is a, c, g, or t
aaaagccaaacaacctgttttaagaataataaagcaggcctaggacagttccatgtaaagagaacctgaggcttttcccaaatttgccagcaacatcagtgaaccacattggaatgggatccgatagcatctcnnnnnnnnnnnnnnnnnnnnnnnnnnnnnnnnnnnnnnnnnnnnnnnnnnnnnnnnnnnnnnnnnnnnnnnnnnnnnnnnnnnnnnnnnnnnnnnnnnnnnnnnnnnnnnnngacttatctatgagtgaaggtagttgttgtggagaggaggtaggatgtctgcctctaacctgtggaatattccaccttcttcttttcatctgccccaaacagaagtaactgaccaacccactttagaagactcctccctagggtctccttgcctccaaaccggatctcttctaatctgcccttcacattgattcctgggtaacttctcctaaaacacagatgcctgctcctgtgccttccaccacaaatgtaagcctccagaggctccccagagcaaatgccagtgttatgcttccagtacctcctgcagaaccataacccaattaaacttcttttcttaataa

SEQ ID NO: 147407 - DNA, 659 bp, Homo Sapiens
tttgtctcacttctttcacttcatgtaattattttgagaatcatcactgttgttgcacgttatcaataattcactcctttggattgagagccgagtagcattccagtgtatgtatctaccaccatttgtttacctgtttacctgtgatgggcatttaggttgcttccagttttttagccctcactaagaatgctaaaaacatctgtgtacaagctttgctatgggcaaaggctttcggttttcttaagtaaataaataggagtaaaatttgctggattgtacactaggtacatgtctaattttgaagaacttgctgaattgttttctaaagtggctgcaccactttccattcaaaaccagcagcgtacaaatttaccagtttttccacatccttgctgagatttggtatgctcagtattgttggttttagtcattctcataggtgtgtagtgctatctcattctggctttaagttatatttccctaaggattaatgatgttgagcgtcttttcacctgcttatttgctatccatgtatcttctttggtgaagtctgttcaaagcttttgcttatttttaattggatagtttttacaaaaataattgagtcatgagagctctttacatattttagaaacaagtactttaccacatatatg

SEQ ID NO: 147408 - DNA, 483 bp, Homo Sapiens
  misc_feature (331)..(349): n is a, c, g, or t
cccagccagaggaaaactgagtaaggggacctagctggaagagcaagtgaatgaggggacccagcccgacccactgagtgaggggacgcaggcggaggaacagagtgaggggacacagccagacccactgagtgaggggacacagccggacccactgagtgaggggacacagccggacccactgagtgaggggactgcaaccaactccattctctccctgagcagcgagtaacttcaggcccagcccggagacctaggagccaccggaggtctgacccagagaactcaccaacagggtgcgccccatggtgaaaataaaatgaatctgttnnnnnnnnnnnnnnnnnnnactccctccactttttttcccccaagtcaccaccacttctgacactatctttttctctagcgttctgctgttgtggtccctggcgcatgcttgtttcacaaaacgccaagagtagatcagtggatgtcattggg

SEQ ID NO: 147409 - DNA, 923 bp, Homo Sapiens
  misc_feature (679)..(679): n is a, c, g, or t
ccaatctgaagtgaattaaaggagatgagggttttcaagggggtagagtaaatatggaagaacaagagaatgggacgtcagagtaaatcccttttatcagtctggaatccctcaactcggtaaaacgaaggacatgaattgctgtcctatgttccgcctctaaaaattacacaaaagttaagaaaacacagattttcttcactaaattacgatactaaactgttaaggtggcaaatccagaccaagtaagtactttaagcaatggttagtttaaaatatatttaggacttttactagcccactggagaaaaaaatatgaacatttttgtaaacttcagatgctttcgggcagcgtcctaaactgatgatgacaccttgatacttttaagttgctaaggagtctcaaagattatgaccttgctctgccagctgagagcagtgtggccttaaataatattccttagctgagaaataccactagctctctgcagtacctcaggatggaaggagacaacatgcacaaaagtgcttggtcaactgtcaagcgttacaccaatgaaagatgttcaaatgcacctcaaatttctcaacattttccaaagccaaccaaaacccttagcttctttgtaatagagacgatgaattactaggtaagaaatgagcacccagagatagaagntcaaataatgttttgaagaatgcaaggtcatgccagagaaaaacaaactatatttcctcagactaaaatcaatgctacaagatgttgggtcatcactgcttttataagcccattagaaatgtaattagacttgcaaggcactgatactcccctccaaggttgtctaaagaagtaagcaactccagccattagtaagcactattttaaaagtacctgctggtagttgcacagttaccttaaaaaa

SEQ ID NO: 147410 - DNA, 544 bp, Homo Sapiens
cagagaacattttatcatcaataaaaactttctaaaatgtaacaatttttctaggtttaattaaacaggctaaaaacttgatgtgtccagtccatgagagcatcctcctatccactggacgaggtgtctactaaaccacatcttatatctattgtgaggccaactgtcttgaggccaaacaagacgcgaattatatggtagcacttgagagggctgcggacacattagagcagctttctcttcccatctacagcagttctgggcagcatgcttggaatggcaacgctgacgtccccgaaaaaccccagccctcttgccaatttcctctgaaccccaactacccaacccaaaattatgtgaagatctgattttcaaacaaaacgaggacaataatgcaccattattacgtttccctaaaacattaacagtatggaaattaagacacaaaccagagaccggaaaaaaatcttggtgcgttcaaagtaacctcaatcagttcccgagtctattttccgcttatggtgcagtattaacaaaaactaag

SEQ ID NO: 147411 - DNA, 343 bp, Homo Sapiens
ttttgcatgagatgttttattagtgaaggatatactgagtcactgtaacaaatgacgtttccagacagcttgcagaataaaaagtgtatgtctcgcgcacgtgacaatttgaagtgaatgttctaagttgatgggcaacccttctgtgcacagtcatcctggactcaggctgatggccgctttttcaacacttgtcttccaaaatctctctgggtagcaatatcttagctacaatcttagacctgtgtacagcccttccaaaagatctttgcatttctacagaagacaattcattaacataaagaatatctgagggaggaagatctagttccagaaaccttct

SEQ ID NO: 147412 - DNA, 470 bp, Homo Sapiens
cattaccctgatgatgggctgaagttcatttattagggtggttcctgatgggaaaaggacatggattaggactttaaaacactggacagaatttcccacagtctttgccctcaaggagttcaccagtttatggggctagaagagcgagaaaattcaagaaaataaatgtagctggtgggagactttgtagatgttgggctatatgttggggtgatggtagctcctgatgtaattttcttagttgcatcttcaatatgcctggagtcgtctgtccaaggcttgtccaggcttctgggtttctctcaagtttgtttttctcaggatattgtcctggcccagctactcctttacctgtgagaagatcttcaccattaggaagatctctagacccccagatctcagaatcaggcctatttgtgtaggcccatggaaatcactacttgtgaagtagagatgcctttttgtctaaa

SEQ ID NO: 147413 - DNA, 737 bp, Homo Sapiens
  misc_feature (434)..(604): n is a, c, g, or t
cacaaaagtttctcttttcaaaacattttactttaaaaggagccaatttaaagaaaactgttaatagttcaggtaacaggcagatacaggaaaagctgctgacagtgttgtatgaggtttgaggattttgatccaagctggtcccactcagtccatagcagagaatgaaagggcccagagagggtggtgacctctgcctgaagtcacacagtgagtcgaggacagggaggtgaccccaggtttctatgtgtagggcgggaggatgttctgggacacagttcaattctcatttgtcacacactttggctattagagatcaaccccttcgctcctgtgtcttgcaatggcagccttggcaaacgctaaatgaaaatcgtgacaacacttgtgttatgaagcatttactttgtgttcaccttgtactactcgaactnnnnnnnnnnnnnnnnnnnnnnnnnnnnnnnnnnnnnnnnnnnnnnnnnnnnnnnnnnnnnnnnnnnnnnnnnnnnnnnnnnnnnnnnnnnnnnnnnnnnnnnnnnnnnnnnnnnnnnnnnnnnnnnnnnnnnnnnnnnnnnnnnnnnnnnnnnnnnnnnnnnnnnnnnnngaaaccactcggcactgcaggttcgtcccttttctctgagatgggggtatccaatcttttggcttccctgggcccacagtggaagaactgtctggggccacatataaaatatactaatgatagctcatgagct

SEQ ID NO: 147414 - DNA, 510 bp, Homo Sapiens
ttttttcactgagaaaaatcattttattagactaaatgtttccactgcatttcagtgtgattagaaatgcccctccctcaaaagacaagccaaccacatttccatgctttgttagttatcggattaatagtgaagtaatgccatccgtgcactggatccgcccattccttagcatgttttaagaatgatctggttggaccctaccattgaaatatgattttgtgcttctttaacatgtctcatagcaggtgtatctaaaatcagacttggtctacctttcatctgtttatggtcctgggtatattttaccgagctaatattttcttgattcttcttcactctttccatttcaggagttacacttaaagtggtagctcttcccagctgacctctgtaataaacctatcatttcagagaacaaaaaatagaatactatgaatcaattcaactaagagacttatttatttatttaagacagggtcttgctctgtcacccaggctgaagtgcag

SEQ ID NO: 147415 - DNA, 760 bp, Homo Sapiens
ttttgaatgtgaatgtatctgtttatttagagctttcagtgtgtaaaatttcaaataaaattatctatccaattgctacagtttaaaaaattaaatcatttttccattctcttttaggaaaaactgtagcacaaattaacagagtagagagtagtgaaacattgaaaacatactttagaaaactctcagattagtaagaatagtatgtaattgtgggtaacaaaagccaacaagaatgaaatacagacatttatgttcgcatgcatcataaagacaacaaaaacaatgttttactagagattaatataaacatgtaaataggaaaaattctcctttttaccccaaaattttcttctatattcggcagtcaaaatttttacttttcaaaattatatgacagctgtcaatacaaagatctcactttttaacatatactttcattctatgatacagtttaggtattaatgatgcattttaaaatggaacaatttaatgccaaaacctgagttgcttcaatataactagagaagacttaaagctagcactgtatcatatcgaattgcagcatacatactgtattgccccgtgctagtctgatatatgctagttggtactgccatggtagcaatactaggtggtgttccttcttcctgtgatctctcttcttcatcttgggaacaccagcacatcagaggccagttcatcagtattttcctatagagggtcttcgggaaagcattctctacggtatgagaaacaa

SEQ ID NO: 147416 - DNA, 1048 bp, Homo Sapiens
  misc_feature (53)..(77): n is a, c, g, or t
  misc_feature (904)..(945): n is a, c, g, or t
tttgaaagtgtgttgttttttactctttttcatagggcagtacatatttgtgnnnnnnnnnnnnnnnnnnnnnnnnngtgacttacgttgtttagaggttaacatacgaagaaagaatggctcgtcgactgctaggtgctgacagtgccactgtctttaatattcaggagccagaagaggaaacagctaatcaggtaccatgttgctctggacttcttagggtaacatttattctgtcccccttttccatcttccttatggatactgttcttgggatgagttctggtgcaactacattcactctaattttctttcttgctacctctttagcaagagcacgtgaaaatccaactaatcctcctttactggcactgtaaacggactggccagagttgccttttaagccaacaatgcttcctacattaacaatagaccctccctgttgttgaatcatagtcctcatggcagctttacaggtcagcatggaacccaagaggttagtatgaagctgagataccatatcttcagtttttgttcttactaaaagaccatccctgttaataccagctgcatttaccaagaaatttactcgacctaaatgtttctccatctcttcaaatgtattttgaacatcatgttctttagcaacatcacagctaaatgccaaatgatctccgccgaggtcaccggcggcggctttggccccttccaggtttctggcaatgaccgccagtcggtagcctttccgggccattaactgggccacagctctgccaatgcctcgggagcctccaaaaacagcacacactttgtccatctcggagtcacaaactcggaggaaagaaggtagagagtgggagcccccctccaggttccctcaggcttttaaacaaccgcggttccnnnnnnnnnnnnnnnnnnnnnnnnnnnnnnnnnnnnnnnnnntaacgccgctcgacacctcctgcagccgcacaatagtaatgcacggacgcgtgggcggacgcgtgggtcgacgatatcccgggaattccggaccggtaccagc

SEQ ID NO: 147417 - DNA, 416 bp, Homo Sapiens
  misc_feature (46)..(46): n is a, c, g, or t
  misc_feature (48)..(48): n is a, c, g, or t
  misc_feature (51)..(51): n is a, c, g, or t
  misc_feature (372)..(372): n is a, c, g, or t
  misc_feature (380)..(380): n is a, c, g, or t
  misc_feature (385)..(385): n is a, c, g, or t
cgcggccttcctcagcgctctgctgccctcgcagccgccgccgggncngtncaacgccctggggctgcccaagggtgtcacccccgcaggatttccaaagaaggccagtagaactgctagaatagcctccgatgaggaaattcaaggcacaaaggatgctgttattcaagacctggaacgaaaacttcgcttcaaggaggacctcctgaacaatggccagccgaggttaacatacgaagaaagaatggctcgtcgactgcttaggtgctgacagtgcacttcttttaatattcaggagccagaagaggaaacagctaatcaggaatacaaagtcttccagcttgtgaacagaggcttcatcagtggaatagngtaccagnttagnaaggtctcctgttggttgtatccaggttgtt

SEQ ID NO: 147418 - DNA, 935 bp, Homo Sapiens
ggtgtctgttctcctttttggttcagtgctcgcttggttcctcagtgtgctcttcatcatccgcttctgtgcgtcaggtgctagatcccctgggcttttgtgccctgggcgttgtgattcgctgctggtccctctgttgcttggtcccgtcctgccctttcctctcggccttggagttccgtgctttctccgtgcccttacccgtgtagacctccctgcctccctcttgggcctgccgcgctgccccagtttggagctgcctcgtaggggctgggccctttcggcctggtactcccttctcccggtacatccttcacaggttaccttgtccacgctcctccggatccacgctttggacttgctctactattttacttttaagagtccgacgcggggaaagacgggtacaaaaatccagaggagatccaagtcaattggaagatcaacatttcaaaagggtgtccacagtaggcgtaaattaagcccaggctctaccgaccttcaaactacaagcagagctttcaggagcaatgcggagagacggcttcccacccggacctcaccacgcaaccgcgcacaccccagccacattgctcctcattcagccagaaaggactccaactccaccaccaggaggccccccttcctggtgctggccagttgcagaggctgttcatggcatcccacaggtgcgactgccccccaccctcctcctagcactttagagggtccctctgtggcagacaccatggctaggtttctctttccaactcctgttggtctggcaagtgacagatcatcttcactacattaatcagtagtcacccgaacattcctatactgtcccccaattcctttcatcaccagctgcctcccccactggaattattcaatatggaactagattaaattgaagacttgccctttagttttta

SEQ ID NO: 147419 - DNA, 328 bp, Homo Sapiens
accagcgccaacgagaatcctctcagccacagcggccctggtgggagaggggtgggaggacctcagcagccttccccacctacgacccccgcaaaaagagagtccttggagttgccgtgtggtgaggggatggcctgtgagcgcggctgtggtttccacgtggcgtctgggatgggagagggagtcagataagcacatctgcggcagcggctgaggaagcccgtggccaacaactgtggtctacccaggttagatgcctccgttagatgcagaaacagaaaccacggcccacgaaactttgttttggtgcaggagaggggctctcaaa

SEQ ID NO: 147420 - DNA, 355 bp, Homo Sapiens
ttttgtacgttggtctgcaatttatttatttatttttgcatagtgatggaatgttgaaccataccaggtcgctaaaagttccaaaggcagattccctccccatctagaaaccgttctccatctgccgactttctggtcttggaaagagatagagttgatagccctgtaatttccttgcacttggatcacaaaaagtctggcggtagggcaggtccaaagtgggctcatcgagcagctcaacagcatccccagaacccagatcttcacatctgtcaagtgtgcctgcagcttgctgcctgttcggcattgctgccctcaggttgcagagaggctgctgcagaaaccagcatcatgt

SEQ ID NO: 147421 - DNA, 616 bp, Homo Sapiens
accttttgaattgaagaggcaagaaaactacatactacatttctgatacccttttttgcagaaaggatacttgatacttactttaaagctcagagttgtgtctgtatcttcaagacttagattcagagctgagttacttggctatatgaggaagcctctttgctgatacagatcatgtagtgatggtgtgcgaagtcctagacagcagcaatttgattcaacaacattctgacagtggtgagaggcagaagctctcttctctacacaactctatgggcttacatatctgaaattcagttgaattcagacaaaattcaagtgatatagtgaaacggagtttgtgatgtcaacttgcctaagcaagcacacaagataagctgacaagaggagcaagctaaagttcaagggcctgtgtgaaagagagatgcctgactaatgttttgtcaagataaagcagagggttggtgacagacaatagaggccaggacacttaagtaagaaggtctacctttcctgttttaaagtcatggttgcatctactttcataagaacttattgtgtaatgtttctgtcagtaacctgggaataaagagtggagtttctcctgcactacaaa

SEQ ID NO: 147422 - DNA, 438 bp, Homo Sapiens
tccatgacctacaatcaaacaaagtaggtaagagaatttctttatgtccagttcttactcaaaaaggcaggggaaggttagagtagtattttctgttttatggctggctttggggatttttgggttctggtttttatgaaccactttgcagaagagaaattctagtttctgtggcttgtcttgaagaagaatgagaggtgaaagacgaaagcaggagagagccagaggaactttgcttttgaggctgcttctgaagccttcacttgggggcatcactttctgagcccccaacagtgtcttctgatgaacagaaatgtttaatgttaatgaagtttaatttattatttttttaatggttagtgctttctgtaacctaggaaatctttacctgtcccaacattgcaaaggcattcccctatgttacagaaagcactaacc

SEQ ID NO: 147423 - DNA, 367 bp, Homo Sapiens
gcttttaaaaagttttaatagccataataataatttatttacagaatcaagtacaaactctaagacttcataactctaaatacattgcaatgcattttcgaataacgcaatgtggctgacaatggctgaggcgacgggcagactaatcaagtgcagaaattggtgattgttttcatagcacatgccagactgcatctccagcaatctatttactttgtgtctttttctgttcccagtgttttctggtggcagtatcttcttatgtcttttcttctttttgtggcacttcatttcttggcagcatctttattatattttgagatggttgctcagaagagtgggaagaatttgttcacctgagatgtca

SEQ ID NO: 147424 - DNA, 432 bp, Homo Sapiens
tttggcataaaataacaatcattttattatgttcataccgttgttggtcatgaattcaggcaacacatagcaaggatagatttttgttggggagtattcagctggagtagtgctaactgttggtggtgtctgggttggtcacctggaggtgtatatctagggctgtctgtgagtttttttcggttcttcacgtcatttctactgggaatgggatgcccgtcttcattcactgtctggcatctgggctggtatggctgccacagttggagctgttcaggtgttttctctccttccatgtggtcatgttagccactttttatgtggcatcaagtacattcacattgttgcacgaccatcaccaccatccatcttcagaacatttttcgtcttcccaaactgaaatttcctactcattaagcaataactacttct

SEQ ID NO: 147425 - DNA, 586 bp, Homo Sapiens
tcataaaagaaaatattttatttccattacataggcaaagtttgttttttcccatatcaaagccaaatattatttgatgtactgaccaataatatatgtagaaagaataacagcaaaatatcttatttctttatataatttaatatataccctattaacaccagtgtgcagatgtacagtactgacagtatactaaatagttagtattaaaaattactttaaaaatgttttcaacattaggtactggtggaaccagagctgttattttgtacatcatatcatttatgtgttgcaaaggaaaagtaaaatttccagtagcattagaaaaaaatgtactgatattttatgtagatatacaaaatctcatgacatctattgaaaacctcacaattctattgtgcactaataaaaacaccttttcaaacaacttgcacttatactgagttcataaaggctactataaaaatattgcaaacgcaataaaaacacaatatcgtacaaagtcttttgttttttaaaagtcaaattttaaaaggactgtatttatataaatgtgcaatactttttagtgaccctgactaacatt

SEQ ID NO: 147426 - DNA, 1151 bp, Homo Sapiens
gggtcatccaaggcgcaagatggcgctgctttttgcacgttctttgcgcttgtgccgctggggagccaaacgattgggagttgcctccacagaggcccagagaggcgtcagtttcaaactggaagaaaaaaccgcccacagcagcctggcactcttcagagatgatacgggtgtcaaatatggcttggtgggattggagcccaccaaggtggccttgaatgtggagcgcttccgggagtgggcagtggtgctggcagacacagcggtcaccagtggcagacactactgggaagtgacagtgaagcgctcccagcagttccggataggagtggcagatgtggacatgtcccgggatagctgcattggtgttgatgatcgttcctgggtgttcacctatgcccagcgcaagtggtacaccatgttggccaacgagaaagccccagttgagggtattgggcagccagagaaggtggggctgttgctggagtatgaggcccagaagctgaccctggtggatgtgagccaagtctctgtggttcccacgctacagacagatttccggggttccagtggtgcctgccctttgctctctgggaatggggagctgctgacccattcagggcttgaggtgcccgagggcctctagtatgtccattactggagtccctaatcacgcctttggccagcctccttttgaaagtgtccgaagcctttttactttgcctcaagcaacctctagctcccacaattcagtgttgggtcctctgtgcaatatcatgatcatcttcctcatcccctaccttgtgaaagctaggcatacagccaaaccctccttttccccacccaccaacactactgccaatttcctaggctaccatgggtgtatcttccttgacctgcttccttcagtccctctgcctccctttgcccaggcctttctcagactgtattccatcctggggtcttatcattcagctttgtttgaatttattaatcaccatgatacctctccctccctttgtccacatgtaacttgttcttggggctctaccagatggctgaagagtaaatcctttctacctctggctgaaggagtggtgcagtcaatgacttggccctttttctacaagcacatttagagtttgggctcg

SEQ ID NO: 147427 - DNA, 517 bp, Homo Sapiens
ctgtcaccaactttatttctgggttcagtttgatagtcaatgaaacaacttgttcaatgtcccctcccccagtgttcaaggtagccttctatatattaactctttgctaacatattttatatttaaatacaaggaaaaacaataaattactcgttggctgagagctggctgctggctggcagacaggagcggctgttctgcccctctcctgaccctgcctcggatgaggtccgaggccccaggaccccagtgaggtagcagaattctgtacacagtacttattaccagggactcctggtgtccactgctttagtgctggggccctgagtctctgaacccttggttcaagttgtaggaggcaaagtctttcccaattcccaacgggtggaaaacactcattttaaataacacacaataatatataggccccggaagaagtgtgcctgagctgctgtctgcctcagttgcctgtgtgtgaagtggggtcctgtcccacacatgtctggaagggggccac

SEQ ID NO: 147428 - DNA, 439 bp, Homo Sapiens
actttcttccaattaaataacccagtttcgatcatgaaaagggcacttgtttctacaggagctgtgtccagcttcctcagttccaagtactgtttccacacttcttccttgtcattgctgaggttgtatatccacttactcaggaagcaaattccacaaggttgcaagaactgaccccctaagttgttctttcagattctatttctccatagagttcagctaactttttaaactcgggtccccagtctcccaggtagtgataatcctggtctgattgtgtcgttgctggatccagcgagctgatagacccagcttctgatctctggacctcataggcataagtctgaagagagtcataagggggaacgctagggtctaggtctgcttctgccagtctttgctttataaattcctgaacatctatgcttttcagggtgga

SEQ ID NO: 147429 - DNA, 902 bp, Homo Sapiens
ggggcaaccatagtcgcgtccacgttgggatagactaggaggtgtctcgaggtgactcaccagggggtctaggcagcaaccgcggaagtgaatatctaagggtcacataatggcccggtaagttccctgctgaccaccttgtttcgccgcggcctttccaggggggtagttcggtcacaagtaccctcgggggagtagttatcattactcgggggctgttcatttgtatatggtggcggctcaactgtgggtcgtcccgttcttgcgtgggttcccgttaattgccctccggggaactcccctttgtgggattttgttccaaaaaccgtcgggtttgcccgcccgggcggttgtttttaatggggagaaattccaagcccttatgtcaagtcccagggatttccttagggaaacaggctaaggcccatgttccacttttccttagtgggcccgccgcgtccaaacggaatggtttagaaagcttttcgagggcccgaggcgggccaacaatttttacgcccctcagccgatttggggttttttcacagtccagtctttattagcattgggtccctggtcccaccacccattcccctccacgtaccatcccttcccaccccttcctcgtccttgacgctgcggctgcatcagggttccacatgtccagccctccccgcccccaaagactgcagggcagcagaggagctgctgtggcctttccccagctgtccggaaccaggaagggcaggaaagccatggaggcctttcaggcatctgggcagggtagggaggggccgtaaggtgctcacctgtcacacgaggtccccgagcgccgaggaagatggtggcgggcagcgggcggcagcagtggcgtgatctccgaagcccacagtacactcacc

SEQ ID NO: 147430 - DNA, 437 bp, Homo Sapiens
aacagaatggtatcaatgcagttgaatttcagtagcataccagctgcttccatagccttaggaaaaataattaaataagcagtgttttctaccagttcttcctactttggtctcttgtattacctttttatcaccatcttttacctttagattgccctaagcacttcatcaggtttgtcccacaccaggtatctcttactctcaaatcatgttttcctctcttgccagtagaaagattctttaccactagaagtttccaagttatcatttatttcctttctaaaaatggaagtaaaaagggggagcagaggaaaacctagcttgagttagagtattaaaccatgtgaaatcatacttgtttgtttatgatattaactcctcatacctgcttctttcattttttcattaaagtgactctgactctagtacccagtaaa

SEQ ID NO: 147431 - DNA, 391 bp, Homo Sapiens
cagtgtctgttggaagctttaatggccgtgcacagggctgtggggctgagcgagcctggacctcccagctccagcgtcaccagatgaacatgggcttgccgtcatcgtgcgccagctggctgaggcaggagagcagcagcagcgcgtcggcgagcatgccggggtgcacggtctccaccaccacacgctgcaggaagtccacggtgtaggggccgccctcagacgccgccagctccgggcgctctcgcaggatgccataagcgttcaccagctgctcggtcagcgcagggtgcacccgcccgttgtagcccagactctgcagcctgttcatgacgctcacatagcgctgtgtgagcctctggcacagcttctcatccagcttgtggtcact

SEQ ID NO: 147432 - DNA, 537 bp, Homo Sapiens
cttgaagtggttgaccactcctacttaaaacactttgtcttcccttgccttgagaccacactctgctggttttcctcttaactctctggcccttctctttctcctggctcttcccttagcttcatgtatccaaactcggcatctccacttgactgatggcccaactaattcctcaaactcaccttgtcggggactgcattcatcacctctcccacagtgttcccaagcagcctctcactcccctacctccccacttgcttgttttgcttttcagcatccttaagtaagccctgcctgaccctgtagattgggccagggacccttattctagggcattctttccttttctaaaggcactgatcgcagtttgtagttatatctttattagggggttgctggatgactctctgccccgctagactgtaagctccgtgaggggtagggacatggtctgctttcattcaccactgtattcctgcaggcctgccacagtgcctggcacttagcaggtgctcaataaatgtttgttgaaataaa

SEQ ID NO: 147433 - DNA, 509 bp, Homo Sapiens
tttttttaacaaaagaaaagataaagtttattcacatactaggaacccacaaagaaaatgactttatccataactaaagacagggatttacaagcctaccttaataagggtaaaggagcagggaggaaaaggcttctactggaagaacaaatgggtttatttaggaaagacaaatgtatttttaggagaacaaaccaggagacaagatggttcttcatcatgtttgtttgtggtcttcttcatcttcttcacagccgtgaaactcctccagagagggggctagtggcagtctcactcccagaagtttctgcttttagtcagataagggagtattcagacaaagcctctttctgcatctgttgattctcaaatgtcttcaggtcataataatttttacgacacagtggtataatttggatcctttcccttgtatagaaaggtaatattttgaaatattactcacttttttccccatttttcctgttaaagcttaacccttcctcatttac

SEQ ID NO: 147434 - DNA, 362 bp, Homo Sapiens
tttggacggcggggcttactgtggggtatgccaatggcgctggtggcagtggctgctcccgtggaggctgttgggactgcagcgcttactgagaggctggcagctgcagggaggtgtgagggtacgctgctgctggggaggtccccagagtggcctggccttgggaggcctggggagggaggccaaagggctgtggggggcctgggtgctgcagcaggggccacctgcaggctgtgagcgggtgggccctgaccgtcagtgggggctggcattggggtgcagaagctgcccgccgacccagtcagaggctgcagtgggggatgtggcgagggatgcggcgggggatgcggtgagggcggccc

SEQ ID NO: 147435 - DNA, 561 bp, Homo Sapiens
tttctaaagagagtctgtgcctttatttcctaggctctgcagtgctgtgataaggtgaccacgcagcaataaggaagctgagctttcaagggttttctggggtccaaaaatcagagcagttataggtcatatctcaggcaaagctaaggctttacaggtacttctgccactgaacaagggtctcttttgtcctcctcttatctgaagacttctgtgagtcatccccgtaccattcacctcctggaaaaggcaaagctgtccaaaacagaaaattcgtgacgtcaaagaattggaaatacacagaggaggcagggaaataccaagcctgaaggctcagtcactcagccacgctgagatcttggtaggcagaaacacgtatgctattcagagaaaaaggcaacaccccagacatatgggcttacagctgctcatcagtcattcccagcgtcatttctcattatattaacctgaatgtgcaaaaacatgaaaggccttttgatttttatcgttagagtggagatgctcttcagtttttaccacgaatgtgagaaactgttttcc

SEQ ID NO: 147436 - DNA, 382 bp, Homo Sapiens
tttaactggaaagcttttataaatgtgatcgtgaaataactaaagtaaactatgaatgatacatattactatccaaatatgcaaatgttttattagtaatagaaacacttctaaaatgggttcgccgtgtggcactcaaaacaaacgtttttcttgaactagtagaccaggaagtagggagaatgttaccttgagtacacctaaaagaaatagggtagtgataaactaataataataaagtgtgactgaaaagaattgtctgttgggccatcaaaaaagaacattctgttttcctttaattagctcttgtcactttttctcctgtcaagaaaaatgtggtgcagacatacatctttttggatgatctcaaacttcattctgc

SEQ ID NO: 147437 - DNA, 427 bp, Homo Sapiens
ttttcgtactcagattttattttttacaatattttaagaggtggactccttgatctgttcccaagattccatggctgtttgtgtcttgatgtcactctgatgcccttgcttgtgagtgccttgcctcccgctcccaggagtctacagtctaggtagagggataagatcatccccaactcctaaattttatgggagaggaaagcaagccccagggagatgtatgtactctccgatctcaggatctggcctaggcaaaagggtcaggagaggttgaggtgctaggtcacaatgggagcctgggactagctctttacagagcaggcgggcaccgcgagggacatctgtcttcaaatgtggggtccagctcttccggtgtggcatcctgagactaaggtctgggaagcagtcatgatccctaagatcacac

SEQ ID NO: 147438 - DNA, 457 bp, Homo Sapiens
gaatgttacaatacttttaaagatttattgccatacattttcttttcccgttaaagaagaccttctattatgagcaagatgaaatgcaaaatagaggccacatgctttctgcttgtcaagcttgtgtaacttggactcagaggagaacatccatggggtcctttgggaagcagtggttagggtggtggcagtttacacaattgtcccactgcactgcatcctggtacgtcattacaaccttttactgagtcctgttgttttatttgctactcaaggatgcgaagtatctgtttaacagtaaagtgccaagcaatctgacatctcctcctaaagttggtaatactccccaaaatctggtttctgtttctcaactataggtggtagtggataacaggcaacctatagctacagctgttagtccttcccacagatcaacatgcaaaagagaaagtgagtt

SEQ ID NO: 147439 - DNA, 502 bp, Homo Sapiens
tttgacacaaaccaaatagctatttattgaataagagaaggggaaaccacatttaatgagcacccgcaaagaaccagtccctttcacattagtcttgtccatttcataagcctgggtccagtgtgctggcccttcagcctcacaccgcagtttggaaaaacacattccaggggagcagagagactgagctctgggatcctacggctggagctccctgggcttctgagtttcatcctggccgctacatctctctaggagctatggaatagcagtgcttctacccctcaaagatgacaaaaaagtatttgtgaagcaccactaataggctaactgctgattcatggcaaatgggtagttactcaccttccttactggaggactcttgtatctaggtactactttctttgaaaattactgcagcttttaacattatgcattataatctttgatacatatatatttattaatttcagcaacttgttgtgaggttattagtatattt

SEQ ID NO: 147440 - DNA, 338 bp, Homo Sapiens
tcacatagtacctggttttccacaagtaagccaagggcatgattttctgtgtacatttattaacagttctttggttttatgaaatactcatatgaagccagtccctggagtactgttttttaaaaggtccctttgaaccatttgtaaattatattttcattcataacctgcattcttagaaggcattcagtcaacatttacagcacttactgtgtattttccacatggagtggttcaactcaagcgtcccttccagtattcagggcattcttatttcatgttcaagtgagtgcattgtttagaaatcacagtttattaacatgtacatgatctatttt

SEQ ID NO: 147441 - DNA, 384 bp, Homo Sapiens
ctcctttgtctgggggagagtatttcagttaggaagtttgttggaattcagaggcaaacaatgtctatcagtccttggattataatttcacttctgtgatcctcaagagtttctcttttttctttgctttcttgtcctctgttcttttggcactgtgtagccaccttagagaaagaatgttttgtattttcttctttttgactgttttctcatagtccctggtcttcagaatgaacagaaacgattccaactggaagaactgagaaagtttggggcccagtttaaggtgagagaagagtgagctgggatattagcagggtaaaggggttgggagtggttcgtagatgaggcaaaggactagataggagtcaaagagatgagatc

SEQ ID NO: 147442 - DNA, 2067 bp, Homo Sapiens
  misc_feature (1783)..(1793): n is a, c, g, or t
  misc_feature (2004)..(2004): n is a, c, g, or t
  misc_feature (2006)..(2006): n is a, c, g, or t
  misc_feature (2021)..(2021): n is a, c, g, or t
gcagtaaccataacggtctctaaggtagcgaggcctgggtggcgaattcggcacgagggtgagccgctgattgaactctgtagctctggagctagtggttccctattctatgtgtccagcgacgatgagtccattattaagacagtccaacataaagaggcggaatttctgcagaagctgcttccaggatactacatgaacctcaaccagaaccctcggactttgctgcctaaattctatggactgtactgtgtgcaggcaggtggcaagaacattcggattgtggtgatgaacaatcttttaccaaagatcggtaaaaatgcatatcaaatatgacctcaaaggctcaacctacaaacggcgggcttcccagaaagagcgagagaagcctcttcccacatttaaagacctagacttcttacaagacatccctgatggtcttttttctggatgctgacatgtacaacgctctctgtaagaccctgcagcgtgactgtttggtgctgcagagcttcaagataatggattacagcctcttgatgtccaatccataatatagatcatgcacaacgagagcccttaagcagtgaaacacagtactcagttgatactcgaagaccggccccccaaaaggctctgtattccacagccatggaatccatccagggagaggctcgacggggtggtaccatggagactgatgaccatatgggttgcatccctgcccggaatagtaaaggggaaaggcttctgctttatattggcatcattgacattctacagtcttacaggtttgttaagaagttggagcactcttggaaagccctggtacatgacggagacactgtctcagtgcatcgcccaggcttctacgctgaacggttccagcgcttcatgtgcaacacagtatttaagaagattcccttgaagccttctccttccaaaaagtttcggtctggctcatctttctctcggcgagcaggctccagtggcaactcctgcattacttaccagccatcggtctctggggaacacaaggcacaagtgacaacaaaggcagaagtggagccaggcgttcaccttggtcgtcctgatgttttacctcagactccacctttggaggaaatcagtgagggctcgcctattcctgaccccagtttctcacctctagttggagagactttgcaaatgctaactacaagtacaaccttggaaaagcttgaagttgcagagtcagagttcacccattaagcgcaaagcctcagaagacctggaacaagattctgccatctctgtgatcccaagatgtcagcccttgccccagcaatgctgaattttcttctacttggtcatcaaaaaaggagtgtaatagaagtgaggggagctgctcctccatcttcttcctgaagaagaaccttctctccttcctcttcctcatgaatgggccttagtgcctcagagagttgaggaccgcagccatcccctccactccagagttgggtggtacggattttcaactggccaaccctttgcctccactattgaatttttttcagacccccattcttcatgctggaaatgggattgctggacttggcagctttctttcccctcgtctttgactaggaaccggactcttaaatttcctccaggaccagactacgctggcacattatccctaccttagttctttctctctgactcctggaagaatactcctgtaatctctgtaaaggtttttgggggataagggtgtttaaccacctcccagctttcttcttcnnnnnnnnnnnctgaaaaaaggaaaaagcacacagcacacaatttcaagccattttcagatcagaactccagaagtgttgacaagatgcctattcgtagagttccctcagaagagccatggtgtttatgaagagaaagagtagtgattgctctgccagaagcagctcctctttaaactcctcctctcttgatgaattttcttaaggctggagggaaatgaananagtggggaacatggnggtaatctttatccccttttgtttaaaccgggagggcagccaggga

SEQ ID NO: 147443 - DNA, 411 bp, Homo Sapiens
ttttgagggataacttctgtatatatcatggttacattttaaggctagaaggcacaagaatagaagacgatgaagtataaacattatgataaattttcagtactctagccagactccgtatcaggccatctcttccctagagggatggaagaggggattcagccacgtctgtagaggtgtgtgtttgagaaccaaatgcagggaaacatctccctctctgatgttgaagctcggggccctagttcatctgtggttcgtgatggatcctgagatatttgacaaagtcaacatgagatgctcctaaagttagaaggctgtatggctgactccttgagggatttggaggcattgtttggtgattctacagcggtgtagctgacaatccttgaagcgtgaacattagcaacttca

SEQ ID NO: 147444 - DNA, 444 bp, Homo Sapiens
  misc_feature (77)..(86): n is a, c, g, or t
taattgtgaaaaacttatgtttgttttgtattcagaacacatttttccatagatgagattttatggtcttcagagannnnnnnnnnactctggtccacaaaaattgatttaattctaatatccatttctgcaactctcattgtaactatgtttctatggaaaatgcatttatcattctgccttgggatattaggaatatatttagttttacttctgaatgttctccagaatttctttggttacatccatggtgttaaatccattcagataccttacatggacaaaaatcatggattggctcacataattgtaaagcccaggagtagttttggcttttttcttttgttatgctggatctaggtgcttgaacagtgttctcaacatccatctgtctatggaccctcaggaatgttggctttcttctcgggcacctagatccagcat

SEQ ID NO: 147445 - DNA, 1042 bp, Homo Sapiens
  misc_feature (1013)..(1013): n is a, c, g, or t
tttcagaaagtaagaggcctttattccctgaattcactgaatgaaagcacatcatcatggcagggtcctcatcatcaccatcagctccaacccagccaagacactcaacatagagatgcatgctagaatgaaagctgggagagcagagaaggaaaggaggaacattgaagccaatggatatccacaccctctccaacgaatctccacctcctctcactgagaaggttcaagaaggtttgtctctgagccttctcccagctataaatctaggcagactcctccctccccacacatccgctcctgctctctctcctccaggtgaccccagccataaggagccttgccctccttgctgccattctcctggtggccctgcaggctcgggcggagcgactccaggcaattgctgatgaggctacagcccaggagcagcctggagcagatgatcaggaagtggttgattcctttgcatgggatgaaagagctcctcttcaggtttcaggtaagacaagccggcatgcagagctgcagtgtcttggtgctcaattttggttgctgtctctgtgtctgtaggctcaaggaggggcttgacctgcacctgcagatgagattcctacagtcctggagaacaccgtagagggacttgcagtgctcctggagtacgctacccatactgcttcagctaagttgaaatgaaggtccagtgtcaccaccaatctcactgttcactgttctggcttttcactcggcctcattttcttcggatccattgtgtgctgggcaaacactcagtgtcagcttaaagtttatgcagtcacaaaatcgttacttctccaggaaaatcagtatcctctgtgctaaagaatgggagttttattgaacatcttcaggtcacacatttgccttttaagacgtagggttacaggagatccactgaaacaagtcaatgtccaaagctttatctttgtatgtgcttctcgtagttgtacctcgtgccgcctcgtgccgaattncttggcctcgagggccaaattccctatag

SEQ ID NO: 147446 - DNA, 328 bp, Homo Sapiens
gctcccagcatcggggaatattttaaattacattttacaaaaatcaccactaagatgaagcaggttcttctatcttgagtatatttctctttcatgaactgtgtcctcagcccattcgtctaccatagtttccgtgttcttgttgtctatttttacagctcactgtatcctgaagacacagttccttaataccactcccccaacggggaacagaaagactgcatgccttacctggcttcttgccaccataaaagtgagtgtattcagcacaggtaatgtacttggctttaggcaagcaaggcagccccaggtgccagggggtgatgag

SEQ ID NO: 147447 - DNA, 379 bp, Homo Sapiens
tttcataagcacatagctacatatttattaaacaggaaaacatatatagagaaatttaccctcaataatcagaaaatatacattcttttcaagtacaactggaagcattcactaaattaactatgtactaggccacaaagatgcaacaatatactccaaaaagttaatatcatgcaaatcatgttctctgacaataatccaatatagaaagaaagcaatgatacaattttaaaagaatataccagcaaactaaatatctaagaaaaccttcagttaaaaggaaatcatgaaagaagttaaaaaacacaaaattaaataacaatgaaaacagtaccagtcaaaacttatgagaaaagtctaataaagcatttagggaaaa

SEQ ID NO: 147448 - DNA, 922 bp, Homo Sapiens
attttattctgtaagaggagtatgtttttataagaatgatgtgtgtaattataagaacttcctatgaacatgttgacttttaattgtcttataacatgttcttataaagattatcaattgtttttttcttttctaagtttagtattcagtggtgtctctcattcttttcattggaaatgtgtataatcaagatggactctttctttcttgtaattattattgctctttgctagtattttaattatttatagctgccagatatttgtcttttaaaggccttccaatcccaatcagaatgaataaacaattaaaaggaagaaagattttgttagccctagcccttcttttccttttgattgtgcgtgttctatataacagctaaattattctttatgaaattagtatatccagcaaactggagaattatgctctaggctgagtgaatggtaaacatgttaacatttcctttgtagggtttccagggtgccacaggagatttgtaatgtgctgcttatttgtattttccccagatctctttcagtttattataatgctggagcaataattaaatgttccttagcgtttcctatgtcctacacctcactgaaaacatgtcggcagagaaagcaaatgttcatcatttctcaatataaaacagatcctgccagggatcatgccaaacctgaccaaccatgacagtcaaatcaatgtatgttttggtttaaatttttatttttgcctttgctttagcaacttgattctggtatttgtttttccctgtggcttatcattttatggcatgacagttcctgaaattgacaaggcttcctgcttacctttgtaatgcatatgtgtgacaatataaactataagagaaaatgacattttgactcaataaatatttgctttatgtccattaaaa

SEQ ID NO: 147449 - DNA, 971 bp, Homo Sapiens
  misc_feature (204)..(212): n is a, c, g, or t
aatgtacaagtcagtagtaaaatatggacatgtgaattttttagacatcaccttttccatgtatagaataaatgaacatcactgtgttaacaatgcctcaaattagagtccaagaaagaagttgtttgcttgttcctattggactcattttatatgtcttcatggatggacaaagtaggaaatcaagatgaaactagatttgannnnnnnnncagtgattttatccatttataatgtaacatcaaattatttttagtaattttatgaaaataattgtcttaaaacaaggtcattaaggactctaaacataggaaggtgtatgcatatatctaatatgttttctttaatcacattgtggcctctggaggaaacagttctttgtgtctacttgttttctcacctctcacgaaactactacaaggatgaggagagttatggatgtggtttgttccatgaaagcatatttagttggccttggtgagtggagctgctgggtttggttaagagatccagagcccaggcatgttgtccgttctctgctaccctcaggacctggctgagggtaacacagaccaaggttctcccctaaaactggccaaattaatttgccgccttcttcttcttcatcatcatcatttctctcccacacctttttgtattctcccccagagaaggctaggtcagcttagaccagaccagttttagccgtttctggagagttctctgtctttctctctggctactttccctgtaactgtagaagaatgaagttttctggtttcaatagagtggtaagttaaggagcttgaatttagaggggctgcagttgggtcatggcagttgaaaaggcaagtgtgatgtcctaatgtcattaacttaactgggtaaagaagccctcaacccagttattctgtcttacaaaaatttggatgctctcacctcagctgataatagaggtcatattgcctagc

SEQ ID NO: 147450 - DNA, 590 bp, Homo Sapiens
caggtttttaaaaaatgatggcttcagttgcagagatgttgactctcaggtggctctgagatatgcaggtgaaaacagccaagaacagttgatgttaggaaggggcccaggccggagatataaattcagcagtcatgggcatatgtgctgaatgaagcaaggggattgagtaaggtacctaggagagagtgcagtgtgtgaaggcctgggggctcagggaggaaccattagcaattctaacattgaagggatggccacaggaagaggagcctacaagaaggatgagaatgcatagtaagagaagtagaagaaaggatggaacaataactactttgagaacataatttatggttatattcaatttgagtatcatttgaaatcatctgaaactcccaaaaagtttcattcatgtagtcacatagaagttacctaaagtttatttctttggcttgtgccttttcacagttctaattgtattaaggcatatttactttttgttttgcttttagattgcattaaacattgatcaagatttgtaggaccaaccaacctaagagcaataaatgtttttgtttgtttcaaatttcaaa

SEQ ID NO: 147451 - DNA, 927 bp, Homo Sapiens
  misc_feature (610)..(728): n is a, c, g, or t
  misc_feature (871)..(871): n is a, c, g, or t
  misc_feature (902)..(903): n is a, c, g, or t
gctggaccggtccggaattcccgggatatcgtcgacccacgcgtccgcccacgcgtccggccgactgtaacatgtttcatccagttcaggacgtttatttatttccaacttgcatacaaaacatactgagaaactaaaaccatcgttaaaagtgaagacacgttgagacaggtatctcgacctgccaagtataaagctaaagctgagttcataaaaagggatgatttggccgacggtcatctgccagattctgatgatgattcagaagtcagtgtggaagaagatcagagggagaggcaggcgctctttgacttatcaagctgctccctgaggcccaaaagcttcaagtgtcagacttgtaaaaagtcatatatagggaagtggggactggcccagcattttaaacttaatccaggccatggccagctggaccctgagatggtgctatctgagaaagccaatgggagcaccctccgggggtgcacagaggaaaggacgctcagcctgaccttcccggggctgtccgtgccagcggctccgcgtgagggaggggcccgctcctgcttggtgagagagtcagcacgcagtggcctgcagtctcactctgtgnnnnnnnnnnnnnnnnnnnnnnnnnnnnnnnnnnnnnnnnnnnnnnnnnnnnnnnnnnnnnnnnnnnnnnnnnnnnnnnnnnnnnnnnnnnnnnnnnnnnnnnnnnnnnnnnnnnnnnntaattttttatatttttagcagaaacgggggtttcaccaccgttggccaggctgggtctttgaactctttgacctccaagtgatccatttcacctttggccctcccaaagtgctgggaaattacaaggtggtgagcccaccgncaccctgggccctgtggtaatttacccttgnnattggctactacaatttgctgaat

SEQ ID NO: 147452 - DNA, 230 bp, Homo Sapiens
ttgaaaaagaacacatatagtttaattgatactttgccaatacaaaaataagcatccacagaatgtttatttactgtttaaattactccatattttcatatactgtgaacagaaaatatattttaccccacatatagtaaaagcaaacaagtgcaatctttcaaacattaaaatcataatcaaatctgtacaacagataaataaatgtatacctctaacagttagcttgt

SEQ ID NO: 147453 - DNA, 698 bp, Homo Sapiens
tttttccatttccaataaatggtttattttaattgagaaaaataatgagaactggccaccttttggtacacggctgttcagcgtctccctgacttgggcgatctggagccttctgttctgtagctgtgcccttgaggcactcgggtcctggggtcagtgaagtcagctacgtgtctctatccatttgagaaaacctggccctcgaaaggcaaaataattccttttccaaggtctattagattataaagttgcaacccaggaagtgggcatagaaagcgttggagatgtagtctgttttaattttcacatgttgaagacggtcctttcttttagtgaatatgaaatgaaagtctcacttttttttctgtcaccaaaattctttcagatgacttcttttttcgggtcccccagggagaagtcaacccagtaccaccaagtatcagagagaaatgaaggcacagataaggcagtgtcttactcaggcttgtagagagggcgaatgtcagaacaggaattggaaggaagtcctgcctgctgttctgaggcactgatgctctcactaccccacccactactcaggtgctttcccatcctcatttcacagcaggcaaaattgaagccagagaactaaagccacttgtctcaggggttcagttggtaaatggtataaccagcactggaactcagtctcctgaccc

SEQ ID NO: 147454 - DNA, 545 bp, Homo Sapiens
ctcttcttgttgtcattgtttattgtttgtttattgcttattataaaaatactagaatggggacactgtttcctgtccagccctggagcatagcatgtgacacaaatcataacaattaacacatatttttatattggagtttaaaaataagaaatgtcacaaggaaagcatatatagatgctcttttatcatcgccaccccattctaacatgacaagcccaggaatcattaacgatcctttgttctgctcaatgcgtggggttgacatggatatctttagtaacgagctgctccttatcttatcataaataacaagctgccactttggcatttggaggctgcagaccaatttctgtaatatcgcattcgccactctcttagctgctgttggatttggtaggaagtttttaatttaaatatctttggtcctcggatgtagatttaaatttcctggtccccaggcaaactttgtcaaagggacttgcaacccattgctcttagaatcttgcatgccaggcacccttgggcgtacataagggttgtgg

SEQ ID NO: 147455 - DNA, 565 bp, Homo Sapiens
ctttctgttgcatccgtgtgagctccataaatctgctatggaacagaactactggttcttgaatggaatcagttgtgctgtttgctccctcagatgtctgcttcccatagatcctaccagaaatgaagtcagaatcttcctcttttctctctagatgctgcaatcgcttggaatcttgttcaaagattgagctgtgtaaaaaacgagaagcaaacaattcctgcctctcttgctcttcttctttatggtcctctttcttatcatccattttcccttctgaatcagtcctaattttcttctttttcatgtaccaggatggaataggtcttggagcagagtcaaccttttctttatctttgttgtttcgaaaatttgcaaatcgggagtcccaatcaagaaaagaccaattttcttcacgagatgaagagagggatttagctctttcaagcaaagctttagtgtctggtgtgattgtcttatccaatgcaaaagagtaaaatttgttcctttctaaagaactagagagtctttcatctcgctcacgtagcttgtcttctgtgtccct

SEQ ID NO: 147456 - DNA, 626 bp, Homo Sapiens
ttttatgaattgggttccgctacttatctaaaatgttctcacatgatggattctcatatccctagatccttctctataaagtcgaaattcctgctttacctatttcactgggaggctgtgaggaaagaacattaggcagatgtaaggtgatattgcttcaagcacacttagcaaatcagcaatttattttcccctaaagaattttaatagtgtccgtcttgcactgagatattggctcctgaagacaaccttatttttctcaaaccggtcattattttgtgatgtaagcatgttttaacccagaatcaattgactgttcaatacgattggagtccgactgcagtaattttagaaactttattacggtagtaaattgtggtttcaaatcacatgtcattcgtgaccatgcttataaaagagaagacgacagtacaactcccacactggtactagcaattttcttctctccagtggtcttggcttccggcaactgaagtttgtccacttacggctggggctccagggacagagaatgctttgattatttttccagcttggccagcctccctgttcttggggctcctgtctctctatgtatggtttatattaaaaagtagagcgccaaa

SEQ ID NO: 147457 - DNA, 747 bp, Homo Sapiens
ttttaatgggcaaaagaacaagttgcagtcaatggctgcagaggggtgtctggggtccaatgtgggctgcactttgtgggtactgaggaaatgggaagatgctgcttctaggtcagctggtgggttggaggttgggggctgtaattagcagcagccttagaactgggatgcctttcaatccctcctggccccttatctctgtggggcagtcacaggacatcatctgttttattcaaagttgggacttgcagcaggagaccctgtcctgcatggagtaggggtcctctgttgacaaacttcttggtttccagctcttccccatctgcagcaggcctctggataaattctctctccccaggaccccttctccctccgatgggaggaaggacagaacacagctcacagcccaagaggtgggcagacccagtccagctgtgactggagctggttttggcttggggctcatgaaacccactcagtgcagacatcagctgcccagagagccctgggctgtcagcagctgggctccacatagttcccagggaagaatccagtcccctctgagctgacgccctcgcaccagccatcggagtagcggcgagtgacacagatgacagtgccctcagagaaggagagctcattgtccttctggctggtgtatgggtacagtgtcaccactttctccaagtatgaggcaggcacccagctgggctcatcaggcccaaatcctggtgggggggaaagggc

SEQ ID NO: 147458 - DNA, 424 bp, Homo Sapiens
  misc_feature (16)..(16): n is a, c, g, or t
agtacttcagtagtgnatttttcttcccctgctttccttgtcactccattttagtggtaaactttttgagtgctggggttctttgttagatctcatgctctgtccctttctcagacgggcattcagtctggcatctttcatttaggggatgaaacatgacaaattatttctcagtagccgagacgaaccagctttttgttggtaattcaggggcttctgagggaacagctagtgggtgtgtggtttccatgagtcctctgaattcgatgagagtggccaatgtgtggcagcaatgagtcaagacacctgtgcacctagcgtagagaacaggtattttgctggatttgattgaagatattcttccatggcaccttatgtttatattttctatatcgattattaatgaaagataaagatctgtaaa

SEQ ID NO: 147459 - DNA, 708 bp, Homo Sapiens
  misc_feature (70)..(163): n is a, c, g, or t
catggacttctcaactggctgcttaagtgtcctcacacttggtgactggcttccctcagaccagatgatnnnnnnnnnnnnnnnnnnnnnnnnnnnnnnnnnnnnnnnnnnnnnnnnnnnnnnnnnnnnnnnnnnnnnnnnnnnnnnnnnnnnnnnnnnnnnncaggcaggcaggcaggcagaagcgattatttttattacctagctgggaggttacacttccactactttctgttcattagaagcaagtcactaagtggtccatattcaaggggcgtggaataaggctccacctatgaaaagagtaatgtcaaataacttcagaacatattttaaagtcaccactgctgttttccattttctttagagggatgaaattgacatctctgacatatctaaaatcatgttgaagggctcttatttaaacaagtcgttaggttaatattgggttctctgtagaaatagaaaacaggaaaacacaacgtaaataacaatacagttagcagtgattaatgccatgttgaataatgatcaaaaataaaatcctccaggtaaacttcctacaagtttatattaatagtattctcatttctttatttttctatcttcctttattccctgcagttacgtatactttttatatgtcaaatttaatgttgtgtggctatgtataaatattatagaataaaactagagttcaagagcaaa

SEQ ID NO: 147460 - DNA, 304 bp, Homo Sapiens
ttttttcatgtctacatgtatttattcatttctcagtattacaaaacatctaactttaaatcaggggaaaaaagtcagcacttttagggtgcccactgttagaacgtaattagtaatcaacttgccattaatttttggcatcctatctgcactgggtgcacgtattagttagctcttacagcataacaaaccatccaaaacttcttagctcataattgcgatggtcagccatttaggctgggcttggtggggccattcttctggtctcagctgagcctgtcaactaggcagctgtgcttctggg

SEQ ID NO: 147461 - DNA, 352 bp, Homo Sapiens
tagttttctgggatctcttgtgaggtagcacatattcaaacccacttttatactccctgagaggacatcgctgtactatgtagtccagaatataattgctgtccataatatgattcagaaagtagagaatcagttagtatattttggcaagacttacacaaaaatgcataaaaactaaaatatttaatgcatactagggtaaattagttgtctgccaaagccttgtatgtggaatatctcacacttcatgcatgcctggccattgagccttactgtggtcactttcacattttcagtagaccggtatgtgtacaaggctttgtgatttcttgttaaaggatggagacttaaa

SEQ ID NO: 147462 - DNA, 637 bp, Homo Sapiens
  misc_feature (316)..(370): n is a, c, g, or t
ataatttttatttgttcattatgcctcaataaagctcacacagtcatcttgaggtatgaagtgagtgtgtaaagcacagaccccttggtctgacacagaaatgctcagtcagtaggagttggtgctggccctgttatcattcacaggtgaacggcttctcctggctccacactggtgttcacccttgtcacatcctctacagaaagcagagactgcagttatcccaacaagactctggggagctcttcaaccagcatctggtcctcactgttgtcccagctacttgggaggttgagttgggaggattacttgagcnnnnnnnnnnnnnnnnnnnnnnnnnnnnnnnnnnnnnnnnnnnnnnnnnnnnnnntgacagagtgagacctggtctggaaatggggctgatgccagggagccaagtggtctagctcagtggatcccatctccatggagcccagcaagctaagatccactggcttgaaattctcgctgccagcacagcagtcggaagtcatcctgggatgctcgagcttggtgcagagaagggcatccaccattactgaggcttgagtagacggttttcccctcacagtataaagaaagcggcctgaaatttcaaactgggcagagcccactg

SEQ ID NO: 147463 - DNA, 280 bp, Homo Sapiens
aggataaacagaattttaatgtatgtaaagtacttagaacactgtttgccacttttgcacacacagaaagtcaactgaattagagaccggaaactgaaaggtgcttatactgtcttagtgggagagacagataagaaacccaacaatttcagtagtattttctgataataccaataacatgtttatcaaaaggttgctatgggaacccaggaattgaagaaaaaacgaccttagggggatagttttctggaataaaattcaaaaaaggctttcaatagga

SEQ ID NO: 147464 - DNA, 296 bp, Homo Sapiens
aacctcaggctttgtggaattagggattcttaatctttcagagagcaaagaaagtaattagaattttggatgttggaagaacttataaaaatctgacccatatatacaagtttccaaaataaatctctaaaatttgagctcctcctttatgtaaatttgccaaactcgctatagaaatttatgaaagccagccagcaagtgattttgtagaataggccagaggactggtgaaaactttggagaattactggcttttcaaaagctgataatggccaggtgtggtggcttgtgcccat

SEQ ID NO: 147465 - DNA, 276 bp, Homo Sapiens
  misc_feature (55)..(71): n is a, c, g, or t
ttttaaaggtctttttagtttattttgtccaatgctatggagtcacaaactcagnnnnnnnnnnnnnnnnncagaactaaagatgaactggtcaaacctcagactgagagagagattaggtgacttaatcaatgtcacgtggtgaatcagcaccagaagtaagtaggactagaacacaggattcctaattctgagcccagacctttttctttgcttctgcatcagttgttctgtttgtcacatctatggggcgtcttcaggcagtagagactggtt

SEQ ID NO: 147466 - DNA, 896 bp, Homo Sapiens
  misc_feature (720)..(783): n is a, c, g, or t
tttaacagttcaaagagtataaatattaggtttctataacatttttacttcttacaaataactaattggtttgctagacttttctatcattgcttgttttagttatataacaaaccactccaaaatgtagtggcttaaaccaactattatttctcatgattctgcagtctgtgctgggctcagcaaggtgtttcttcggttccaggaagtatcttccaaggctggaacatccaaagtggcttcttcactcccatgactaagctggagactagccaggcatccctctgtttacatgttttttccacatgactagcttgggtttcctcacatatagtggtcttagggtggctggacttcttattgcatctggcttccaagaatattttaagatgataagccaaaatgtacaaattcttatcaaactcctgctttattattcttgctaatgtcccattgactgaagtaagtcacatgaccaagcccagagtctctgtttttcctttagtcagttcatcagttacttcctcccacttaccgagatgtttggctttgcttttgtgatccaaatggaatgtgtaccatatgtgagttttcactgctattggttgatcagtagcacatttcaggcacttttcacattttctttgatagatgtgatagtatgccactgtcctatagtcccatctgcttgcaaggctgaggtggaggattgcttgagcnnnnnnnnnnnnnnnnnnnnnnnnnnnnnnnnnnnnnnnnnnnnnnnnnnnnnnnnnnnnnnnngagagcctgggttagaggtgcccgcacgtgtcgagaccatctggccaaggacagagagatgccccctgggagaatgttttaaccggcgcagcggagccgcttggctgcgcccg

SEQ ID NO: 147467 - DNA, 722 bp, Homo Sapiens
  misc_feature (82)..(97): n is a, c, g, or t
  misc_feature (658)..(658): n is a, c, g, or t
aaatgtgtgtacttatttattcttcactaatattaaaccaggtaatttatatctgtctttggcaaataacatacacaaatcnnnnnnnnnnnnnnnnaatgtttgtataaaattgaatattcatgattttaaatttgacaaacactgtcaggtaaaaatcaaactattttactaagttaacatctcattcaattagttgtaagttgtaatagcggcatattttacatgagactattagaaaaggataatattaagtcattaacattataaatctgaccacttttattaggttgaggtgaaatagagaaatctctactatcctggagagaaacaagcaataaaaccatgtattacaagtttaaagaaatgaatttatcctaaaatcatcagtatcagcaccccaacaaagcaactttgccatttctacttaaagtacactgtagcttgatcagacacttatctcagcagtacttgtttaagcaggtctctttgtacaaaagcaaaacagaaagcataacaaaatccatagccattatttaccttgcacccagtaaaagccaagagatttaaggtaaggacattttctaatcccatacccatgctaacatcatcaacattgctgatacaaaactcaggtcaggaaaagaagctcaaacangggaaggtgagtggcaacattttatgtatgctaaattggatggcaatattagattacatcttct

SEQ ID NO: 147468 - DNA, 347 bp, Homo Sapiens
aaggaatgataataataatttattttttgaggactcaatgtcatttcaggccctgtcttaagcattttatgcaaataattttaattaattaccaaaaaacactatatttatatacaattgttacttcaattttacacaccaagaagcacaaaaggttaattaatttaaccaaaactggagagctagtaaataatggaggcaaaatgtaaatccagacaatcctctgaaaccatgcttttaaccattttgctaataaaatctcaaaaaatgtaatcattgaaatagaaaataaataggttaaacaataaaatagatacagctgaagacagaaccagtaaactggaaga

SEQ ID NO: 147469 - DNA, 119 bp, Homo Sapiens
  misc_feature (1)..(1): n is a, c, g, or t
nagtatacggtatcttcaccctgctctactacctcttcagcaattttttcctagaggtcacctcctaagtatacaaaatataagaaacaagggtaaattagcccaataatttgtagatt

SEQ ID NO: 147470 - DNA, 569 bp, Homo Sapiens
gaatccactgattacattttaatgtttgtgaatacacatataaaacacacattaaccttaacaattggtggggaagattggcagcacaggactatgcacaacaaattagcaggcactaaggcagaatatcttttacagcagaaagaccaaatctgtccctttctgatgcacatcttcagttttgggtcatgagctagtggtggaggtcaaggccaaggtcaacctaagaagtctacaatagcatgcatcaatggaaatgctgcagaacaaacatggaggaaaaagtaaaaatgctcttgtaaccatcaacacctgcaaatatgccacttactctttttctcttgtgagtgcagtgagcatgactaaacacagtagctctctgggaagagcaagaataaaggagtcttcagaatgagttgtaagatatgtatgatgcttacaaagtggagttcacaattgtcctgtttaatgtcagtctccttattttaagaatgcttcaggtgacaaaggcctgtgtcagcagtatggatcatgatgagattcctggaaggctgaacctctgctggtac

SEQ ID NO: 147471 - DNA, 446 bp, Homo Sapiens
tttttttaaacaaatacataggtattttaattatgttctgaactggctagtggtttatattagcttgtcaactcttctagctttaccacaattcttttagattcctctgagatactcccaattactggaaattgctaccttcccccaaagaatggggtagccacattccagggcctagtgttggggacagatgagaaagaacagtgacagttcccctttcccaatatccttcacttcacatattacgaggcctcagaaatagagtaaaattgactgtcaatcctagctttatatgaggtggtaagtgaagaaagaaggggattaaagttctccaaaggcatcttctctccaggtgattctttaatgaggatgacagcaggattgaggcttctggaaaattctcacacaggcattaggtgtaatcataggaagttccaataaggtcc

SEQ ID NO: 147472 - DNA, 933 bp, Homo Sapiens
  misc_feature (188)..(231): n is a, c, g, or t
cacagagctggctcaacatatcccaagagccaagcagactttatttctgcagcaatctctgctggtcagggtgcctgcactcctctacccactgcccttcatggctgctgcagtggccgcagctgtggcccatggcaggccacactgtcaaggttcagcgatgctgcagtcatagcagaagttgaagnnnnnnnnnnnnnnnnnnnnnnnnnnnnnnnnnnnnnnnnnnnncacgttctccagctccagcagacgcagcttggtctccatggtcagcagctgctccaggtccagccgtgtctgctcgctgcccatgggactgcccagcaaggcactgagcccatctgtccacaaggtagaactcccgcttggagggggcaatgaagttgaggtacgacttcctcctccccacggtcatagctgattgagaaggccaactcatagaggtccttgttctgcttcccggagcccttctcccggacatgggggcagtccttgcctgtcaggagtgccctcatgtcggccacagggagttgctcgggcagactcatccagggtagagcagggctggcgccctcctccatgtctccgtactgcagcagcattgatggtttgggggacaggacagcagaaccacagcttatctgcgtggagaaagggaagagggccagagtgcatgagaggtccgtgacacacaagccagccgccctctcgcctgccactctgcctgccctcatgccccctgcccatgcccattcagagaccctggcgccgcacggtctgctgatcttgcggaagagcgtcccctcacagaggcggagcaagcgctgctggcggatcaggcccatgagctctggcttcagcttctcccgcagctccagaatagggggagccagtgtgccctcactggtgcagccgttcagtctgccgcag

SEQ ID NO: 147473 - DNA, 554 bp, Homo Sapiens
tttagaagaaaagtacttttattacccccattttacaataaccgagagaaagcaaccttactttgatctaaggtcaaatatgatctaagactaactagtgaggggcagaactttttctccaggctttgggcttcagatctgggctcttcaccaccacagatgaacaagtggataaatgaggacttcttttcattccgtggctgaagaagtgacatggaagagtctaccattcattttacagatacaattatgtatctgtaatacataatacataattatgtatctgtaatacataaaattacagtaagtcctaactcactgatgtttctaacttctgaatcatctttttcttcttctttctttcttgcaatcctaaaaccgtcagagaaactgttttgaactcatattgaagtgtaacccatccaagcactgggtgttttatgggaaagagaataaaccttttgtttggttcttacttcttaccacccattcatttgtaactatacaaatatcaagcacctactgtgtgctaggaacctttttttaggcactag

SEQ ID NO: 147474 - DNA, 427 bp, Homo Sapiens
  misc_feature (297)..(297): n is a, c, g, or t
ttttcaggtagaaatgctatttataaaactgaagcagagcagtgggaagagcgaatgaaggtggctatttgagaagacccccaaaaaagcgagactgcaaagcactcgcggttgttccttttctgatcttctagctacaggcagcgaggtgcgctcccaggaaggcccgccctcttcctcctgatagggcgcaaggtgccagggacgctcccccgctcttccccgcccagagggcactgtgtgggggcggacgtttgtgcccagcaacatgagcgcggcgcgagaggagcgcgatgngagaggggtcccggcattctcctcgttctcactaggcgtggagaattactccaggcggatcgtggcatgatgggaactgtagttgacgaccgccgccccgcgcctgaggggcagtaaaagtcgccaggtc

SEQ ID NO: 147475 - DNA, 198 bp, Homo Sapiens
ctgccattccgctatatacttactaattattattttattcaagatcatgcatgctctacttgaaggtctatttctatcttttcagtgctacccttacgcactagcctaatcacattatttctattttcaacatctaggaatcaattacgtagtgaacatgcctaagaaataataatctgggcagatgcagtggctcag

SEQ ID NO: 147476 - DNA, 1180 bp, Homo Sapiens
tggctcgtcttgctcgttgcttgtggttatgggttgctgtctccgttactctctggtgtgggcatgttggtctgcgtattgcttcgctcggggagtgccggggctgttggttgtgcttttctcaggtcccccgaggtcgcgcgcgttaatgtgcgcctgtgtgatgggcggcctcggtgtttggcccgtttcttcttctagtcgcggccctcgctgtgttcgttggggataatgtaagtagttgagactgagccaatatatgtccgtgtccaggaccatagaaccttgatcgaaagttggtatatatcttgatctcagattgttgtgcactttggagtccagattgcgacgcccgtggggaaagatttccagaagcccacttatctagaagttttgtgtagaagtttctgttgaaaagtggctttaaaatttagccaggctgcaaagtctgtcaataaatgaatctcaaagttactatctggtcagtaagcctatggaagtccccagtaagtaccaagtgcaagctgaacagatttagaaagtcgaatccatactttctagcatcatcatgaaaactccatgactgaccgacacatcatttccaatgttatcatcaaggcctcagtgtgtaccccaggacacactttcaaattctcaggcagttccttaagaatgtgtgggagtttctgcaatgtctttatatgtgtccagcataaagatccagtaaccagtcagtatgaacactggtggtttctttatgacttttacaagccataagcagttcatttagatgagttaaccctttggaagctaaaatgaactctgaagataaatcgaaaattgaacaaaaatttagcaacatcctactaagtaaaaaggagccaaattcaagttgctggtaatgaaaatgtttctctgcttgtgcatgaaagttctccactgtatcttctatttttgtaatagcaaacagttcttctttgatttgaggtgaaaccacataatccaagggcagttctcccttagcattcctctgttgtaaaagcactgggcccccatgctgtagtagcagcttgccaatttctacatgtccgcggacgcgtgggtcgacgatatcccggaaattccggaccggtaccagcctgcttttttgaacacagctgttctataggtcacaatgccc

SEQ ID NO: 147477 - DNA, 470 bp, Homo Sapiens
tttttgcactggctgtacctttattatttttacctcgttcactaacagctccgtgacgcaaggttaccacacacagttagatagtgtctgcattgcacatctaaggctatacagcaaaagaatcagaattagtacaaatacaagaactatatttacagtctgtatactcaagctccaaacatcagataatatttacaaaataaaacatgaaaatgaaaatccaaaattaatgtacattgttgctaatgtgctcaactccttcacgggggagagatcagtttgcaaagtcttggttcaaaaaggccacttatgcattatgggttttgttgtcatgtgtgaggatggtgacaagagacttgaaatctcaacagacaggtactttagagccacaaagtctaagacgatgccttaaatacaagaaggctgagggactcctcaagtgagctgatgccagaataggcagaatgaaa

SEQ ID NO: 147478 - DNA, 496 bp, Homo Sapiens
gagggatgactgctgggggtagactgggtgccaggggccatgggcccaggacccagtcttggccattcagttgagtgaggctgaaggctgggtttgaaaaggcaaaaagacaagacatccaggcagggcttctcttttctttccacaagggacaagagcttggcttatttaggctacagccctgctgctgctcccttccttcttctgtcctgtttccagccttgcaagaaggctattcacaattaggcctggctgcttctctcatttttttcctcccagtttccaaacaagccctcagtgaacatcattgaagcgtgactgcctgtctgcagggagaaggattccatttttcttctcagctggtccccagggccacgggcacagggagagggacaactgcagcagtggggaggaggcacagctagctgcacagttctctcttctccttgtcctagtcagatgaaggaggctgcactacaaacccaaattttgcaaa

SEQ ID NO: 147479 - DNA, 519 bp, Homo Sapiens
ttttttttctgtttgtaaatggttttaagtgaatgaatgccaaggctcacctttgctccgaagggttggcctcacccgccgacctcactccaccctgggcaggtcactgacagaaccacatggtgtcttttccaggagctccccacaccaagtgagaatagcatgccaccaggcctctcaactcccacagcctcgcaggagggggccggtcctgttccagatcccagccagcccacccgtcggcagatccgcctctccagcccggagcgcccgctgttgtcctccggttaaccttacccctgacccggaaatggagcctccacccaagcctccccgcagctgctccgccttggcccgccacgccctggagagcagctttgtgggctggggcctgccagtccagagccctcaaggcgctggaggcagtagaacgtctcagttcttcttctcagctcttgtggccatggagaaggaggaaaaagagagtcccttcttcagtgaagaggaagaatgtagatg

SEQ ID NO: 147480 - DNA, 466 bp, Homo Sapiens
  misc_feature (448)..(448): n is a, c, g, or t
ttttgaaagacttcacgtttatttagttttcccaagccaagtatccctgtgtgtggtataaatattccagaaagctctccaagggtcaaacacctacttgaacccaggtctcctgcatgataatacctgggctccaactagatgggtgcatctcagcctctgcagagtgtgccccccaagagtctgtggcagtggatcccccgattccccctacccgttccctgtccctgtagcaactagagttttaaaaggttctttggcagttacataacttggcccttgaagggtttctgcccagcgcctcctttctggcttagtctggacaccactgcttcccatggtcaggagatggtgtccctggagatctttttgcatctgaagttttgtcacttccattggggtgggaggaatggacgaggctggtggagaagctgctggccacaggagncttgtagaaaaatgcttg

SEQ ID NO: 147481 - DNA, 571 bp, Homo Sapiens
ttttttaagttgtcagttttaatgagtgctacaaaaatgaggattccttaatgaagccaggcacaccgagagaggacaggacacgtgcttcaaactggagcgtgtgagatgcaggctaaagctatatcctagggggtacatagcatgccttctctacgcaaacacgcacaggtcaggggctgtgttcctggagaaagtagatgccattaagatcttgtttgagaatattgtatgtgatgacaaagctgttgggaagtatcccattggtaacccagaaaggtgtattgtgcttcttcagaggtggaggcaaactgcagctcttcttcaccaacacagtgaagctcagtgtcatatcacactttccaactattactgaggggtcattgctgctttcctgaaacctggtggcccctgtctataacctgtgaaatggtggtagagctccaccatcctggccagctcactctagcaagatactaggacttcaccatttataatcaatacagtaccgaccactacagagatcccagggcattggaacagtatacctgccacaaggagcaacacacat

SEQ ID NO: 147482 - DNA, 437 bp, Homo Sapiens
ttttttgtggtagccactcagatatttattgaaagtatcaacaaaagaagtatttgtctttaaaaggcacttagtctctgtttctttgttttcagaacccacctttacaaatcatctacaaacacatgcattatgggactcttcctggaagagcacagtaattaaggaccaggggagttctgactgatcagaagatggtttaatcaccaccagccagtcagaagggatttgccttgaacaggtttcatctgcacaaggcaaaatcacgagaacaggacagggtggatgcagggacgtgagtttgggtcaaattgggagattgggaaccaagcacagcattaggagatggcacaggcagcttagcatatcagaaaccagcaaagtcaggaattattttcttaattccttcttagaaatgtagctacatgtccattttg

SEQ ID NO: 147483 - DNA, 454 bp, Homo Sapiens
actacggtgatgagtaccggccgctgttcttctaccaggagaccacggctcagatcctggtccgggccctcaatcccctggattacatgaagtggagaaggaaatcagcatactggaaagccctcaaggtgttcaagctgcctgtggagttcctgctgctcctcacagtccccgtcgtggacccggacaaggatgaccagaactggaaacggcccctcaactgtctgcatctggttatcagccccctggttgtggtcctgaccctgcagtcggggacctatggtgtctatgagataggcggcctcgttcccgtctgggtcgtggtggtgatcgcaggcacagccttggcttcagtgaccttttttgccacatctgacagccagccccccaggcttcactggctctttgctttcctgggctttctgaccagcgccctgtggatcaacgcggccgc

SEQ ID NO: 147484 - DNA, 1006 bp, Homo Sapiens
  misc_feature (301)..(316): n is a, c, g, or t
tttattttgtttagaatctacattttattatttcaaccaaaataatattttaggagaagtggtataatagtcagtacaatctctaccagccattagccatgttcttggttgaacttctaaaactgaaactggactgtaagtgccttgagggcaggacccaagaaccatttgtctttgtctttgtgttccttctgcgccttcaaggtgcattatctcataagaaagacatatgtaagcagttataatccagagtgatgagttatgattatcttccatattgagcataagattagtctcatcnnnnnnnnnnnnnnnnggtccggactctccatcttcttccattggctattcctccaccaagacaaaaaagcagcagagctgaaaggatgttgctttggcttgttgacacccacttccgactctgggattaaactgagtttgcttactaagaacccctcctgaccaccaagcaatgcagttccaggatcagaggtcatcctcttccaatctttgacttccacccggagttgtagataaccctgcccacagttcctcccagtcttgtcatcaggccaggagcagggcaagatatgagtcccagggactgtgtgctcacagcagctgtgcccagagattaagctatgagaagccaggcggtctgggaaaagtgaactgctaacctctctagttgcactccaaactttgacctctgcagctggggaaaaagtccatgataatggccttacactcatcttcctaagccactttattcaccggctttaagacttttttctaggtagagattcacagttttcaggtataaaaagtctttcctggagcatctttaattctaagccaaggaacttcttaagtgattgagtaatgtgttttgtgattctcacttcccttaaaatattaattaagaaaacaaatgagagcttctccttaaggggtacactgagagttaaactgactggccttcagtgctagccatattgcactttct

SEQ ID NO: 147485 - DNA, 276 bp, Homo Sapiens
ttttaaagccatggaatcctttctttgagaggagctgcccttaaaagccagcacataaagcagacagagttggtgcttctctggttgtgcctgtgtaccacccccacactgggtcccaccagagccctcatccctgggcccctgaggacttgatgaagactctaagagcacagcttgaaaaccagatgaaatgctttctcagattccttctgtcaaggcattctaggaaagaggccaacagcccagtctctagagccaggcggccaggtgtagagt

SEQ ID NO: 147486 - DNA, 482 bp, Homo Sapiens
tttcaaagcagagtaaattgcattagcttttaattaactgctggagaagtactaaaacatttccgccaagttgcaataagaaaatttagtgggaacgtctatcactactgaaagttactaggttgggaccaattttcaagcttagcaacattcgagatcaggataccgtgtgacagctttgaccatctcccgtttgcagaaactggtttgggactcctacctgtccgcctggtccaggtaaggaaagccattgctgagaagagggccgacccaccccaaggtatgagttatttcccaaaccgacccgcttcgctgtaaaatatgactggctcttgattacattatttaacactggtgaagcagaatcagtggtcgcccctccacctgtctgcctcatttgccttgctcaccattaagagtcaagctccactgcagtagtccgcagagtcggagcagaaattgtgtggacaaacgctcccggg

SEQ ID NO: 147487 - DNA, 441 bp, Homo Sapiens
ggtccccccaaaacactgcgtgtttggttagccatccccttgggcagtgctgcattcaacaattgcctgtgattgtttttgaccagccccctttccccttccaagaaggtgtttgcaataggaaaattctgagtcaggtcaaataaagactacattgcaaggtcttccagggaaccaccagataggtcagataatgacagttctttgggaatggggctttgaaggagctccagcccctctttgacccctctaatggcttccaagctgctggtttttgctgtgattgtagactgttgtttttcaaggctagggtagaaaacagactggaaatagggcaaattaaaatgccaccaagcttactgttaccaaaatttttgtctttttcttgcataagtactgtctggattactgcaaatctttaatatccagagtcctggaaag

SEQ ID NO: 147488 - DNA, 860 bp, Homo Sapiens
tcttgttctgtttctaactttacacatgagagttaacctgtttggccttttttccccctctgtaaatgatgagtttggaccgagtgacttttaaagacttatccaaactcaagttcccagtttggtcttgtctggtttccatctgtgcccagggtgggcagtccaatgcccagtgccttcgaccaagatggtcctgcctgtctgaggaccttggagtgcattctcccaatgggtactgaggcctcacgccttagagcccccagcatccctactcatgctgggaagatgcgctcccctcaccctgctgtggccacacagaagcccctggtttcctcagaggcacctctggcaagctcctttcacaaatcttgcgaaacttggcctttagacaatccgagctcttgactgagctagatttttgtttttgttttctttccccttagagtttccacaatatcccttttgagcagttagggttagaggactatgaatgaactggactgttcgctacaaaattaaattcgaggacattttaattaagtttggttatgagtacgtcatagtttttatccctgggacatacaagagccttaagacatcttgtgtctaaaacactgcattcttagcaaaaagcccaccaaggagcctgagggaaggaccttataaggtccttatgtcattaaaaggagaatacctcaggaaccattagtaatggccaggtttgggacattcagcacccagtatgccggaacctcagagaagggattcagtacagtgccaacatgtccttcatatatcctttggttaaattctgagatgagccccagacatagagctttggattactatcagagcggccc

SEQ ID NO: 147489 - DNA, 262 bp, Homo Sapiens
aaaggcatacagatttattcatgcacacagggagaaccagagtgatgaccccaacctcccaatggggttcggaagcttatacaccatcttgaggttacagaaagaacatgggctcaaagtatggccacagtttatggtggaaaatcaggtgacagtggcaagaccggttacaggggggagagcagaggaggcctggctagcaaaggtggccttgttctacagatgaaacctcacaggtagcagccctgagagagaacagatg

SEQ ID NO: 147490 - DNA, 483 bp, Homo Sapiens
gcagaaatgcggtgtttattgggaaccatctgcctgcacatctcatctatgtgcgcgtgtgtgtttggtcacattgaggtccgtggccagtgatgcaatcagacagccttcgccagccccacacggttattggtcctgtcaaagacactgtaatactcccagatgaagacattccccaggatccactgctgggaactatagtcaccctggaaaccactggtgcagaagccctggtcctggctggtataggcggagggtggcagggggtacttcttgccgtggatctcgaagacagccgtgggaatgctgctcaggcgcccgcagtcgatgtcaaactcattgtactggcccgcagtgggtccaatggcctgctggatgttgaggatgttgccgccaggccccaccagcagggaggtgccggtgtccaggatggcctgacagccaccgtcacaggccaccaccacgccgtcaatgatgacactt

SEQ ID NO: 147491 - DNA, 770 bp, Homo Sapiens
  misc_feature (330)..(375): n is a, c, g, or t
  misc_feature (595)..(613): n is a, c, g, or t
tttcgactaatgatatggaatgttccttgtgtttatatgtgtgtcaggtaactttatacagaaatgtttaccacaaatatgtgttaatgtttggtgtagcttggactactgcaaggtcttttcaggactttcagtagaagcctgtgatgactgctagaaatccaccacagatcacaaattatgaccctgctttgtatggggtttataggtaaacagttaagtcagcataaatcacggaggacagtctgagagtgatcagaaatacttcagttctcacactgcataccttcctaacagattgtcaaaaggtaattcttctcctcatcctcnnnnnnnnnnnnnnnnnnnnnnnnnnnnnnnnnnnnnnnnnnnnnnaagcatcattaattctgtcctaatacaagtttggtcaaaacgaaaccattgttatctctgaaaaagaaatcagcagtggaaagaacatacttgtgggcacttcagatgttcactaaaagccttaaagcagcattggtctttcttcatccctgtaaaatgggttatcaccaggagggatcatttttaaatcaacagaagagacaagaaaatgccaatgccnnnnnnnnnnnnnnnnnnncactttctcacagccacagggtcgtttccccggcagtcttgcaaaagcttatcaatttctctcacaacttcctctgcatccacagactctctgcccagatccctgttggggtggtcaagctgctcaagaacagcacccatctcactggaatcccggc

SEQ ID NO: 147492 - DNA, 631 bp, Homo Sapiens
gggcttttagaagttagtcatttaaaaatgtgttgattttctgaatttcaagtctccttactggttttaaatagcttataacaaaagtgtaaatgttagaatgttccagcaagcagaggaccagcaggccgccgagctggccccgtctccagctgtagttgggggacgcggcttactcacttgaacttggccagtagaaaattttgcagtgggttccaaaactacatggttacaaacactcgcttggtaataggcacggtaagacgttgtgctgtgtgggctgcaggggcggacgtggcggacttgcaccgcccagccgcgcccccctgcacccgcgttgtcggcggcgctgcggcggcaggcacggaatctacggctccagctccgcagcgccctcgctgcccgcagcatcggggcgggcccgcggcacagctgttcctgcagctgcttcaccaccttctccaggtgctcccgggcctcgcgctcccgcagcaagtcggaccgcagctgctcccggtccgcctacgcgtgctgcagctgcacctgcaggtcatcgatctgggccgagtactgggcgcgcaggcagctctgctcgcagcctttgtcgacaccccggcctgccggcctgctc

SEQ ID NO: 147493 - DNA, 281 bp, Homo Sapiens
tttatgaaataaaaaccactttattttgaaagctgcaggggagccaagtttctccagcctggacgtggaggcccggggcccagggccgggcaagcaggacagtcactgtggtttcgggggcagccaggccagctgtgagcacatcaggctgtactggccccgcctggcccaggcgaggcatcataaaacatggcatgagccgatttctttccagctgcaggaactccaatttgtgcaggaggagggtcatttctttaccatttggggctgaaagaaaatgg

SEQ ID NO: 147494 - DNA, 401 bp, Homo Sapiens
agaagctgtttccaccttcaaacagaaattcacataaaggactggaatccaaatatccaaagcacccaaagactatgtaaatattaataaatcacatgctgaaactgatgaaccctgacaccaaatattttatcctgaagaatatgtcccacccagcttccttcatatcagtaaatgacaccactcactcagtttctctggctcaaagtttaggagtcatctttgattcatttccctcacgcttccatatccatcagcaaagggctactaactgtaacttcaaaatacatcatgaatccaagtacttatcacaatttctatcactcttattgtgaaatgaacaaattgtctagactactaatataatttaactaaactggggggcttctattcttacactc

SEQ ID NO: 147495 - DNA, 533 bp, Homo Sapiens
  misc_feature (364)..(364): n is a, c, g, or t
  misc_feature (477)..(477): n is a, c, g, or t
ttttagaaataagtctcatatggaaggccatctttattactatcatttcactgacttgtttacttacttttttacagtatgaagtatttttttatccatatccacagtgggaaattagactatgagagactattagagagaatgccatgtagtagacgaactttgagtaatactaaatatttcatacaggcatacttcattttattgcacttcacagatacgtgttttttacaggttcatggtttgtggcaaccctgcattgagggtctatcagtaccatttttccaaaaccatatgctctctttgtatctgtgtcacattttggtaattctcacaatagttcacactttttcactattatatntgatactgtgacctgtgatcagtgacctttgatgttgctattgtaattgttttggggtgacacaaaccacgtccatataagatggtaaacttaatcaatacttgtgtgtgttntgactgctccactgactggctcatctactcttcctttccttgggcttccctattct

SEQ ID NO: 147496 - DNA, 440 bp, Homo Sapiens
tttatgttccttcatgtttttatttaaagaaagtgaatcaagtaccaaacacggaataaaggcaaacattcatttttggggtgattgttcccttcttggcaatccctgttttattgagggtatcactagttattcaatccaaggattttttttgtttccacaggaggtgggtgtttctttgtcttcttagagtcaggattccagatctcctgatgtgtgggacttttcttggccactacgatttcatctacagtcacgagctgtagcaccacctcagccactgctcgaaatccttgggctttgactattagggtgtcccacacccttcctgggccacatttattatcccttcagttcccacacccattaggaggttccaccttggtgcactccactcatttctgccatcacgtctgagacagctaagcctgcattctctg

SEQ ID NO: 147497 - DNA, 750 bp, Homo Sapiens
tttccgaatgtctcctgtttattatgcttgagggcagttttaggaaaaggttttatggctgctgaggcaagagtaagtaatgcaagatgtggggaaaaagcaaattcacggagtcctctctgcaaatgctgtggggctggtgcctccgacaaggcagatggatgacccgcaattacccgcccggatcccccagcctcaccccgctccctcccgcctggtctccaagcaatttcagactttttgtacatccagagcagagattgtgtacgatttctctcgccggcagaagcggctttcaggtaggggaaggaggccgaggcatgtttatctttgaacaaaaggcagctagagacaaaaagggagcatggccctgcccccagccgcccgctcctggtgccctccccaaagcccaggtccttcctctggctgcagaggggagattttaattgtgtgtgctcagctcagcttcttcagggtgccaagatctggggacaatggtgtgggctgctctgctggtctctcgtgtgtgggtcaggtggtgtctgtgcaggtaggaagcagtcaccgcctgggccaggctgtgtctatatgagtacgggaagggagccaaatggctgtcactgggcagtttctcaacccgggcaggcccctctggagtcttcccttggtggcgggaagcaggatttaaggtgtccagtttgagggagaggcccttcatcaccactccagaacaccgcgggcttgacacag

SEQ ID NO: 147498 - DNA, 477 bp, Homo Sapiens
ggaacaagcagcaaaatgagaactttatttggtgcagtcagggctccatttagttccctcactctgcttctaatcaccccttctcccagccctcttctatttgatagaggtctgtccctcagatcagcaatgtcttagcccctctcctctcttccattccttcctgttggtactcatttcttctaacttttaataaacatttaggtataatacattacagtaagtgctatttagatacaaacttaaaacatactatatattttaaggatctaagaatcctttagagaaggcacatgactgaagtacctcagctgcgcacgctgtagccagtttttttaatgtaaaagtaagaatgccagccttaacctagccctgcagataaaagctaacttttattaataccagccctgaataatggcactaatccacactcttccttagagtgatgctggaaaaataaaatcaggggcttcagat

SEQ ID NO: 147499 - DNA, 1039 bp, Homo Sapiens
  misc_feature (331)..(373): n is a, c, g, or t
ggggtcctttttcatttgtctgcttctcgctcccttccgtgttctgttccctcttcctccctcttccctgggcctgtttctcgctgtccctgtcttttatccttctcatctgcctcttttttgctcaccctgtttctcactgccctcccctccgcctttctcacccctctgtccttttgagctcttttttgctctgtctcttcatttgccttttgcactctcaaactctttcatcttcccattcgctgtctgtatttctccataactatatctttcttcctctgtctccgcccacccacatttttctctttccctttctctctttggggannnnnnnnnnnnnnnnnnnnnnnnnnnnnnnnnnnnnnnnnnngtcttctcatccctccattcccatctttccccagcaattaccagctctggctgggtcgccacaacttgtttgacgacgaaaacacagcccagtttgttcatgtcagtgagagcttcccacaccctggcttcaacatgagcctcctggagaaccacacccgccaagcagacgaggactacagccacgacctcatgctgcctgccgcctgacagagcctgctgataccatcacagatgctgtgaaggtcgtgtagttgcccaccgaggaacccgaagtggggagcacctgtttggcttccggctggggcagcatcgaaccagagaatttctcatttccagatgatctccagtgtgtggacctcaaaatcctgcctaatgatgagtgcgaaaaagcccacgtccagaaggtgacagacttcatgctgtgtgtcggacacctggaaggtggcaaagacacctgtgtgggtgattcagggggcccgctgatgtgtgatggtgtgctccaaggtgtcacatcatggggctacgtcccttgtggcacccccaataagccttctgtcgccgtcagagtgctgtcttatgtgaagtggatcgaggacaccatagcggagaactcctgaacgcccagccctgtcccctacccccagtaaaatcaaatgtgcatcca

SEQ ID NO: 147500 - DNA, 399 bp, Homo Sapiens
cctgagtttgagcatctcaggtgccactatagagaatagctggcataattattgcctcctcaacttaccaaaacctgtctctggaactgactcacaaaataaaaactactgctcagactcttacagagtgacaccaacaagttgattatctcgtggctgtagtttgaaattgtagaggtcttgctgcagctcaggaaagaatctgccttatgctaggagaaaaatgctgtttctgggttaacagattagggaaagtccaggaccatgttagaggttttacaaaccaggcctgtcaccatcagaaacatgccactgaaagctagttctcttggggtgccacttggttccaattctcatgacatcccactttttggggatccctagcctttgtcttccttt

SEQ ID NO: 147501 - DNA, 560 bp, Homo Sapiens
tacttttactggccttttgtgttgtggtctgggtcagtttctgtaaatgaaggacagttctggtcaaaggttttgccaaccttccttcctggccccacttcaaggtctccgcctgtaagaggatgtaggaaattgacctccagaatgtctcttcctaacttcaggctcacagaaaacgtgcctgccagaatgtgccgctcctcaaaggttcccaaggattctaccttcagtctgtttttttctcccacatactccccacccccgtccaaactactgccaccttccaagacccctgtgatcccttcaccctctgcccactttctctctccagcctgccccaggccctctacccagcagtctgagggaccatccttctcaggtgacaggtcaaattgtcactccagtgatttgcccagctgggtgaccatcgcagccacagcagctcacagcaggccctcaccaattccctcaccagggacatgagatgcgttctggaaggcacccaagaggaaaaacagacaaaggtcctttccaattatggaagagaacatgaactgaga

SEQ ID NO: 147502 - DNA, 628 bp, Homo Sapiens
ttttaatttcaataacaatgcaacttgatttttttattcaaaattgcatatacaataagagttaaagaattcttctcctttgagatgatggcaatgataactataggcattctcaaaggcatggtaacaatgactttcaagtctgtgatgttcagaatgaatttatccagttttcttgaaacaataataaaaagtattgaagactgtggggcatgtaccctgttctgtagctcctcatcttaaaatgtcttggctgtttttgaagaatttccttgaaggtatgcagacttcaaaagctgaaaaatctcctccttccattcttaattgggcactacaggcagagatccaggagaggtgacctgctaacaatgcaggttgaatagattggctataagttggtgtaggggtgttttctgtgatcctcgtaagtttgtgggtgtttctgtgatcctcttaaatttgtagttgggactgactcctttaagatgcagaaggcaggtaatccaagtttggccaatttgtgtctttatcctccagcctcagtaatttgttcaagagtgggcacttgcttgaagtcagttcagagcaaatttggactttcaaagaactggacttgaaggaaagaaga

SEQ ID NO: 147503 - DNA, 476 bp, Homo Sapiens
tgtggctgctgctgatacgaaggttgggcatgaggggtctgggacggtggttgctgggagtagtgtggctgctgctgctgagggtgaggactttgctggttgtaatatggagtctggccctgttgaccatacccgctggggccttgttgtccataaggaggaatctgctgtgtataagagaggccgcccatggcactctgcgcccggccctgcatggtcatcgggtaccgctgcggggtctgggacccgtatggctgccctgggtacccatgtccttgctgcggtcctgacggaggtccctgttgctgcgagtatgggttagtcccgccatatggctgaggtctcatcttgcccatctgatccattggactggatggctgaggggtcggggcgagcggctgccccccgccgccgctgctcccgggtctcatgggcgcgtggtggctcctttgttgggcccctcccgaggcggccgc

SEQ ID NO: 147504 - DNA, 872 bp, Homo Sapiens
  misc_feature (109)..(109): n is a, c, g, or t
  misc_feature (201)..(201): n is a, c, g, or t
cgggactgaagttattttggcaaaggagcaagaaaaaggtctggcccgaaataactgacccgaagtaacagaaatttccctttcctaaccttctttagttcaatttagnattctaatagacgagactttagtttaacgatttttttctagtgccgaggtctccctccctcagaacgcacagcagcccgcaggtagggcttncagccccattcttggttaggtttggctttcgctggaggtgccgcaagttctgtgccatgaaagcaatctccctccagctctggagacaggtggggcacagcttccgtgacttttctttggtgggaaaaaggtatactttgtagggttaaactgttcccagatgcgctcaaattcttccaaaaaaaaccgcacgtactcgtcgtcctccgtgatgagaacattctccctgttgttctggatggcttgcgtggtccagttgagcgagccagtgatgagcaccctcttgtccacgatggcaaacttgtgatgcatgtagcctgggtcttgatcgtgccggacctggatccctgccttgcgcagcagaccgatttgcgagccgttgagggccatgtagtcgcagtcggtgacgacccgcactcgcaccccacgctggtgcagcaactgcacggcgcggcccagctgcgggctggagaaggcgaacaggcagagatccaggctggcgcgggcggccagcagggcacgcagcaggcggcttagcgcgctctcgccgtggggcaggccgcacgggcagccctcggggagctcggccagctccgcgcccggagcccgcagcagggcctcggtacaggtcacctgagacgggaagaacagcgcctcgcgccgcggccgca

SEQ ID NO: 147505 - DNA, 342 bp, Homo Sapiens
cagttgaatgattatttcaaggtcttctaaattttcaagctttgatctttgttctagttttttctttttgagctctgcctctcgttgtttctcgcttttccactgttgctcccccagggtcacagggtgggctagaagtgtcttcagatcctcctgcttctctaaagtaacagcagcttcatactctccatctctgaaatcctcaggaaggaattcccctgcctccccattgccattcttctttccagtgaccagttcctctactttcagtaccatcatgttggctgaaggagtcttgtatgtttttctgtcgtggaaggaatccctggagttggccctccc

SEQ ID NO: 147506 - DNA, 796 bp, Homo Sapiens
  misc_feature (471)..(487): n is a, c, g, or t
gaacgctggtgatggttcatgcaaaagattactatgcaaggagcaaaatctaagactgctgtttttcccaataaattcaattgttttccacaatgtagaattttaatcttcaaattaagtgtagctaggacagtgagtgaaactaatcactgcttgacttttattttcatctaggaaaaataacatctgatgtcaccacattaaaatgccttcctgcttaatatcagagaaaaaaatacatgttgccagtttagactcagcgcagtttatcatttggtccaaatttcatattcaaactacaaaaaatattttttaataaagaaaacatattcaaaacatacatatacacacatacacacagtgggaggaggcaagaacccaaaatgaagctgatgctattgtagcatttattagcaagatcattagggaaatgtaaaaatgcaacaccctttctttcacattaacatctgnnnnnnnnnnnnnnnnnccactctaagtgtccaaatattggaaaaaaagaagcaagcggaggtcctgaattcttgtaaaaactgctgaacaaactcttcagtttctcttaagaagagtcaccaggataggcagtttctcaacatttgtgcttcatggcaagcttgtgcgcagtttctgcaaactgctgggcgctgttcttcaggtcttctgtcttctcctctgctcggcctaatcgctctccacgctcattcaaggcctggcttgccttctgcactgcgctggtcacgctgtcagcagctgaatggaggatgctgtttcctccccc

SEQ ID NO: 147507 - DNA, 457 bp, Homo Sapiens
ttttgaagtatgcagtgtttttattgaaaagatgtataacttttaacaaaatatgtaacactattacccagtcaagacaaccactttcattttattgaccttccagttcttgtacatattaaacagacaaatcactgttacataccataatgagcagcagctcaattacccattcccaaaccatgcaattccaccccagccgccccaaattttaaatccagaagacaaacctagaaaagcagcaagataaatatttacaaacattgtagaaaaacagcagtatttcaagttttgttaaattctttccttcagacataatgtagacatagaggaggaacagctgagagtctctgcatcacagaaagagaaacctgagcaaaaacaaaaccatgctttctaaactttccagtgacaccaaaagggagacactagcaactaagtgtacttcagaagtctc

SEQ ID NO: 147508 - DNA, 526 bp, Homo Sapiens
ttttagttttaaatgggcaatttattaagtcccacagatggtatttttgggaaggaaagtgggtactcacactaagtattccaggaagaaaaacatcactgacctctccatgctgcaaggggtccaatatactcagtctgtcctcagattgaggctaatatgcctggagcatggtgctatgtatggggctcagtgtgggcttctgctggccatttgggtacacagcatggtcttatccaggtcagcctcctgaggcaaagtctttgtgttgagtagatgtgtggtctccatccctgccattgtaagaattttgttcaggagcccattgagtccattctctctctcttgtttcctctctcaccaccacgtgatctcagcacacactgctccccttcattttgtgctgtgaatgaagtagcctgaagtcctccccagatgcagatgttggtgccgtgtctcttgtacagcctgcagaacaaatttcttattcctagacttttaacttctgcagggatcatcaatcttg

SEQ ID NO: 147509 - DNA, 522 bp, Homo Sapiens
  misc_feature (393)..(401): n is a, c, g, or t
ttgtctttgggagccttttaataatgtggccagcttatcatgacaagcgtctatgagaaataaaatgcattctgcacatgacagatgatgaactacccgaaatatctcgtgagaagctctggcaggaacagcagggtgtctggattcttaagcacaacacattcagcagccagacccagaaactcaaaggcagcgttgggaagccactgcacgtttgtaaggagtcaggttgtccacacaatggcgctattttgggattccggcttctctgcctgtgacctgctgaaaccattcatgccggcatcatgcctattggaaactgaaactctttgaagttattttgaaacgagaatcgactcaatctattccactatagtttcatacaaagcatannnnnnnnncctcatttcaaaataatttcagacttccaaaaagttccaaaaataggacagtgtgtatacccagttccccaaataacatcttacataacactgggccagcgctgccagtcacttcgcagaa

SEQ ID NO: 147510 - DNA, 625 bp, Homo Sapiens
  misc_feature (43)..(43): n is a, c, g, or t
ctttgtgggcctgtgttttctggagggaccaagttttttccgncagacggggtggtgtgaccatcaacaagaagggaaacctggttgtgtctttgaccagcgttggcactttggagggttgttttgcacgcagttttgaaggggagctcggtccaccaggacttcctgggcttctatgttctggacagtcatgggatgtcagcccggacgcacgggctgctggggcaatttttccaccccatcggttttgaagtgtctgacatccacccaggctctgaccccacaaagccagatgccacgatggtgttggggaaccgcgggttcacggtcaccaggggtttgcaaaaagactacagcaaggacccgtggcatggggccgaggtgtcctgctggttcattcacaacaatggggcttggattcatcgattgtgcctacactgattatatggtcccggacatcttctgagccttttggccagcacgcttgtcttcccccggggccaaggcagaggaggaggacgacatcctgacctgctgctgaggctgtacctccttgactaagctggttccttgtgtcaaagcacctcatgccttccattaaagagaggccgtgtccaccctgaaa

SEQ ID NO: 147511 - DNA, 591 bp, Homo Sapiens
  misc_feature (379)..(510): n is a, c, g, or t
tataatcttcagtttaatgcatatatcatgagaagagtctaaactgcttaacaagtataattatttttgagattgcatttgatcaaccaaaatcctgtgtaagtcttcacaaatcctttcacaaatgtctgttgcagaacagtttctttattcagaaagtgactgaaagagaatttcatgacacactgaaagcaagtatctctataatattttagactttcccaataccaagagtgattacaagtcagaagatcattacctaacaccaaatagcctattgcaaaacaggtctcagatacagaataggttttctggtgtttggttataacaactatacttcatatacataaaaaagcatttttgttatatagtctgttannnnnnnnnnnnnnnnnnnnnnnnnnnnnnnnnnnnnnnnnnnnnnnnnnnnnnnnnnnnnnnnnnnnnnnnnnnnnnnnnnnnnnnnnnnnnnnnnnnnnnnnnnnnnnnnnnnnnnnnnnnnnnnnnnnncccgtataacagaaatgagagcttgctccctggctactatccaatatacaaggatacagtaagtagatagccatctccaaa

SEQ ID NO: 147512 - DNA, 388 bp, Homo Sapiens
ttttttactgggtgtgctgtagggagattttattgaatcccatactcccatattggaagaacactcaagcccatttacagtgtgggactaatgctgagaggttgagtcacattggcaggaaagagcagagccaggaactgaagctaggtctgtgacttagagccggcactctttccactgcagaggggagaggtctcaaggcagaacctggggctgtgcacaccgcgggaagggcagaggcccctggaaacgaacaggagcaggaggcccagggctgcgcagcaaccaaggaggacacgaggaaggtgcttgtgccaccggtggaagacgtggctttggcttttaggctcccctcggggcaggagcagatcaaagagcctagccccag

SEQ ID NO: 147513 - DNA, 760 bp, Homo Sapiens
ttttgtaatcactgtttattatcacagctgtcacagacttggccatctgctccagtgacctccaaacctgtcactctttcattcacacaatggacattcattcattcattcattcagcgacacttctatgtgccagacacagaaccggggctgggtcacggaataaacaatgcaaacaagtccctgctctactcccacagagcttaccttccagcggggaggcagagcaaaaccaggagccagaaaggcaaaccgatgcatacacaggaatatcagatggtgatgactgctgtggaggacggaagcaggaagaggggacggcgggctagcgagtgtgggggcaggcgtggggagacacgacgtgggtggccgtggaaggcccttccggggaagtgacatctgagcagagatcttctccccaggagccagccctgacaagactggggaggaacattgcaggcagcggcacagccaggtgaaggccttgaggctgggaagagttgtgtgtgctggggacaagaactgaggtcagccaggctggggcaccctccagctagggggacgacgggggacaagggcagagaggaggttgggagggccaggccaactagggggacgacgggggacaagggcagagaggaagttgggagggccaggccaactagagggacgacgggggacaagggcagagaggaagttgggaaggccaggcctgcagggccttcaggccaggagggcactgggatcctctgctgggagg

SEQ ID NO: 147514 - DNA, 412 bp, Homo Sapiens
ttttaaaacaaaacattttatttaatgcagaaattctaaggtacaaaaacattttgtaaatgtcagctgtgatctactttcacctagttacagagttatgtacaaatcaagtcattaacattttcaatgtcaaaaatacagcacgctgttaagagttctgtcagtgctcattatcccactagatcccacaaagggcaaactcaaagatgaaacaaaggcaacgccatacaataaccaccatattccacaggctttctcccctaggacgtactaacagggagtttccacagggaaaaattctcttttaaaaaattaacagtaaaaataggagttacttactatctagatgaacacaattggttttcacaaaagcttttgctgctgtctggactcaccatgcttttttcttgag

SEQ ID NO: 147515 - DNA, 332 bp, Homo Sapiens
ttttttattagacattcctttatgctttgggaataagtgcggttaacaaaaccccctcctgggctttacattcaggtgggagttttattttcaagggagggaagttctgggggcgagatgaagatcgaggttctccttaagcagacggtagtacaatttgcacagcgtcttcacacaccttatcatgttcaggaaaactgtagagttgacctacccttcggtgctggggacaccaagagcgtctcccgtggcaaatgagctctaaattgacaaatctccagctgctcctggttccaagtcgaggagtccagctttgaacaaacttgagacta

SEQ ID NO: 147516 - DNA, 289 bp, Homo Sapiens
cttttacttaaagcaaacaaggtggagggtagctccttgcgaaacctaccacctgcctaaaagcgcagtggctcgggtggtccagtcccggagactttcttggcactttaggctcgtgcccacgggcggccaagtggcggaagagcctcacgcacgacgtgccgcctcacactcccgcggaggcatcgcgacgcagcgacggcgtgggcggagaggccggcccttcctctggcgccttcggctcctccccctgcgcctcacacgctcattgtgaagcgacagcggccgc

SEQ ID NO: 147517 - DNA, 412 bp, Homo Sapiens
ttggcactgaaaatcttttattgaataatgtaaattctcacagaggcctctgatcatacttttcaacttgtgcctatttattgaataaccaacatccttacagttaatattaaaatctttaagttgtgtggggttttttggaggggagggatgggcaattaccagcaaactccgcctcccccaaacctcacctaacccgaagctccccgcctcaggctcccggggagccaaggggtgggctgaggaacgcagcctacttttacccacctccctacctagtgctgggaagtgacggaaacggagacacccggctcctggggctggactcggaggacccatcctgctttccctctagcagcctttccggagctcaccacctttcctcccctcacaccgccaaagccctgcctcc

SEQ ID NO: 147518 - DNA, 660 bp, Homo Sapiens
ttttatcagaagatgggctttttattttgtccattgttttcctcaatgctggcaccaaagtgccgtcagggcccgtctcccctaggctcttccctgtttcttgggactatctcaccagtagctgcaaagaaagggcagaaaagagcttccagccagggtgaaggctactggggatgtctgtcaaattatctccagctcctgggtctctgagataccaaacttggtcttatgctggtcaaacagtttacgtagggcatcaatatagagtgtgtgatatttagccacgatctcctggcttggattctcaatcttgggcattggtagaggctccccgacgatggtggttacaggccgactatagggcagaaggccccaggagttcttggtgaagccacgtccatagaaagcacaagggtagatgtgtaccatgctctggaaccacttctggaagcggttgacaaagccaccaggagtgaaaatgtgctgatcatagaggtccgtctccccaaaggcataggcaggtattagaggcaccctgcagagcaaaagcatatcttctgaagcccagaaaggtagggaccttgtcgaatgccagacacgctgacggcgcatgatccctgggtctgcctacaggcttctcagaccccagtccagctgtgc

SEQ ID NO: 147519 - DNA, 458 bp, Homo Sapiens
tctgctggaaagcctcgcctttatcttcttgggaagccgagattggacataaagtagaatgatgtgatcagacatgttaagacagaaagagcacttggcatcagtgtggggtgtggttgcttcctctcctgaatgccttccttgttgtcttcatctgactagcactactcatatttaaagattcagctcaagcgtcacttcctttagggagccctccatgatcttcacggcctggccacctacaccgtcccatgggcctccgttgaagctgacataaacctggatcacagagcctgacacatcttagggcacatttgtttctcggccagcctgagggtctgttgaggattgggctcctgtctgcacttccctatggttggcagctggcacagaatccagcattttataatgactcactaaaaatatttattgttaaataaataagaataagcatcaaa

SEQ ID NO: 147520 - DNA, 1245 bp, Homo Sapiens
  misc_feature (97)..(157): n is a, c, g, or t
  misc_feature (667)..(714): n is a, c, g, or t
aacccctcgcctttcaaaagttcccgggtatgggggggtaaaaaaatattcccaaaaggggaagggacccgggtttgtggggtttgtgaccctgccnnnnnnnnnnnnnnnnnnnnnnnnnnnnnnnnnnnnnnnnnnnnnnnnnnnnnnnnnnnnnctggagccgccaccaggccagggtttcctgccggggaaggatgtcaaacccggggaaggcccaaatgccggatgagcccaaaaatcacgtctcttaaagtttcggggtgggaaaaggaaaaggtgttctgcccagctgagccactcggggagagccaagctggcagtttatggcagagaaggctcctgttggggatgttcccagcacgaaaaacccaaggggacccagcccaggaggggccacagcagagcccaagccacagatgggaggggagggggtaagagtccagagcaccctgccccattccaccctagctcaagaaggccatgctaaactgtagcccgccaggctgttctgccctgcccacaggtgtgagggagggggtggtcatctaagatcagtaagtccagtgattcaacagtgcagaggatgtgccaggaccaggccagcagggtctcatcctgaacttctgtttgccaacgggaggaagtgctcaggtgtgtgacaagnnnnnnnnnnnnnnnnnnnnnnnnnnnnnnnnnnnnnnnnnnnnnnnntaccaaagtaggatctaaattccttaagttcactaaaaactgtgaaaatttccggcatatgatgtttgaatatcaaacgcagagatttctgaagctttaatgccaatagttagtgagtctgtttagatggctgtctcccgctcatctgtgagtcgggcgctgagctgtggctgctgccaccagatgccgactcttgagggggacaatgggaggcgaggtgggcgctgctctgtctcccggccagtcttgctgcctgaggtgcgtcgagtgcagcgggctgctcgctcctgtgcatccagctggtcctcacactccgcctggggactgtgcgccagggggaaggtccgccgctcccagggctggacagactgttcatccagccccagctctggtgtggaacaacgggtatcctcactggctaagtgtcgcagagtgtcccgagccacaggggtgaggggtgctgagtgcagttccgggctaatggggctcctaggggactgaccatgggagtattctgacaaagagtggcta

SEQ ID NO: 147521 - DNA, 686 bp, Homo Sapiens
aatgctctaagttggtatgattactttttctaaagagctcaaagtgctttggtgccatagtatgaatttcattacccattgtgagacacaaagggggttagcaatgattctgtttgcaccctggaagccaaaggcaggttactcacccacttagttccctaccacaagaccttgaaagaaactggaaccccaggtctccagcccagagattttgttggaagtttccatttgcaggaaatgactgcagggcacatgtgggaagtgacaggaatttgaggactaacattttagttttcctcatttctttttaaatctgagcaattgttcattgatcgataatctatgttcttacattcagataaataaaaacaccaactggctattttgttcttacttagttttatgtgtatgtccaggcatttgccactgctcctaaatagctctccctgaagtcttctggtcatgagttaggtttcttatccagaagctcatgtagtgccagagcttagctctcctatgacaacgcaatcacattattgaaacatctatttagggatctgtcttctctaatagattataaacgccttgagcttgggtatcgtgatttaatgatgaatcctccatggtatctgaatcccagaatcctacaatcctgcatggtatctgaaacatactatgctcttaaa

SEQ ID NO: 147522 - DNA, 433 bp, Homo Sapiens
ggccgctcgctgttttccttgttgctgttgcactcactcatctcttgagcagtgaggtcatcttccaatatgatctccaggggatcaaaaatactgatcctgtgcaagcgcccttcaatttctatctctaccatcctttgagcttgagcgtaggtcagcgtttctcgcgtaggggagtgtttaacactgcatggggaagaaggatgcctcgctgcagagcctcgatgacatcgtcctttcctcctcatttggtaatgattaccctgatctattgggcctgagaaaaagccctcagggagcaggcttccctctgtgagtcccgaaaggaaatcccagcagacttcaagagcacttcttaagacagaccctccagacactgggtatctttctctgtatcagacagaaatcctcattgtatgttgaaactagattg

SEQ ID NO: 147523 - DNA, 425 bp, Homo Sapiens
  misc_feature (180)..(192): n is a, c, g, or t
caagatacagcttcaaagttaggatagtcgtatttctctgatttcccttttgctgcaagatatgtactgtaatgtggatttagcagctcattgacaggatgtcacctatcatttacccccacatgaaacttggaaacagaagtggttttatatatgtatatatttccatagttctatccnnnnnnnnnnnnngtcccatccacctctgctgttttctttattgtaattcaattcttggttaggtttcagggattgttctcaagttttcttgttctttgtgctgtgcctcaaggcagaatgtattgtcataagcaagataattgcagcattattagtttattcctcaccctaataaatacatatgttcagttagtcaaggaaagaagcatttgtatctgccaatgcttcatgtctttgataaaaaa

SEQ ID NO: 147524 - DNA, 369 bp, Homo Sapiens
cacggtttgactcaggtaactttatttttctctaaattattttatctggcaacatttctgtggctttaactattaactgtaaacataaaacagatgtgaggatgatcttattccaagaggtggccgctgtgttccagccccaggttgtctggtactttccttcctcactcctcacctcccacgtggcactatgcaaagcttcacattctatcttgttcttccttctccagtcgttcttgctcctcctgttccttctgcagccgggcctgtcttctcttttcagccaagatcttcgcagcctctcctgcatcagtggtgcctgctgtgggcttccccaaggctgcgctgttttcggctttccctcctgcg

SEQ ID NO: 147525 - DNA, 190 bp, Homo Sapiens
ggtctaatgtaatagatacatttttaaaactatcaagataatgtgtgaatatttcagggtctgcagttagctaggatttgtgagatgtagactcatagagcttagattctaagaagggaggtaagaaagatgagcatgcaggatcttaataaatgcctgctcattgacctctgatctgaggtagaaagtg

SEQ ID NO: 147526 - DNA, 459 bp, Homo Sapiens
caccctcttatcccaacgccaacccttgatagatgcgaaccagtcgtatttcctttgtgggaaaggagtcgctttttaaagacgtgcactggccatctagggaggagcttttacttcaactcaaaataggactggagctgactggtgacctggcgctcgatggacggaaacgctgttcttgccgcttcggcagctcccatactggtgggagaggcaaacttgcagtctgctcatcttaagatggtgaatgttgagatagggttgctcccgaaaagccgagaagaggagccgtttgacccaacttgagggtgatccgatagacactctttagggcgtctgcagagtgggtgcgcgtggagacagtcaataagagaaaatcgtaaatacagatggtattctaaatctagcatgcatgtaaagttgtgtgacattttaaagattacattttacactttaaaa

SEQ ID NO: 147527 - DNA, 754 bp, Homo Sapiens
gcgctggcccatggggatttggtccgattctgtacagagatagctgcttcatctccgcctcttcttggggttcacggcgtgcgatgatggcatcgcacttcctcctttcagttctcttccagctcctgatcggttttccagcttgactttggcctgcttagcagcctccagctcgcccctcagcacctcatgctctccggacagctggtcgaccttggcaatcaggtcattcttcaccacattccaggcgtttttggtttccagaagctgtgagttttccagtagcagattccccacttctttgcccattcctgagaactcccctaggaggtcggccccttcgtccacatccccgatgacctcagaccctgccgtcgacagctcatggtacagggagtcggtgttgatgccgaaagctttgttcacgatgccctgggttgggctgcttcctgtgcggtccaggcgggtctctggacacatgtccagctctggcgtggagtcaataatgtcttgaacatcagaccactcgtcactgctgcccatgcctatactgacgttgcgcatctcctgggtgacctgtacttccatgttgcggctgtcgcgcttctcccgggcacgcttgctgttcttggagcccacgccatagtcccccaggggctgcaggctctcgttgaggggtgtgacggcggccgagggcacggaggatgtgggcgtgttggacttggtgcctgtggtgctgggtgtggcggccgca

SEQ ID NO: 147528 - DNA, 375 bp, Homo Sapiens
tttgaagaatatttttgatttgaggttggttgaatccaccccacgcggaacccacgactaagaagcgctgtgttttctaagggcttcacacaaattacctcatttaaatgttaccacaaatggatgaaaaaggtattactataacaattttacaaatgagaaaagggaaacctagggctggatcaaagtaacgacggttaagtacactcctgatctatcgtttacaagactagactgagggctgaaattttgtcaatacaacgctgtccttgtactcgcgtaagcaagtctccatgagcacaactccaggactgctagagtgggaattttctcccagggaccccatttctctttggctggaattcccgatctcca

SEQ ID NO: 147529 - DNA, 411 bp, Homo Sapiens
acacgaacaaagtcagttatatttgacatccagaaggctggtcacacccatgagagaaatatgtagagtggtccacctaactcagaaattagaaagtgataaagtcacaaacttacaaaaccagcaaaaacaacattcagtgtatttagtattgagctctgtttcttcaggaaaagggatgggttatatctgcatggaaaatgggacaagtattttttaagctgattctcctgggaagttgctaatgaaatcattccagtgatgctctgacacaggattgtgaagaggacgttgacccttggtggtcgttgtcagcaacacggatgctcaaccctggtgggtgcctttgttactgttttgtccacaagagattttagcctgtcatgtgctgcatgcaggtgagtttttaac

SEQ ID NO: 147530 - DNA, 397 bp, Homo Sapiens
ttttttttcatgggcaatttaaaaaaatagctttattgaggtatactttgacatgccataaaattcacccattgtatgtgtacaattcaattacttcatttatacaactgttcaattatcaccatattccagcttaatggtcaatatttgctttgtcatttgatcttttctctatggtaagcaaaaatctattatttgaaaggttccttcactgaaagctgggtggagttgaactctaaaattacctacaaaattactttctatctagtcatctatgtctaattcttcaatttgacacatgcatgttactagcacaagctgcattttaaaggcagcaggaaggtcttttactatcattagaagttaactttaaggattgagcaggcacgatacagca

SEQ ID NO: 147531 - DNA, 230 bp, Homo Sapiens
gtcaaatgctttttcttatcaattgaggtgatcatgctgttttttccccttcattctattaatatggtatattattacatcgcttgacatttgtatgtagaaccatccttgcatttctttgataaatctcacttggtcatgttgtgtgatcattttaataagctgctggatttggcctgctagtattttgaagtttttttgcatctatattcataagggatattggtctg

SEQ ID NO: 147532 - DNA, 724 bp, Homo Sapiens
ttgagctgtgattacgttattttcaatggactgtttaaaaagccctcccctaaaagtcacttgcaaatcttcaaattcaaaattgtaaacatcagtgaagagttgatcaataaaagctttcattaatgtcttcctgtgcctgggtacaattaccttaatgctgctcagatttttttcatcaattttctgtttaatggtatacaaagtggcagccatgctgggacagctaacaatctcaaattcttccaagagagctgataatccattgcttgtttctatttcacaattatcttgttctccatccctttcatagctgatgttactgcaacacattatacagagaaacttggccttggcagcatggtggtattggacagcattcaaagtcttcagtaatgtctgatggcagtttttttgagagttcaatttcaaaccaaaaagatcaatcaaaacagcttctgccatccttgaaagaatacttttatgccaaataaatcactcgcctcggctcacggggcgcaggctgtggctctgcacctgcccgggcacctccaccggcggctcacagtccattcgggacttctgtcggacaacgcacaccagaggcgattcggtcctcgccttcccgctcttcacttcggttgcacaccggtctacggcgacctctgtgacaatttgccgccccgtccctcgtcctgagcctcacccacctcgccgcggtcgc

SEQ ID NO: 147533 - DNA, 301 bp, Homo Sapiens
tttcaaaacattttgatttggctgaaatcagatcaatgggtgatgtaaatgggaaaaagactcaagagggacaatttttgatgtggcgtgggggtggttggggattattattatctgtgccttgataatacagggatcagggaatgaacctatataaaggtatataatcctagaattacagtacctttgagccaattctttctttttaaaagttatctcctttaatcacctaggggtaggtgagcagaggaggaatggtttggaaaaacactcgatacttaacaccctcccaaccagggag

SEQ ID NO: 147534 - DNA, 386 bp, Homo Sapiens
gggagcggctgcccaagccgagtgtgtgctggaacagttcggcaatgaggaccacaacaagttcatccggaagttccactccatgccctccagagcagagattccgcagccccggcccttagaaggcgcattcagccccatctccttcaagccaggcctccaccaggctgacatcaagctgaccgtgtggaaaaggctcttccggaaatttttgccagccccggagcctctcaagttggaccctgccactgcccacccactcctggagctctccaagggcaacacggttgtgcagtgcgggcttctggcccagcggcgagccagccagcctgagcgcttcgactacagcacctgcgtcctggccagccgcggcttctccgcgggcc

SEQ ID NO: 147535 - DNA, 486 bp, Homo Sapiens
cggacgtccgtcggacggccgttgtttttctacttgctcctagcgcaccactgccagaagcctctgcccctgccacacacccagagcatgcagtttctctgcaagttctcagagagccccagccggtgacccccaacagagacaccactcaccccgggcctctatctgtcctgccaacaagatgactctttgtgccctggctgtctctgaggacctgccctgcagacatatgttcccccttttccctgcaaccatgcaccagttctgtctcaggcagccaggagagctccaccattcaatggagctgagaatctcttttccctcactgtctgaatccgtcgtggggaaaaggacctccttcaaagtggttcctcccgattttcatcctcagccctaggatattgtttagagcattgttttcaccttcctagttaggcctacgttatagttaacaattatttataataaattttccctgttcaaatt

SEQ ID NO: 147536 - DNA, 424 bp, Homo Sapiens
tttttttaaggtgacaatcacatcaattttattttataacaaatagaatcatgtcccagttccaaaacaaaataaatagtaatgttaatatagagatttactcatggccttttttgttaaagagtcttaaaatgtttctttggacaatttaaaaattttcaatgttttttttactcccatacaacctagcccccctgccaaataaaaatcaagcatattttctcctgtatcttgtgtataggttatataatagtaccttttatctttaagatatgagctgaaaccccacctatggttgtagtgagcatcctactttacgcctcttatctcctttaaattcaaaacaggtatctcaaaaataaagttaatataggtttataagtaggacttgctcactcctgaaagtacgtttaagtaaatctcc

SEQ ID NO: 147537 - DNA, 400 bp, Homo Sapiens
aaacatgtaaataaaaataaataaagctgtgagataaaaccataaatgaagaagttataactgtaactagatctctccaggatccattcttagaggtagcaatttttctactatctaaaatacaagaaaccagagtctgtcacgtgccctacaatcttctttatgtaatctgtatctgaagaacttgaaattatcccacaaaacactgtggaagatgtcagggtttattccacaagagtccactgcttcttcagatgctgtttcattaatccctcttttcaagatatgaggttgacaggaagtcatctgatgaaatgctccacaaagaggttcccccgatataaatttaaatctgcttctcctcgttagctacagtttggatactcaaatgacaaccacc

SEQ ID NO: 147538 - DNA, 659 bp, Homo Sapiens
agatgccatacattttttatgtacctgcaaatcccagaagaacatccttctgcatacccgtctgatgttgagtttcttaccacaccagggaccccagcatttccaaagttgtaggcaaagttttcctctttcttgggtggtgcacagggttgaaggtccttaggctcctaggccaagggtccaaagtccagggatggagttggagtagaggcaggaaggcagcattttagaaacccagcaatgtatttcttatccaactctgcatttcaccttcagataaatgattttcttactggtctccatgagacataatcctgttgagagcatcttgcagtttcactgtctctggaaccttctagaggtgatagatggctggctataaatctgactgtagttgcctcatcatttgttttctggcatatttaaaatatcggtttctttcagctgatcatgattgttggtatactggcattgccaaccaatttttagaatgtgtgaaggtcagtgggctttatcaccactcctcttctctaactggaaagacttgttctaacatctcctgaagtttctgagagagcccagagcaggaactttgggctctagacagaaggccttggaggagggcgggagggaggagtacctgttggaggtgtttggga

SEQ ID NO: 147539 - DNA, 486 bp, Homo Sapiens
  misc_feature (412)..(425): n is a, c, g, or t
gtagtttccctgttttctgtccaaagttgccactggtatgacctatttttgttgggccctgctctctacctgttgataattggttcatttgatgaatatcctatgttaacctgttcaggtaacatacttctgcaacccatttaaaatgcatatccctggaaagggcttataaggatggatcttagtgctaggaattcccatttagctcaggatctatttttggctttgtccttgggagggattgctattatgttgaagtctggacatctggtctgggtttggatctttggtggctttttttatgaagagagatgtgctggaccagtacttaagattgttttggcaataatgattatgtcttattaggcaggtagaggtaaaactgttcagtaatagtgatttgtatattacnnnnnnnnnnnnnnttgaaggcaactatcttcttttttggttagagatattagattaaataattctttgatgttt

SEQ ID NO: 147540 - DNA, 450 bp, Homo Sapiens
tttgttgttgatccattcataagcatttattgagggctgactggatgcccagcactagggaaacggcagatggcacaaagggtggggtccccaaggacagggcgatttcagctcttcccttgccaaccccgggtcatccccagggctcaatcccaggctggggggagggtctgggagtgggggcagtcgtcatagggtgggtcttcctggaaatccagccgagcccgggtgcccttgcccaggtgtaggcagcctcctaggtggacatggagggagagcaggagggcgaaggctcagacttcccggcacctctgaaactcggtgtttctctacgtctaactctccttcttgctgcaacgcatttgccggggcgggcggcctctgcattcctgaactgggtcagaccaggagagaggattcctggatcctggcccagtggccaatccgccc

SEQ ID NO: 147541 - DNA, 538 bp, Homo Sapiens
agaactagtttactttttctcctgttcaatacttagctttggtaaaaatttgccgtgttcttccttatctgtttcagaagcattagagtttcacctacttggtgtaagttgctctttaattgtcttcctgtggatatgttttgtaggactctctgctttttctaaatttcactactcacatcccacaacattatcttcccataattctggcaaaaaggagtcctgggatacctctgaagtgtggcccttaaatcccagttcctgttcatacctgactcccaccaagaaagacttttaacttgaaagtgaccaaaacaaataggaaaaaaaggaaccatcaggaagcagaaggtatgcagtgagaagaatgctttagactcttgaggaagattatcttttgtcttctcagagagataagaaatggtattacattcaaggtgctattaaggaagaaaaagaatagaaaagagtacttacaaataaaaagtaacagtagacaactatttagaagggctaaaagataaaggaaatactcttt

SEQ ID NO: 147542 - DNA, 753 bp, Homo Sapiens
  misc_feature (486)..(665): n is a, c, g, or t
tttctttttattgctaaagagtattttattgtaaatatatatcacaattctttattctttctgtcatttatgggcatttaatttctttgaataaatttaacaagttgcaaatgaatatttagcaaattgcactcagattaaaataacaaaataatctcttatcagaagctaagaaatacattttcctcctcctcatccatatccaaagacggttctgaaaatgccttttcttctctattatagcaacacctagtggcttgagaaggccaggtctagaggtatgcatttacggctgggaaacactgacctttagctttgaagacctcaggtagcacctagacgtcggctataaccgcataacaatggtccccatctgaaaccatttaagtcagaatctttggaggaagaggccaggattggtaggttataaaagttgcccagatgattttaatgtgcaaccaaggctaagagctacttatctagacnnnnnnnnnnnnnnnnnnnnnnnnnnnnnnnnnnnnnnnnnnnnnnnnnnnnnnnnnnnnnnnnnnnnnnnnnnnnnnnnnnnnnnnnnnnnnnnnnnnnnnnnnnnnnnnnnnnnnnnnnnnnnnnnnnnnnnnnnnnnnnnnnnnnnnnnnnnnnnnnnnnnnnnnnnnnnnnnnnnnatctagactaagtctgttatttaacgcaagaaaaaaactgcaggccagacagttgaagcaatttgctggagtcatggagtcagatagt

SEQ ID NO: 147543 - DNA, 518 bp, Homo Sapiens
  misc_feature (459)..(467): n is a, c, g, or t
tgaggttttcacagtgggtgctgggaaaaaggcaaatattttttcccattggtttacccagtgagatgtgatactggagctgtggcagccatcttgtggtcactagcttcagtccttctggattggcactgctgattgtggcacctcttgggcacagcatttcctgcccggctctatgcccctgagcagctcctattggctgtccctggtcagggttgcatgctggtccaatcatccctggcgcaaaggagaggccgtggacatgaaaggaaggagccactgggtacatgtggtgtcacagatggcctgctctgcacttctacttctaaagcacagatgggaagaaatggatcttgtctacgatctaccctgtacccaactgggcacttacacagaagcctcactcattcaggactgcattagaattctcatggctaggttggccgtcacttcattttnnnnnnnnnttattttacgactgcattggcataaagaataacatctaggctggaaaaaaa

SEQ ID NO: 147544 - DNA, 420 bp, Homo Sapiens
tgcagtcgctgggaaggaaggagacgcctaaaccgcggcactgccggtttgagcgtagcaaacctgcccaccggctttgtagccccgattctctgtgttttgctcccgtctccgacgagagaggcggcgacggtggcgtctgcgacgggagacagcgcgtcggagcgagagagcgctgcgcctgccgccgccccaacagcggaggcgccgccgccatcggtcgtcaccagaccggagccgcaggccctcccgagcccggccatccgtgccccgctcccagatctctatccttttgggaccatgcgcggaggaggctttggggaccgggaccgggatcgtgaccgtggaggatttggagcaagaggtggtggtggccttcccccgaagaaatttggtaatcctggggagcgtttgcgtaaa

SEQ ID NO: 147545 - DNA, 439 bp, Homo Sapiens
ttaattaacaaaaaatttttattaggaaattaagtcaatgtatatcacttttctataattagttttcatttagacatttcaacttttatatttaccttgaactatttttttactgtaaaacacgttatctatcgtaatcagaagcaagttttacctccaatgctatattgaatttgtccattcttccaaacgaccaaaattctatgatgtccagtgtctgctattaccaatctatcagtaacttggtctactgttactttgccaggaaatagcaatggtgaaggtggcaaagaatctttatagagttttattccaattttattatctctgatctgccccctgtctttgtaatactttaaagcaattgaagtatataaaaataatttatctttgtgtccctctccaatcaaagaaaacaacatgtttccacgaggtcccc

SEQ ID NO: 147546 - DNA, 580 bp, Homo Sapiens
agctatgatcttgaagaacaagaacaaagtaacagaaactgttaaaagatctgcttcactgaaggcaacaagacacaaatttcaggaagggcctatatcagaaagaaggaacggacgcacacctccccaaggagccctggcactaactacaacacacacagggtttggccagacctggaccagcttttggaaaacactaactcaactgtcatccaacttgctgcagttaaccacccgtcagtcacccatcagggggcatgaagctctggtttgatcactttgctaagggctgcacaaggaagaaaaaaagtcataaaacactatattgtcaagcagtactcactgcttctcctcttcactgtcctctaccttgagtccctcaaaatatttcacctgcatgacatttcttcacttgagatgctgtttgccctttaaatggcatcttagcatttgaggtcctctagctgtcttctttcttttccttaggctgacaattctgctgaaagtttgtgaaaagacttgacattcacaaaatctaaggtcttctggtgataccaaatgtaacaggaatggaagcatc

SEQ ID NO: 147547 - DNA, 514 bp, Homo Sapiens
acgctttgggcggagttttacctgtgatagctgtggatttggctttagctgtgaaaaattattagatgagcatgtgctaacctgtactaacagatatttatacctaaacacaagatcttaccatagaatagtagatattagagatggaaaagacagtaacatcaaagctgaatttggtgaaaaagattcttccaaaacattttctgcacagacggacaaatacagaggagacacaagccaggctgctgatgattcagcttcaaccactggaagcagaaaaagtagcacagtggcgtctgaaatagcaagcgatagagaaaagcagagctgctgagtaggaaaaggatatatatattaagatggagccagaagatattcctacagatgaactgaaagactttaacattattaaagttactgataaagactgtaatgaatccactgacaatgatgaattagaagatgaacctgaagagccattttatagatactatgttgaagaagatgtcagcat

SEQ ID NO: 147548 - DNA, 389 bp, Homo Sapiens
tttgcagaatgggatgctttatttcactgtggcaaataacaaaaccatttatctggttcgtgtgtctatgtattggttgagggtctgctgatcttggctgggcctgattaggcaactctgctccataagcctcttatcctcctctgggaccaccagcctaacctggcatgattctctgcaaggacctttgtaaagcactggcccatgggaacacagaggactggttacggctttgcagctgaggcccaggattcaagacatcttgacatcgctgctcactggctgtggccggggtaactcactgaaatcctctgagctccagtatatgcatctgcattcagtgcctggccctgcatcggatagtcactgagggcccattttgtccatgg

SEQ ID NO: 147549 - DNA, 538 bp, Homo Sapiens
caccagggctttagatctgttgctcagaagtttctcaatatccctggctgcaatttctaccagctggcgtgcattatttggttccacagtatacaaatcttgatatttctcataaatatcaacaagctgattgactccacttgctgtttttgccagtgtgacaaggtcttcttgcatcttatccacccatgatttgatagtgacggccgaagggaacggctcctccgacgaggggccgatgagcaaagattggaaaagtgtcagagtcaaggccagcaggcagccagcagccatcttcgcgatcgaagatcaatgccccctccctgcccaagcgggggaaggagcggcgctggaaaccgcgggcggaggaagagcagcacacgccgccgggaccgcgggcgtctggagggctggctgcgcccggggcccgaggcgcggagccgcgcgggggacggcaagggcgggagcggacgccggggaaggggcggtggcgggcggacccactagcgtgcgtcggctgctccgcgccgcggccgca

SEQ ID NO: 147550 - DNA, 435 bp, Homo Sapiens
ctcctgcttcgctgcctgaaacaggcaagaacagagtggtctgcactagtcaccaggtgaggtgggaccaagaggccaggccgggaccgccatgtgctggaacctaacccaaccgtggtggtatcctacagtggggatgtgtgactgtggctcagtcatgccacctgaacctcaggtgtgccaccccaggaatttggaggtattgggcaaactaagagaggttgtatttgtaaactgtacccaagcacattagaatcccatcacctcccacttccatgagcccaaggccacaggtacctctcacctgcacagatctgccagcttcctccctcatcccctgcctaacaactgctgtcctcacaagctgaacgtgtgtggctgcttcagcaaatcatcaccacctccaatgtctcctctcccaagaggtcaatgact

SEQ ID NO: 147551 - DNA, 426 bp, Homo Sapiens
tttaacagtggaatacctctttatttagtatttttcaaactgagaagattacagacagaacctcttctgggatagtgttccctcccttgatcttgtttatgaggacatgatatatttgaaggccacccagtaaatagagatctgtgtaatttctttcctctgacttaaattcaggtttatttagtcattggagggtctcttgcctgaccaacgatgaataagctttcacatgtatacagttctctctataaaaatactgcttcatttcccaggaaattgtttttctgagcctccacaatggacttcattctgagtctttccaaagaatttaaggttcaaaatcattgtcacctcaaatcagagctcctcgggtgtggtgcggttacgaaaggaatcagcggaacccagatcaggccgctgctgggg

SEQ ID NO: 147552 - DNA, 562 bp, Homo Sapiens
tttatccccaaacttgttgcacacccacaggccatgatcagtgctgagagcttacagataatcagaattctcagggctatccatcatctgagtgagaggatgtaaatggagatctgtttgcaccaaattcttcgccaaatcctgatgttctgaagattcttcctcccacgacttcctccagacacctctgctgttaacaccacctttccagagttctcatgaccaatagccatgccaaattcagtccgaataaaggtgttattgatgagatctgtaatatccttaaagttcttcccataatcctcacttcgatatagcttggactgtccaaaagtcataattaccagtggtacatggaaggtagtcaagactagaatgaccccagtgctatctccaacccaggacaaggatactgagcctctgagatcatcaaacacatgctggtgcgtgttgttggccagcttggcgacgaagtcccggacccggccgcactcctcgtcctcgcccggcgcgctgcgacgccaacggcaacagcggggaaacgcgcccccggctgcggccg

SEQ ID NO: 147553 - DNA, 183 bp, Homo Sapiens
agaccataataccctttgtcttcctagaagtaatccctggagcctgcctgccctgtgtccagcactaatctatgagcttgtgatatttctttctttaagctagtcatatttagcagtggggcttgtgatatttctggtttcctgatctctctcctcttcaaataaacgcaagatatctaaaaa

SEQ ID NO: 147554 - DNA, 899 bp, Homo Sapiens
  misc_feature (554)..(592): n is a, c, g, or t
gaggttcccgtaagggtcgtggatctagttcaccagatgaggtcaacataatttgctaaagcccagaaggggacgctgacattatagtgcttccagttcaaccccgattcttcttcgaccccaggaacttcagcagcccctcccagtgctcgaactgtgaggaggcagtcaaagggaataatggaagagaggaagaggattttctcagttgcagtcatggcgtctgggatgaaggagtagtttccagaaaggaggcgttgtttgcttatctccagaccaaaatccacacttggcaaaaatatgatttcaggtcttttaggctctctgtgctcctgggaggcaagctttcccagaaatcgagtcatattctcatcctgtttggcactcgtaacacagactggggattgatctcatccagaactctctggagaagcttgaggctctcgtggtctggggcatctggcatgaagtggatagtggagtcactagtatcatagtaggcaatgcccaagtatcctgaattccacagcacacacagatggatctcggccagnnnnnnnnnnnnnnnnnnnnnnnnnnnnnnnnnnnnnnnggggcccggcactggggccgggctggggaagccggaggaggccgccccaggtctcggtccctgcggtgtcctccttgggttcgctcctaaggaggccatgagcttggaggctcctttggaaggaaggggtctgagggccctgtggggcgagtcgtgcacgtcttatgtctctgcctctgccaaccacgcgccaggaccccagcctcacgcgcttatcttcctcctcccccagctgccgccatcgcagcgttttcccgccttttcagtaacctgagtcgctacaggtgggagaacgccccgctgaccg

SEQ ID NO: 147555 - DNA, 1035 bp, Homo Sapiens
tttaagggtctaggttctttaccttgaaacatttcccttcccccaaatacactaagaaatccatgacaaagcgccataggcttggcagagaagcctgaaaagatgtgtgcttgcatttcattttttctatgtcccctcctccttttaaaaataattcctgagataaaattgcactgtaaactaaggagaaagatgcagctgaaggttctcctatgtgcacaataaccactgggtctctctccaggataaattatcagatggagaataaggctctagactgaacgaatttctaatatgactcttcagatgacaagtaatattcagcaacagaaggttttctcacagtgaagacacttgtggggtttctctttggtatggttgatcagatgcagaggaagatgtttcctctggcaaaatatttgcctcagtggttacattcaaaaagtccttccctaaaagaagttctcgaagggtaactgaggtttgtccacttgtaaaaggtcttcccacatctgttacactgatgggatttttcccagtatgcatcctttgatgctgagtgagggacgagctgcgactgaaggcctttccacattcactgcatttatacggcttctctccagtgtggatgatagagtgtcgaatgaggtttgtgctccagcaaaatgttttcccacactcgatgcattcatagggcttctctccactatgaatccgctggtgccttgtgaggcctgacctgcggttgaaggcctttccacactccatgcactcatagggcttctctccagtgtggatgctgaagtggcgaatgaggtctgccctattgctaaaggctttcccacactctttgcactcgaaaggtttttctccagtgtgggcccttttatgcaagatgaaagtagagcagtgggtgaaggcctttccgcattcactacacacatatggcttctccccagtgtgaatccgctggtgccttttgaggtaggatcggtggttgaaagccttcccacactcgaggcactcaaagggctt

SEQ ID NO: 147556 - DNA, 727 bp, Homo Sapiens
tggataactaatccacatggcttctttaaggatctgaagacaaatatcccagttggcccggcagataaatattgataatataataatagctgctgctcatggtgtgcttgccagggcctggcgctacccagacactgaacgatcatgctcttatgcaaccagccgggacctgctaagggaaaaagataagcaaatggggacgtgaagcctcaggaacctgacctgcgcttgcacaccacggtttgttgggcaccttagtgacctgtgccccagctgactgcgtgtcactctcatctccagggaggcaaggttcagcgtgtgactccaagatcaaccaaagccttcagagtcctggcacatgccaggaagcactggctcccaggagaaccagagcctctggggacaggcactgcaatgagcagtggcctcatgggatcttgagtacatttaaaaggttgaaagcctctttgttaaaaagacaattccattactttccccaaaaagaccaattttacatttaaaaatgccaccttcgtgaatttctgcaaatttcattgacttcaatttaaactcatttcctcttggactgtgataggtgaggatgaaaaatgcctggtcaggaaccttcttctgttcctttcctctttaaaaagcaaattccacagactccagaaggatcccaacatcatgtgttatttaagaaaaaacagagagatgaatgaggttg

SEQ ID NO: 147557 - DNA, 514 bp, Homo Sapiens
tttttcacagttcatcagtttattctcagatttgagatgcaaattatgccctatggcctggcggtggggggccaggcttgggctggaatctctcatcatatcccagccttccctaaggaggaagcagatgaaatctacaacaggggggactttcccttttaatacagacccaggtataaatagggcagcaccattaggatcctgattcacccccccaacatcttggtccccaaaccacctggcatggcaaggtgagcctggggaggtgaggggcagggggaggggatttgcagagctgggctgaggcaggaaaagaaacacaacccagtcaagggaagtccctcttccctctgtagtccgacctcagtcctttcaccgtggaagtagaaaggatcaaagggggtgggggtaggggtcccagcctgggatcaggagacatccagtgcttaactctggggaggggtagcaccaaaaggtgtgaagggcagcgacggaggagtgaggaggcaggcat

SEQ ID NO: 147558 - DNA, 536 bp, Homo Sapiens
  misc_feature (26)..(26): n is a, c, g, or t
atgtaccctaggaaatatagaaaaanaatgtagatgaatattaaccttgaaatgaggaaagagaactttctaaacagaaatagaaaggaaaaaccaataggtttagctttataaaaataacttcttatagattagaaaatgctgtaaagaaaatctaagagatgactgttaaatggggagagaatatttgcaacatttaatatataaagtgttttatcaatcaatgtgatttaaatggctaaaaatcttgaaaaaaatgcaggcttactaacaactgaaatgaagtgaattaaaattgtgagaccctgttgttttatataaaaaaacatgtaaaaatagaccatttttacactcctaaaatcaagagtttgaggatctgggactcttaagtgcagttatgggaatgaaacgattagagcctcatctaatcaaagcacatgtatgcttttgtccagaaattctgagaatttaaggatggtatcaaaagcgtacataaagttttaactcagagtacgtttgctggagcgttctttgta

SEQ ID NO: 147559 - DNA, 817 bp, Homo Sapiens
gcttccagaacctattttaatcttcagaccttggaaggtattcatatctcataagagtaatgtaatatatgggggcaaagatgcagccaagtagctcagcactgaaagctaagatgaagaagaaccccatggcttccaggaccttccccttgatgctgtggtcggcaaggagggaggtgactgcagaacaccagcatgctgaacatcaagaacttgacttattgaaggtgtcaggcaaacccatggccaggaaagccaaggttaagctccccagggtcaaggagccccggtatcctaggacatggtagaagacagtgctggaacctcactgcgtgtgtagaactacagatccaagcttagagagtgtgtctgtgtcaatgaagggaggaaagtttctcagcccgagctgacagatcaggagacagattccacttggattagggagaatataaaaagggcaaaattaggagatcctgataccaatcaccatcttattctccctggcattctggccttcagagccagaactacagtgatggttttggtcagaatgatagaaatagccatagtaaacacaactccaaatgctatttgttggagtcaccacgtagctgtgtgggggtggccaatgcatagggcagagcagaggaagcacagtgtgacggaggccagactttcagcagggtgcagctgaaagcccatgtactggctttaactgaggggatttcctgctgcttcacaaataccccaaggaccattgcagtaaggacagagaggcagggctgtgcaggccagagacatccccaaagggccttca

SEQ ID NO: 147560 - DNA, 337 bp, Homo Sapiens
ccctgtcaaagccatttattttaacaaatactcttccattgctctgtttttattcccttcagatgcatctttccttctgggattgtgaaaatggatgtcatttctgtagctttctgaagtttcggtgaagtttccttttcctctcagtggattctgtgtagcaggaagcatgagttgatttcagctttttgtcttctgagacctacttcagagtgtgttgctgctggtccgaggtgatggcctcttctcctctggtagcccccgaagcctttttttctccctatcagagcaagaaaggctcttaggatggttgtttgcacgcccaagttgacagact

SEQ ID NO: 147561 - DNA, 891 bp, Homo Sapiens
ttagaacaactcagggttcccttacatcggccgggtgaatttgattgttgccactccacttagaagcacaggaagctcagcccttacagtctgacacacagaacaaccaaacatccaatgaccccaagatataccacaccatcttgttgctgggaggacaacagctctgtgggtgtccggtctcaattgctccaggatgccgacaggggtgtgttggtgatgttagggaagaaggcattaggacaggccccaaactgagatcctttttgtatctttccatagaaatacaggcctaaatgatgccataattgcatgcttatctacaccagttcctatgtacacgatatcttttctatagaagtttaaagtgcctgggttcagaggtgcccattcctttcccacagctactggttcctcttgctgcttccagagaggtctgtcctcctctttcaaggaggatgcccttggggaagaggaatgaactttttcacagttgtcttaactaggatccagcatttggggtaaaccttcttcatacacacgaagaatcgcttcacacacaaacttgtactggcttgatgtcttcacgatcatattggcgctgttctcttatttttctggcaatattcagtggggtaaatgggcaggtgtcctctccgttaggcacatggctgtttccatagtgaccaacacacgggttcgacctattccagcactgcagtgaactaggacgggctcgctgtccactctcagagacctcacatagtttacaaattccagaaagtcggaggagtcatcgggcacaccgtggtcaggccatgcgacgtactggagatgtgtcactgtgtgttctcctcgtgccgaattcccaccaagcctcgtaccttagct

SEQ ID NO: 147562 - DNA, 367 bp, Homo Sapiens
tttgtctttgttggattgtgttcattcgaaaaccttgtcttagagctctgaaattctctcttctgcttgttctactctattgctgagactttccagtgcattttgcatttctctaagtgtgtccttcatttccagaaagcattattttttatttatgctatctatttcaattaagatttttcccatcatatcttgtatcctttttttatttcattaaactggacttcacctctctctagtgcctctttgattagcttaataattgatgttctgaattctttttctggcaattcagggatttcttatgggtttggattcattgctggtgagctagtgtgatcttctgggagtgttaaagaaccttatt

SEQ ID NO: 147563 - DNA, 486 bp, Homo Sapiens
tttgttggtgtgaaataaatatttgttttaataataattctgtacatattagtcaatgtatattcttactttgaagtcattgttttaaaaagacaatctctgataaaattttatcttctcaatttcatgctgttgtctttcatttccaacactcttgataatggtttgaacatttttgcagagtacacagggcagagcttcattcaggttgtccctccaaatgatttgctgtagtgcattaaccagaaatgctgaggcagcaagggaaacactaataaattggatggtttccagggactgtcgctctggtcgtaattcagcagtgggaatgatgacatcaggcagaaggagacttattcagtagcttctgatctcactcagtaaaagacaaagttcttcaaggggcctacaggtagtgacaataaactggctctctggagggggaaaaggttctgatttgtagcatttgcctgttttactggtata

SEQ ID NO: 147564 - DNA, 535 bp, Homo Sapiens
ggtcacagagttttatttagtagtaattactgtataacctgcaagtggtggttttccttattattatttgacagaagctggggttagaggagctttagacatttttggttccagttaaacaacaaacagtaataaagcatcagcgataataaaatgcaaatctctaacaaaaataagatgaattaaaatttgattaatatagtgcttttccctgttgtagagggcattgcattactattaataaatatacatatgaatggcctcatatcagagaataggacttcccttctggctttagaggccttcttcctccttgggatatggcaaatatcttcctcttttcatccagcttggagagtgcttgtaagagtgtctgcttgtaatctggcttacaaaggggtgatgtggtgctggtggtcccctcagattcagaagcttagagcagactccgggacacaccaacacacatgatcctcagtccttttaataaagcacgttcaacccttctcagagtgaccttgagtggttgcctcca

SEQ ID NO: 147565 - DNA, 536 bp, Homo Sapiens
  misc_feature (46)..(74): n is a, c, g, or t
taggatactatatcactattagtttggacttcaactagtctatagnnnnnnnnnnnnnnnnnnnnnnnnnnnnnaggtaattggccttttaattgctattatatatgagagcaaaatagaagactgacattttcttattagttccaaataactagataagttaatttgcagatgtataaaatttattgaaatcacctttgacgtgttgtaacatttttaaaaaaatcattagttattgtgctgctgcttctcagatatttttcagtgccacgaaagcttttattatcagttcagtccctgcccttaaggttcatctgacctcccttccccttccacagatttgtattaagtgaatgattttttctgtataagcattgggggggattgggggaggtgggatttaaaggtgaataaggggtaggcccttcactaaagaagcgtatctcctgttaggaaactgactatctaagcatagagttgttgggttagctttgaagttgaagactgtgaatctgtgtctcaagtaaaaatctagt

SEQ ID NO: 147566 - DNA, 665 bp, Homo Sapiens
tgcttttcctgcgtcctgctgggagctgcgcgctccaggtatcctggcctgccgccctaggccggcccaaggagccacacaggacagttgacccaacacttctgccacctgaagaacgacacctgcattcctccatctctgggaccaccaaggaactcagggagcttggaatctctcagatcaaaaagatactgactcatcggatagccatgccatcctgaaaacggccttcctttgaagaaaatgtgagtgggaaacatgaagagtgatgaaatgaacaagttgagtgactcccaccctgttgaagagattgaacttcatccccagttcctgtgaagctttctggatctcgtcttccaaggtgaagtggaggttctggatccgaacgaccctttaggaccccttgatgggcaggacggcccgattccaactctgaaaggttactttctgaattttctggagccagtaaacaatatcaccattgtccaaggccagacggcaattctgcactgcaaggtggcaggaaacccaccccctaacgtgcggtggctaaagaatgatgccccggtggtgcaggagccgcggcggatcatcatccggaagacagaatatggttcacgactgcgaatccaggacctggacacgacagacactggctactacca

SEQ ID NO: 147567 - DNA, 788 bp, Homo Sapiens
ccagccgggactcgaaggcaagattgtggctggggaggtaatgggtagaccacccccaagagcacttatcttgagtcgcccgaggcccagtttgtagctgcagggcccttggaaggaagccctgccaggggctggaaccaacctctcgtgccaaggctggtcagaccctgcagggaccacccttcaggagagcagaggggcctcctggagagggacctggcagggatctagagaggggaaatcctgtgtttcttccctgcgcatttcagggtttttacaaaagatgtactgatctggcagcgcggccaggcagacaccttcccaggactccagaaagggcctctcagagagagggcaggaaacggtaccgctgaccgggcagcagggttggaatttcatcatgtgccgaaggcccctgccacaagagaggggcgtgccgatgtggggtccgggtgtgcaccctggcaaggaaggggagtgggggagtacagggaagtacttgggagccagagtggctgcagagggcgaccacagtgctctctcctcccgcgccctagcacagtggggcaagtgggcccacagtgaacagcctggctctggtcccgtctgcctcccgaggtctgacacctccccctgggagcagcaggaaaagacaggcaaggctgagtccaggggctgagcagagggtcgggggcaggtcccctccgatgtccctagcccttcctggacagcatctgctgttcacgacgcgtggtcgacgatatcccgggataccgacgcgtacagcc

SEQ ID NO: 147568 - DNA, 1112 bp, Homo Sapiens
ttaagcggctgccttctgggttcccattggggggggaccctgggtaacctgtaggtggtgccagattgtgcccaagttggccatccggaactgggaatggtaagggttgttcctcccggcgtggtgacccatacggatggcccttcccaggggcctgcagtttttccggggacaggctgacctctggggcaccatctgaggtgatcagaacccccctggggggccccatttttttccagtcaccatcgcccacctgggctgggatgtcatctctctctttccttcacctccgaaaggtaaagctatcgggggtcgtttgggtggcggactctctccggctgcagaggcggcctcaagttgctgctgctcatagagggcctgctcactctcctccgtggcctccagctcgccatgggcactgcgcttgtgcatggccaaggtggaggtctgccggtaggtcttgccgcaggtgctgcaggtgtagggcttgcagtgtgtgtgcaccacgtggtgcttatacaagctcgagtactcggtgaagcgtttcccgcagcctggcaccgtgcaaacgtatggcttctcccctgtgtggatgcgcacgtgattcttatagttggtggcgctggtgaagccgcggccacagtggggctccgggcaggtgtagggcctctcgcctgtgtgggtgcgcacatgtaccttgcggatgttagatgtggtgaaggagcggccacagccctcaaaagggcactggaacgggcgttcaccagtgtgggtacggacatgcttctgcaggtctcctgaggtcttgaaggccttgctgcacagctcctctgggcacttgtatggtttctcaccagtgtgggtacgaacgtggctcttcagtccatagcctgtggcaaaggcctttccacagctggggaagtcacatctgtatggacggtcacctgtatgagctcgttcatgcacctttaagtgatgagcggtggtgtagagacgcccacagcccttgtagccacagcggaatgctctgtctccaacttgctgcccttttccattacggggaatctggccctcgtgccgaattcaaccacccaggcctcgctacctgaccc

SEQ ID NO: 147569 - DNA, 806 bp, Homo Sapiens
gggaaggtcacatctgtatggacggtcacctgtatgagctcgttcatgcacctgtaagtgatgagcggtggtgtagagacgcccacagcccttgtagccacagcggaatgctctgtctccaacttgctgcccttgtccattacggggaatctggctgtcatgaagaaccttgctggcatactgctccagggccaccactgcgtctgcactgaagccctcatcatcctctgctgccaggtcctccaagcccacctctgtctgtacggccaggatggtgctctccgatggcacagccacagggtggtgaatgtaggcagtggagccatcttccagttggacggcttccagggtgctggggtcatagccttctctgggtgtgcggtgtatgtaagccatgctgccatcttccagctgcacaggctgaccatcctcaaaggagagagcttctttctgtaccgtcacctggtgaatgtatgcggtggtcccatcctcgagctggatcacctgccacttcaagaagcttctctcctttgacagcttgcatggacgtaggctgttgtcccatcactaagggtcaccgtgtgcagcacccaagctctccatggcaaactgctgctcgtgcactcagacatgaagttggcttctggccagcacacaagagcacacagctgaggtcagagatttccttctgggtcacaaatctgacagccccacgagggcagactcacagcacgacagaccgccatgcaccgggccccgcacaccagcgccggccccacaacccgcctgcgccatagcccgcccag

SEQ ID NO: 147570 - DNA, 529 bp, Homo Sapiens
  misc_feature (422)..(422): n is a, c, g, or t
tttgaacaggaattgcctatgtttatttaaacatatttgccacatgattaatgagcaacataaaacgcttacacctgggaatcatgaaacttgtaatttccatgctccttgcctatctgacctttccttagctcacaggtacatcaatacacatcctgtctctgtaatacctttggtggttgtgttagagcggactaactgcttaacaagtcccaaattccagtgacttaacacagcaaagtttatctttcattctggtcacattcccttacagagctactgcaaagttctattccatgcagtcatttaggaatccaggctcattccttcttatggctctatcctcttctgagtttttgaaatcttctccatttggccagtgtaaggcaaagagcacacgtggaaaaggcaccacttctctnaggtgaggcacatccactctgatggaaactagtcttacagcccaccctggtgcacagggattaagaagtgtaatctattgggatcccaagaataggggagccttggg

SEQ ID NO: 147571 - DNA, 708 bp, Homo Sapiens
tttattgttgaaaagtatttatttacactatagtcacaaaccatccattatctgaacttcagttagtggttttgcgttagaatagatttattttttcacaactattaagagctaatgaccaaacaaatcagctccggtaacattatgtacattcttatctgaaatttgactacaaaggtaacacttttaagtcacaaaacaaagcatacaaaaatatactttctaaaaaaaattccaaatattaataggcagaaatatacagccatactaaactcagggagtgatttttttctccataataaggcaacccatttacatgcagaccttgtaacattgtctacatcacacaaggcaccaaggacacttccaacacaattgcatgcatcctagtttcagagaatatatgtacatcccccttaaataagttaacctctgagatcataaatgctttacattttttcccaaagattcagaatttagagaacagtgtacatcaaaaatacacataatctgagtggatatacactgataaaataggtcacatttcccctactactctgtaaggagcagatatttgcatgttcctcccatcacatgtcacttctgttctctgagtttattataacatattgcttcatgggttgagtacactagaaatgctctgtattctccattttagggccaccgagtggggcataaagggctata

SEQ ID NO: 147572 - DNA, 1189 bp, Homo Sapiens
  misc_feature (976)..(1028): n is a, c, g, or t
ggggctgtgactgtatttacttcattcttgaatcccgcgtccccgtggctgggggctgacacatccctgggcaccactgtgacttcctgtgggtcccttcccttctgtccctgactctgtagaccccccacaggaagggtcctaggtagggggaggttcctcctcccttgaaaccctgggccactctgtcaaggcaaagcctctgggcccagcaccttgtaaaggctttgatgagaggagctctggcttttgctcagggcctttggcaccccaccctccagcccccaggaatgcaggcgctcaaagcctgtgggtaggctgcccgaagcgcgtgccgcagttcttctggagttggagcagggggacagagctttgggtagaggagggtcacctgcaaagctggaatgccaggggagtgggcggtgcctccagtctcctgggggccagggtgtttccatacctcatgggcctgagcctgggcaggggtctggagtgcacatagccccccaggcagggagagggcagtgacaggacagagccattcatctgtcccaaagctgcacccaaggggtgtcagcaacccccaacctactgacctactttgggaccacaggcccatctagtgcaaatgaggcccagaaaggagaaatgctttgctcaacagccacagtaggctgacgtaacctatgtaatgtagggtcagggtgggcctgagggatgagccaggtggtgggcaggtgacacaccaggtcccctcctggcctctgccccacccagccctctcctgcacggctaccagaagatgtccgggaagaacagactagccctgagtagggagtgtggtcaggtgcagaggagggcaggggcccggatcctggcccagaaacactctaaaacagaatccgatcctgagatgatccaaatcaaacagaaacttgacggaaatagtagagtctgaaaatgatgcactctgcgnnnnnnnnnnnnnnnnnnnnnnnnnnnnnnnnnnnnnnnnnnnnnnnnnnnnncccactcatgctctcggtctctggttacacacccacaccccccctactcctgtattcagatgccctccatggcccaccctcccacccagcagagcgccagagcctggtgccagggactcagtgccgactgctgacgtgaagggtgtagaaagcccagggct

SEQ ID NO: 147573 - DNA, 147 bp, Homo Sapiens
aggggctgtgactgtatttacttcattcttgaatcccgcgtccccgtggctgggggctgacacatccctgggcaccactgtgacttcctgtgggtcccttcccttctgtcgtcttctcgcagccgtatagtagtagtaggcggccgc

SEQ ID NO: 147574 - DNA, 440 bp, Homo Sapiens
tttacagcatgtgtaatttatttatgcaatacaatttaccattaactgagagaggaaaaataaagagaaaaataatatgttttgtactataattacataataaagtttgaattaggaatatcacttggcccacaaacttcctctggcctgagaaagatcagaaagcaacgtcgtctcttcagttccttcctggattctcaggaggagcaggtctccctctaagtgccacgggacaagcgcgttggtggtaaacggagccgcggggaagagtggggcctttgagaaccagctgcattgacggggacatggccagcccaggtcaatcatagagaaaaagcaagagaaatgcctgccactgcgcctgggagtccattcccaggtctagggccaccccagagctcccggtcaccctcaagctgaaatgttagacgcggagggct

SEQ ID NO: 147575 - DNA, 440 bp, Homo Sapiens
tttttttaaataacaacatttttattgcaaaagaaaataaaacatttgaaatttctaaacaaatagaataaaactttaacagtcccacgaaacatttttaaaatttgcccaaacagggtgtaaattttatgaagttactttcaccaagttgctgcatcaccagtgacttatcaattaacacaatagagctgtggtgctcaaacattagcatgcatcaggatcactgggaaaccttgttaaaacatagattgctaggcccttccctcagagctcccagagtcaccaggtctggagtagatctcaagaaactgcaattgcaacaagctcctggtgctgctgctgctggtctggggaccccactttgagaagcactgcagtagatcatctctagtcctcatctcccttaacttcacagttgtgtatgacactagggatcactc

SEQ ID NO: 147576 - DNA, 122 bp, Homo Sapiens
aatccccaagggttcctcatgtgttttcaccaaaaccaccccagtgcctgagattgaaaatattgtaactttcagttagaaatcagccacaataaacaacatgggaaaatgccttaggatgg

SEQ ID NO: 147577 - DNA, 990 bp, Homo Sapiens
  misc_feature (103)..(103): n is a, c, g, or t
  misc_feature (110)..(110): n is a, c, g, or t
  misc_feature (113)..(113): n is a, c, g, or t
  misc_feature (218)..(218): n is a, c, g, or t
gttacggtcccgggaattcccggggatatttgtttgaccccaggggtcccgccggcagcttttggcggcaggggcccccggcccccgtttccctttccccttncggcttncgnccggagcccgcttcgtgcactttgggggtatggccgtcccatgtgtactccacatctgtgaccagtgaaaatcggagtcgccatgatatgcttgcatgggtcaangactccctgcccttcaactataccaagatagaacagctttgttcaggggcagcctactgccagttcatggacatgctcttccccggctgtgtgcacttgaggaaagtgaagttccaggccaaactagagcatgaatacatccacaacttcaaggtgctgcaagcagctttcaagaagatgggtgttgacaaaatcattcctgtagagaaattagtgaaaggaaaattccaagataattttgagtttattcagtggtttaagaaattctttgacgcaaactatgatggaaaggattacaaccctctgctggcgcggcagggccaggacgtagcgccacctcctaacccaggtgatcagatcttcaacaaatccaagaaactcattggcacagcagttccacagaggacgtcccccacaggcccaaaaaacatgcagacctctggccggctgagcaatgtggcccccccctgcattctccggaagaatcctccatcagcccgaaatggcggccatgagactgatgcccaaattcttgaactcaaccaacagctggtggacttgaagctgacagtggatgggctggagaaggaacgtgacttctacttcagcaaacttcgtgacatcgagctcatctgccaggagcatgaaagtgaaaacagccctgttatctcaggcatcattggcatcctctatgccacagaggaaggattcgcaccccctgaggacgatgagattgaagagcatcaacaagaagaccaggacgagtactgag

SEQ ID NO: 147578 - DNA, 1116 bp, Homo Sapiens
  misc_feature (263)..(263): n is a, c, g, or t
tttccactaatttttctttccacaggaaatgttttggaaatagccccccctaaaggcggaggttccttaagccccctgcgttcttaagagccccctttcttttggttgagggcccattcttctcaggaaaagccaagccccttggggttgcagggttccttccccttttttccatttgcccccctttcccaggggcccccagagcagaccaggtaggcctgttaggcccctagtgttcagatcccggaggcatccccttcttntacagggcaccgtgtggaggaactgtgtggggagggcgtcccttgggctctactgcctgcgtgtgggctgggggtctgcagccaccgaggcagtagagtgagcagagacactttcttgggccctacagagacagagagaggtggaacttcacaggagcggtgcacagagctcagtgttggggtgggcagggtccagagaggaggaagggaaaggaatgttgtcatgatggcatggcaagtgttgtgggcttttccattgtgccttgagcagggggaaaattccctctggagagtcgggaggtggagggaggcacgagcaccggaatgaccccagcagccccagttgcctgggctggtgggtcctcttcttccccagggtcacactgctcctcagggccccccagagcgcaggcacctactttgtcaacacccatcttcttgaaagctgcttgcagcaccttgaagttgtggatgtattcatgctctagtttggcctggaacttcactttcctcaagtgcacacagccggggaagagcatgtccatgaactggcagtaggctgcccctgaacaaagctgttctatcttggtatagttgaggtgcagggagtcgttgacccatgcaagcatatcatggcgactcagattttcactggtcacagatgtggagtacacattgacggccataccccagagtgcacgaggcggctccggcggaggcggagggggaggggacaggtggcgggggcgctgcggcagaggctgcggctccggccggcggctccggggcggagggtcctcgctgaggccgccgcggtctccggcttcaacgcacatcccgggaattccggacc

SEQ ID NO: 147579 - DNA, 1022 bp, Homo Sapiens
agggcccctttgttccaagaaaagctgggtacgcgaaacttgggccccttgagggatattttagagcgcccgccctcagtactcgtctggtcttcttgttgatgctttttcaatctcatcgtcctcagggggtgcgaatccttcctctgtggcatagaggatgccaatgatgcctgagataacagggctgttttcactttcatgctcctggcagatgagctcgatgtcacgaagtttgctgaagtagaagtcacgttccttctccagcccatccactgtcagcttcaagtccaccagctgttggttgagttcaagaatttgggcatcagtctcatggccgccatttcgggctgatggaggattcttccggagaatgcaggggggggccacattgctcagccggccagaggtctgcatgttttttgggcctgtgggggacgtcctctgtggaactgggttaggaggtggcgctacgtcctggccctgccgcgccagcagagggttgtaatcctttccatcatagtttgcgtcaaagaatttcttaaaccactgaataaactcaaaattatcttggaattttcctttcactaatttctctacaggaatgattttgtcaacacccatcttcttgaaagctgcttgcagcaccttgaagttgtggatgtattcatgctctagtttggcctggaacttcactttcctcaagtgcacacagccggggaagagcatgtccatgaactggcagtaggctgcccctgaacaaagctgttctatcttggtatagttgaggtgcagggagtcgttgacccatgcaagcatatcatggcgactcagattttcactggtcacagatgtggagtacacattgacggccataccccagagtgcacgaggcggctccggcggaggcggagggggaggggacaggtggcgggggcgctgtggcagaggctgcggctccggccggcggctccggggcggagggtcctcgctgaggccgccgcggtctccgatcctggaaa

SEQ ID NO: 147580 - DNA, 787 bp, Homo Sapiens
tggattaaagatggccacaaatgttttgatacttcttccctggaaggtcatgcctatgtcttctctcactaaaactggaagaactctgtgactcctttgaccaacagaatatagtggaagtgatatggtaccatttttcagttttaggctttaagacgctggcagcgtccactttctatctccacgaaaattctctctagaagccggaagccacaataataagtctgactatgctaagactaccatgctagaaaggtcatgtagacttagccttccacctctgcccaggcaccctgtatatatgtatcttgaatcctccagagaattccatccaccagcagaataccacccagtgatctcagtcaacgaaacatgcaaccaaaaatcaccaagctgggacctgcctgaattttcaacccatagaatgatgagctaaatgagacttgctgtttcacaccactgaatattggggcattttattaggtagtaacatattattacaacgttgatttttgtaacttattattattttttttagttgttccagaagccacaatgtcccattaccaccttctacaacctaactgaaagcagaaacctgaacctagtgattttgcagaagcaatttgcaaagttcattataaggtaaaattatttctgagaggccaattttctctaagatattctaaaacaaacaattttccaaacacaatatactccaactaaatcactgcaattataaccattttcgtcttactaaataaactattgtacatagataatcaaa

SEQ ID NO: 147581 - DNA, 402 bp, Homo Sapiens
tctcttttaaccaagtttaatttataggctttcgtggacttctggaagtcaactgacttcgaagttaggacagcatggggggattgggggagtagctatgacaatgaggagttttaagagtgagaaaacacaatgtctatgagaacatggacttctcttttagaggctccatgagctactcagagaggaggttataagggttggttaaggtacgagaggcacaaagtgaaagaagcctccactacttcaaaccacatcagggcttttggcaagagctacatgaaaaataggctcacaggcagcctggcgaggcgggtctgggcttgcaggctggcgctaaggaccggcagttgggagactctcagggacccgatggagggccttgggcaccaccagtttacc

SEQ ID NO: 147582 - DNA, 500 bp, Homo Sapiens
  misc_feature (152)..(175): n is a, c, g, or t
ggacagatagaatttattagctgttaaaacttgggcaaataactacatcctgatgcttgattttaaaatttgcatacagttattgcatgaattaagtgagaaaacattttgagcaccaaacacaatgccaggaatgtagaaatgctccttgnnnnnnnnnnnnnnnnnnnnnnnntgagcagtagtagcacttactgaatttaactaagtgacaagataaatagtactgtcagttaagtgctttagaccttcagaaaaagcataattaatatgggctggagaaatgggctggggcttggaaggtgacagcattcagatgggcagggagaaaagaatgtaaaagccaagggatggcttttccacatgaataaaggaattcggcggttatgatgtctcaggctgtggacttcacctgaaatgactgagatggaagattttgtgcccgaggaagtgggaaattaaagttgaaaaggtatattgggcaaatattgaaggcattg

SEQ ID NO: 147583 - DNA, 614 bp, Homo Sapiens
  misc_feature (76)..(76): n is a, c, g, or t
  misc_feature (180)..(180): n is a, c, g, or t
  misc_feature (192)..(192): n is a, c, g, or t
  misc_feature (271)..(271): n is a, c, g, or t
ggatctcaatgcctaaaagaaacagaattccttaggaggcccatgcctacatagaaccaaaatttctgcggtatgntatagagttgtagtgcaaaagggacttgtttcagtctttgtatagtctgtatacttctgtatacatttagtatattatctaatctttccagttaatgttttagnactccaaagagnaaagttaatctacatgctctctcaagttttctagataaccaacatttttctggtttacagtgatacacaacaaagttantcatttatttttctggatgctggagacaaacatctttattaaagacactaccaaaattttggcaaacatttcaaaacagatttgtaaacataatgcttcccttttcaactggcagcactttgaaaagacaatacaataagacaatacaacttgaatcaacattaattcaaaatccttatatttttgaccacataacttatgttcccacatgataaaacaagtgacagtttaaatcaatgtcaacagataaactccatgaaatgaaagtttgtgctgtttgatgaatcacagtatgttatggttaaatatatccactcttttttatattcctggcaccaggatg

SEQ ID NO: 147584 - DNA, 331 bp, Homo Sapiens
tcttccaggaaaagtaattacaaatgttttgccaaggcgacgtctagcatgtctcccagaaatgggcctgccttaagtatcccttccatacccaggaactagctagaaggagcctcaaggaatctggtttcagcataaacatgatgatggatttcagtgtcacagctgggagcccatagtcaattctgctttctgtaaatagaggtctgtggggtgccttcttatgcacggatggcattgtgattcccatttaacagagtaagcaaaatttcagaaaaattccagggtctgcctgaagtcaaagccaagaggtggaagagtcaggatgaga

SEQ ID NO: 147585 - DNA, 197 bp, Homo Sapiens
aatgtacattcttctgtcagataaaaacattttgagggtggttacccttgccatacctcatcaacaaagaatcctcagtttctctgtgctgtggatgtaactgaatgaccgagccaagcagtccccacttagattcattcttcacttcagacattcaaaaatacagtaacaagctgggtgtggtagcccggaattca

SEQ ID NO: 147586 - DNA, 519 bp, Homo Sapiens
  misc_feature (187)..(212): n is a, c, g, or t
tttgtattgccaaaatccattgatttactttaaaaattaaatcacaggttgcggatcccgtaatggtggcatttccacacacagtactgttgctgatttgatgagacacaaatatattccaaccccattttcaaatattaaaagttggtagggtcctcaacgaaacctaacagtgacttcaagttgnnnnnnnnnnnnnnnnnnnnnnnnnncagggagagcccaccttttggcctgtatctctcagaaagagggacaagagcggtgggaacgtgaggaacttttaaaatgtgagagcgttactctggggaaacctggagtttactcttggcctttactcgctggactgtcatagttctcacatttgtgaagcgagtctgggctggcggccctcaagccctatcctcccccgatgcggaagtcttgcttctctgtgcctcccaggcttgagaacagcagagtctggccgctcaaaacgaaagcttcacgaacgtcgctcgctcggtgctgagaaagaag

SEQ ID NO: 147587 - DNA, 415 bp, Homo Sapiens
ttttttccagccagcaaaccccaaacaggaacctatggttggtgatggatgtgcgttcagaaagcagggagggagggggagtcagaggtgagggggtcatcagccatagctgtccgctgcatcaccccctcgctatctccaggaagcgttctgggcttttcctgttgtgcagtgtggaagtgctctatcttcattcatatcaaggaaagtcaaaggacaaactaaagccggcagcgtctttctggcttcctagtcaggctgttcggtagcggagtgtcaccctgatttccagccccgcagcacacacagtgagagcctgcctggcgtgattcagaggcaacgtatttcccaaggtggctgtgaaggaaccagggggataaacacagcccgtgaaccgcacgccagaggacaggtc

SEQ ID NO: 147588 - DNA, 500 bp, Homo Sapiens
tttacctcttgcaataaaacttatagaaaaaatagacaaatatgcacatgcaatttacagcttttccaacttaatccttgtgcttcacttgaactgtttatttttgtcattcaacattgcaacattgtcttcaaatggattctttcctataccagggtagtaggtctctgaggaaccactcaaaaaagtgtattaaaagtggtcatacttggatgaaggcactccaactctgctcaaagcaaaaactagtgtgatcctgttgtaaaattttctttttctctgaaaaaggcaagcaagggtgcatgcacagtgtggagaactgtcagggttatgggaacgctctggggtctgggtgggcatagtcgctgggtccctgggtcttaggacccaacaagcacctccatgatgtggtccagctctgtgaggtccattttgaaaggctgacttggggtgacaggctgactgctgtaaggagcaagagttttgaggaggtcgtcggc

SEQ ID NO: 147589 - DNA, 387 bp, Homo Sapiens
ttttttgctattcagctgagtttaatttaagattattctgggttatcttggccaatgtaattgcaagggtactttagatgtggaaggcagggactccatgtcagattgaagcagcatagaaagtctacactggtcatcgttggctttgaagatggaaggaagccaagatccaagaaatacaggctgtctccagaaccagatgatatcccatttcctctattcaaggtcattattccagcaattttcttctttctctcttctgtcatagaaatttccctctcaatttctgttgtccggttctgcatgaagcttggaagtcaccactctatcccttctctttagctgatgttggaaaattccatagccatcaactgattaagtgtgtgc

SEQ ID NO: 147590 - DNA, 806 bp, Homo Sapiens
tttttttactttgaaaggaaagtttattatttcccaatgttctttacattttcatttggaaatatcattcctgacagaaatagatacattataccttcgaaagcagaaagatcttaattaattaaaacagtttacatttaccttagcattaggtctggctggctaatttcaaaggattaaaaattgcacctatttgggccaactggggtcctgaataattatccagggtaaaagtataatatttcatactttatacattttgcttcatcacacatttactttccacacagtgttcaacttcacatttaaaaagcaaattagtctttaattccctaatgaatataatagtcttgatttgattgaagtttcaaatggaaaataaaactatgcggagttttcaataactgcttagcccaataaatgttgccaatagaagtttaaacacttgtttaaacagtttgcaaagtattatttcctttattctcttcaaaacaacacagacacacataaagtcacacattacaggcatctgaactggtaaaatgttacagattagtggcatgcaggtattttacatttttaagtgcaatgaaaaatgctgcttattcattttgcttgaatggatgaaaacaactaaaataaatgcttaattaaaatataactattccatgtatataagggtttttgtttttaaaccaaagtggcagagataagaattttaggtcagaataacttacttcttaactgaagattgtcactggcaacatttggtactaaaataaaatttcctcaaaaagcacatttcc

SEQ ID NO: 147591 - DNA, 712 bp, Homo Sapiens
  misc_feature (281)..(392): n is a, c, g, or t
  misc_feature (503)..(598): n is a, c, g, or t
ggtagaatgatttattttcctttgggtatataccctgtaatgggattgctaggtcaaatgatagttctatttttactactttttattagacaggatcttgctttgtcacccaggctgcacagaatgagttggaagtttgtgtcaaattggtattatgtcttccttaaaagtctggtagaatttagcagttaagctatttggacgtagaattttctatgggatggtgtttaactacatttttaacttttaaaatagatacaaggctattaaggtagtctgtnnnnnnnnnnnnnnnnnnnnnnnnnnnnnnnnnnnnnnnnnnnnnnnnnnnnnnnnnnnnnnnnnnnnnnnnnnnnnnnnnnnnnnnnnnnnnnnnnnnnnnnnnnnnnnnngcctcttctgggtttgtattgatgaaaggtgaatagaaaaatattttatttttaaaatattttttaaaatagaaatggcatctcactatattgccaatgtggtggtgtacnnnnnnnnnnnnnnnnnnnnnnnnnnnnnnnnnnnnnnnnnnnnnnnnnnnnnnnnnnnnnnnnnnnnnnnnnnnnnnnnnnnnnnnnnnnnnnnntgacaaagtgagacccgtaatagaagagggcgaggttcctcacctaacccataatgctcagctcgcctttccggaagcaaggactatcaccccgacaataccttcatccgggcg

SEQ ID NO: 147592 - DNA, 315 bp, Homo Sapiens
tttgccaggcccgatggtttttatttctttcagttatgcttgcggctggagtggggacgggggaagagcccatggcctgggctccctggagaccagggctgatgataccagctgccataggtgaggtaccaggcaaaggtgcccactgcggcgcccaccaccttgtgagtgtactggtggaaatagatgacggtacagagcagcaagaagttccagaggcccagcagcagcacgttcagcaggaagacaaggcgcagtggggcgccggcaggaagcccatgggccaggtacttggcgaacacagctgcttcctct

SEQ ID NO: 147593 - DNA, 781 bp, Homo Sapiens
actcttaccttctttgagtttttattcaaatattatcttctctgcaacgttttccttgatggctttatttaaatgtctaagccctgcttagcatccttcttcttttctttgctttgatgctcacacaacactgagcaccacccactgacatccagtgtattttacttacttgccggcttgctgtacctcctgccactgggagggcagggagttttctgaatttccaatatgccagcagtctgtcccgttaccatcagtctgtcccattaccagtgttttgctcattcttgtatccccagcacctatgcctgtgcctgcatgtaatagactctcagtcgctacttgttgaaagactagtgagcagctgctgtacactcgctatgtactaggcccatgttttattcacatagcttcatgtgattgtcagagtgtctcacggggttctgttgtccccgtttaacagaagagcaagttgatgcctcgtgaggcaagggaacttcccaaggtcacacagctaggaaagggaacagggacatgggtataggcaggatggcggtttacctaaaactgtggtcttggcaggggtattaaaaacaccgcaacgtacaaagttgaaaagtaaaaattaggctgggcacagtggcttatgctgttaatcccagtgctttggaggttgaggcaggaggtcggttgaggcaggaggtcagttcaggccaggagtttgagatcagcctgggaaacatagggatgctttgtctctgtctgggtggttggcagtggg

SEQ ID NO: 147594 - DNA, 442 bp, Homo Sapiens
gccaggtgattcctttgtgtgttatgtcgtaagtggagtgacttcatcatatatggaagaagatttctatattcagctttttctgcaggttggagtcagcatagagttggaaaatcagctttggctttctttcctgtctcatttcctctagtgttctcctttttattgtcatcagctctcaacaactctgccacttttgtgtcccaaggtaataagatgtaggaaacaaaacattgtaaagtggagcaagaaaagttatcaattaaccacatcagagtcaaatgtcttgggtgacactaaggaggatatgggcaggtgataccagagtgctttatcttgtgatgttgatacagtagcagcctctcagacattcagccaggttggatttctcatgagtttgtcacctagttttgaatcctatcccgttggtttctgcaggaaa

SEQ ID NO: 147595 - DNA, 297 bp, Homo Sapiens
  misc_feature (276)..(276): n is a, c, g, or t
tttgaacaacaaaggcaatttattgactggcataacggagaagcacaagattggggctggtttgggcatgccttgatccatggcctaagcatggccatcagtttttctctgtcctcagccctgttctctgctgcgttggctggcttgtgtggctgctgacaaatccaggcttcaagcactatccgattcagggcaagcgaagaagaaagtgtgtctttctgaattgctgcttctcctcttcctgttgttgccttcttcttctggtgtcttttcccncagcctcaacgttaattgtct

SEQ ID NO: 147596 - DNA, 389 bp, Homo Sapiens
ttttccgcttgtgcaccgggggctcgctttatttcaccaccagcacctgtgtgcttctcctgcccggggaagggtggatgcacttgagcagcgcccccagcagggccaggacggtgaccacgagcagcaccagcttcagccccttgagcacggagtccgccctgccccgcaggccttccttgcctcccgccactgggcatcgttctctctccactgagcctccagcgtctccagactggcggcgggtttgaactgggccacgagctcctgctgcacgaagcacttgtagacggccggctggaaaacctgcagctgcctgccgccggtggaggggtccagaaaggtggtgaagtcctggccggagagctggctctcccacgtcagggggg

SEQ ID NO: 147597 - DNA, 426 bp, Homo Sapiens
cgtgtggtggtcgccgacccccaagctggaggtagctgcatctggtactacgaggatgggctgctgaagaaccagatggcccccaccatgagcctacaggtgattggaccccctagcccaggctccaaggtggtgctgtgggccgagagccgcctgccgcgccagacgtggagcatcagtgaatcgggccacatctgcagccagatgttcgaaggccagatcctggacgtgaagggaggccggggctacgaccgggaccacgtggtgctatgggagccggatgaggacagggcatcccagatctggactatccacgtgctttgaaacttttcccctcaccctccagccctggaggcttttgctgggatgaatgtttttatagggtttttgttgtaacataagctattttctaatatgctgccaggt

SEQ ID NO: 147598 - DNA, 387 bp, Homo Sapiens
gtaatacctacgtcacaggctgtcctggaaataacatgtgagaagtacttagaatactgcttggcacatgtgcaccaagtcccctccaaggagagaccctgggtaatgatgatctttggtgtcaactaagattcttaagaactggatcctcgtgattcctatgtgacctgaaggacggatgaaattcaccaaagtctctaccacagacattctcagatggtcctaataaaaagaagaaacccaaaccagaactggtggtccacattgtgagagttgctgaatatcatcacaaagcaataattatccaacagcatgcttggtggctcaacattctgaaaggcaaatgtcaagggcacatagtctcaaccatgttgctgatgggagctc

SEQ ID NO: 147599 - DNA, 305 bp, Homo Sapiens
catgttagtgacagtgatattttaatatttttttaagccagtaataatttttctccattacagggctaagttctgtggctggtggtcagtttgtaaatttatacttaaagagacttaatagtaacttcatttatttgtctggttatgttattgtatatataaatatttatgttttcatatattgcatataaaaatttgtgttacatgttactctcagaacagattgctgtaagacaattgtaaaaaaacatgtctttcgtctgtttctcaaagcaatgtaaataaaacctatggactgtccaaaa

SEQ ID NO: 147600 - DNA, 816 bp, Homo Sapiens
  misc_feature (156)..(156): n is a, c, g, or t
gtcattgcccagggttccccttaggaaaccaggcttatgccccaggttccatcttgcctgcgggggcccgccgggccaaaacagaaggttttagaaagatttctggagggccgggggcggcccaccaagggggattgtgtggtgggtgttgtgggnattagtcaagcttttaatgaaaagatcataaaataacagtttcttatcgctgtacatttaagactgcacacttctgaatggagagatcagtcgttggtgaattgcttttctatgacactgggcagctgtgtagctgcagctctgacctgaatttatacaaactctcaagggacatgaactcaatgtgacaagtgacagcggcggtggccagtacaggagtgcgatcccggtgtccctccccccttctgggaagggcataaaacaaaacatgatccctcttccagttccaattaaacaaaacagctataaccccatccctcccccctccccttcgaggtatttgcgagaaatgagccagtgcccaacctgggtcccccccggggtgggagagggcagagggaagctagtgatgggtggggtagagaggctcccctcagcacctggccccacggggcccgccaagtggagggtgggagccctggggatcctccctgccccagtgaggtctgttatgcagcatttttgaggtcaataaattacagcaataaatagcaaggtgaggtagggggagggggtcctggtagaaagttaaagtggggtgactgaagccggggcatcctaggaagggggtcctgggcagcctcagttcccaccgctccc

SEQ ID NO: 147601 - DNA, 383 bp, Homo Sapiens
gaccatggatcaagtaaactaggcattaatcttcgatctgaaattgtcaggaaaccttgagatcaaaagaacatccctggggaaggtgttaggctcagcttattattatgtgggggctcagtgtctatacccacctgaagctgggctggccatgaggcttcagttcactaatcagatgtgcattgaaacagatacaaaaaggggaagtctttagggccaaaaaaatggacctgggtttgtattactatttcagcttaatcgtgtattccttgtgtttcctcggccattaatggctaattatggtaaatactatttggaattatgtgctatatactaagtgtttgacatgtggtatctcatttaaaccttgtgtaatcctcaaa

SEQ ID NO: 147602 - DNA, 511 bp, Homo Sapiens
tttacaataaatcccttgttttattttataattagaataaacaatatttaacatttaatatattcagcttgatctcaattgtgcaaatgtaatgcatagaaaaaaagactgagtaacccaaaactctactgagacctctgagacctggggctgtgatgtttacccttctttctgcttttctgtactctccaagcagacaagaagaagtatctacctatacataggagtgtggaataggaataaaatcccagagtggctggccacatccccaggttctaaccctgctttggctaccgtaaaactgtgaccacaggcaagtcacttgagcacaacgaatcagctattagtacatgacagtagccaccttatatgtttctactgtcccctttgtcattatgcagaagatatctaggccactattccccagttataatttccctatttacaagctctgtctttccaactattgcaaacgtatccagagacttaaggagaaactttacttgttttg

SEQ ID NO: 147603 - DNA, 348 bp, Homo Sapiens
ctatgttaagaaatatatttatttgctaatatatttatccacaaatgtggtctggtcttgtggttttgttctgtcgtgactgtcactcagggtaacaacgtcatttctttctacatcaagagaagtaaattatttatgttatcagaggctaggctccgattcatgaaaggatagggtagagtagagggcttggcaataagaactggtttgtaagcccctaaaagtgtggcttagtgagatcagggaaggagaaagcatgactggattcttactgtgcttcagtcattattattatactgttcacttcacacattatcatacttcagtgactcagaccttgggcaaata

SEQ ID NO: 147604 - DNA, 457 bp, Homo Sapiens
tttcaatgttactttgtatttctttattattcaaactgcaggtttaagtcagattcgcactgttttagagtcaaaaccgaggtcttcattggtcttttttcaggaggaatggcagttcagtgcttgtgacctgcagagatgagatcaggccctctcagttcttaagaagcttgtttcgggggctgggaacccgggctggtggcagcggcggcggtagccgaagggatcgcgggctttagcctcggcgccgccgccgccgtagtagtagagtaggtagcgactggcctgcacactctgcgccatcacgttggtacagtggcacgccatcagcagcaggtttcgaggctgtacgcggtaggcgaagcgcactgaagatcgccgagtaccagatgagcgctgttgtcatgcggccactgatgatctccggcgacgccttcatgtctttaaaggcagccag

SEQ ID NO: 147605 - DNA, 871 bp, Homo Sapiens
  misc_feature (853)..(853): n is a, c, g, or t
tttttcatatttgtaaatatacatagttttatttccatcagttatgacatgcaagcaagtaataaagtgaaagtacaatcaaatgatatatggaacttcctcagtcttaaaatattccatggagactatcaattttatgaaaactataaagaatgcttcatgaaactacattgtacagtgccatttactatttttactgacattttaaataatcaacaattaaagggaatacatcaaccattatttaataccaataacgttatttttcttgagtaatcctgttgaaattaaggattttaaataaaacattaaaaacaaattatattgactgatttcagctttggatgaaatcatacttgtgtatttgtagtaatgcgaagcataactttctcctcacaattaatcttttataacatcggtgttatagttttctctgacaccaacattgtgatatcgcacaggtttactgcatgcatgcattacatgcctccagagagtaggcttcaaatatatggaaaaattatatttatgaaaaaattctaggaaagggaatggtgaaatggaagagaatttctcacttgctaactgttggacatggatttgtatatatttggatatagacacatactggcacactgtgagtttgcccatgtatatatacacttaaatgagaaacccataatatatgggttgtgtaatcttttaattaatccataattgtatgtgtgtgaaattagataagcggttaccttttctttactcaatttgatggaaagccaaaaaactctgtccaccttcatttcaattaatccaatactgttagactgctggtagcttcattctccttgttctncttacggcaaccggaaag

SEQ ID NO: 147606 - DNA, 484 bp, Homo Sapiens
ttttttacttttttgcacacaggagagctttatttctcataagagattgcagccagcagggcagcccttctgacaggctaggaagcgtagcctcaggccagaagcctggaacagacacttggaggggagggacagaggggacaggaatttacgctgaaggagatggccaaatagagatgttcaataagcttcaggaggagtcatgaatattcatgaaaggagaagcgtgtactggtccagctgagcaaattctccatggactgcccagaaccaatctctgatctcttctcgggccagaaggaggggctgaccccttaccccgtcatggctgaggactcgggttcagggtttctttgggatccccttggccagaagaaggtccattcattcagttggggggttcatctcagacaacctcccgtcatcaccccttgagtgagacctaagccttcaccgcagccttcgaggtgccgtggtctggtgg

SEQ ID NO: 147607 - DNA, 498 bp, Homo Sapiens
acaaggtgtttttcgtcttgttttttattgttgtttgagttggtcagtttgatttcattttaaggtaaaggaggatacaaagttcactacttgaaaataattgattaagaaggcaatatgacattttcatgctagtttgtgtagtaattttactgcataagaaattacagagattgcataaatcattaggtcaacagcatacagagaagaacaaaacaaaacattgtttggatcaaataaaaaacagcaggaacaactcaattcttaaaaataccacgaattccccgaatgtggctccatttgatagaaaattttgcattttctggataatgtctgtagttacattaagcaaaatggaaaacggccttcagataaacacactaaaaagcagcttacacagatgtgttgccctcttcaccttggatgtaacaaaaataaagatgtgaggctgcctgctcttgcctaaagcatggcttgaactttcaattgatagtaacc

SEQ ID NO: 147608 - DNA, 310 bp, Homo Sapiens
aaattgtttgtttgttcttttgaatatttcccatctgaggttggttgaatccttggatgtggatcccaaggatatggagggctgactccagttagaaagaaatagtcactcctgtcacgtactattcaattgtctcttaaccacttactacctattttttaaaaaagacaacactgtgatctggttccagaaactagttctggaaaacagtgtacctgctcttgttttcaaagttcaaagcttatttctgaaataaagttgtgttttctcatggaattccaaggacttttcacattgtgacctgattccc

SEQ ID NO: 147609 - DNA, 474 bp, Homo Sapiens
gggtggtagtattcctaaatctgtgttcttatgttatgcttgcttatttccataacatttgtaactgtaattaaaagaatttgcacattttcactcatttacacaccttttaaatttattaattcttaacattcttccgcagagcaagtcattaaataggattaactgcatgaatcaccagttgataagcaagtgcagaacttagacaagaagcagctcaataatgtagttccagaaacctaccattatctttctatttgtgagcatgatgaatttcaaaataaataggatagactttttgtaagatcatttgttacatagctacatacatgcagtgtctttcaagaatacttggggcctgccaatttgtgtctagtatctcataattataatgttactctgaaaagagagaatacatatgtatgtttacatttgtgtatatatgagcttttgtcagtcacttgaaactcagac

SEQ ID NO: 147610 - DNA, 467 bp, Homo Sapiens
ttttttcagacttttggcttgtttgaaaccagtaactggaagaagacactgccggacctgaggattgcacaactccgggaaagtcacctcattccactgataacagaaccaagcgtcagaggctttcaacagcccggaactcagctaaaatctgcagacctcagaaccgccagcagcacgaggacagagtcggggaggtgtagctggacaacagctcatgaggcagaagagctgtgtcacaggtgtcagctgagcacaagccctgtctgaggccgtggtgactggcgacacgggtcagttggagggccttggaagctgaagggtggtcttggcatggactctggtccttggggtgcaggctcttgggtcccagttctgctcggggtggtcctgtgaagcactagactcctagcgggtcatctgggaggttctagcagagctgaacagcccaagggtcatcagggctc

SEQ ID NO: 147611 - DNA, 556 bp, Homo Sapiens
ttttcatttaacattatattttagtgatctttccatatcacttctgtgcatctttttcatgttcctgcattctttaaggtactgctttctactcccttcttcctaaaaatcaagattagatttatctatgcgcatgagtttcatttctcacacattagtagagatgtgtaggcttgctaggacacaaatacatttgagaggaaatgcttagatactttcttaaatcttctgcagacatactgtgttggtggctagagcactacacagacaagaataaagaaaccaggtatgtcccaccagtctaagaacatgtaattaaaatgactcacactttccattgcggaagaaacaaagacctttaactttatcttcaccaaattatataagcagctcatccaagctctctactgatgtcatcttctcagttgggatcagaggaaacattcttaatttgtcacaaacatcttgttgggtctttaccaaacttgaggtaataaaatctgtttctctttgctgatagtttcacactaaaagcagttagaaactgacctcagag

SEQ ID NO: 147612 - DNA, 536 bp, Homo Sapiens
aaagctttattgctcacataaagcctgtttggtgggctcttcacaaggacgcgagtaaaagtttgtccatcttcctctttttagtggtgaggacccacttgaaatcacttgaccaggctactgcggtgggtgtgtggaatggggcagaggatttctggaacaccttgtggaacatgaggatgaatgatgaaaacctgtccgtagagcacggttgcagtaggagggtgccaggctgtaagcatggggttcatgagccacaaccttcccctgctaggcctgagtcctgaagtctccactcctgcaaaaccagttcaggccatgatgagaagggggaatcaggtgtgcctcattatacccttctccctgttggaattctggcacagctgaccagcatgaacatcaacacagaggccttaagattgacagaacagactctcaagtctgacaagaaacattaacactctattctctctgaagcctgctacgtggaggcttcgcctgcctaaaaccttggtctccaccacctcttattgtaa

SEQ ID NO: 147613 - DNA, 641 bp, Homo Sapiens
  misc_feature (561)..(561): n is a, c, g, or t
  misc_feature (571)..(571): n is a, c, g, or t
tttctgctgcttaaaacacaactttattgatgaaacacaagtcttagaataacaaatataaactaatataaaagtgtagcttatgcatgatgtataaccaattcattgtcagtttaggtagaggaaagattaaaaaatctcaatctaggtaataagatcaaatcaataaattctttctgtgtacaaatactaatatttcatttggcatccttaaaatggttcatcctaaacccaaccattacaaccaacatcagtcactgttatgatatatgatagtcattattccaaaatagcagctgaaaagatctctttaccatatacgcacaatgaaaaacaaagaatttacaaatcacatcgtaccaactgcaaatatctcaatattgtttgggacagactccaaattagagtttggttaatactttcaggacttttactttcaccaccagatcattgtgatttgctagtgctttgattttcttaacacaaactccagactctttgaataagaaaaaaagtgaacttctgctgaattctttcctggatgatgcgagcccttcattntttatgttgncatttatattctcaaatagggtaaggatattaagaagaatctctctatcccattctttattaaagaggga

SEQ ID NO: 147614 - DNA, 495 bp, Homo Sapiens
cccgcagcacctgggagggcgcgtgtgactcgtctcccaggtcgtttgggctggagtaggcggaggaacgcaccgcgagcaccaacgtcccgcccctgtcttggcggtcctcagaatgaaatccagattcactaaagagttcctcagtcctctaggacctggcccttttttctcattgatcatactgcctgctcctattctgagggtaacaggaacctcgaggaggaatgtccccatttcccaggaggatattctgtttccctataacgttttgaagagtctcagtagaagcagcctgtttttgacaaaaagatcgtcagagtacagctcagcacattctcacagacagaatcgccctggtccagacatcgtcagcatcctggaagctgccatgccacctatcactacccccaccaagggagccactacgctgacttctaaatacagattatttttgtctgttgttgtgctttatataaaaatgtatgctctgtg

SEQ ID NO: 147615 - DNA, 492 bp, Homo Sapiens
  misc_feature (341)..(430): n is a, c, g, or t
cccagacaagaagaaattatattttgcaaggttttgaatgagaacacgcctccaaatcaaacatgtgtgttgtcttaatgattaaaatagtctcttgttttacaaaggcagatttgatctttctatcaaataaagcatgttttgatgattaaaatgtttgtaaacacagcagtagtcagaaagaacactttcatttgttgaatccatttttcctctatctcttctttcctttcttccttgagttgcccataagggccaggcaggtggtgcaaaatagcggaaactgttagatgcaagagtagggatgctggggtggtgatgaactggagagtgcgggctcnnnnnnnnnnnnnnnnnnnnnnnnnnnnnnnnnnnnnnnnnnnnnnnnnnnnnnnnnnnnnnnnnnnnnnnnnnnnnnnnnnnnnnnnnnatcctcaggagggaggaacactgtgacctcacatggcagagggcagaaagggaaaagggccc

SEQ ID NO: 147616 - DNA, 590 bp, Homo Sapiens
  misc_feature (258)..(293): n is a, c, g, or t
agactctctgatacctctctgatacacaagcaccctaagccatcttcatcagatcactttcagtagtccactgccacaatgatcaactttaggtgtgttcccacctacacagtagccttccaaggtaagaaacctgtctttgttaactttcacatctccaaaaccaggcacaatgcttggcataagcacaaactctgagggtgcttgttgaatggaattcatctgaaacttcagaagtgccttcccattgtgtcaggnnnnnnnnnnnnnnnnnnnnnnnnnnnnnnnnnnnnaggcggaggaaggagggacagtgtgtgtttaatcttctcaactaactttcacatttttttgagagtagggtcaatgtcttctactttcattagtgtgcttgtctttcaaagctccttgcctactgcagacagcagagtgaatggccctattttcatgtcatgttaaagacacccatgaaggtgaactgaactatacagaagagaaaggtagccagggagctgataacaacagagaaaaatgagaatttactcagcaggtggatctcaccaacttgcagaaggctttaagattctaac

SEQ ID NO: 147617 - DNA, 326 bp, Homo Sapiens
tttgagttttaaggaggccagctttatttactagaagcaccatttgtaattagcattaacagttttacaaaatctctttcgtactgctagcatattcctactttattcacagagagtataaacctttaacagtggccagaatagattggttttgaacagaacagccatcagaaaagagccccaaacaaaatgaacccccaaaaactgtaaaatcagggggtggctgcttgaggtggaagttctgcatttacgcccaatgagaaaacagatataatttatattaacccatttcacctcaaaaacagatgctgatcaatgaaattaca

SEQ ID NO: 147618 - DNA, 221 bp, Homo Sapiens
  misc_feature (54)..(67): n is a, c, g, or t
gtttaatttgaaaatgcaaagaattgttaaatgttcttaaatgttctcactacnnnnnnnnnnnnnngataactacgtgaggtgatggatatgttaattagctggattgtggtaatcattttggaatgtatatgtatatcaaaacatgtagtacaccctaaatatatataatttttatttgtcaaatatacctcaataaagatggaaaaaaatcgaaattc

SEQ ID NO: 147619 - DNA, 650 bp, Homo Sapiens
  misc_feature (374)..(387): n is a, c, g, or t
tttctctggctaataaaataagtttatttatatatacatggtagctgaaatctgtggataaggaaaaataagtcatacatccacatatgtatatataacatatgtatctttgattacatatattatatataaattttactttacaaacagatttttctctgtatacttacacacattggtatattaaatgtaacagttaacagaaatattatggtaaggttaaaaaggtaagacaacaacacgctagaaaattaaacttagagaaacatttagttgcttctttgtgggttgaagagtctttgaagagagacaacaaccgaactcatgtgaaggaggttcatacaacattgagaacacacttttgaaggccatcnnnnnnnnnnnnnnaaggaaaatgcagaaagaaaaaagtcatgatagactacagcaacaacacaaacatatgacccaatattcaagttcaattcccaatctgactataagagcatctatattcaaaatatactatcaaactatttttcttttagagaaaggaagtgtcaaagcagtaatcatctctctcagccacaatcaggaaaaaatagagaagcggccacctctggaagccccttgggtacttctgagggtctgacgttgttggccgtgctgga

SEQ ID NO: 147620 - DNA, 614 bp, Homo Sapiens
  misc_feature (24)..(24): n is a, c, g, or t
  misc_feature (217)..(375): n is a, c, g, or t
ctcgtgcgaatttcgggcagaggnggcttctggtttttttcccatgacacacacatcctttcctattttgtgctctgggtcttcatattaactatcttcccccaggatagtataaaaagtgttaggaaagttgggctttggagttgtggtaatttctgtctttgttactttcctccccttcagggggttttttaattttaaagatgaatgcagtgannnnnnnnnnnnnnnnnnnnnnnnnnnnnnnnnnnnnnnnnnnnnnnnnnnnnnnnnnnnnnnnnnnnnnnnnnnnnnnnnnnnnnnnnnnnnnnnnnnnnnnnnnnnnnnnnnnnnnnnnnnnnnnnnnnnnnnnnnnnnnnnnnnnnnnnnnnnnnngcgtatctgctgctctgaatttggtattttaacaccacttactgatacctttcctgtaaacctgtagatggtttaattcttagtcaagagaccagtctcatctaaaactatcctgttgtggtctgacggcaagtaactcatcttgagtaatttttgtttctccttaagtggcattttgactgtccattgcagcattctgatcttaaaagacatccactttgctaatgcacacgagattc

SEQ ID NO: 147621 - DNA, 681 bp, Homo Sapiens
ctgatggtgatgaaagcccttttctaggtcttcggcatcatctggaacacatagtgggtcatagagaattacgggacttacataataatagtaagaagaagattagctcacatcctttgagtactccgcatgtgccaggcactgtgctaaaaccctgtaggttgattctctgctttaagcatcaccagaagcctgtgaggaaacctccgaattctccatcttacaggagagagctgcttttttccttcaagtataatggaaaagttgtggtccccagaatttctgtcctccctatgctagcacgaagggataattgatcttcagacattgaaaagagatagcaggcaaaacaccggggctggaacaacacagcaggatacccagggatcccaaaaggaagtcaaagaagagattggagaaaagcagtggtgaggaaaagggcattgcccccaaaaagtaatgtctcccatgcagagaagactagcattacataaatgtgtcacctgagagagttaccttaccctgactctgtcaccaaattttattaaatgcctctcctatttcatccttgttggtgaacttcccagttcttctcttattttatgggcataagagcttatactttgcagtttagttagttaatttatttaaatagcattatcaagttggctctagactaaa

SEQ ID NO: 147622 - DNA, 826 bp, Homo Sapiens
ttttcatgtttaatatttaatttattatctttaaagtaagtcacattattttatatttgcaaaaacatcgagcattttgagctttaatgtggtagattacatttactttttacatatctgggtactagacatcccaatttttctttcacagataagacaaataagaagcttggaaatgaactgacttcactcatccattattaaagaaatagttctcaagtatttaatgtagtttggacataacatgcccaaattgaattaacgatcttcctcccaaatctgtaccttttccaaaggccaccatctttctctgaaaaagacaattctaggtatacagtggactaactgtagtatcacactgaaaatttccctttctttttctgcatacattacaccaatttgcatgcctcatgactgtctataaaatgcataacaaagttgtcctcttttctttatctccactagtgccaactaggctgagtctctgttatttttaccaactgaaccactgaattagcatttgatttgttttcttatgtctcagactgggtttcctgaagaaagtgtattgggcaaacagttggcttcaggtagcttatttgggagttgatcccaggaagctaaagtaaggaaacatacagagaaaaatggggaaagaaagaaaaacagtgaaggatgcatcattgagctagttatagctggagccaactgcaggtccatgccttggtgatgtgctgaagaaccagagaagatgaatctcaaaaatttcttcacaagtctgggggctgcagcatttatctgctgatttcagaatcccatagtggag

SEQ ID NO: 147623 - DNA, 599 bp, Homo Sapiens
  misc_feature (580)..(580): n is a, c, g, or t
tttttaacgcttaaatactttttatttctgattgcttttcaacggataacatgtccaacatacaaaaatagctgggaacttgcagagtcttttagcctatagctctttatccatggataaatcctctcagattttaaacactatccttgaaaacctggcaccttgtccaccgatgcaaacacggagcgctgcactgtggggtcgctgctgccccggcgcccctggtcgtagaagcggaaaggcaggtgctgagtggaggtggaggagccgagtccaaaccccaggacttcagtggtgggctggattgggaggtccaggagggcagctattctctgcatcttcatgcgccttgcctggatgcggcctttggccaggcgctgcttggcgatgatgcagcggatgtggtctgagaagatgaaggtggcctggaggatggggaagggcttggaatgggggctggacgcaggcttgtggatggtgatgttcagggcacggctgtcgtcctccacgccagtcacctgcatgtcctgcaataggcctgcaaacttgaccactccccagccaagcctggacacatcangctccaccaaactcatctg

SEQ ID NO: 147624 - DNA, 551 bp, Homo Sapiens
tttgcaaaatgtttataatttattgggatcattagagcatcaaaaatcagataaaacatttcagcaatgggatagtccaaaatcacagaaagtagttcattaggaaaataaaatatgccattgtgcttaaattagagaatattttttcgttagtaaaatagggtaatgcaagatatctgagaaggaatgagggagagcttgctacccttgaggacacaacaattcatcttgacactatttcttatacagataagtgattctcgtgcttcagcctcctgtgatgcttgctgatgctttcttgaagagtgattctgcccagggacacaagacagctgcccacgggagatgatatgaggctcccagaaggctttgcagcttctaccagacactgtgacaggatgcatatggcattgttgtagcttcaaggagctcactacgtcaaaggtaaatcccaccagctctgcttgccagcctaatgcctcttctttgtgaactcctgtggcggctgccaatagagcagttcatcatttcttaagagaactgcctgagcg

SEQ ID NO: 147625 - DNA, 553 bp, Homo Sapiens
tttccattttaaattattttattgtatattaaaaaaccaaataaagcaataactttaaagacctcacacacacacagtataaacacctgggtaaggttttgttcgtgtccatgttgacaccggaactaccgttaaagtgcaagttttgttttgtgttcctttgtgcagtttcactcacatgtaaacaagtcacttggctatgatttgacccacgcccccccgcttagtttcgggagggcagaggctctaccggctgtcacagcaacccggaatcacagacaagataatgccccgtgggtcctgaccctcaagcgggcatgacggtttcttgaagcctagcagaggctggataacttcacatccctcccccaccccgcgctcactcttaggtctttgagaagataaatccaccctcggctgggccctcgctcccaaagttatgggggtggcgggcctcaatgggggaccgggggtggggaatagtcccagtcttggcccgttctctttccttccggagcagatgaccatcacttctcggttcagtggcggccgc

SEQ ID NO: 147626 - DNA, 475 bp, Homo Sapiens
tttgccatgcatttatttattaaatttatatttttatctctttctctactcatgtgcttaactggtgaaatgattctgtagaaatagatccttctgattctgcatctcatttccttatggcaactacaacaggaggaatccagctggaaatgccactaaccccacaatccagcacctgagagaggaagccagtcggagcgccgtgctgggctcactcactctggcctgcgcactggggttgtcacatccattttccactggctatggggaataatatttggttaaggctgttgaagcccttgcttttgaggttttacattatttggtaatgaaagccgttttttcttccttccccaggcttatgtgaagaagcccacgcccactctcaacaaaacagactcctccttgggaagcatctccagccctgggacagacacctcgctgtgacttagggagggacaggattagcccagga

SEQ ID NO: 147627 - DNA, 344 bp, Homo Sapiens
  misc_feature (223)..(247): n is a, c, g, or t
  misc_feature (250)..(250): n is a, c, g, or t
  misc_feature (254)..(255): n is a, c, g, or t
  misc_feature (260)..(260): n is a, c, g, or t
ttttaatggcagaaattaaactgtatttattggtggcaatgcgatgggagaagaggaggtaatacagcaaccctcacaccactggtgtgaccattttggagaatagtctcttaatgtgtacgcaggcctaaagatccaacggttcttgcctgggtctgtgtccgaaataaattctcatatagactcaaagagcacatgactgaggatgtccatagttgcactnnnnnnnnnnnnnnnnnnnnnnnnntanttgnnggcangccgagcttccatcacgtggcgccggcggagaccgctgagggtggtggagggaagaaaagcgacagagagcaagaggaagggcg

SEQ ID NO: 147628 - DNA, 628 bp, Homo Sapiens
tttgggaataaagacaaagacaaaaaagtttatttggaagaaggggtcagggggctccttgcttctagtgaacaagggccctgagttctagagccctttatatatattgagtaaaggagatagggagaaggggctgattgtcagtcagctgcttgacttagtgtaggcctgtatgacagcattctttaaacagtaggctccagatgtcccagtagataatctcaaggagcacagcaccaggaagtggctccccttagcataccttccagtgtcaggtgcagatgtgagtttgcccacattctgcattcatgataaacagtttgctctttgatcatatagcttccagtggaatgctgtgttggtcacaatcctcaggcttctggatcccaacatctctccctttctgtttttgcattaattgaatgaatgtaaggccaggttgggcagctttattttctgattggcaatccatctgattttacaggctatgagcaggaaacagagacagaacaacattattcccagaactatatatgagatgttaatgtggtactttagataggtccaacgattgatgctctcccagcctggctgaatccgtccaggcttctaaagagggcctgaactc

SEQ ID NO: 147629 - DNA, 788 bp, Homo Sapiens
  misc_feature (633)..(692): n is a, c, g, or t
cgaggaccccagcccgcctggcggccacctcgagggctacccatgcccgcacctggcctatggcgagcccgagagcttcggtgacaacctgtacgtgtgcattccgtgcggcaagggcttccccagctctgagcagctgaacgcgcacgtggaggctcacgtggaggaggaggaagcgctgtacggcagggccgaggcggccgaagtggccgctggggccgccggcctagggccccctttttggaggcggcggggacaaggtcgccggggctccgggtggcctgggagagctgctgcggccctaccgctgcgcgtcgtgcgacaagagctacaaggacccggccacgctgcggcagcacgagaagacgcactggctgacccggccctacccatgcaccatctgcgggaagaagttcacgcagcgtgggaccatgacgcgccacatgcgcagccacctgggcctcaagcccttcgcgtgcgacgcgtgcggcatgcggttcacgcgccagtaccgtctcacggagcacatgcgcatccactcgggcgagaagccctacgagtgccaggtgtgcggcggcaagttcgcacagcaacgcaacctcatcagccacatgaagatgcacgccgtgggtnnnnnnnnnnnnnnnnnnnnnnnnnnnnnnnnnnnnnnnnnnnnnnnnnnnnnnnnnnnnccgacggcaagggcaagctcgacttccccgagggcgtctttgctgtgcgtcgcacggccgagcagctgagcctgaagcagcaggacaaggcggccc

SEQ ID NO: 147630 - DNA, 576 bp, Homo Sapiens
ttttgggatgtttcttgcctgtgttccagtcccacctctgccactaattatggcagtgaggaaatcacgttagtctccaattatcttcagttactcctctttatcacattctccccagacaacgctcttcctgccaagacaagacgggccctcaacatccttctcagcataacactgcagccatggaaattatcatgagacgtgaatcctctttgctccaacaattgtccggctgtgacaattctgtcaaagagatccaagcagcttgcaggtagggactgtgcccccaagagttggtcctcagcaagttgagtgacagactgcaactcccttgtagtggagtttccctggtgtcagcagatgtagcatatcatggggcctgcagactttctggtcctcttagtttagggtaagtaggggattgagaaggtttctttgccaactgggtagaaacttccagaagttgccctaagtctctgattccttcagttcaaaacaattgtgctaaagagccaaaaaaatgagtcctgaatggtgggagtcctggaagccgtaagaggcgcagggagggtgtgg

SEQ ID NO: 147631 - DNA, 481 bp, Homo Sapiens
cattatgtgaccaattttaatgtaaatagcagtctcagtgcaaggattaggtcagtgtttgatgggaataaagttccaaagcttccagtggaggccaagagtctggcttgtggatgggcatggcttttgccagcataacaactcagaatgtgtggatttatcggactccttaatctgtcaggctgtaagtcctggatgaggtctgtggctcctgactcaagagatggcacaaaccatgagagaggttgcagaccccgtgcctgaaaaggctggtgactgagccagcagtgcaggagagtggatgataccaagtatgttcatctccatgccagagaataaaaaaagaatgtgtcaatgtctcccctttcatgaaggatttgcgggtactttggtggcagtccctgaatggggtgcctggagcctcttgcttttctgttgaaatcagaaggcattgcatcggggagtttgagagcaaagggat

SEQ ID NO: 147632 - DNA, 192 bp, Homo Sapiens
ttttttgctttaaaatccaaggcctttaatttagtttttggtaatgaccataaatgccttcgcaaaacctctttttcactgtaaatagaaggcactaggcattacataatacccttaaagcagtgattcctcctgatgctggtagagataaaacatttaatgtcagggtttacatagtaacaaattcttctt

SEQ ID NO: 147633 - DNA, 785 bp, Homo Sapiens
gttttatgacccaaactttttgtttctggccatgtgttaggagtatgtcactcccaactggtgtgcagcaggtaaccccttctctcaccagccttcaaacaatgaaagccagtccgtctcaatcttttgaaaggactagactatcacatattcacacatgaaagagcaaattgttaattaaaattataaattctattaactgtattcaatacatacaaaaaggccagtttttattctaaaataaagaacatttattatcacaagttggataaaaacacacagcttttacaaaaatgatttttgatagaaaaatatgtttgaatacactgtgatatttgtaggaacaccacactattgctgtatctccagctaaagcttcaaggaaactctatttcttataatcaaaatatccactatttaccacaacccgtctttggaaagaagttcatagtgtattctgaacaaaccaaagcatttactcggaagttacattcccatgcctggcagtcacttgtgtatgtttaatacagttacacatgatgtaattacagaatggcggcgctggaagggaccttgtagatcatttagttggcaccctaattttacagagggggaactaaggccagagttgagagatgtcctcaggatacctgagtcccattccagtgttcgttcagtaattcataaggaagtcatcataaaggtttaaaaagaaaacgttaatgactcgctccctttattcttctatgctgagagtatcattctggtttattcagattaagacc

SEQ ID NO: 147634 - DNA, 426 bp, Homo Sapiens
tttgcttggtcagactttttatgaggttctgattctgcaggttcatgatagacagaaacccaaagatatgtgagaggcaggtgttgtgtgctagaaacattgaaagtgtctctcttttcttctttcattttcatttctgcacttctaacacatgaaatttacctgttctaaaatagtcgaggaggaaactggcaaatgatgcttttatattttgggaatttgctttaaaaagggagaatatgaaaacacaaacatcaaagagcaaagtggaaatcatgatagttttcaagtaattccaagacagaaggaagtctgaagtttgaagaactgcaatgggtaatgctccttttcacaagtttctaattttcattttctttactttgtgccttccaatcctccttgttacctccttgttcacgaggtgtc

SEQ ID NO: 147635 - DNA, 224 bp, Homo Sapiens
gtgtttggagggaaatccacagttactgaggcatgggaaatgaaggctggaggtgctgctctagccctccttcccctcctaccctccacatccacacttttctccgcagcccttcccgtccacatcgatcagtagccttcaattaaactgctgcacaggaagtgccactgcgcccagcccacttccatttattcttgtattcttgtatcagttaagcctccctc

SEQ ID NO: 147636 - DNA, 639 bp, Homo Sapiens
ctattcattgtgtagtttttttgtaacttatattttaccctaagcattttctcgttgtcttaaattattaattgaaaattattcatggctaaataatgcctaggttgccatgagccttttctccttctataaaccgtgtcagcattcttttatatatatctttcagcacatctgcaatgatttctttggaataaatttctaaagttcgctggatcgaaagattcagggatttttagtgttctttcagtttggcaaagtattttccagaaacaagcccatttcagttctgaataaacaaattcttttttatgttgcattaaaatctacctccttgtagcatatgcagggaaaatgaattatttgtcaacatgctttcagatacttgaagattgttctatttctctttatgactattctgttttctggactatacattatctttcccatgattttacattgaatggtggtgattcagtctcaatgtattatttgctactccgaggtatataataaatagatagatgtgattagcttctaattaaagggatatagtaggtggaaatgtataatagtggcgtaagccagacacagcccactgggtttgacaaatctcttttcaagtaagattaccaaaataaa

SEQ ID NO: 147637 - DNA, 275 bp, Homo Sapiens
  misc_feature (121)..(133): n is a, c, g, or t
tcgagctccggtacccccccgactagcccgacaggggctgaggggagtgaggcagggaggatgcatggggcctgtgggaaccagagagaagctggggtcagaggtaggagctgacgctgtnnnnnnnnnnnnntgaaaggtgaggcaaggtcaaaggtgaactgcagctcggagggaggggtccaatataaaccaggacttgcaggtgtagaagtaaaatgggactcatagagggtgaaagagaagttggagtcagaggggattcagcctcgtgc

SEQ ID NO: 147638 - DNA, 442 bp, Homo Sapiens
ccataaatgtttaccctaaatttactatgatccttgacatttcaaatttatattgctgttattattttttgtgataatttgtagagctgaagtttgtcaagtttgtataatgcatttagcgctgtagttaagagcatgggctatgaatggatgctaatggagagcctgttgcaatgtaaaaaagacactcaagtagctcagtggaatggcccacatgatgagaaactgagagccagcgtcaactgcccatcacataattaagcaagcttggtagcagaccttcttgccccggtcaagccttaagatgagtggaaccccagctgacaactccactgtaaccctatgagagctgccaagctagaatcactcagccaacccactcctgaattctggacccccagagtctgtgtgagataataaatgttcattgttataagccaaa

SEQ ID NO: 147639 - DNA, 459 bp, Homo Sapiens
atcatactttaagttttagggtatatgtgcacaatgtggaggtttattacatataagaatccaaccacaacttgactggtttcatcaagcagcattgctccattttacaagagaggaaacgggctcaggacaggacacataagcacctgacagtaaatattttaggttttgcagaccatacagtcagttccatcaccacccccagaggttcacacgaggactcccacactccgctcttcccacacctgggctcctgctcgaaacctctgctgaacagcctgcttgaaaatccaccggagtattctgttgataaggaaatgtctgggcctcagatttcccgtgctgcttgtgtaaatcttacgaggaaaagttgtgcagctcctttcatgcttctggattcagtgcaacttggctgtgcagattctctaaagcttttgaatagactaataaacatggaat

SEQ ID NO: 147640 - DNA, 460 bp, Homo Sapiens
tggggggcgggggtgggtgaggaagtcccgggccaggcaccccctgttttgaggacgctccgtgtctcccctcgcccagtgccacattctgctctctgccccttctttccacaacttgatccatcccccgtaaggcttggccacttctccctcaggatactgtgttttaccccagccgcccacctggagagcctccgaggggtcgcgggcgctctcccgggctgccggcatctgaagcagaggagcagaggcctagacctcccttcgcccccaacacctggcgacggacatttgccggctctcagcagcgatggggaattttacattgcgcgtctggatatacacccaccacctgagtgtgccattcacatgttactggactttgtcacatctagttaatcctccctgctttgatcccttttattttttatgcatttccaagtaaattatagacctcaaa

SEQ ID NO: 147641 - DNA, 1059 bp, Homo Sapiens
tcaccttgggcctgcaggatccacgcttcagggcctcatggcgagggatgtctatgtggatctgccctgttatgtgtcctggtgtacttcgtcgttcctagaatcgtaatagtgctcaataagagtgcgagatattcgttgtggttttctctggagagtggctggtctccggtctacattggcgggaaggtaacctgagaggagcttccacgtcattggacgcactggcttagggattccggaccagctcaacctccgtaattcctcaaggtccgtgttggggccggcaagcagctgcttgaacttgtcgagccgggaggcctctctttcgctcagcgctgagctgctgagagtgctggggtcagatgtgccacccagcgtgacggtggccgagtgtgggagagactgggacctctgcagaggggcggcatcgctggcactttctgcaggacaggacgtgtggctctcactgaccgacttcaccagccggaggtcgccgctggggggtgagggcggctctgcctcgggcctgggcttctgctgaagccctggcccctcctgcagcgtgggccgcccctgccgctggctgtggttacgcagcacacggttggccgtctccatgaccacctcggagttcaggctctccgccgccatggccaggagctcatcgtcgtcctccccagcgtcccaggcatcgctggtattgctctcaaactcctggaaggtgctgaccctcttggccttcactggtgtggtcggcatcttggccgtggacctgagcaaagtgccatgtaacagtggatcaaagggggggtgctgggcaccatacacgtgctggatgctgcccgggagcttgctgttgctgcgcttccagaattgcttcctggccccgtcgctggccatggcccctcctcatccctcagacccgcggcccagacaccccgagtgcacccggccctcccctagcggccctttcctgtgccccgggtggcccctcactgctcccggcgaacgcgtgggtcgacgatatcccgggaattccggaccgtaccagcctgc

SEQ ID NO: 147642 - DNA, 656 bp, Homo Sapiens
  misc_feature (383)..(384): n is a, c, g, or t
  misc_feature (395)..(395): n is a, c, g, or t
ggacgcactggcttagggattccggaccagctcaacctccgtaattcctctgcaggacaggacgtgtggctctcactgaccgacttcaccagccggaggtcgccgctggggggtgagggcggctctgcctcgggcctgggcttctgctgaagccctggcccctcctgcagcgtggtccgcccctgccgctggctgtggttacgcagcacacggttggccgtctccatgaccacctcggagttcaggctctccgccgccatggccaggagctcatcgtcgtcctccccagcgtcccaggcatcgctggtattgctctcaaactcctggaaggtgctgaccctcttggccttcactggtgtggtcggcatcttggccgtggaccnntgagcaaagtngtccatgtaacagtggatcaaagggggggtgctgggcaccatacacgtgctggatgctgcccgggagcttgctgttgctgcgcttccagaattgcttcctggccccgtcgctggccatggcccctcctcatccctcagacccgcggcccagacaccccgagtgcacccggccctcccctagcggccctttcctgtgccccgggtggcccctcactgctcccgggactccagagcctagagccgagaagctcttccgcctcc

SEQ ID NO: 147643 - DNA, 734 bp, Homo Sapiens
  misc_feature (642)..(675): n is a, c, g, or t
gagacagttttgctcttgttgtccaggctggagtgttcacatatgtaccccaggcagttcatggcatgggatgagccacaggtagtaagagaaagggagtaacatggaggcaggcctagatcttcacacgtacaggatagattttttttcagataatttgttattttgatttataccttttaaatggataaacattagctctgtgggtctctttttaaattgtttcaggacatgacaaacatctgggatgggcctgatgatgtaaccactactaaactaggatacctacttcctattcacaattacgttaaattccattatgcatatgaaacacacgatttatatcacataccacttatacatatataagtcttttgaacttcagggataattcgcagatgtgcttaatgctattgccctgattattcaatttatctgtgctttaaaaaaacttcatagtcaagtggatgcaagggatagggttgcagaaagcgtgtggttattaatacaaaaagggaactacttgaggctaaatcctttgtaatcctgatacagtacagatctcagattccttttcagttctgtaaactaatcgtgttgatggttactcaaatgtaaaagtcgtaaaagtttgatataacnnnnnnnnnnnnnnnnnnnnnnnnnnnnnnnnnngagtgcatgcaaaccatagtaaaatctgactaagtctctatctaccagcaaggtaaccc

SEQ ID NO: 147644 - DNA, 499 bp, Homo Sapiens
  misc_feature (338)..(363): n is a, c, g, or t
ttttttaagttaaatttcttgtttttaattgtcttaagtatcaaacttggatcatcagaacatgttggaaaaacacggctctgaagccaacttattaagcacctgtgctgtatcgaacattttacatttgttcatttaacatatctagataaatctactcatttacagctatagtgatccaagatttcatcacagcagattaaaacaaaacctttaagttaaaaataatttaaaatcagtgaatatattaatactatgagagtctttgcctatgagaatacagaactttggcccaaatgtttcattaatctacagggttatatacatttggagcacannnnnnnnnnnnnnnnnnnnnnnnnnaatcctcttcccaaaaatgggtttctttaggcagctcgagactcctgtgttagacaagaggaaaaggagtgggtgcctctcgactgggaccagtggacattattatgggaatataccagtggtggcaggttgatga

SEQ ID NO: 147645 - DNA, 555 bp, Homo Sapiens
tttaagttcacttctcaaatctttattcacactcttttcttctaaaattgacagaagtacagaagggaacatcacacagtaaaactaaccagaatgcgtccatctggcatgcctttcaggaatccagcccactaatatttgctgtgggtttcatgactcaacccttcaagatgccgcacaaggaagaatttcctcattttgcagaactgccaaatctcattcactggagcaaaggctcctcatttggggctcatttttagacagttgtttctctgtttatacattgtaaaaatctccctcagcggatggagtttgtcatgcatttctaaatagtgagtaaacatattcctccactccctcccggcaggacacacttcagcattttggccactgagcctagttgaatttctctctccttccttcctcccctcttcccacgcagcctagctttattcttgcttccttggttttatttcttcctctcttcctccctttttcttccttccctaccttcagccacatctttcagcctcgtttgttccttggaggctttta

SEQ ID NO: 147646 - DNA, 557 bp, Homo Sapiens
ggtgtttctttcagtgtaatgcatgcagtggtcacaacccagttactcataatatttggattgtatttgttcgtagatatgcccagaagactagagaattagtgttatataccatatagaacttactgtcagtcaactataaacaggcccaattaaaaactgttccattactacgcaaacacatattagaggcctttgctgatgacacattagctggatcttagccaccccagaaagggtttgatttgaagctgattgttgccagatatgcatattggaatcccatctacccatagttcctctgaaggtgattttgtaatttgcaaaagggtataggaaaatatacctaaaagcgaatttgtggctgagaggataaacagaagctgtttgctcatgttctgtgccccacacccaccaatacctaaatctgttaaggaagacagaaaatgttttctttgtgctcattgagtagttccagacagaagaagaatatactctttaaaatgtatttacctgttagttggaagtacccagaattatcagaaacgggggcaaaa

SEQ ID NO: 147647 - DNA, 387 bp, Homo Sapiens
catccaagccctgggtgactggtagctctcatgagggtgtgatggtcaggccttgcccctggtgtaaattctgtctgtaataggctgtgactttctaactcaacatacccactggcttaggagttccatttgcacagggggagctttattgcttttctatatacataagaactttacgtctcaccagtggaggttgggcagccaagacaccacaatgctgggtgtcttcagaatggacttaattttgtccttttgctttctgccagtgcagatcaccatctctcagatgagcaggaccccaccctctggcagtcttgtcttgggagaatcactctgagctcccatcctttgtaaattaacattggtttgagcaccaccctccatcac

SEQ ID NO: 147648 - DNA, 607 bp, Homo Sapiens
tcctttgaccactgtctttttcttaccctacttctcttatctttgatcgtatatttctcataatgtgaaatatgatgagattcacttaggggcagcatgttagttttgggaggcaatgtcaactgtgtctctgaattcctgtcttccaaattgaagccagaccatgctgatgacctcaagtagcactgactatttgacaatagggctgataatgtaatcggcttgaattttgacttagtaactttttatgtaatactttcggagaaattctctttaggacaaagcagagagtccaatttattgagggatagattgtatctcttaaagtggtcatattattattaattttgccaaaagaagaagaatttattgaatatttatactataaaatgcagtaacattctacttgcttattacatttaaatccttgtgtaactgaatgtttacatgtcaagaggaaaagctgtaagaaaatgctgtcacagacccatccctgtggcatcgtcagcagaatactgcttgcttacaatctttattatgcattcttataacataacctcagagtatctttaccaaaggtttttaaagtaaatctctaattaagata

SEQ ID NO: 147649 - DNA, 597 bp, Homo Sapiens
agaatcttatgattgaattagaaatttgtgatttatccattcaagtgatgaaaaataggaaacctaatttttcaaatactgtcaagttttagttttcaaatgtttgtcattataggaaaacagagatccaggcagttgtttctccagctggtgtctttacacagaattggagctgtccagtggggctgagtatgctattccaaactagagtaggtgtgatagagataattgggcaaatttcaaggagtaaatactgattcatgctttttattctgcttggacaaatctctggtttaaacaaggtgtttttcttagcctcaaagcaatgcagaggagggtagggaggttggggacacactgttgagataaatttgtttttaaatcttctttctagtgcatagtagagagagaaggcaactaaagagcaaaatttgcatataccctggaaagccctacttcttgattaactttatttgggatggtctctttatagcgcttttaagttttggagtagaaagatgaattcaggtaaagaaaactagacaaactaagttgtaatcattaaatgactgcttcccttctaatttcctccttaaa

SEQ ID NO: 147650 - DNA, 454 bp, Homo Sapiens
gtgggggttttggaatttctgaatcaaatttaatttcttttatcatcaaaagttaagacatatttccctcagtcttaggaatttttattgttaatacaaaataaattatacatgctgtataaatttttatttatagctaaatatttcttcagtcatcactgtcacttcctgattcactcagctgcaaatcatttcttaaagtattcatcagaaggccactgttgtctcgaaatctattatgactggcatctatatcaggaatcctgtactgtgtcatggtaggatgtcctgagacacaattccctgtatcagaagtagaggatttgcaatcttcatcttctgagtcactagaactatcctcactacttgaagatgatgaacttttggaatctgatgaactatcacaactactcatctggtccattagactagcttctgccttcagttctctccc

SEQ ID NO: 147651 - DNA, 453 bp, Homo Sapiens
ttttggtaggaagcagattcatttatcagacatggaggaataatcaataggcaaccagaagttctatcacattttcaggtcaatagcaatatcaccttatatctcagcctattttctaccaaagaaagattattcacttctcttagcatagcatctattagtggagagtaggtgatgttattaacttgttggtaccttcggaatgtgcctagtgaaaagcctaaaacagtgtcagtctaagacataagtcaatgttaggtagacaaaaggaattattccttgggaaaggaaaacagactttacaagataaataactcaaaacagaaaatgggagagggcaaaagtaaggcaaatccactccaagtggtaagttgcctggtctattagtgctttgactcactccctaccacctacacagaggctttggagaagtcaaactagcaaaatcactcc

SEQ ID NO: 147652 - DNA, 727 bp, Homo Sapiens
  misc_feature (619)..(662): n is a, c, g, or t
atagctatggcagtattttttattactgcaggcttcccctctctatttgatatctcacagatggcccgtgatgaatcatgtgacgcacagtgctaagttaatctctctaatgatattaatgctatttacttgtattgtgctttaaaattacagtttaaatgtgaacacttttgcattcattgactcaggttcaactttaagaacctttgaagtaagtcttgtctctacctactgtgaagaaataacctcagagaggtcttgctcaaagtctatagcaggtgaatgatacagctgcgattcaaatccagatcatgtgtttccaagcggtgtttttgtattccactcaagctgtgttgcacccaacttcataacagtgaagaataaagatgcagctacactttcaacgttgacatctcaaggaaatgtggccagtttcatattgttggatgggatgtctcgctggcttagagaagcctatctcttggtagtggagacacatcaacctctctctcctcggtctgtcttcttgactttgtctagtgaggcagccattctgcagaatttcatctgctttaggtatgcagaccctgcactgcatgcgcgcatatgcacgcgggtnnnnnnnnnnnnnnnnnnnnnnnnnnnnnnnnnnnnnnnnnnnngggactaggactattccagacttggcagggggactttaatggggagctcaacccactgactgcct

SEQ ID NO: 147653 - DNA, 570 bp, Homo Sapiens
tttttttaacattctagatattttaaacagaaaacaattcatggagagatcaattacaagagtatgtgtagcaaaagatgaaagggtcaggttgtttaagtaacttgataaatctctgcttcttttgtgttgggtgataaaaatgttgaccagagatcagtggcagatgatccaaggcgtcagctgtccaagctcagcatctggagccggtgctgaggaaatgtgcatttctaggtctgggcgccattggaccatcactactgtccttgaagctgccaccgtgagaactcacatctcagctgctatagccacagctgatattgtcattgcttccagaattatttcccttgctccatcgtggggatcccgcaatactgctgctgctgaaatcactgttgttgctccttccagaactgtcggcactgcagcattattatcactgcagctaccactggagatggctacagacaccagaaacggaagagcacctctcccctcctccggcagtgtgactttcagtcggctcctctagtagccagatggtatagaaatgacacaccaatgtccgag

SEQ ID NO: 147654 - DNA, 391 bp, Homo Sapiens
atcacacaacagttttgtaaccctgttctctcagaaagttccatagtccacccatctggaacaaaatagtgatttccagaaaggatatgggtcaatgacagtgtgggaagaaacaagaaaaatcaataacctacattttaatgtgaaatgacaacatgtttaacaacagacttcccaggcatgcttcaggagagaatgcgagaacataattttagaaccagaaggaaacttagagatgatgagaacttaacactggatttcacaggtgagaaatggagaccctgactggagaactttcttgggtcacacaactagttatccactttcagcttggtcttctttcaatcttcatttgcctcctaaataaaagatctgctggctcggaaaaaaa

SEQ ID NO: 147655 - DNA, 428 bp, Homo Sapiens
  misc_feature (392)..(392): n is a, c, g, or t
ttttgacatgaaattgtacgtatttattgtgtacaatatgatgttttgaaatatatacataccttctagaatggttatatcaagctaattaacatatgcagtacctcacatagtatctctgcagggaaggcttatggcctgggcaatttttagttctgagcaagatggcctggaccttagcttgctgctgctagtagattactgggagtgtcagatctgtcttgtcatgttaatgagagctgggtgggacttactgccacctgctactcttactccttgtgcgaactcttctgtacagtagaaacagctatgcttctccttggaataatatcccagtggccagagaactgtcccttgagctccacaggggccgctgcttgccgtgcatgtgnagagccagagctcagaccggcttataccagcctcca

SEQ ID NO: 147656 - DNA, 500 bp, Homo Sapiens
acaggcgtacacccagaaaaacagcttgagagaagagccagagccacagccagatgctcagtcaggaagtatccacaccactccaaacactgccagagacactgtcagacacacagtcagacacactgccagagacaccgttataaagactgccagagaaacagccagacacacagccagaaaaactgacagagacgcagtgccagatacaccccgagaaagtgccagagactcagctccagacagtgcagacatagcataacagagacaaatgtgggtatcagcctgaagcagctgcggagaggctggagagcaatggacttcctggggcttcctgtgggagagggctcctgcctgccttttgctacccttgaccctctccaggaaagtcccctcctctgagcctgcttttcctttcctccctgtcacagccacaggtgccctgactgcccctccctggcacagtaaatctctctgtgtcctaagtggccccagctaaa

SEQ ID NO: 147657 - DNA, 588 bp, Homo Sapiens
  misc_feature (536)..(536): n is a, c, g, or t
ctggttgagaaaaatcaccagaatgtttggtgtatctataaggcttttgtgtttgtttttccccagttggctgaagttagaattgcttgactgacacttcattgctatacatgaaggggcactttaaatcaggagaatctctcagcttcatagaacgggtaactagtgcaggatggggaaatgttcacagacatcatctgtatgtggttgtgcatagaaagtaaatacatggcgtaattaactcagctgttctagctgcagtactgctgcagtgatccacccacatttaggatgtgctgacagataagctctttgcctacaatacatggataattagtgctataattctggatagttcctttttagtactgttttatgaagctttatcaacttggcttcatgatcctcactttgattgattttaagaggatggataacacagttatctctgtaatgttctgtcccagtatgtctttgggtcaccagttaccttcttaaaatatgtgctttaggtaggtgttattacatatctgtanacaattggtatatgaaatatacacatcctgtgccccaatatggtgcattatg

SEQ ID NO: 147658 - DNA, 456 bp, Homo Sapiens
ttttcccctgccttacatgcttatgatctccagttgacctccgctataaattgaagggattgaggcaaatggtttctaacattcctttgggctctaaagtttgtagttttcaaatggagaaccaaggtttaactgccaaggaggcaggtagggacagagcctaggcccagggctctggtctgtgctggcagccagaagaattgccgagggccaccatcttgcagtagcatagtagggtgtggccatgtatatggtaaatacaattaggattttgtctgttgcccagttttctagggtttttttcactgctcgtgctaattttcttaatagcaaaccatgctctgagcctttcccttcacagagggaggtgtgctggacgtacctccttctcaaggactggtgtgaatatgtatgatgcttctcaagctgcaaagaacacattacttgaataggtgc

SEQ ID NO: 147659 - DNA, 343 bp, Homo Sapiens
tttttagtctaagaaaaaaatatatttatatcactgcaatggcacaccctgggtaaaatgttccttccgcaatgcatatcataggcagctcatggaactggctttgttttgtgtggttgcacctgacctggtgtccatagtaagacctgtagcatttggtcacttgctgccacaccaatgcagcagtgacacacaggaatgaaatatggaaatacatataaataaaaccgcaaagagtctggggcaagggctctgcagagctggtgctgcgagacagtgcattcctcagtgcaactggagaacagatgctgaatccttagtgtttgtgtttctttcactgcga

SEQ ID NO: 147660 - DNA, 871 bp, Homo Sapiens
tttgattagcaagaaaagaagtttattctaaatgaagaaacatgatcaagacattagaagtaggatgcccattgcaccccctgacatcaatgggggaccagtgtagattcctgagagcaagtgtcagcatccagtcagccggagaacttacgaacatacaaggtgctgggccccacctcctgaggttgtgatttgttagatctgggcaggagcctaagaattctcatgtccaacaacttcccagccgattcagaggctgcagaaccacttaacaggaatactttattcaatgtggtttatcctgattaataacctgtcagcctcttcagaaatttgtgataacgtggcattttgtgaaattctcatctgcttttagcagactatgcacagtcccaggaacgaggccagaactgataagcaagtgtggcattggctccagccaaggttatgggattcgggaacctccccatcctggaattgggctgggaggggtttcacctgggagccacagttttatggcctggggttatattgcagtccaaagacaaactgcttgtgatttggctggctgcctcagctcgatgccagtggcaggccgtaggatggtatcccgctaggttgagagcatgagagcaaggcaggtctcactaccacctgctaggctatggaacccgagccaccccactttccccatgctggttagttggaacagaaagagttgctccacttctccctgaactattgctccagtggcctgagaactgtcctccaacccccatcagggctggcacttgtactggccattaggaggaccaggtatagacctgcccatctcagccccaccctgctttctcctctacccaacaccacc

SEQ ID NO: 147661 - DNA, 511 bp, Homo Sapiens
cagtgtctctttaactttaatttggtttgtacatgacatctacatatcaatatattgttcattttaactgtacatcttgctttttatatgtaaatactttgggtgaccatattcacaatttgtaaatgtctttcactgtagggacagaaaggggacattggccctccaggatttcgtggtccagtaagtgtgattaaagacaatatcaatgctatgtttgatcaagttctttaaagtagcaaggaaattttgaatcagtgtctctcattaactgtgtgagagagattataacatttaccttgttgtcaaaccagggcagaaaatagctggtcactatgtgtccctttgaccacgggtaaatatttctatttggtccctggaaggcactagtgatgcccatgatgggctatggaagagaagaaaagctttgtctaagcagcccaggcccaaggtgatcctgccccttcagggtagaggacagtgagacaacaagggatgaagaagtcaactt

SEQ ID NO: 147662 - DNA, 351 bp, Homo Sapiens
  misc_feature (78)..(78): n is a, c, g, or t
atacacacatttgttctttctggaaaaagccaattccaaccccagtttataaattaatgcccaggtctcttatgttcnttggagcagcgccgtcaaccggtgacatgccagtggcagggctgggttattactgctgggtatatcaagggaagttggagtgatttaattgattcagcagatactgattggatgtctctgtgctcggtgctttagagataagggaaagaggctcagtttttccttctgagagtttataatgtagtagagatgtctctttgtcttattcccttcaaaccttttagcaaaaaggcaaatgcaagtaaatgacaattagactagcccttaacattt

SEQ ID NO: 147663 - DNA, 404 bp, Homo Sapiens
ttagacaaaacagctttatttgaaagacgtgggacagccaagttcccccaaccccgcggtcctggcgacgtcggtgtcaggcgtgggaggaccagtgtcctgcggagaaagaacaaggttaggggtctgcagtcggggtcaggagtcaggggccagacctcgcgagcgaccgcacccgggggggaggcggcagcctgttcggggcctgggtttcaccgccgcacatggggcagcgcgcggtgagctgaggcccccggggcatctgggcgccgaatctcacccgcggccacggccaaagcgggggcaaattttcaaccaacgccggtctcgaagaccaccagcgagacgccagtggtcaacgcggcaggacctacctaagtgaagaggagagcgcaatggaggcg

SEQ ID NO: 147664 - DNA, 243 bp, Homo Sapiens
acgttagacaaaacagctttatttgaaagacgtgggacagccaagttcccccaaccccgcggtcctggcgacgtcggtgtcaggcgtgggaggaccagtgtcctaagtgaagaggagagcgcaatggaggcgcggacgtttatagccactcttcgggtggattcccgagccgcggctggggacggaggcgccggcgtttatagtcgcttttcgggtgacgtagattcccgggccgcggctccc

SEQ ID NO: 147665 - DNA, 962 bp, Homo Sapiens
gaaatttcaccctatccagcaaaatcccaggttgtgtcaaagtattaatacattcagaagagaagaagccttaacaatgcaacttacaggaagaacaactgaataattgatcccagcagccgtttaactggagacctatggtttaaaaagtatcatctgtctatgaagagaaggaagcatataatcttcattatacagaggtttccatgtaaaatactgcatttttagaagactgacatctaaagggagaagcttcaattatctgaaaaagtcaatgattgcctagtgatgtcaactaaatgagctttactgtgtcgagattcttactgaagccaaaagaaaatcagcatgaaaacagaccagcctctggccagggtcatccagcacctctgggtcttgtctttcaataaaggaatggctagaagtgtgaccccttccccaagacactctcctgccactgatggatcaacagaatgctatggagatgcaaagggccctctagaagattgatgttgttatcaataaaaacaaaaatcaaggcatcttcactcagtcttcagctgataaaaatgttgacaacagtgggagaaactcaaaactcacatgttttggctttctttataaagggaaaggccatagatgaatttctaaatttaaacctccatctccagagacacccttctcgttgctgattcagtttcatctcatgaatacacagggtcttggataggattctgcatgggcagccaagatatctgttgtattcctagctgtgttttttatttctaggttgccctgggacactctctatatatcattttccctgaacagaaaccattttgagagtaagtacaacagcattcgttaaatgctctctgctcttcaagggcaagatgttgttgtcaagtttagtagaaaaacaattgaatgtaaaatgggctcattgattaaagctatacaac

SEQ ID NO: 147666 - DNA, 473 bp, Homo Sapiens
ttgtttttaaaagcatcttaatccaaaatcatttattccatcacaagaagaaaaaatcaggaagttcaatatgtcccaggcagctctgacatcatcgtgtcctgctgcaccatcgggcacatcatgcctgactccccccaaggctgcgacaggagacattcttcctgctcaggactctggtgttcctgatgggtcctgtgcctgcttgagtcatgtggctgcagagaagaggactgatgtgaagacttgtgtttagtaaactgtacagtgctgtaatacctttgcaatccccaggtgaagaggcagcacctcttggcgtgattctcaagggggtttgtgtttattcagcaatttttggtcttgctcggggatgttctcacttcctttgcaatccccaggtgaagagatagcacctgtcggcgtgattctcaagggggtttgtgtttattcagcaattgttggtcttgctcggg

SEQ ID NO: 147667 - DNA, 826 bp, Homo Sapiens
cggagtcctcactcaaagaacctaagttttccactgtgcgatagacaaagttgccttcagtttctgatgacgatggagacactaattcttcctcaaattcattggagctaaaagatcccgagtggtttctttgccttgtttttcccatcatggtagtgttcgtggccatgacatgtctcaaagagtcattaaggtaacggttcaaacaagctgctcttgtatttggggggtgccacgtagtcctcactggcccgtgactctggcctcactcccgctttgatgaccgaattctcacttttaatcacaggatggtgaactggggtattatagcccccttcgttcatgtgggttcttggaggattttctccatcttcagaacatgagtcatcactgcttacgctaagccgttcagcattgccttgaacatacttgttgtataactttattctcaaagcccagcttaaatctggctgtcgaacggtattcttaagccgacgtcttgcattagcaaaccaatttgacacctgcactagcgtcatctgcgagccgagggccaagagtatcttctcggtcttggtggggtacgtgttgtcacggtgcttgtaaagccactgcttgaggggtcgcgccatgtcttgcagggcctgccgcttgtgcctcaccttcccgccattctgccgggcgccggtcctccggtgtctcaggccgaggttgtccttgaggggcgggccgtcgggaatgcccacctcggggcgggcgtgaggactgtccaggacaccgctgtagggccggccacctcgctcccgctccgaggcgcctccgtcct

SEQ ID NO: 147668 - DNA, 434 bp, Homo Sapiens
tttttccactagttcattcattaacaaacatctgagtacaaaggcacaatgatctccactgtagccctgttttgtgatgaaacacgcacacacgaacaataaaacacctggaaactgtgtccacgtccacagatcacgagagatctgggtgactaagctgtgggagagtcacaccacatggagacccggaccctccgtctgatggcttgtcatgaagctgttaaaatgtttgcatcatatctgtatcttctgacttgcagaatatcttggctaagtaagaagcgtaggcagatgatcaataacaacagcaaacccacagggaggcagaaccagaaaaccaggaaagaaaatgtgaggtcgttcaccagcggcatcaaagggtacttcatggcgcatgtgtggctaagctgggccagcctgggctgggctggcag

SEQ ID NO: 147669 - DNA, 484 bp, Homo Sapiens
tttcaagcttatattttatttcttgcctctgacaaccaggaggccatgccagagagataccatgtaaggaatgagaacagctgcccctgagaattaaccagagatcttctgcccagccccagcctcccacccccagagagctagtgactcactccaccagaattctctcctccagttctggtatttgcttggggttggagactggaagctattggcccgttgcagagctgcgtgcacagctctgggctcctcagggcactgtggagagaccgccctgctcagggcctcccctagggacgtgtgcggtagatgcggggatcctggccgccagggtttctcttcacagggctctgtgtgggaggcctcgctgccaccatagtcagactctgtgtcagagctgctgtcttcgctggtgaccaggacacgcacagccagcacatcctgtccagctgcttcctccccagggctgatcctcactgaggtc

SEQ ID NO: 147670 - DNA, 509 bp, Homo Sapiens
agtcatttcttggtatccatgaggctgtggtttcaggaccctctgagaaatccacagatgctcaagttccttttatgaaatggcatagtatttgcatataacctatccacatcttcttgtacatttctagattacttataatacctaatacaatgtaaatgtgatagttgttatactgtagttttttatttgtattatattgttgtatagtgttttgttgcgttgctatttctttgtaaaacttattgtattattttattgttatttgttatcttttttgaacattttgatctgcagttgattgaatgtgtggatatagatctcacagatgtggagggctggctgtgtacacacacagggagaagactgtatgaagataccagcaaaaggcagccatctacaagccaaagagagaagccttgggatgaactaatcctgctgaaatcatgaccttgcatattttgcctctagaattgtgagaaaataaagttctgtgctttaaggcaaaa

SEQ ID NO: 147671 - DNA, 635 bp, Homo Sapiens
atatttgtggattcaccaaagaggtgatctgtcagttcctgtgcaagtctcattgaagtgatgggtgccatacactgttagatgccaacagccacgtggcctgagcattaagcatactggccacacccttcacgtaatttctctaccatctttcaagtagccttatgaattcatgatggaaatactgaaactcagacaggttatatgacagctggcagatggcatgaccttagtgctcttagtatacaaatggtctaacatacagtaggagctcacaggtgacggctgaactctactgtccacttgaacacacctgggtcctattcctggagatctgggcttgtgatgcggctcagggcccctgtccttccacgagtggcacatagcaaacacgtgcatgtgtggctttggcacagagggtctcactcctgcatttagcccctctctgattcacgtcctgggcccgaaacctcccctggggaagcgggatagtcacagggagaagcatggggattgtcactgccgaagcccacagcaaaagaggattaccatatggttccacctgggctagccactcaaagccttctagaaacacagttctaggaatgcatttattaaacacagtccatttttct

SEQ ID NO: 147672 - DNA, 1567 bp, Homo Sapiens
  misc_feature (1233)..(1233): n is a, c, g, or t
  misc_feature (1240)..(1240): n is a, c, g, or t
  misc_feature (1350)..(1350): n is a, c, g, or t
ctgggcgtctcgagaggtgagagagttggcggcgaggtctcggcggctaagcgagcgtcggcgactgtctctccgcgagaggaggcaagttggggtccaggctccaaagccggtggccgcgtaccgcggtggagccgctgtctttgaggtctgaggagagaacagtgatatcctgagagaagatgggaaagggctgcaaggttgtggttgtggattgttatctgtggggaaaactgcaattttggagcagctcctttatggaaatcatactattggaatggaagattgcgaaacaatggaagatgtatacatggcttcagtagaaacagaccgaggagtaaaagaacagttacatctttatgacaccagaggtctacaggaaggcgtggagctgccaaagcattatttttcatttgctgatggcttcgttcttgtgtacagtgtgaataaccttgaatcctttcaaagagtggagcttctgaagaaagaaatcgataagttcaaagacaaaaaagaggtagcaattgtggtattaggaaacaaaatcgacctttctgagcagagacaagtggacgctgaagtggcacagcagtgggcaaaaagtgagaaagtaagactgtgggaggtgactgttacagatcggaaaactctgattgaaccattcactttattagcctgtaaactttctcaaccccagagcaaatcaagctttcctttgcctgggaggaaaaaccaagggaactctaattctgagaactagaaatcagtaatttccacaattgtatgttgaatagtgattgcctttaagtgtctgtgaacatggagtaatatttaaaataggccatttgtatctacctttggtccttaggaaaattcctaaggaagtcaattaatgcactttagatgttaaaagtatttgggctaaggttattattgcctgatatgaaataatatattcttattctcattgtttgaaacctgtctttgaaattagcacctttgttatttatgttgtacttgtgaaaacagtaaaatagtttggatagttatgcaaatgcacctatgtgtaacttccccccaaccccaagctgtttcggaagatatcataatcattctgtgtaacattatgcaaacttctaagcccaaacatgactttgtttttaaaaagttcattaatctaatgtctaggattataaaacatttttttgtgtctaaattggacccaaaacattngaacagntttggggtagtaagctaaatttcatccttgtggagattttgctaaacagactaagacccatgatttagctttgctcaaattagaatgtttagcatgagttgaggtaccanggtagtgttaagtaggttcatcacggctctaaggcccgttttttccttagccagacccctgttgatagaccagatacttgagggcaaactgtttgctcctcctcttgaaaatgattaggcacttaaggacagtaaagctgtattttctggaaggaagactgtatcttctggaatagttttctagaaaactagtcatatacaataaaagtatcataat

SEQ ID NO: 147673 - DNA, 405 bp, Homo Sapiens
tttaacaggaatggtttttaaatttgaagagttaccttattgaagtgatctccaatcacatgccatattcgagaccactgtagtcggatccgattcatgttgtagtatgatatctccacaatcttctgcaagctgaacatgcgaggatggtggggggaagccagttcatccatggacacagcacacagccagcggacaaagtcaactacaggccagacccaacaacacaagcaaagcctcgttaggaacagtcagacggtcacagcgtgaggcttctgcagttttcacaggtaagtcaaatacatacctattgcatttccatccagtctggtagacccagtaaaaatcctaggaagataattccagacaaaataaacattagaccgggtgtggggctcacacctg

SEQ ID NO: 147674 - DNA, 942 bp, Homo Sapiens
  misc_feature (108)..(165): n is a, c, g, or t
  misc_feature (395)..(440): n is a, c, g, or t
ctgtgactgtgagctgttctgttcttttgcctattaaactcctgctccaaactcactcgatgtgtgtgtgcatgtccttgacctcaatatctggtcgtgtgaccaagnnnnnnnnnnnnnnnnnnnnnnnnnnnnnnnnnnnnnnnnnnnnnnnnnnnnnnnnnnttgaaggtgacttcatcagaatgctttgctgctaaagggatctgcagtccagctgaaaacctgcccttgcctgagcccagccactttctcccagagaaaactggagaacctaaacatgattgtgaacagaatggcttccggtggcctgggactccttggggaaacagaaaatgcaccacaaatcccattttaggaaaaatctgttttcctcggagcccctggaattaaannnnnnnnnnnnnnnnnnnnnnnnnnnnnnnnnnnnnnnnnnnnnnaactgccctcctacgagggacccttaaatcaaccccaggaggagccctagctgctgttccccacacaacgccactctccagcaggaagtagccagaagaaatcgtcacccagtttcccctagcagcagcgcagtaagattgaggagctaaaaacagacttgggtggatgtctgcagctgcaagaagatgtgtgggaacagacacagaaactctccctcccagataagcaagacaaagaaacacagaataagagtccatctatgtggtcagagaatgggataagagctgatttaaaaaaactctgctctatatagaaggcacacctggtcccaaccaaaccactggaccctaggaggataagacctcctctgctcatgagccccctcctcagtagcccatttataaaaaccctgacaattttactaccacttggcaacccgctcgggacccctctctgtgatggagagctgttcttttcttttgcctattaaactccttctcc

SEQ ID NO: 147675 - DNA, 378 bp, Homo Sapiens
tgtggacctcattactgactcccatccactagcttctggtaggctttggcccttgggagccatcagaaaggcaagaaatcagacggcaggagtagagggatactggtatttattttcagttttctctctccacgttgccctaggttggctccatcccttcaccaaaggccacagctccagccagacggtgtcctctccatggaaaactaccttttctaggctcagggaaacagctccctttccttgcctctttgggactagggatgggaagggcccccactgttgctagtcccaagggactgcactctcctccttggtttctctaaacctgcccacacctttataaagagtcgctttttttaaagtcccttttccttt

SEQ ID NO: 147676 - DNA, 410 bp, Homo Sapiens
ttttttttccaaaaacggagaaagctttacactatgaaactagttacaaactctttttttccagcagtaaaggtggtgtacaagtcctctaaccttatcttaagaggtaaccaggaagttgaacctggccaactgggaaatgctgagatcaagatataatggagtgaccaactacgaaaggaacaagactcaagaactaaggactgggcagaaaatcactccagcatactggataagttcaacaacaacaacaacaaaaacagattaaatcctcatggcctcagtgcagtgtagaatgaaggtattctgatgcaggaacagaatttggtaatagagaagcctggatcaggtggtactgaggaatatagactagcacacacttgtgagtatccaaggatatgtcagctaga

SEQ ID NO: 147677 - DNA, 545 bp, Homo Sapiens
cattacatgtgtcaacactttattataagataggttttatgttagatgataacaccagcatcttgctcaataaattgaagccagctttttcaacagagaacattattagaatgaaactagatgcaagaacaggaaagtaaatacctgtgtcatgttcaacaagactgaactacggagcaaagaatcacacagtgttgcaagatcttgaactgactagatgataggattacaaaaaccacacagctattgctggaaaattatgtcatgcagagaacagactggcacgattacatatgtgggtttgtcctacacaaatcagacctttaagtgaaacaagtctatccaaccatcttcccataaaacctagtttctatggaaaacaatcaattaagctaaacccccacattttagatgtatattcatttatagaagcccaaaaggacagtggggttacaaataattttatattttagatgctttcataatttaaaaagttaacattacaatttgtgttactaaaatgccaaaacaggattggcatgctg

SEQ ID NO: 147678 - DNA, 437 bp, Homo Sapiens
tttacagaatcaaccaaaacatttattttttctcttttttcaagaaaaactgtcgagcttcttcccaggcctgctgaggaaatctgttagccagctcaagatagtcttgggaaccaaggcatttccctttgggttggtaaggctggttttccgcttgacctggagtctgtgccaaatcctgaatgaaagtggccagtaaaacacagctcatctcttgctccagaatgatcttgttctgatggttgttgtaacaagctgcgataaagtgaggggaacagtactttgatcagccgtgggtcactgaaatactggaagggcaactggcagagcttctgcagcactgtggggtggcggccggactgcacgatcacctggttatctgggtggttgacagtgaagtagcccacacagacgatgacctcatgaaggaggctttc

SEQ ID NO: 147679 - DNA, 748 bp, Homo Sapiens
gtatttaaatatttatttattagtatatgcatatgggaaaatgccaaaatatacactaaactgttagcattgattacctctgcaaggtggaattagaggagacttttgctttctaagatttacattttgacattgtttgagcttttataaggaatgtattactctatagccagaaaaaagataacctaaaacaattctatgatattgcaaatagttcaggaacagagagaaggtccttatcttcagcagctggggcaaatgtaaaaccccctagatgaaaaccagatatgcacttggagtttgtgcattagggcaaggagaggtggtataatatggtcttggctcacaacggcacctcagtaatgtttaataatcaagactgggactatagaatagataccactttttccccagtgcatgacgatttaggtatttatcaccaggatcttaaaaatatagggtttcagcccttatgatcattgcaatctaaagtgatttaacatccctgctttcctctctttactgcttctcaacaatccattttttttcctttcccttcaccctcctcgtcttcccagccctttttaaaattgccacaagagggcagcagcctcatgcataagaagggcactcagccataggtaacaacaaaaagcaaaaggatgccattaaaaataggtgatcaaactttagagatttcagcatcttgctctgaatatgtgtgcagccacgtttaatattccattag

SEQ ID NO: 147680 - DNA, 453 bp, Homo Sapiens
ttttgcattttgctttgttctttcatccatttaagaaatgtttattgagggcccgaaccaggccaggcactgtgctatgcactttttaaaatggctttgattttcatcaagaccaagaggcagagaagagcggagggagaagcagagagggaagatgggggctggtcaggtgtgggtcaggagaccccagcctcaggggtctggtcctgtacagaggcctaggaccaggctgctcactctgattataacacccattctacgggcaccttcaacactgcactgctgggaagagggctttccagtttggctgagagttggaaaaggctaaaaggggagaggaccccagagcaattccccaggatgacaggagctggaggcagcatcccgggaccttaggagaggcctcatgagcttcccaagctcctacctgtcttttgaattctgaactaaaga

SEQ ID NO: 147681 - DNA, 432 bp, Homo Sapiens
gggctccagttttcacccaggagacaggaggattctggctggaagggcaggagggactggtgtcccccccagaaggagcgccccaggacgatgccacacaagagagtcttcagagactggaaatgcttgccagggaggaagaaccactttctgtcctccatcctcaggagcacagaagggtgaagctgagcccacatagagaagcatctcatgctgtctgcagcggctgcagcgctctcctggggcaggagatgctcaaaggtcaacatgactttgaaaaggggctgggagaaaagcccccagtgctggctctggactcactatcccagggctcctaaagggctaaacatgactagattgtagtgagcctttcctaacatgcaaagaagcatccagggataatgtctaaatacagatgtgctatttctcaaa

SEQ ID NO: 147682 - DNA, 909 bp, Homo Sapiens
  misc_feature (150)..(177): n is a, c, g, or t
tcacaaaaacaaaggctttattttggctacaatttccacaggaggaacacaaacagcttgctacactgtgaatacaggattttggaccaacaaagagtgctccctgctggttcccactggttatgctctcatacaatgctggcaagattnnnnnnnnnnnnnnnnnnnnnnnnnnnnttaaaacttctctgaaatagctttaaaggtcattttattccttatggaaggaatatacaatcttagctacatttgttcacagaagttgattgtgggaagtgctgaacaaagcttcctgtggcccaggggtgcagcctcatctttgggccatgctcagtcttgctaagggcctggcatgggctccgggtggctgagacttagactggcccatcccttcagaccactggctcaggctaagcaaaaagtgactagaaacaaaacatcacattctaagtcacacagctctgggagtgggcatttcatacttaagattacagggagtcacttaagcactaagaattatttagctacatgtatgaaagggctccagcaagttctccttgtgtcacacagggcaggaatgtgggcaaataggcaccacgatctgctcgtgcctggcggctggatgactttagtggggccaatgagaactcaagtcctggaggggctcaatgccaccctcagctcagtacctcaacaacaagggtgaggagacccctctgttcggagccacttctaaaagagcgagtgatgttaaagagtctctaaaaactggttttcagtttctgcgctaaggagaggaactgctgtttctaagttctcagctcagtcggactcagctcattaaggactgagaaaaccctgtcctgccaggtcagcggcctaagacttgagcacagctgtaaacgatcc

SEQ ID NO: 147683 - DNA, 773 bp, Homo Sapiens
  misc_feature (706)..(706): n is a, c, g, or t
atcaccggacttaacaggggcagggcaggacagggcacgctgtggagccaggcagcctccacctcacaagacctggcctggtacaggctacagcagcaagcagacaaagtaagctgttcaggactggactccggtccctttattgagactgacaggccagtgggtccacccaaacaaaaataaatttctctcccaaagcctgcctgcaggttggggcacccagcatgtacctggctggggcccatggctgcccctaaccccaacagcacaggtctggctccctgggaatgagaggatgctggctatccagtatctggagatcctaaatgaagagggaggtgagtcctggtggccccctacccccaggagagctggccgcaaatccatgatctgtgttgggccctcggggctcagtcatcggccagggtgatgacgtcgtactcgatgccctggtgctgcagctgttgaatgtgttcgggcactgtctcgtctgtaccaaacaggccctgggcttgggccatggcagcatcagccactgctgtgacagctgagtgtgctgcagcctcaagttgagcctgtgtgacaagctgctggcctggggacacaggcacatactggatctgggactcctgaaggaacggggctccttgttcatactggatgtgtgtgatctggccctcctgtacctggatgtgatggccttcanggaccacaacatattcctgggggagcaggtgctggacaccatcctgggagatgatatactgcaccct

SEQ ID NO: 147684 - DNA, 856 bp, Homo Sapiens
tatgcataacgcaaaaggagaagccatttttaacttcattcttgtggtaatgttctggctaattttcttactaataatcctttcatatattaagattgggaagaatctattgaggatttctaaaaggaggtcaaaatttcctaattctggtaaatatgccactacagctcgtaactcctttattgtacttatcatttttactatatgtttgttccctatcatgcctttcgattcatctacatttcttcacagctaaatgtatcatcttgctactggaaagaaattgttcacaaaaccaatgagatcatgctggttctctcatctttcaatagttgcttagatccagtcatgtatttcctgatgtccagtaacattcgcaaaataatgtgccaacttctttttagacgatttcaaggtgaaccaagtaggagtgaaagcacttcagaatttaaaccaggatactccctgcatgatacatctgtggcagtgaaaaatacagtctagttctaaaagtacttgaggtaaacatactaaaatgaattatataatgcagcctcttaattctttgaagaactagaacaattaggaaacaaagttctagcatttacaaaactcagatctcaaagctctgcttgtatttgtgatatttcatgttgcttaactgtaaaccatttcaaaggtactatcttttaaatctgtatgtaacaaatcttttcaaaatacatttttaagctaatactcttaacatagattattgaagttacgtgaaatttcatggctctaacagcaaaatacttaaagtgccatagtttctcaagtgactaaagtagttattaaaatcaagcacttgatacta

SEQ ID NO: 147685 - DNA, 497 bp, Homo Sapiens
  misc_feature (286)..(299): n is a, c, g, or t
tttaatttttagattgcataactcacttaaagggaaaagaggtttgaagaatctgcagttacctggccattttgttctatagtattctagttttttagaatgtttcagcttctcctttaaaaatgtctagcatgtttatttggtcaatgaattggcaccatggtaggtactgaaaaagaatgccatgtatattaaaagttatctctagacatttagttgcaggaagaaaatctgaaaaaatctcatctaggtatcaaattttagtagttgtagggaaactgcatannnnnnnnnnnnnncaaagaggattaaatgaaatgttacataatcacataatcagcacttaacattccaccacgcatatgatgagtatccaacaaatgttggcttttattgttactactcttttattctgttcagccagctataacctaaggcacacgatttcaccctgtgcttgtataatgcctcttggtctttctctttcacttgctctc

SEQ ID NO: 147686 - DNA, 363 bp, Homo Sapiens
gaacgcacaaatcctgggggtgtagagaggaggaggatgtttacttaaaatgtcttaaggttcagcattgacagagaggcaatatccaaatcactctaagttttgttttgggtcctctgacaattgagtttccataatctggtcggctcagagacaccatcatgtgtggtatattcacaaatgcagacaaagaaaattctagaaagccaggggtgaaaaagctctcctttctcagacgattctgttaagtctatgtgggctaaggagagaagaacaaaagtttctctgggccttggcctcttggggatcccttctctcattttctaaaaactgtttctcacaccaggctaaggaggtggtggg

SEQ ID NO: 147687 - DNA, 331 bp, Homo Sapiens
cttaagtgaatgccaggtatggtattctagctatggtgttctaacggcaacaacagctaacatttcttgagagcttactgtgtgccagacagtgcggcaggcactattacaacctcattttgcggagacaaaaagggaaggtgccctgagaggggcgtgccctagtgccacagttggaagtggcggaaggaggacatacccccacgcagtctatgtgggggaaaccaggtgcactgtcctctctccacaatcttccctgacccagcatgcaaagtgtgcaatgcactgaaggatggggccctgggtgacaagagtgtggagaaggggctgg

SEQ ID NO: 147688 - DNA, 1182 bp, Homo Sapiens
  misc_feature (50)..(50): n is a, c, g, or t
  misc_feature (91)..(91): n is a, c, g, or t
  misc_feature (230)..(230): n is a, c, g, or t
  misc_feature (254)..(254): n is a, c, g, or t
  misc_feature (287)..(287): n is a, c, g, or t
  misc_feature (344)..(344): n is a, c, g, or t
  misc_feature (438)..(438): n is a, c, g, or t
  misc_feature (440)..(489): n is a, c, g, or t
  misc_feature (613)..(642): n is a, c, g, or t
  misc_feature (697)..(759): n is a, c, g, or t
  misc_feature (812)..(821): n is a, c, g, or t
cacggtgattgggcgtggtgtgctcgtgccggggggcggcgcgtggatanaaacgggcggacctctctccactataccttgggtgggcagnatttgtgatgcgccctgtatgaccggtgatagtcgctcttcgccaggacgcaccattctggatcacgtgggatgtaaacgggcgaggtgtgaagaatattgggaagaggtagtgagggacgggggtggcgttagatatngggtcgtcggcggaggcgcgcgangctcggggcgctgtgcaatatgtggagggagtngtgtctccccggcacccggggtcgggctcccggtggttgtgctaggaccgcgcgcanggggggtgagatatatattagtgcgtatgtggggagaggggaggggaaacagaatattgtggggagggaaagaagagagttgttttatcgaggngnnnnnnnnnnnnnnnnnnnnnnnnnnnnnnnnnnnnnnnnnnnnnnnnnncctatgagagtgacctaaccgaaatatatcagtgatctccctccttccgttcctgtcgccgcacccggtgggcgtgtgtggtgtaggagaaaatgccttgttatttgcctcttcacctgctccnnnnnnnnnnnnnnnnnnnnnnnnnnnnnncaggtgtggttaaataaggattatatttgttggggcgcgttttgttagtttatannnnnnnnnnnnnnnnnnnnnnnnnnnnnnnnnnnnnnnnnnnnnnnnnnnnnnnnnnnnnnnggtttggtcaatgtgtatgggtgtgggttgtttggtgagtttgtggttccccnnnnnnnnnngagaatgaaatatgtaaatgtttaattttaacaagcagttacaaatcgtaacagacaagaactcttggatctaagagaccaaaatgtaatttcttacataacagacaaagttacaagttataatcgttcactaattacagtgaaattccggactttgacacatcaatcaatagatgttccaacgttccccctagagatcccagttcaagtcttaaatatttcatctgctgaagtttcctcagaaaaggctccttttcccaggattttttaggtttctacttttgccccttctcccactaaaagaagaataaaggaaagttggggaaatcagagaatcctgaatctgcgtgcgtggtgaagt

SEQ ID NO: 147689 - DNA, 484 bp, Homo Sapiens
tttttgtttttcaccaaaatgaattctctgatgttggataaattgtgagttttgattaaaggtctttccacatatcttacattcccatggtttctcttcactcatagttttttgaggtggaataagaaatgtgggctgaataaaagtagacatgtcttcacgggtaattattacttgactgaaatgtctcttctttagagataatattttggtctcacacattgattccagatctgaacacaggcctctagtcagctctctatcaaccatccagggctcttttccttgttccaataaggagatcacagctggcttagaattggaaagtcccactgaaaccaggttgctgaaattctccaacatcacttctttgtataaattcatctgatcagcgtccaggcattcccattcctcttgagagaagtctatggaaacatccctgaacatcaccggccccttggatactgcttgtagaagttcatca

SEQ ID NO: 147690 - DNA, 468 bp, Homo Sapiens
  misc_feature (72)..(169): n is a, c, g, or t
ttttatttcataatgcattttatttcaaatatatgggatgcttccatacattataccaaacaggaaaaatannnnnnnnnnnnnnnnnnnnnnnnnnnnnnnnnnnnnnnnnnnnnnnnnnnnnnnnnnnnnnnnnnnnnnnnnnnnnnnnnnnnnnnnnnnnnnnnnnttgatttttttctacagaatctccttttgtttcctcttctttaatggggggacttattctgggggtcctactttgtccctggaccacttctgctagcaattcttcttgagaagttcgagttctgtgagcaactggaagtgtctgtttctgtggaactgtagagtagttagttgtttttgtgtacggattcttgagcttcacgatatagccttctaaatcagattcttgttagcttgtttagaaggtggaagagaaggtctcctttcaggctttgcaggcacagacacactgctggagat

SEQ ID NO: 147691 - DNA, 655 bp, Homo Sapiens
aggaatgcaaatatagccttttacctccccattaccggactctccctacagtgcaagttcatctaactacacgctcaaactggaaagtcaacttgagaattaacagttgatttataaaccaatcatgcccactgtggaactctcactctttaggaggttgtctcaagagataacagcctgcccatgaaggtgccagcagtcacaagctgattgcccagtagataaggcacaagagctagcatggaccccccgccaccacccttgctcacttcctcccctgctttttaaaagtgaagccatatggaggacacctgcatttcttcccctaagctagttttggaaataaattactttctttataccagacttcacttttgttaattggactctgcaagcaacaagcgactaacctgcattttggttacattaccatgttttaggtgggacaaacttctaatatttcaaatgtaacacaaatatcaaaccagtaaagactttatttaggaaccaaacccaggctgccatggtggaaaaagggcagaaccttagctactgaactacagcatggggcaaccactattgctatttcagtttggcttggctagcaaagggttgttttgttatgtaaataaagcccttcaggtaattgaaaaaa

SEQ ID NO: 147692 - DNA, 410 bp, Homo Sapiens
tttgcagtctagccattttaataatgttattgagccgtgatgcaggcttggagtgagatagtgacagtaaagatggtttttactattggtgttcatgagaggtgtccggaagacaaaagcaatgctgtgagcttctgtgggcagtaatttatcttctttctctaacctttgagtctggagtcaattgaaaaaagtagacctatgaacaatatccttccagggaagcttaagtgtgtggccaattttttcctaatgccttttgtccaagcctaggatgcaaaatgaacctctaagggaagatttcagtctgtagagacactttttcaggactgttggagaatgaaccgagaaagagggagaacacataatggcctggctccttctaaactccccaataaggtaataccttc

SEQ ID NO: 147693 - DNA, 507 bp, Homo Sapiens
gccaggcacagataaattctttatgaacattttctcataaaatttgcataacagcccaagaagtaggtttaatcaggagcatttttcagattagaaaatcgaggtccaaaaagttgagcagagtttagtagcccacctaagcccaatgagatggaagataaatatccttggcaatccaacccaggcttgcatttgtgggataattcctccacttccgagtgtggctactttgaaagaagcaacactcatctgagggtataaatacggcattgaaagtgtctggtacataagcagtggaggattcataaattcagctcttgaattgatggaaaacattgcacagcatttccatacatccttacacatggttgtgttcagatacacagtttcaaatctacacatacacacattgaaagggggatttatgaaccataagaaaggaggtaaaaaacgctgactcaaatctctgccaactttataattttagaattgggaaggtaattcaac

SEQ ID NO: 147694 - DNA, 667 bp, Homo Sapiens
ggcagaaggctgtaaagctttattgggagaattttaatggtcaaaatttccaccccaggagcagcctgaaccatttcagcgtgtcttcttttaaggctgtgattgcccttcattttccttcaggtgttttcacctcctctggatttggcaggcccaactcctggacatcaggaccatctccgcgctcacacccagtcttcgggtgaacctgttcctggctatccgcttcaggctctggcccttctgcgggcagtttcatctgctcttcatttcgcaggcacaccctcttggtatcaggaccatctccaagctcacacccagtctttggctgaaccagttcctggctatcagcttcaggctcctgcccttgagctgcagatgctccctcatcctctctctcttcagcaggtgtagaatcctgactttgagttggtgattccacttcgtcaggttgctcatcactggactcctcagaagattctacatagatcattggtctacgccgatagattaatcttcttagaaaacccatatttcacaacttcagcccctgggaggactggcctgcggatctaccagatgagtctcagtagaggaaaaaagtgtccggacagcaggaacgcgactgcacactctcacagctccctggcgttctccacgtgggccc

SEQ ID NO: 147695 - DNA, 537 bp, Homo Sapiens
gaacttttcactttcctgtcctttcaagcaacagaaatcaactagcaatcagagagtaacctacccatcctcttgggcaaaatttctttggttcatgaaatgctgcaaatattacacaattccatgtttcttctttttctaaagagggcagcaactgagtaggcattgaggttgagtgtaagaaaattctcccctactccataggtgctttcaggcatcatggctaatcagctagaggccacatttcccagtctcccttgaagcttgttgtggccatgtgatcagcttcttgtgaatgggagcttgagtagaacacatgactggttaactcttaaatcgtgctagacaaacctctccactgaagtactaatcaacttaaaatatcaacgtacccatggagccaaagcagcttggggagtcagaggaggtctcagggaaatagcgatgcttcaagagagttaaaggctataccagcctcttcccagagccacctttgcacaccttcatttgtgcacaaataaatctattatgattttt

SEQ ID NO: 147696 - DNA, 460 bp, Homo Sapiens
tttttccaccctacatatctggtgctatttcatccatctacaagcaggagccaggaggctggccccttttagatctcactaggggcatcttcccagaggctgtgtgggcatgtgcctgctcccaccgcgccccctccacagcaccctctggctccggatgggccatcatgaaagcttgagcggcccagatcaggtcctcttcccgaactcctgggacgggcacggtggggatgccagcgatcatcatggcgagggtgaggatgcagatatcaggctgggagctggcctccttccccactgcctcagagggtaccggtagaacccgtggtaacagcccacacagcatcaggggcctaggctgctggggcacccagtcaggggctctgcttctggagtagcattgtccagccaagctctccactgcctcaatgcgggaattgtggcagttcggccctgtgcc

SEQ ID NO: 147697 - DNA, 602 bp, Homo Sapiens
ttgtcttaacattgccgcatttactatcatctcatttgaaagctgatgtgtttgggctgggtgatggcagaggggtgggagttgggggatgctggctctgaaatgccagagaggcattaagaactctggaagcatctggctactggtagacattttacacagatagcaatttctgaccaatccatttcaatgatttctaacccatactcaactatccagaggatactgttttaagaacattattgtaaactgatactctctattcatttacaaaattcattcattgcatactttttgtttaatagcttggattcagtgttacagatttgattgacccaagtgaaaaaatactgacactaatcatttttaagtgctatttcagaagaatatgcgcaatgtttctaagttattgtgactttgtgactgtcgtagctttaaattataatactaatatcctactctgagaaatgtgtaagacacaggtctaacaaacaactacattaacctcgggcaacaaccatcatggagctgctgtaacacaggcatggtggtggcgtgcatcggtacttacacacaccaaggatgtgaactgacatcccgcc

SEQ ID NO: 147698 - DNA, 427 bp, Homo Sapiens
tttcacaccaagcagagagtttattgaggccatgggcagggccaggaacacagcacggggcgtgcgtggggtggatgcacgctggactgcaggggtgcgctacagcggcaagcggaggggtattgggggcccaggagccgcataccatagcagcgtctaggggcttcaggtgagcatcaagaaccactcctagcctccgcaggactcttttgggaacccctccctgcttccccctgagctccatgtggggtggggctggggcgagggggcccctcttgtccctgtggtcaaggatgggatgatcccttgagattcactataaaaattaaaattcccttataaatcgcaggggagtggcaggagggcatcacttggaagccgacattacctgtccctagagccgcacctcctccacacccccgaagtt

SEQ ID NO: 147699 - DNA, 195 bp, Homo Sapiens
aatactttcatttttaaatattatttatggcatccagatttgcataagatggactgggtcaatggccatgccctttataaatcaatattcttaagttctgcaaattcagtttcctaaagagccaaatcacatcctactcatcagcaaggcaggtagacatcattttcacaatgacttctaattttccaccattgt

SEQ ID NO: 147700 - DNA, 512 bp, Homo Sapiens
ctcattctagaagacaagattaatagattgctggccaagactctgctctcctctccatgttccctttcctttttactttagttgctcaggtaaaaatatgtgtttagatgaaagaaataagcatttcttaaaagtggtgctttgaacagtgaatgatcaatgatcttacctgaatggctgcggcagctggctgagggacattgactatatttacatgtaacgctacagggtatggaacatgactggagacctagatgcaaaagacaaaacaaaggccacgtcattcagggctacatatgcttcaggggacttggcttcctgaggtttcgttctgggactgagagaaaaaaaacactttactgataaaatacactaaacaaatttttaaaaccttttaatgtgaaatttagccaggcctttaaaatggctaaacagctaaaggaacatggtgaaaaatccttgggaggtgttgatgagcactttaaattttgggaagtgttccttaattagag

SEQ ID NO: 147701 - DNA, 428 bp, Homo Sapiens
tttggaaaactatggttctttttactttgtcaaagttctgcatctgttcccggttggtcagccaggattccatgtcctgggcagtctgaatgacaaatgcttcgtaatctgcaaacatctgtgtaaaacggttagcaaagacctctcggagctgtacattgagctggtagtcccttagttctgcctcttcacaatgcagttttaaatccttgtctttttcacccagagaagcagagaggtccattttttccacagccacaccagtacgcttggccagagcctgcaagcgggctatggtttcattgcccttcagtaactcatacatgctgatgttattagtacagacattgccgttctttttgtcattgaccaagtctttcagaaccatattcttcagtttgctggtactctcactgcaatgtaggctg

SEQ ID NO: 147702 - DNA, 1027 bp, Homo Sapiens
  misc_feature (230)..(257): n is a, c, g, or t
ctgttccatgtcacatttttcagtctataccccttgtagaactttctgggaatcagggtcaaatagcctggtcaacatagtggcgactgttagctgtttacttgccattctcagagtcggacagctcgaatttgtgccaaatccttcgaagtgatctcccagtaactttcattcctggtcctggttcaagagcaacatagtgaaaggtgaaagtcgtcgtttttctgttnnnnnnnnnnnnnnnnnnnnnnnnnnnntacaggttttacttcctggcatgtcaatacgttcccttctttcaacaatggggaaataaatctcacccccgttgttccccccgttcaatgtttgactccccttaaagaaaaacggaataccaggcacagggaacatagagttcctctgactcagagccgcgacctctgagcagagcggaggaaaggggcttaaaaaaccacacacactaggaagagttgcagctgatacgaatcaccattgccaaaaagcaaactgcttcagccggtgcccaggtgctgggacgcgatagaagccgcacagacttggcctggcagctctgaggaaatgggggccaaggagcctgcacctcttcttgccaaagcccgggagagctgagtgggcgctcgttctcaggccggctgcaagcccggcgcttcacaaggcagagcgttcggcccccgggaagcggcatcgctaaaaggaaggctcagtgaaacgcttggcaaagtccaagccgcgccgcccagccagttgtctataagcccagccaccccgcctgccagacgccatcctgggaacccgcaccggcgggagctcccggagttggaaacgtctttggctcggccgcggtcccctctgcccgtctatcccgcctctccaccctcgctcactccctggcccgagactgagccggggttcaccccagggggtggtgcccaggaggcacaccacgcttgggggaatggtggagaccgggatgaggcttcctggagggcgggcgggcggccgc

SEQ ID NO: 147703 - DNA, 959 bp, Homo Sapiens
gaacaattttccctccacccaaacccttttcccagggtcatggatacctgggggtttcaaaaaggtaaaactgaggaaccatttcagtgcttgcattgaaactttgtaggacagtgaggttagtaggtgagcaatattctgaactgcaaccggggttaaataaaatggtttgatgatctggccctttacagcagtgtgagaagatctgacagatgtactcctgggtatagcgggacctgctaagcagtgccatgaggtgtggtatcactgtggcatctgtatacagtagctcctctggagtgacaggactggtgaagatggtacgcaggcatcggaggccagcttcaataaacttcaggtctggggacagtagtccttgcaataaggcagggataatatggcagtccagtagagacttgacattgttttcagtacccatagcaagacttcccaacaccactgcacattcagttttcagctctgtgcttgaggtttcttgctgaagcaagtacaacaatcttggaacagctcctaaaacaatgagattggctttctgcttgttgtttccaattacagcatttttcatgtctatgacaccttgtagaactttctggggatcagggtcaaatagcctgtcaacatagtggcgactgctagctgttacttccattctcagagtcggacagctcgaatttgttgcaaaatccttcgaagttatctcccagtaactttcattcctggtccgaaaggacgctcatgcggattggggtctccaacaagcacgccatcttgagccttcccacccggctgctgcaggcgccggcgcgggggccggcactttcgacagccaactattggccaacgctaggcaccgctccctaaaggcagccagatagacgagaactggccacgctctggacaccgccctcgtgccgaattcgccacccaggctcgctcct

SEQ ID NO: 147704 - DNA, 766 bp, Homo Sapiens
  misc_feature (572)..(583): n is a, c, g, or t
caacttttccctcccttctccaccaacatcagagaagacagcatcgtgaagcttctgtggcagcctcctaaggaaggggctgccaatctgtagttggcagatgctataggaattgcttacaaatgtcgtctttaagaaaaatgttcttatatttttcctatgggcaaaatgaaggcttgggtgctcatctaaagctcagccaactcctgaagcactctctcagagcatactgctgctgtaatgggctggcttaattatcggcagagtgcttgaaaaggctttgcagacctcccctgcccccaagactgggtgactttatatgtacttcattcaagggtaaatcaggagacgttctccatttatctcttcgtccttcctgcctggaaagtgatagcactaaatattcccagcagatgggtagtgttctcaaaggaatcaccctttccctaccttcagactctattctttacccttccattgctccagtgctgatggaggccaaagacaaccccagggttttcataggaaattcactggaattgtgcgcaattgtctttgtagtccttttgccnnnnnnnnnnnnaaatattatgttgtcaatagcatttgtttgggtatttgttttagaggcctcactctaagttattaccgtccccttcattgttttcaaagacatgtggtgatatagtttttaaaaataactattttgttatagatcataatatgcataaaactgtacagaaatattttgtaatgtgttgatttt

SEQ ID NO: 147705 - DNA, 418 bp, Homo Sapiens
gtgctggccgggcgagtcgctccagcaggccggggacgcgggcgcggcagggggcgtggggccggctctggtggggggtcctgggcccgcacatagctgcgaagggtgatgtcggccgagccccctgactccagtgggatggggtgtgtgtggaagtggcggcaatgtcaagcacagactggaaccacagatgctgtacgtgacactggccgtggccgttcagggacaggcgcaggtgcttggccttgccctggaagttgaaggtcagcacgtactccccaggccgagtctcactttggcggatcacgaagaggccgtggttccggggcccccctgccagaaccagttgagcagccttgacccgggacagtgtcccgtggaaccatgtgtagtcggatagctccagctcgggttcaga

SEQ ID NO: 147706 - DNA, 463 bp, Homo Sapiens
ttttcaaaaatcaatttttattaacattatattcatagaattcccatttggctctaagcatcttccgcgtcctaaagcatggtgtgggcattcacatgctgctggcctccctcgaattccttgggaagacaggcatctgtgctaaggacagaggggcctctgagggacctagcagcccagccaagggggcctgaatcacacaggttgcggacaggacacaccggcagtggaaccccgtgcaagcggcctcggcgtcctgagtgggggcctgtacagccgcctcaggagtcattcagggcttttctccatgcattgttgagttttcctttctctgtctcttttctaaacacttccacctctatcgactgagaagtgtgattgggagccctcactctcctccctaaggctcttttgctggagtcggagaaagccttctcacatgcagtcagggacgtgctggtca

SEQ ID NO: 147707 - DNA, 771 bp, Homo Sapiens
  misc_feature (124)..(200): n is a, c, g, or t
  misc_feature (348)..(348): n is a, c, g, or t
  misc_feature (376)..(376): n is a, c, g, or t
  misc_feature (384)..(384): n is a, c, g, or t
gattcaacactttttaaatgagatttataatatagagaagtttaaaacatgttgtatttttcagggaaaccgaaacagcaataataattaaaaggaaaatatatagcatgcagaatggatgtcnnnnnnnnnnnnnnnnnnnnnnnnnnnnnnnnnnnnnnnnnnnnnnnnnnnnnnnnnnnnnnnnnnnnnnnnnnnnntgatctaaaacagtgtagaatttgtatataacctagcatcccctgcatacttcaaatcatctgtagattaattataatacatagtaatatatataaatgttatgtaaatagttgttatattgtactttttttacatttgtagggtttntattgttgtatttttttcaaatacgctntttcaaantaatttgatctgaggtcagttgaatttgtgggtgcagaactcatggatacggagggccaactgtaattcatagaagggattttttcctttcaaatcttagatgaaatagttagaaataatgaactgtgattcttcactttcagaaactgtcctttgcagatccagtatccagtcaacagaattgaaatgcagagtggaagatggcagagtccagacacagtaaacaaaccttggactaaattgcattcagctgcagagcaggtcccgatgtctaccacgtgtgtccagggtgacaaaccagcctttaagctcctttcaggtaggatgtttcctcctgaataagtaaaccagccatcgctcctttacgaatgaatccagctctgcctg

SEQ ID NO: 147708 - DNA, 371 bp, Homo Sapiens
tttccacagaagcttttgtttttattaatctattaagactttacaaagtttccttctctttggttagaaatgaaaaaagtgggttaatctcatgtcttgtttcaaccgggaagccatgacttaaggagagcagcctatctgccacagatgataccaaaaattaaggatactcaaaaacactggtcccaaatcaatggcatgtccacagcctttgttccctgaagatctgcagctcataaacatccaggggaggccaggtctcctctctgtccttcctagttgcagatactgatacagcagaaggcaaagttaggacatgtatggattagattgttctgatctcaggacaatctagttgccagaaagaattc

SEQ ID NO: 147709 - DNA, 609 bp, Homo Sapiens
aagtgtacgtttttttaactcatttaacatggttatgtatcctttacaaccttatctgataaatcaatatctggattatcttgggattggcttccattgatttattttcccttgagaattattcgttttcctggctctttgtaagtcaagtaatttaagattatattcaggacattgcgagtggtatgttggattctagattctgttatattgcttagaaaagagttggtgttccttttttaacaggcaattcacttgtttggatccaaattgaagactgtcacacctacaggagggcagtggatcttatctcaattattttctttagtttaagcctcagctgcaaactgctttcagtttctcttgcccatatggtacaggggtcagccagagacttggactgagtttaaacacggaatcatgggttacctttctctagctgtctccaggttttccccatcccctcactctctgactgttcttgttgctcccagtctccttttccttgttcttctggcttgaaagatggcagattttttaatttgcattttagctgcctggtattaatgctgcaactttggctgtcctcaaggtaaaaccacacacaaa

SEQ ID NO: 147710 - DNA, 447 bp, Homo Sapiens
gtcttacaaaattgagcatttatttcttgaaagaaggtatggaaatatattgtaggtctcacggttcttctgcacaggactgggaattatgagatccaagctgggtttggctgtgcttgaatccaggctctgggttcatttcaagtctaatccatttgcctctccttattctggggtggtatgtccttctcatggtgatgacaccagaaattgctttaagtagagtagaggtattgttgcagcttcagaaagtctcacttcacctctggcttcactccaaatttttgagaccaccttgttccttgtgtttttcggattcagctgctggatgcttgattttgaggtgttaccatgctactgcctccatctgtatctgtttaataaaaccacaagaaaatcaaacttagagggaaaattcaagatacccttgaattctgctaattactg

SEQ ID NO: 147711 - DNA, 402 bp, Homo Sapiens
tttctatctttgggcagcaatgtctttattcataaaatgagggcaagatattatcttttctaactatgttctgaagtgacttggggctcctctgccccatcccattctacattttattcattttatccatcatgttggggtttcacatatgtttttacttgcagaaagggctctgaaaaacaagttgcaaatcattaggccagatggtgtaaggtctgtcttcaacaaaagttttgattctctgagtgaaagacatgctcttgacaatggacagtgggatgaagtggtctcagaggaggtggccatatacccgggggagcttcttggaagaagtgagttggaaagttaaaatctgggtgtttctagcagttggtgaaccaggatggcttggagttgcagtgg

SEQ ID NO: 147712 - DNA, 286 bp, Homo Sapiens
ttttagattgcttatttctggtttaatgaaactcacctaaaaacaataaagtgatggaaaaagtttggactgggaacctggcatcacacagtccagttctgcctcttagtgatgcctttgggaagatcattttattcttctggccttccatttccattcattcagttattcatctaagtaacaaatattcctctaatggctcctgtgtgccaggaactgttttgaagagttggtatagaacaaaatccaggatgtcctcctggaattttcagttatcaatgaagta

SEQ ID NO: 147713 - DNA, 957 bp, Homo Sapiens
cttgtactaagaagtcactgtggcctggctgccctttggtggccctcggcttctttgacacagggccccacgtcctctgtattgggttccattgctggagctggagatcagcgttagctgtaaaatgagatggctgagcagatgtgccacctctgaccatggttggaactgaacccttgcaatcacgtaagcctttagcagctctcaagcttgctctcagccctctcagccctcagagggaacacagccatggctataagcaagaggatgagtaaggcctgggcgctgcccagagctagaaacccaggccccgggagggagagcctgacccacttccacacataggagaggaagaggcccaggccgcctgccagcagcacagaggacacagccaggaagcccactgccagccgccacgctctctcatcactgttgcactgggctaggaggagaggctggggggcaaagagggtgaggaccagggacccgtacacgccaagcctggccaggcccaggccaacccgaggcacccccagggcttccagctcagggaactggtgacactgtagggtgctggtgtcctcattccacaggcagaagttatagaagccgattctcaggttgggcaggtcagtgaggttgccagcctcccagagaagagcgtataacatcaggcagatgaccacaatcacgaggactatgatgctcatgaacagcagctggtcgcgccaccgaggccttgggccggccatctctactgccctctgccgggggacagaaaggaggtgcagagaccacaggaacactcatgaaaaggagaagcaggaaatcagggttggttgtttgaatcttccttctcgctggctttctaatgtcagactccagaaaggaggagtggaagggaaatggcaggcagatgcagtcctgagctggtgcccccttgccttcgcagtcgtg

SEQ ID NO: 147714 - DNA, 401 bp, Homo Sapiens
tttagatgagcaaagcatttattgagggcactgcctgtgaaggagaagaaggaagaagccaacaacgctgggaaaaccatcagaccatgatgtaggtctgacccctgtgaaggaggattaagtaggaagagtctcagactgtagccttattccaagaaagtttcagccaggcttctggggagttcttgaggcagcatctcctggttgaggagacccaggtcctgcaggaacgccaccatgttcaatcattggctcttacgtggaacatgaggcagtatggtggcagtgagttccacatgtcgagaagccttgtctttaagaaccaggaccttggccaagtcagttcactcagcattaatgtcctcatctatcaagcagttggatgagaccaggggccagca

SEQ ID NO: 147715 - DNA, 918 bp, Homo Sapiens
  misc_feature (52)..(126): n is a, c, g, or t
ttcacctaggagaaaagaaaaatgataaattaacaaaaggacaatgctcttnnnnnnnnnnnnnnnnnnnnnnnnnnnnnnnnnnnnnnnnnnnnnnnnnnnnnnnnnnnnnnnnnnnnnnnnnnnatatttcttcttatgttacactaccccagatagggaaaacagaaatttattctagatatttcaaacaaaaaaggggttgtatataggcaattagtgcttatcactggaggtgctagaggttggtgaaggttgtggggatggggttgcaccactggctttcaggctactttaccacagctgatttccagaggatggaagaagtcaggaaacttgggaaaccgctgctgaggtccttgcagccccacggtccccaggctggtgactggtgggggagtatggagtccagctgaccaccagagcctgcacacctgctgctatgggggaggaaaggatgacttctacctcctttccacattccaaattccacgtgactacattttattggcagcaccccgctggcaagtgagccttgatgtgtgcttcctgggcttctggcaccttttgtgttctggaaaaaatgctgccacagaggtctgattttgaagtggctgccaacatcccagacagcgaaggtgttatttttatattctactgtctccacacagaaacctactgtagggacggcaggcacagtctcccccagcttcaatttatacaagatggtggtttttccagctgtatccaaactcaatataagaatccgcatcttttttttcccaagtagacttttaaagagcttttcaaaaatgtttcccattgtaatttaatcgaattctgttgccactcaaggtaccgctacctacaacaccgccgactccgcggcctttaggatttcagctcagttcagctccc

SEQ ID NO: 147716 - DNA, 1261 bp, Homo Sapiens
acgggcagtaacctaacggtttaaggtagcgaggcctgggtggcgaattcggcacgaggcctttgccatctttaaaagaagattcttccactgaagaagagctcagacagttgctggcttccttacctcaaacagagctagatgagtgtatccagtattttacatctttggctcttagtgaaagcagtcagagtctagctgctcagaagggtggtttatggtgttttggaggaaatggacttccttatgctgaaagttttggagaagttccttcagcaacagtggaaatgttctgtttagaagctatagtaaaacattctgagatatccacacattgtgataaaatcgaacgcaaatggaggcctgcagctacttcagaggctgtaccgacttcacaaggactgccctaaagtacagagaaatataatgcgtgtcattggaaatatggctttgaatgaacatcttcattcttctatagttcgctcaggctgggtttccatcatggcagaagcaatgaaatctccccacattatggagtcctcacacgctgccagaatcctggcaaatctagaccgagaaactgtgcaagaagaaatatcaggatggcgtatatgtgctgcatcccccaatatcgaacaagtcagcccattaaagcagatgtccttttttattcatggccttatgggagcagcattcaaaacatggcgccagcaggacagtgagcaggctgtaattgaagagacctatggaggatgaagacagatatacgacgtgctggcccaagacatggttagcaaaagactgtcctgctctccgaattatatctgtggagtatgacaccagcctcagcgactggagagcaaggtgccctatggaacagaaagtccattgcattcagaagcaacgaacttcttaggaagctcagagctgctggtgttggggataggccagtggtttggatatcacatagcatgggaggtcttcttgtcaaaaagatgctgttggaagcctctacgaagccagaaatgagtactgttatcaacaataccagaggaataattttttatagtgtccctcatcatggatcacgtttggctgaatactctgttaatattcgctatcttctcttcccctcgttggaagtcaaagaactcagcaagggtaatactttttgtcataaaggaaattggggttatattaacatcagttacacagagaagaagaaaaagtttcttccttgaatgtattatctcattttaaa

SEQ ID NO: 147717 - DNA, 501 bp, Homo Sapiens
tttactttttgaagaatatttattgacatgggaaaatgctcacaatatgttaaagaaagcaggatacaaatctgtaaatacagcatgatcccaatcttgtagtaaaataaattatatatgcatagaaaaaatacaggaaggaaatacactaaaacattaacagtgatgatctcaggatggtgggatttggggtaaattattaattttattttctgcattttccaaactttccacaatgaacatatattacttttataatcagaggggaagaggtcaatacaggtgacacctagtcctgggaggtggcgagactgatgtggcactaagggggtgtttagagtcacttgtactgcctcattctgtgtcctcatttataaagaagggataataacacctgccctgcctgcctcccaggactactgggcatttgaaagggtcacaatatctggtgattgttcctctgtagcagcagctcaaatgctttattttaggacacacgcc

SEQ ID NO: 147718 - DNA, 853 bp, Homo Sapiens
  misc_feature (168)..(311): n is a, c, g, or t
  misc_feature (713)..(752): n is a, c, g, or t
ctgtctcaaaaataaataaatacatacatcaggacacttttctaggctaaaagacagtaaagagatgtgataaacaaatacaatgtgtgaatcttgattgaatcctagattttaaaaaacagctgtataagacattttgggattattagggaaatctgcatatgtacnnnnnnnnnnnnnnnnnnnnnnnnnnnnnnnnnnnnnnnnnnnnnnnnnnnnnnnnnnnnnnnnnnnnnnnnnnnnnnnnnnnnnnnnnnnnnnnnnnnnnnnnnnnnnnnnnnnnnnnnnnnnnnnnnnnnnnnnnnnnnnnnaaagtgtgtgtgtgtattaagagaaagaaatcacatatggcaaaatattaacaactgcatctcggtgaagaggatatgagactcaatttctctgtaagcttaaaaattttcaaaataagttggggaaagtaataatagagaagtaaacagttcaagaaaaacaaacactattttatgcttattaaaccagttcctcccacctcactgtagtttgtgttttaaaataacttccagtgctgccaaggtcatggggaagctggtacagtgaattaccagtggcatgaccatggctcagcctgcataggccagcatgcagcaatgcttatcaaacatggaaacacttccatgctggctgaggcaggcattgcccctaaggattcttttcaaggaattaggttgacnnnnnnnnnnnnnnnnnnnnnnnnnnnnnnnnnnnnnnnnaacctaaatgtccagtaataagggttaggtttaggaaattttgcttcactactggatggactattatgcaagtattaaacatgggttttaagacttccaaa

SEQ ID NO: 147719 - DNA, 537 bp, Homo Sapiens
  misc_feature (519)..(519): n is a, c, g, or t
tttttactgaaacatgaaagcgaatcctttaattgctttcagttcttcataaacaggatgtaattaatttcaaacccaaggaacaccggtaatacattccgatgtaggcatagtccctggaagagaggcactagtggcttctggactagaaatctctgccataggatcacaaatccagatcagcgccttcagcaagcaatagaaataaatgataactggatagagcgagggatgccaggtgtactttttaaaaggcgatagaaaaggtttcgagcttctttgtggctgtttggtatttcctttttaatctgttgggggaaggtaatttgatttttttccccctttttcaactgggaataaggaatagtggtagttgggagtctaccaccactgaaattgggctggcaacctggcatcaggggaatttggctgggccactttatggagcaatgaccctttataaataaagtttaatcccaaggcagagtgtttatcttgtagtctttaaatgttacattncttgatgtcagaagaagg

SEQ ID NO: 147720 - DNA, 341 bp, Homo Sapiens
tttcgttcatttaaataatatttattgggcacctaaattccagacaacgtgtcagtcttgtacatgttgattcattcacaccacatcccaagaaataatgctcttcctatgagattacgtataagaaaagtgcttttgaagggtgaatcattgtttattgtctctaatacacagtgcctcaatgaaaagatatttatgtcatcaatatctccagaataaggcaatgatgattaaattattcatgataaaattagtcttactcataattagtaacaatatacctacaatttattgagtacccacaagtgccaagcactgagccaagccctcttcatacattc

SEQ ID NO: 147721 - DNA, 704 bp, Homo Sapiens
tttaactgggtaattgcttgtctgaaactttttccttttaatatggtttacattctatctccagagaaaacacacttaacagaagacagaaaacatttaacaaatccaaagcaattaaaaatagccacaaaaaaagagaataacctagactgacagctcacagagcaaggaggtggcagagacctgcccaggtgagcttggctgttgcccccagctcaatcttcctcctctcctctctctgtcccttcacctctgatcagtcccagcctgattcccgttccctgatgcctcaccttcttgctgccagatgcctctaggaactagggtccttcagactccagatgccctggcctgggccttaggacatcttgacttccccagtggacagctggacagtgccctgctctcacccacagctgggaccctgaccatgccatgaggcccctgtgtggaagtggtgtaggggtggggatggtagcactggtggtacagatctatctgggcctcatcatgggggaatctccaatgccgcacaggcgttgggtggtagccgcgagtgccccatggtgcagtggagtccccgggatcattgtgattgctagatccagtgttccttgggcttaagactgggcttaaggtggaccaaaggagttgggattcaagcctgttttaaactcgggggtgacaatacctaaacctcacat

SEQ ID NO: 147722 - DNA, 543 bp, Homo Sapiens
caaagcattccattcatccagcaaaacattcggatttcattcgaatttgggatccgcaagcaggttgtccattttttcaaatcgagtctcaaaactgtcccgagtcgacatgttgctgctgctgtgacaatgccttcttaccagcaccagcagcggaaagcaatttcaaccaatttcctcggcgttgggttcgccgccgcggggcggaggagccggaacttcaggttcaccaggtgcgccggtttcccccgtcttcccttcattgaggggacctccgctctccaggaccccgggccgggggcaacagcgacccacagccgttcggacgcccaaagtcgcatcccacccgtcagcccttcacgacagccgacagcgccgtcgccaccagcctcgtcgctccggcgagttgcttcagtctagcgggccccggccgccttcgccatggaggggtccccgtcccgagatgggcaggagcgggtagagaaagagaagcagggtggagactccctccgggcaacaagggagggagaagaggaaaggcga

SEQ ID NO: 147723 - DNA, 319 bp, Homo Sapiens
tttcatcacaagtttatttaatcggcactcttagtaaagtgtaagttagacccggaaaaggtcttaaaggtcattttctaggatagtctcatccactgattttacaaatgaggttgttaactcccagcatagtgaagcacttgctttaaggctgcataatttatggaaagttgattttctccaccttgatgggggaagggtaggccaggctgcggatgagacagacacttttcgtgatgtgtgctccgctttgtcttcatctgtccaaggcttggtcaaaggcattttctagtggtgatggttttgtgtcttcccaagg

SEQ ID NO: 147724 - DNA, 435 bp, Homo Sapiens
gttgtgttctattaaaaaaccaagttaacttctaattaccaatccttgaactagaactacaggttggcagaaatttcatttttctatgtattaaaacttaatatcctaacaaatttggggtttttagctttatttctgcattatgcttttatatggactctaaaatttaatatatgacataaaatttaatatatgacattgagctggtaatgcaagattgtatgttaaaagttttctcaaattctaccgttaacagctgtcaatgccagaaattagtcatactttcacaagacttgaacaattccaataatgctttaatctgttaactcttagttacagagagaaaagaaagcttttaataaaatattagaatatcttaaacatcataagctaaaatattcatccagcatcaaccaacctattctcagggtgaca

SEQ ID NO: 147725 - DNA, 619 bp, Homo Sapiens
  misc_feature (604)..(604): n is a, c, g, or t
tttcacattcagttagtatttaatttgaaataattgtatattcacaaaattcacaagcatagccaagagccgtatttgaagaggagactgcagagaacgttctgtagaaataaaagacctcaaaaatgtcagtgttagtcaaccaagaaaggaaaagatgaacaaaactctattaaattgctgtctcatcttctatcaatccaattcaatggatgaatccttcccactgtactaaaatttagtttctgattggtactttgttattttttcatcattttaaacaatgccaatttaaattatatgacactgcaatgtaagtacctgatgtgtctaaatgatgaaacaccaatccttgccaaaaatgatagaacagcacatactcagtattaattgtgacagctattgcggtccctagattacaaacagcttttccttagttaatcgagtagaggtacatttggagacctgaattttcttcatgataatttttaaaaagatttttcacaacctccagaacagcagtgagtctgccatttttgtatcctttagtatctcctggcccaaacttaattcattggggaactttacagtgatcatcggcttnctaggcaaccctgca

SEQ ID NO: 147726 - DNA, 306 bp, Homo Sapiens
tttgtgaagtcaatttattttgaaaggcaattttcataattggaaagctggtatcaagcactgtacctgagatgtgatcatcagaatgaaaacaatgaaaaagaaaaccacattattaaatgccttctagatactgttgttgcctgctcatggctcccagtctgaggccttctctcttgattagccagaattttagcatcaaactagaagtttttctttcaatgttttcaggacccacaatcaccaggtgcacattgggctcctcctgatgccaggctgaaaatgcgtccaccagatagagaggat

SEQ ID NO: 147727 - DNA, 713 bp, Homo Sapiens
tttgtagcctataacttttattttggggaaaatatactgtggcttaagttctcccaaatcctaccctaaaacagtattcatttagaaataaaattatttgcatacaacccgaaaactctttttgaattgccttaggatggtgagggggcacaatgaagtcagcagctacactgtgtttctcctgacacgaaaacagcctaatccaagacaagtttcgttttgactgctcatggtggcaagtcagagggcatcttcttttcactggcagccgtgtatctcggtgcatccctgcagtatgctgacacctggcattgatgggaatgccttggccatttgacaaagtcctctggcgggcatgtgcctgccatgccagtccattttcttgacctctgaaggtaccctccaccccttggtgctacaagagatccaaaccaaagggagcatgattaggactgatgacagtcttactggccatgagacctggtgcggggttggctccagtagtctgcaagttccctgggcaatgggtcaatggcatggccctcctaggaagtatatctaattgaggtaagtcttagcaaaaatctgttttgggctggcatttcaccagcccgtacatgatgtgcgcactcaaggacacagccctggggattctgaacacctgagcgggcatcaaaagctcaggccaatctggttcttcagtcacaggatgc

SEQ ID NO: 147728 - DNA, 471 bp, Homo Sapiens
  misc_feature (455)..(455): n is a, c, g, or t
tttaatgtttaactttttattaagaaactaaggcaggacaacagaattccaaaaaataaagatacagaattctaatttaaattctaaacaaatataaaaatcagagtttaccagtatttttgagtagaggggagtggctaaatgcattcacagtaattatttcttccttaccagcctcaagtttgcaaccctttccttcctgcttcactgggactagaacagaatttctcattcatcttttgctactataatttttgcttctatagtctaaaacttcagaggagcttttgtctttctccgcagttctttctctgttccttcagcaaatatgtgagcacctgcctattgggcttacatgttgtggcacaaagatgagtccgttagagatcctgtcccagtttaggggcgatatgacaccaataaataatcaataaataattttaaacaaggtatanataaatacagcatgag

SEQ ID NO: 147729 - DNA, 503 bp, Homo Sapiens
  misc_feature (477)..(477): n is a, c, g, or t
cactgcacccagtcttcatttaatttttagtaataaccgtgtttaacaactggctcataaaattcctgaacatttaacaatccactcttgcaagccagtaagaactggatttaacacactagtgcgacagaatggaatctcaggtgggagcctagaagttgaggagttcctctcagagggctcatcctcactctaatgcaggaggtgagatcatcagctgtgtctgaaatagcagtagccttgtgagctccaagcagcaaactctggaggtgtgattgtctccaccagcacacagtgggtcaaggtggggggagaaggtggatggctgcactgattccagttgggtttggtctaatgagtatgactgaagggagtgaggagggatgccccatgcactgtggagagtaaggaggtgagaaaagaagtgaagacagaagagggctgacaggaacacagtaaaagagacaacatcctgtncttgagaaccaaaaacaagagcagtg

SEQ ID NO: 147730 - DNA, 475 bp, Homo Sapiens
tttcaactttttaatcaccttagagtcttgatcttttcagggttggtcgctttttaggttgggggattttgttacaatgatgttgaattttggtttcttgctttggttcttagaacatgttgctgactagctggcctttgttctgacatgttgagatggaaaggatgttgcccatctgttaaaaagcctaatagcaactgtcctacctgttggggctttctctctaaccttgttcagctctactccaggagaatacagggtttctggtgtggtcttttgggccaccctctgttgttcatcctcactcatcctcccagaattactccatcctttggaagatttgaaattttacactgaaatctgtcaagacactctttttagccccaggactttcggtattgcttttagcactccccacttctgcttctgtaaagtgatatcaatttgtgataaaatgacaagattattaactgtg

SEQ ID NO: 147731 - DNA, 500 bp, Homo Sapiens
cacatgttttcattagatttgtttaggccaagttttacaattcacatttcattttgcaagtaatttctactgaaatatttatttctgagaaacaactcaaataatttaatttcaattaagaaattaaatcaactcaaaataggaataagacaaactcattatgcttgcttcagcatttcttctacgtggccaaaaatgctggggtcttcaattgtagaagttatcttgtatggcttgccattgacaatggcagataaagctgatcgggggatcttgccagatctggttttgggtagctgtttgacaaacactgcatttcgaaaagcagccacagggccaatgttctgtctaacgtgtttcacaatttcttccaaaacttgctcctctgttgcatttatatcttttctcaatacacagagtgctaaggggacatgaccttttaagggatcttccttgccaacaacagcacagtctgccacggtaccatgggaaaggattga

SEQ ID NO: 147732 - DNA, 521 bp, Homo Sapiens
tgagacacttgtcagattagtcccttaggtgtctttatgcagaacactgtttcaagtcgattcggcaatcatatcatcatcctcaaaatcagtacacccatgaacatatttggtttgtacaaggtattttataataagctcagataaaatgtttaaatatatggtggttcatgtagtcatagacaatattaatgagatagagaaaagagattgggtaaattatactttttaaaacagttttaccaattcagatgcagttcacttgggctgtgtggagtttgacttatgtttatggaaagaatgagaaagaaaagatcaaaacctggtataaaaaagagtagtggagaacaagataaaatgaaagtgatagcaaggcttgtaaggtccttatctacagtctggcagtctctttacaggggcctttcaaagcatagttggcttcataaaaattacgtgactacatttagcactatgtgaataagaagagggcaggcttggaggcacttcagatagaatgtgaa

SEQ ID NO: 147733 - DNA, 1395 bp, Homo Sapiens
tagtacggtccggttatacacgggatatcgtagaccacgcgtcggtggagatggcggcgacagcggcggaggctgtggcctctggctctggagagccccgggaggaggctggagccctcggccccgcctgggatgaatcccagttgcgcagttatagcttcccgactagggccattccgcgtctgagtcagagcgacccccgggcagaggagcttattgagaatgaggagcctgtggtgctgaccgatacaaatcttgtgtatcctgccctgaaatgggaccttgaatacctgcaagagaatattggcaatggagacttctctgtgtacagtgccagcacccacaagttcttgtactatgatgagaagaagatggccaatttccagaactttaagccgaggtccaacagggaagaaatgaaattttcatgagttcgttgagaaactgcaggatatacagcagcgaggaggggacagacgcaggttgtatctgcagcaaacgctcaatgacactgtgggcacggacgattgtcatggccttcttaggttttacactggaactggattaataagcaacagggaaagcgtggctgggggcagcttacctctaccctgctgctcattggcatggaaggaaatgtgacacctgctcactatgatgagcagcagaacttttttgctcagataaaaggttacaaacgatgcatcttattccctccggatcagttcgagtgcctctaccgcataccctgttcatcaacccatgtgacagacagagccagggtggactttgacaatcccgactacgagaggttcctaatttccaaaatgtggttggtacgaaacagtggtttgccctggtgatgttctttacatcccaatgtactggtggcatcacatagagtcattactaaatggggggattaccatcactgtgaacttctggtataagggggctcccacccctaagagaattgaatatcctctcaaagctcatcagaaagtggccataatgagaaacattgagaagatgcttggagaggccttggggaacccacaagaggtggggcccttgttgaacacaatgatcaagggccgatacaactagcctgccaggggtcaaggcctcctgccaggtgactgctatcccgtccacaccgcttcattgatgaggacaggagactccaagcgctagtattgcacgctgcacttaatggactggactcttgccatggcccaggagtcaggtgtttggagcgaggcagggcagttggcactccactcctatttggagggacttcatacccttgcctcttgtgcccctgcaccttctctctctgccccccgcctaaagtcctgcattcagtgtgtggagtcccagcttttggttgtcatc

SEQ ID NO: 147734 - DNA, 378 bp, Homo Sapiens
tttttcctttgtgtttcagtctcagtaactgaggagtttggcagccttgaattttcttgacttctgctttcaatatctgtaccgagctcatgtctttcctctagtcatctaggtgaacagactgtcacttgggaaaggtttggggcctagaacttgagatctcttacttgactctatcagtgattctttcagcccagcactccatgatatctttgatatctttggtgatatatgagagagcttggttgcccttgtagacattaaccccaaaaggttaaagtgtaaatacttggcagacttgttacctagtaacagatttaattattaaatcagcattggttttggagccagaggatgggattaagaccctacttcccg

SEQ ID NO: 147735 - DNA, 371 bp, Homo Sapiens
gaaacccagaaaacaaccgtagtttctttgggtggttttcaaaccacagctccattgagtctgacaagattgtggagataatcaacgaagaattgtggcccaatcccttgcagttctaccttttgagtgaaggggctcgtgtagagaaaggaaaggaaaaagaaggcaggcaaggtccaggaaagcagccaatggagactactcagcctggggtgagccaatccaactgatcctgcacaagtctccctgctacctcctgctgggctgctcctggttgactacatatttggctctctgccttctcttcatgttggcctctgtgtactatagaccctttggactttagttacaagaatatggcatttatgatc

SEQ ID NO: 147736 - DNA, 438 bp, Homo Sapiens
tttaccagttgtaagctgaggctttattagacatcaaatattttcactcattgggattttgccatttgtcatgagaagagcatactctgggtacctgttgatccataggtaaagtgattgaattcgtagtcaaaacctccccaaaaagaaaacacaagacgagatggccacactgacaaattctttaaatcctgggacacacttgcggaagaaatatccccttaaatgtgtactagttgttccatttttgcaggacgcagatttgcagtcttcagtatctatctcacagatgttcctttcatatctttgcagactgctacagttacaattgtgcgaaagggccaggcagagggcatgcactgatatactgtgggtccctaagcaatagtcaacatttacaacacacaatctggcaatgtaactaagagaacagctgca

SEQ ID NO: 147737 - DNA, 648 bp, Homo Sapiens
tttaaagttgcacctttttattatttttaatttggaaactaaaatgaagtgaggtccgagtgattatcgaccattcttgttttagagtcaaaggtagactttctggcttcttccctggcacgtctgcaggtccacagaatcttcctcaaaccagcaaaccattaaaaaaagaagaagaaagaggaggaagggggaacttgctcttaaggaggagattttgcctaagcctaactcagacatcttttaagatatgcagccaggggaagccttcaattctctgtcttacctggcctcatcctctgatgctgcctgaactttctctgtagtgagtcttttcaccttcagtcctgctagccaaccttgctgcaacctttcccattctcttcatcacactaataatttaatggatttccactgtaagccataaaatcccaagaaaagcccttgactgccctgcagaggttgtgcacgcccactgactgtgcccatgcagcttggatcagagtgtctggccccaaacctcatccctggtgatgccaagttttagggcaccaggccttgggatctttatttttgctttgactcctgagttgggctttttaccccagaacacatagcagagtcatctagctggtggagtactgggag

SEQ ID NO: 147738 - DNA, 550 bp, Homo Sapiens
  misc_feature (477)..(477): n is a, c, g, or t
ttttttgaggaggggccacgacatttattgaactctgaggagcacagagggggctccctggcgcgtctgtgctctccagccaccctggaagacgctcaggggaccccaagagccttcccagcacgcggcatctctgtgaaggcagggcctccagcaggctccgccctccaccccactcctggggtcagagccccaacatcctccatgaccctcctctcctggcgctccccatgggtggcaggagagccaccccccgattccagcacacaacctggggcagaaactcgagcccagacaacaatggctctgaggggaaaccgagtcagcatggcagggctgtgtgagagagggggggtctcaggcaacagttcttggacggttctggatggcagaggagaagggcggacaggaagtgctgtcggaacgccgacccagctcctaagacagacagctacgctgacaccaaggaacaatatntctaaaataattaccactgcatgccggtgcatgggcagacgggagcgtaagtcataaataaaataacactgag

SEQ ID NO: 147739 - DNA, 728 bp, Homo Sapiens
tgttgctgggatgcggtgccttatccagcacctgtggtcagctggccagctacccattggctttggtgagaactcgcatgcaggctcaaggtgaatttttgattacagaaccacaccgataaaagtgctgcaccagtaatgtgcttttagaactccaagttctactaagatgcagactgtagttttaagacagtatttctcaacctttttttcattattgcctccttaaggaatcttttcagaaattctttttctaaatgctccctcgtcatgaaattttaatgcgacagaagcattgcatatgtactgtatgcatacatatgccttatagataaacagagtactattttttttgactgtgttacatgcacgttttaagattataagctttagtatctgatggatttgggttcagatccttgcctcagacttcttggggtttttaatgggaatgaaaattgtacagtgttgtaagaattaccaacaatataaataaagcatcttgggtttgttaaatttttggtaaatggtggttggaatcattttttagtgttgcgtagaccctacaagttttgagctgtgattcctcctcactgtgacactgtctccattgttggctttgattacactgtaccatcctggttgttctgccagcccattgataaccttttaccatttgctggcttttattgctatccccactctattaaagtatgcattcaaatgcc

SEQ ID NO: 147740 - DNA, 380 bp, Homo Sapiens
  misc_feature (177)..(185): n is a, c, g, or t
tataagtcttttgaggtacagcctggcacaaaaaggatgagatttgtgggcagaattttggaagaatatctcccgagagaacattcaggacagagccctacatctccccgagaagaggtgaaagagactgctcctatctgcttctgcatcaaacttcaggctcaagacctgtccagnnnnnnnnntgtcttctttcagggatgaactgctgtcctcatcagacgccttattttgtttagaattcaagctcacttgacaggttattgtgaagattaaatgaattaatacatgtgaagcaactgtaacaactcttgacatgcgtgggctggactttcagaagaaacgttgtcagaactctgcccaactgaaaacaagcctac

SEQ ID NO: 147741 - DNA, 509 bp, Homo Sapiens
tccccaagtataacgtcaggcccaagtgtggacacactgccgcccatcccatcaggtcatgaggaagggttcttttacactcggcacttctgtgggagctattcatacacagtgacttgatgttcttggaggatcaacaaaactgccctgggaaagcatccagtggatgaaaagcacctttcaccaaggaacttattggaagggaggttctccctagctcaggtgctggggagaactaaaacaccttcactggtggttgggggtaaggagcggggcacgggggaggaggaggtagtgggcagtaaaaaacttagtctcttttttcctctctgtaattggttatcaggaagaatttgcttaatgactaacaccctaagcatcagacctggaatttggagttgcaaagtgactatcttcccatttcccatctcattttcaataacttcagcctcccattctttcctttggaatgagagtttctttttacagaagtaggaaaggcttctcag

SEQ ID NO: 147742 - DNA, 433 bp, Homo Sapiens
tttttttacaagctgcaaaagttttatgtaatgcactccaccctcttttttccccaagccaacacacacccttcaaactttttgacagttattttcagacccctcctaggctcccgaactccatgcaactccagcagtctcccctgggccatttttagcctctgctctgacctggcgggaggctgggtgtccaccctttcccctgcagtcctgaaagtccggtccgagcgcggacggggcggggaggggctgggcgggccaggccagctccattggcgccaggcgggtgggggaatgcgctgagaggacccgtccagcttgcttaaaagccatcagttttctgaccccgcatcggttccaggaagaatatacctatgtgacaagctaagttctgcctcattttgcatttagaagccacaagaaaaacttttcg

SEQ ID NO: 147743 - DNA, 319 bp, Homo Sapiens
ttttttggaaaacttcacaattttattggtaatggttttgtctctttcctctgtgggcagatgctgccatgaggcttgacggaagtgaggaaggtgggcctgggaggcgctgggcctgcgccgagggaactgaccaggttgttggattgggttcctagtggtcagtcagtagttgaatttgcatcatccatagggaaaacttgggcttgattttcttccaattttggcatgctgctcctgtcagcatcctctaagcaatagtttgtctccctggtagtggtaattggttccaaggcagtttacgatatggaagcaggct

SEQ ID NO: 147744 - DNA, 349 bp, Homo Sapiens
tttttgtgaatgaatatattctttattaatttatgccgtctgcttaataaacagaaatgttggaaggtgaaccagttgggagtcaccatctgatcaacccctgcctgctttttataaataatgtaactgaaccatcatttactggaagtggcaatcaacctgtgaggaacggcaaaccaaaaagtccaccttgggtgtcatggtgatggaattggaggcggagaccagggagagcagcgggctaggatctctgagagtctccgcaacatggcggccctggaaccacctgaccggcaggaggcggagctccgccccagctcgcccggccccaccccgctcggccctgccc

SEQ ID NO: 147745 - DNA, 831 bp, Homo Sapiens
  misc_feature (532)..(593): n is a, c, g, or t
tttaatgttccaagtaatttttattttagaatacaagagaggtacaaatgtatttacagttgtccatatccaatcaaataataatatatcccagttttgtaaatatcattttagataaatatttacaaggttaaagtgaccatcttctggaagtagaacgcagtttcttgaaaactctatacattttatacttttcattaatattatagtttattttacaaaacgccctacgggaatcctggtaaatgactgcaaagtgtgagaggcgacaccagagggcgcgcacggcccgaatttgaggaaacgggcagggaccgagggaagtgtgggcagactgggcggaattcccgggactgggcacagctcggaagcgcttcgtggacacagaagccaccttaacctctcgggcagcggttccagtcttgccctcctctcgctggagtgtgtgtgttggaaggggctgggggtatatttcgccttcccaggcacgatgtcacagctgaaggggagggggcattggtccaactccttnnnnnnnnnnnnnnnnnnnnnnnnnnnnnnnnnnnnnnnnnnnnnnnnnnnnnnnnnnnnnnaggatttccattgtgcctccactctcaacgtgcctggtgcactgcaaagagctccttcctcatccgtccccaggagccaggtttgggggtaagctggcctaaaggagagaagggcccagaagatgcatctctccgggtctcttcccgctgccgatggaccccagtagcccgcacatgtcaaggttgcgtaaggactcccgacacttcaggacaccagtcccaggggccggaagaggag

SEQ ID NO: 147746 - DNA, 289 bp, Homo Sapiens
aaaaaaaaggcagcctctagaaatcccgcttctgtggccaacctcctagagaacccgggagaatgttccagaagtctgtcccctcctttcctccctgggcacactggtgagggaggctggaaccaggcagggagtggggccctccagacccaggctggtgacaccttggcttgggctctgctcacatcaaatggcgctgaaagttcccacccggcctcctcctctgagagcaattgttctggtgttttcacatcccttaattaattagctattattatgattttgcaaa

SEQ ID NO: 147747 - DNA, 395 bp, Homo Sapiens
  misc_feature (31)..(31): n is a, c, g, or t
gcattctcagaaagttaggcatcctaccctntaggattgaattgggaccctttccttgtaacatatttctggtgaccacagaagggactaatagtgcagaaacgttgacccaacggctacctttgcgtaagtgttggggtcctgtaacatatttctggcaaaccacagaaaggatgatactgaagaaatccccccaaccccaaaggaatagactgcagcactgattggacgactttgggtaagtgatggggtacccgagtaacaaatggggattgggttagaggcccaacttaggggagttggagtttctcctaagacagagtgagttagaggcccctcttaataaaaggcaaggacacttgactgacctcaggttagaggttactccatcctac

SEQ ID NO: 147748 - DNA, 506 bp, Homo Sapiens
tcattaattgacccagatttgcttgtttgggaccaaaggcaatgcagagtttagggatctttataatttataaagtaatcacctttggcccaacataacacagatcataaggatcatggcagaattcgtctctgagacaagtacaaaataccattttagagttgattttagaagagaagtcagactaataaattgctgtgttgtagaaatactatggtgaattaaacagctttaactttttctatcagccacaggataaatacagaaactgtataattacatacacatccacagaagatagtagcctcatatgctaaaattgtgagttgtttgtctgtatactgtagtccaaagctccgattccaagaaatgttttatttggttcaaaatataaagggcaggttagagggctacacagaaaaaaggctaaaaataaagacagtaaaatgagggagaggaaaagtggaagtgcagcactactgatccagaaaaactgaggcatcagc

SEQ ID NO: 147749 - DNA, 538 bp, Homo Sapiens
  misc_feature (325)..(380): n is a, c, g, or t
tttaaggcaacacgttttacccacagaacaccatttggaaaagaacacataaccccattttcaccacaaccctaggtggtacatacacaggagagtgacacattttacaaatgaagaaattaataattaaaccaattcccttacagagcattgtcttgccattaacaaaccactaaaacttacattttactatctttatgccaattttttagcatctttattgagatatacttcacgtcataaaattcacccatttaagtacagcatatgtctaatctataaagatgctacccaaagtttagttctcaatcttacaaaatcttannnnnnnnnnnnnnnnnnnnnnnnnnnnnnnnnnnnnnnnnnnnnnnnnnnnnnnnctggggtgggggccaggaacctgttttaacaaacagggggttccagggggttcctatgtatactaaaacctgagatccactcatctctaggatactagaatctctaatagggtagtatacttcacagaatgtcttctcactaatgaatcacctcctct

SEQ ID NO: 147750 - DNA, 394 bp, Homo Sapiens
ggtaagaacagacactttattgcacactatggtgggggagagaggaagaggggtctagggtgacaatgcctcatcccctcccctgggctgagtggttttgacccagggctctgaccagccatgggacacatggacttgaattgttctgaacttatgccagaacccaaagtgacggcctggtgtgtatgcttgggtctgtataaagcagagctttcaatgagaagaggccctaggccccctcccccagccaaagtcatcgggccccagtgaagcagcagacctcacatctcagggcctatttgaaggatccagggatgctcagggagccaggttcattctaaccagtttagtttccagctcttttcacagtggggagtactctgggggagtgggg

SEQ ID NO: 147751 - DNA, 474 bp, Homo Sapiens
  misc_feature (392)..(392): n is a, c, g, or t
gctattttgacaatgctgaatgcaatgcacattcttgcaaatgtttctagttgatgcttctcttgggtatatgcatatatgtgattttgctgggtcaaatacagacattttcagtaattaccatcacttacaatcaccaaatgcatagcatgggccagggacttgtttaagtgctttatttgtattacttttgtggttataagtctgtgaggtattatcattgtttccattttacagatgacttaactgaggtgcagtcagactaaaattacttaataaacaataccactcaccctcgtattaataattaaaagcaagatttgaaacctgtaagtgtagtttctaaaaccagctgttgattactatactattctgtctcttcagtttaattntatgagatgatgccaaatctattttcagcatttttactttttttgccaatctgatatatgttaacagtagttcattatttta

SEQ ID NO: 147752 - DNA, 1098 bp, Homo Sapiens
  misc_feature (562)..(570): n is a, c, g, or t
  misc_feature (964)..(964): n is a, c, g, or t
tgaggtaagctctgatttagcatttattctgataaaatctaatacatcatgggatatatataaagcaacttaattcttgtggtgtagtcttaatagttttgaatgttgactgaatgtctataaaattgtgagtttgtctttgttacattccagtgtttctgcctcttggcatgcttaaagcacggcttacttcatctgctccttacacactaaaatgctgttagtgtgctcaactacagaaatagccgctgctaagtgatgtagattttctacttgaatatttttatgttgtaggaacctcaggaggtcagtgtttactgttttatatatgccttctttttcctgtttgagcttctctctttgaaggattctaacagaacaaagctgctgatcaacctaagttggaaacagaaagtgtaattaatataacttaaatgcatgtttggcagttccatgttacagtccattagcgagtgaacttagtgccacaggtattcatttattcaggaaagaattttgctttttgtattgtctaatctcttcaatgacttcatactgtgtnnnnnnnnntcactttttaatattttttggttggttatttcccaaataatcaacatgtaaataatcttttaagagccagttctgatgctttacattattgctacttgattttgttatgcaagttagatttcagaagaatagattttaaaacacttaaccaagccattacatcttaaaaacaaaacaagtagcatacattttgtaattaacattgataaacactgtgatttttttggttaagactttttcattgatctgaattgcttaaattgcatatattgtaaaataggatcagatgtatattttaaactaatttcaatggattttcctcttgaaatgctttgtctactcagttataaaatattcagataccagtttttatctcaggtgaaatactcctggnattgtttttgctttgggggacatggcttataaagggtcatcctagttacaatccttggttttttaagggcattttccttggaaatcttttcactttagcctgaatttttttcctaaatattctaagcagctggg

SEQ ID NO: 147753 - DNA, 919 bp, Homo Sapiens
  misc_feature (808)..(837): n is a, c, g, or t
cagtccccccgtgcaggcagcaacagctctccttcttgggggaccccccttcggaccggcctcacgtttgttcacctccgtgcagattcccgccttcccccatctgctttcattcagaggggaaggtgaaaaccccaagccccatttaataggtcatgacacgaccataaaagacccccccatgtagtcaaccaaaaataagaactacagagataaggtggcttggcttattaagagtcaaggaatcaaggtaccccaaaatacgggagatggctgggaagagttagagacagctgcagatgcagcttttgcagacttcttgcccagctgtggggttgggggaggagggagcagacctgagaaattaaaggaaataggggttgtgggaggattcaaggaaggctggagggatgtgtaagttaggagctcccagcacatttcttgaagcccaggttctgagcctggggtgtccaggcttggcctctcagatgaacaggggagaccttttccatcaaatacaagctttaagcttcacaccatcttgcctgcctttccgccttcctgctggacaatggagaccagcagctcggatgcatgtgactctggcagagggagcctggtctgggaagcatccgagaatggcttcagcacactccccctaatggaatcagagactgggcaaaacagaggatgtggagaacggggcagcctcagcctgctcccaccagggtcaacatctcccggccctcaccgaccctttttccagattcacaacaaactgatgtgggctctaggacagacccctttnnnnnnnnnnnnnnnnnnnnnnnnnnnnnntcttttgcacacatccacagctgcacccatgctatggaccctcggtgccgatttacaccaagcctcgtacctagcttatctt

SEQ ID NO: 147754 - DNA, 831 bp, Homo Sapiens
attatttgttaggctcagagaattggttaaaccactgagttgccactacctgactcaggtccaaacatggtattttttgtcaagaaatcttttgtgttcctttatttaaatggaaggccattcgaattgttacgttttgtgactcacactccagtttctcttcagatcatataaatctttcaccttttgtgactcacaattataaaagattatctacatttatctaaagaaaaagaaataggtcagattcccagactgggccataggcttttattagtatgagaaggtttaagaaaaatggtaggtagggagagagaaactctgctttgcatagagatttttaaacagccagagagagagaaaacaatgagaaataaagttctgagattcaggggcattcttggtctagagatataaatgatttttcattgcttcattaaagacgcaagatcactcagatattcaaggtaggggctaaagggaagtgggctcaatataaaatcttgaataataccaacatttaaagtctggctgatgaagactatcagaagaaagaaatcaggaaatggtggcaagagttttcttttctacccccttgaaaagacatggttaaaagactgatgtctgttaaaaaatggattaaaacttggagatgaataaatacagtgcctcagctatatggagcttatgctatgagctggtatgtgagcttggattcaagcctaagtcactgactccatgattcatgctcattactgatgctggagagaaaaaagaaatggattctgcagctcattgctcattgtcttaaagagggagtggtattccttg

SEQ ID NO: 147755 - DNA, 851 bp, Homo Sapiens
  misc_feature (785)..(799): n is a, c, g, or t
gggcatccagtatgttttatcagtattcatgcagagttttcatgataatgtgttagctttttatatagttcaaggtcctgatttattttcgatacaaatagtcaaaaaatttgtatatcctattgcattgctttgcagataattctatagacttagtggactgagtccaagggtgtatgatttgcagcagaaattcaagcataaaagtccctgttgttagcatccccagcaactttaaaactcggctgtgaaatctcagcccttgtcccagaaagactatgggtcacggtggaaggaagaaatggcgaggcggctttatatatctgtgtgtgggaggaagctctttccattaataagcaggcctttaatcttctgagcccatttccccagcagtcaattcaccttgaggaagagggagtctagtacgcatggccagcctggcggtggtggggaggaggagatgggtggaaatgaaggtccagagacaggaggtttggagaaggtcagagagagagctgcttctgaggacttcattttgcagtaacattttctgagacccttctttcactatggcaaagatcccatccagacccttctctcctttttctcatccagattcatcatttcctaaggcatttctgtttctcaggtttcttcaccttcattctgaggacactgtcacaggaaattgtaaggaatattggcaaacctactaggcttaagaatttttcggaggcatccagttactctttaaggcactttctcaattctcttccaggacatannnnnnnnnnnnnnncctgtattgactgtcaaacagtgccagtaattttaatacgacataaacttgg

SEQ ID NO: 147756 - DNA, 349 bp, Homo Sapiens
atttttcattcaatctcatttatttgaacatttattaaatctgcagtgggtggttaactcatactgtggatgtctccaagccctcaggagagtgttcatccaagagacagagagagcccctgagggtctatttggcagagactgacaaagagacgaaaatatttgaaaacatgctatcttctccagacatttgtctgtacatttgtataacagctgtgggtgagactttttcccactactcaatgttcttttctcccaagctgagtgtaattttaaatatctacacacactgtgaatagacatagggcatcacctaaattcaaataacagtctctcctcgttccgaatt

SEQ ID NO: 147757 - DNA, 340 bp, Homo Sapiens
actcatggaagacttgtttttatttcagttccacagaggtagaaatgctcatttgagagtaggtggtgcttactgtggtaaggccattctgtgaaaccaagtgctcagttgttctttaaagcagcttatgaatccacggtgcttcaggagtaactgttatttgtgatttcaaaggtcttgatttatcatttgtacctctctggagtggtttgggaaatgtcaaagcaaagtgtttttgattccatgattttctgcttgattcactgattggaatggaattatcatatgttctgatgtttacttttagccttggaagagacatttcccctgcctgtacgtt

SEQ ID NO: 147758 - DNA, 383 bp, Homo Sapiens
catttttattcatgtattttgggttgtttaaacatttctgtaagatttaaaatacttttcttcttatggctagaattctcagcatctactcccatgcctgcctttctaaaatctattggccagtttaagggtatttacaataatacaacttaaagacaaagtgtccataagtcattatttctaacagacagcataacacagtagaaattgccctgaccaaggaattagaagactggaattcaagtcctaactctgccactaactttgcaggatgaccttaggcaagtcatgtcacttctctcatttgtcaaataatgcaaatgattccattctaaggtattttccacctctaaaattgctttcatttactattattatttttt

SEQ ID NO: 147759 - DNA, 419 bp, Homo Sapiens
ttttttaaatggatcactgtcccaaaaggaggacctgctttttatttggatgtgccatcatacaaacactgccttcagtattctggcaaaacaacacacaatggaggcaaaattatgtgtccaaagaaatgtcaatacatcttcttatagtcatcctgtaatagcgtgggattgagatgattaaattcacagctccaataaacagcacgcaaattacttcttgaaggtagcggcataataataccttaaaactggctttaaaacagcttttctgtgataaccatatgtgcccattttctgcctgaagaatttccataattttaaatcggttccacagctgtacgggaagcatggctacggaggcctcagaaaattttcaatcgaggtagaacgcgaagggaagtagccaccctcgtgcc

SEQ ID NO: 147760 - DNA, 819 bp, Homo Sapiens
tttgcgtttggggatttttatttctctgtttggggttatttgctgtgaagaagacacagcctacaattaacagccagaacccgcgttgtcatgtctgcgctgtctgacctgagcgccaccttcccacccctcgggagagacttaaggcaatggagacattgactggtagggctccctggtgcctcccacagctggcgcatggcctctgtttcttgtagatgacctttccagctctgaaattctccattctaagtgacaccaccagaacttcttgcttattaatgtgcacagcatgcttgtcttctgtgcatgtacattactaaatgtttggcctgtccttcccctctcgtggactatgtcctgggtggacaggcatctctgtctcctgatctagctcctcctgtaggagccaggagtggcccctccagtctcatacctggtcgatgcctggctggctgtggctgtacagtgtgcgggtctccacgtgctcaggtaccagcccctgggtgtgcaggaggtacagtgcaaggcgttccttcttgggtcccaaaccatgaacagtaggggttttgggctcaaagctttgcagcttgaactttttcccattatagaaaacagcatcttcctcaggactgaacagaggcggaggtagccctttccgcttggcatagcgttctaggaggtagcttgggggcatctgatcccgccatctaaagggccctgactggcagtaggatttggagagcccacaatgagctccaaagccagataggagtcggttttcaaggtcgatgactgtggttcctatcttatcatcag

SEQ ID NO: 147761 - DNA, 465 bp, Homo Sapiens
aaccaatgaaagtaaatagcctaaggtacacacataagtaaatctataaattaaagcaaaagaatgataagcacaaattcaaggcagtgatctcctctagctacagagggaagggaatgaagtaaggaaaaggtgaacaaggagcttaaaagtatgataattatatgtgttggtttggccaaacagtcctggtttacctagcacagttctggtttgctgattgcctggtgtaatgattaatagcactgtcactccccaaattgtcattgtttggataatgaattatatgcatcctttttagagtaaaagtaacttttttctccttaaactggatggagggcatgtgggtctttatcattcttccttatacatgtatttttaaaatataatttaaaactagtcagtattttaaaatataatttaaaactttagtcagtgttagtcactgtgttagtgacaacacag

SEQ ID NO: 147762 - DNA, 409 bp, Homo Sapiens
attgctctgagccagtcacctgggacctctgctcagaggaccgcaccaggaggctgcgcccaggatttgtcgggagccacgctgagtggcaagcaggaagagggacaggcatgcggggcgtgaccacagtggaggagacaggtggatgtggaaccacaggctgctcattcagcacctttgttgttactgtgaacgtgaatgtgggccagtatcaagagagtctctctgagtgactgcaccatggcactggcaccagggcgactattagccagggcagaccactagacttcagtgcagggacctggttttcccttcgtttgcactttagtaaattgggtgggaggtttccttttggatctgttttgagactgttccagaaagaaggcttcctttcccgagacacttcaaa

SEQ ID NO: 147763 - DNA, 515 bp, Homo Sapiens
catcaacacctttacctcttcccgcctgaaaataaaatatgaaatataacaagtaaatcgcaatctaccttgaatcttctggagaggaaagaagaaaccatgtctagacaaggtgctggaaagacccagggaagacacaggtgagctaagaaagcagtagaaactgggtaattaaaagtcaacataatggctggaaacttgttcaaggagatataaaaagaaagaaaaaccaaaagagagactgtatggatgaactttgtctatttacaattttgtctaaggccaaatctgcagtctggtcccaccgcatgttatctaagttgttcatataccaatactaagagctactgaaattcttccaaaaaatcaaaatcatttcccctttgatttgctagttttccctcttggtaaataaagattcattttttagtaataactgacctgccctaagggttcaccactttcttctgatctcaaatcttgtgctaggtctttaggttacaattcatgaaact

SEQ ID NO: 147764 - DNA, 953 bp, Homo Sapiens
ttttttgattttagaacagcagacttgtggaccttatcaaggcctgatagctgctcctgagccaaaacagctttgccaaccgcagctatttactgctttaagtttttccttagtttgcgcagtggtggaaagtgaacttctgttaaatttcccaagtctcttcttttttcataggctctttcaagagtgcaattattcctcaagtccttggaaattctgtagtatcttaagggaaattactgcaggtcttacccccagacttcatatcataagaagttcttcttagataaattcccgaaagatgatttccctgtgtcttccctgggtctttccagcaccttgtctagacatggtttcttctttcctctccagaagattctgtagtagcagagtgtcttgatactgttgagtgtcgaaaagatgcaagtctctaaattagaaaacaaggggctgtttgcgctcccagtttcttgatactgttgagtgtcgaaaagatgcaagtctctaaattagaaaacaaggggctgtttgcgctcccagtttcagcacagccagtgttctatgcgtaagtaataaattgcctcgtcaaagtcgtcccagccacggtgttcataggcaatagttagaatcactgcccgaagtcttgcttgatgctgctcccacagcctctgcctttgcacagagacctaatgtaggagtgagccggagaacatcctcttcgcccccctctctccccctcccttttgcgtggtctttcttcctctgtagctcactctctctcacgaatggagagttatcctttggttcattcggcagtcaaagaggacaggctggcaggcaacagtgcagctgcccccatgctgaggcacatgaatgtgttgtgaataaagacaaagccctgaaccagtgcagcacgttactccctggaaaagcgaaacaaagatactctgcac

SEQ ID NO: 147765 - DNA, 534 bp, Homo Sapiens
ttgattttagaacagcagacttgtggaccttatcaagggctgatagctggttctggggccaaaacagctttgccaaccgcagctatttactgctttaagtttttccttagtttgcgcagtggtggaaagtgaacttctgttaaatttcccaagtctcttcttttttcataggctctttcaagagtgcaattattcctcaagtccttggaaattctgtagtatcttaagggaaattactgcaggtcttacccccagacttcatatatcataagaagttcttcttagataaattcccgaaagatgatttccctgtgtcttccctgggtctttccagcaccttgtctagacatggtttcttctttcctctccagaagattctgtgcaaggtagattgcgatttacttgttatatttcatattttattttcaggcgggaagaggtaaaggtgttgatggtggaaatcaatctgtagtagcagagtgtcttgatactgttgagtgtcgaaaagatgcaagtctctaaattagaaaacaa

SEQ ID NO: 147766 - DNA, 624 bp, Homo Sapiens
tttgattttagaacagcagacttgtggaccttatcaaggcctgatagctgctcctgagccaaaacagctttgccaaccgcagctatttactgctttaagtttttccttagtttgcgcagtggtggaaagtgaacttctgttaaatttcccaagtctcttcttttttcataggctctttcaagagtgcaattattcctcaagtccttggaaattctgtagtatctgaagaacgaaaataccaaaatttacttcaccatccttctattagctcgactttgttgtacatttacacttaaattaattttgctcttctgttgaaaaagtaaactctaccttgaaagttttatctgaattttcttatatagtttttgaatttgtattttggagctggaggataatttcatattatatctatgcagtattaatagagacacattggattttagggaatttaacaaaaatgggccgaggcacactgtctaaaaagaatggacagaaaagatatggtaaagacttaatgtttcatacagagagaaagactaacttctagcttgtctgtctttgctggggcctgacttcctttttgttagctcaatctgaacaccaaattaatgtgactatgca

SEQ ID NO: 147767 - DNA, 1334 bp, Homo Sapiens
  misc_feature (15)..(15): n is a, c, g, or t
  misc_feature (61)..(61): n is a, c, g, or t
taccagttttacttnttcctgggacagtgcagaccagtgccatcagcttctagccttgcanggagggcacagtcattcttcagacttgcactcctggctctggtgctgcatcctggaaaggacgcgctcgtagaacagcaggtaggcgctggaggacaggacctcctgcagggctggccttgcggacagtgtcatcggagacccacagccactgattgctagttgagagagggttcctggcagaaggtggggaccgtcggtaagtgacaaagtgtccagagtgcatgtctccatggtggacgacaactgccatcagccggaagaggtatgtggaggagctgtagtcgggaacaactgggagagggaagggcatcggcgctgacagcgttggcaataaagatggggagcaggcgccattcataaaaatctgtgttttgggggcccctggctgattcagaactggtgtgggggctcccggcccatcctgcagctccagtgtaggccctgggttcttgttcagtttagggttgtgttgactaggtttatgtccaaggaggtggtacttgtaaatgtccatcatcaggaactcattgaactgcacgtgctcatgccgcttcagaggcgtgccgtggcttgaccagctcagccgctgtaggtggatgcagagacactgagggagcttccctagttttaactgtttaacaaaagtggtcctctggtgttccaccttttccccgttcaacgttcccttggcttcaatctttgtacagttgtcacacacaacatcccgcactgattctgatgagatgaagtggtgaaggcagtggtccagggtcaatgggtgaccccatgtggcggctggaatacttagtgaaaggctatcaaaggtatcaaaatcgaacaggactctggtgttcacagtgtttgcagaccatattactagtgagtcttccatgaaaaggatgttgagacttccagtgattggatgtggggtgaggtgaccctcttgtgcggcaggtaatttgtttgggagttatttctgactgctgctccagggaatgcacatcaaacaaatgtgtgacccgaggctggcggtctcagcatcatcattcacaatgacgtaggtaatgacatggaataattcgtgagcatcacatgttcttcaaatgatgagatcatgccatcatgtacattcttaagacatcactacaagcagcttgcatctaagacctcatcatcagtaacttcttggcaggacaggctttcagaaggtgcaagagtgttaaggcctcgtgccgattcgaccacccggcctcgtacctagcactattttt

SEQ ID NO: 147768 - DNA, 485 bp, Homo Sapiens
ttttatatatgcttgttttaataaaaataattcacaaagtaaaaaccatcaaaaccacaaaatcagtaagttcaatattaacaacattaatttacagtgatggatgatgttttgctgaaacaacatgggaaagtgtaattttcgcatgtgatcaggagcagaggagaaccaaatattggaaatcagtgttggagatccacaacttccagctcctccactagcacgtaatgcttttttctcaggggtctgtcagccccagcttggggaacactgcttttgccatttatgtagaattgattttcttcttctaagatctgcagtatagatcagtgtatgaagtctaaagtctttggcattgagaacagtcttttaggacatagtccccacctaattcttaaagtttcaaatctaaacactctcacattcagtgcccaacagccactctggacttcttgccatttggtaaatgcaccaaagactctttg

SEQ ID NO: 147769 - DNA, 724 bp, Homo Sapiens
ttttttttgaggttcacatattttattgaattaccattctttgacatcagatctttaccagacattaacatttcaatgttatgcttttccccagtgctaccagtggttgaaagaaagaattgtaagtgaagaagggagaaaacagcaaaacaagctaaaagacctttccccaattgcggagcgtctgggatgcacactacctcagctagctgttggtaagaaaattactaagctatggggtggtagagggacttctgctgagatcatagttttctattgctgaccacacccttaccatgataaaatgtctattgcagggacagatgatctctgaagcataaactcctgctaaatataaagtgagttatttgaggttccccagaattttctacatgatagcaaatttttcttacttctttctccttgctcttataacatagtttgaatgagaacatgtcagtgataacatacactatcacagatgtcaggggtgaactgtgtagtgacatccatttcttctggctcaaatttctgtctgttgaaaactaaaccagggttggtgagaagataagatacagggctgtgacaggcccaaggctactgccacatgaaaagctgatcctagagaaatagcttcaccctgaaagttcttgaaggccataaacgttgttcttctaatgctgtggagtccatgaaaggtcatgattgctggtaccccaccaaa

SEQ ID NO: 147770 - DNA, 616 bp, Homo Sapiens
ttttatattttgataaactgattttttaatgatttgttattgttaagataggagaaaagtcaaatcaatggcacagcaagtgtcagtgtggttgggaggcaagctaacacccacacacaagaaagaggatccctcattcctcctccctgaatttctccttttcttttcaccagtgctgtgcaatctgtttcattctcctacctctacgccctgaaagtaaaatgattgactaggaaagcccagacccgctgcgagcagttgtgggtgtttccatcagcactgtcggaggtgaggatccacaatagttgctcttgcgtggagataggaagcaccatcaagtctgccccttctgggaagtgtggaaagcctctcagtctcaattacctgcagctcagaggaagactaagggaaactgaggcacagctgagcatttcccaagcagaaatgcccttcctaggaagtaagcatcctttcactccaggctgtccatgctgaggtttctgtaagttcttgagatggggtatttgtcaggtcgtaaatatcttcgaattgaagcttgtctctgctactttggcagcctagtagaactggagatccacgctgaccctcgtccatg

SEQ ID NO: 147771 - DNA, 614 bp, Homo Sapiens
  misc_feature (79)..(79): n is a, c, g, or t
  misc_feature (174)..(174): n is a, c, g, or t
  misc_feature (186)..(186): n is a, c, g, or t
  misc_feature (295)..(339): n is a, c, g, or t
  misc_feature (345)..(345): n is a, c, g, or t
gggctcaagctcacggcttcgcagattatgatctaagaaaggccattgaacactaccatggtcggacggggagtggggnccggggtcactccgtctgccccgagggcaggaatgaagaaccgcgggcccggcactccgagccacagggactcttgggtcacctttcgccccacnccgcacactccntacaccttgtggcgttgcgccctggcgcgggcgattctcagccagtgcatgtatttcctcgccgggttcctttccgaaacataatcccgggaaatttcgactccgggannnnnnnnnnnnnnnnnnnnnnnnnnnnnnnnnnnnnnnnnnnnncaattntcaacccggatcctcttcgcacactcagcgcctgcctctgaccgcgcggggcgggggggtgaacggagggatgttcagtctatccggagggatgcatgtcgagaggaaatggtcctcctcggagccaaatttttattaatccacaagccccacggccagccggggccgccgcctcctgggcgaagcagcgccgcgccggagccggcgatcgggaggcgccaggagcccggaatctcacattcgcgcgggctcggagtccgggcggccgc

SEQ ID NO: 147772 - DNA, 448 bp, Homo Sapiens
tttttgggagttgaacagtaattaactttatttttaacataagaaaatgatttcatttcagaacaggaaaatgctaaggatgtagctagagatcagtaattattttactgtctcaagacaatagctagagggtaccagaaagtagtcaattaacagtctgcagtctagcctacaaagtaatcacattgaagaggtacaaaactgtggacacttgacttaattcatccagaaaagataataagcttgtctggattgctgaagggttggcatctacataggcaggtaatatttcagagattttccacaataagaactttaggatttggtaatactactattctattgtacactttcttcaagtacattaatttgtgactttcctaaaactctgcagtaagagaaaactgtctcttaggttgatttgcctaaagtcataaaacacacccca

SEQ ID NO: 147773 - DNA, 461 bp, Homo Sapiens
ttacaaaagtacttttaatgcagttaaaaccaacgccacacacccttgcctaagcccctggctctggtgcctccatggagcagaagggaacccccgggccgtggctgctgagctgggcaccctgcccatctctgcccacagagccagtcacctcctcacttcttcttggtcttcaccagtcctttctgcacaaggctgcggtacagttcctggatgtatgtgtagacgcacttggagtcgggcacagccaaccgcaccatgtcatccacgtccagcagctgagcacagtcagccagtttctctgctgtggagaaggccagggtgaagttgtgccggcgctttggtgtatccagctctgcgtagtcaaaggcgtcagggaagaacttgtggatgagggcacagaagggcataccactgctccagctggaggagaagttctggatgtccacatgctcgtattt

SEQ ID NO: 147774 - DNA, 701 bp, Homo Sapiens
acactgcctccagtaattcttgcccacattccttcactcccttgacgtagatgtctccaaatactcttaacatgaaatgcatgtaatgaggagcaggcctgtcatagatcttgatttggggcaataaagatgtgtttttgtcacagaactttttgaggatgacactgtaaatccctaacttttattttctcagtgcatggtgacccccatagctgtttttcccaatagttctgtcagcaggcattttccaagaaggggccccagtattccttcctaaatggtgaggtggtcaagacgtcagaccagttggtggtgtgatattttttcaaggttctgaatgatggattatttgcttgtgcttagagattgcctactttttcttgctttcagttatgttaaagaaggcgagggaaatgttacttattggccgaaatcatctaatgtcttttttgtgaacaagaaattaatttgttaggacttttgtactataaattagaggtaatcttaagatttaaaaaaagaagaaaacacccttaaatgataactttattggctccctgtgtctttatttcctgtatttcctggtggaggtacttatatttggcttttactcatttaataattccagaccccaggagaaagcctggcttttgatgtctggtctggtctctgatgataacaaggaattcccctcccaaggg

SEQ ID NO: 147775 - DNA, 425 bp, Homo Sapiens
gtgtgccagatcacagtgaattttatttaattacgtgcagcttgttcacttatacattttcctctgttgagacaatccagaagctactcaggatacttatttgcttattcctctaattaagcaaagctatctatagcctagaatgctaatctaaaactgcattttgtttctgcaggcaatgatctctgtccaaccccacagcacattccggcatttgcactgtgccgtggacgccgctgcattgtgcatgctccaggctatgtttgtggacagtcacgtcgccgcggaagtcaagctcatttgtcatccttgctaggcacttgcagggctgcctgaagagaaaaatatctgaaagcaggcagtgacgaaggtaaagaagagactcaggagtggaagggcagaagggggctgtgggggtggatgta

SEQ ID NO: 147776 - DNA, 488 bp, Homo Sapiens
ttgaattggaacaaaagactattttattagcctaattacttttaactcctattaagtgtttcaaagctcaatggaagtgtttacttttattaaggttcattgttttaagcttaaagagcaatgttttcaaacttaaaacttctcaagagcccaggtccttggcctcattgcagacccgctggcctgggcaagccaggggtgtcacctgtctgtggccaggtgtgagtgtgagcatgcggggactctgagcctcctctttatagtgcgcctcacacttgcaattatttaatgatctgtaactattgataattgatgttcccatcctcctgggtcagaaactccccaagggctgagacagttatctttcgtgtcctgttctccttcctggtgtctctgtcctttgcccgtcagcatcactcacagtcagccagcctatttatcaagcacttatcagtgccagcacctgtgatagatgccagacatttctt

SEQ ID NO: 147777 - DNA, 719 bp, Homo Sapiens
  misc_feature (593)..(593): n is a, c, g, or t
ctgttgccatgttttttccagggcttccccgccccgttctcagagctcgcagtggatgcagtcactacaccactcccgggcttgtaacccatcacagcctggactcctttggtcaaagccctcacattctcttgatggaaaaaagttttgtcaacgatattttcaatctgctttgcttttttatttctgcctagctgcatttttatttcatcactgttcattttgttctctaggagtcgctggtgttgatgctgaaaagttacaggatctcttccaggaggaggatggcagtacagcagcttaccactgacatagtccttcaggatgtagcgcgcagatcgaggctggtctggctgtccatgcgctgtcatgaatcctcgcatgtatccataagctgtcaacagttcttccgatgttggaggtcggtggggatcttcatcctctcttaggcgttatgatgttaatgccataggtagcttctaagacatgtcttggaatattctggcaaactagtgatacaggaggaacatgatctctcatctgatcaattgggaggattccgctgcaagtcatttctgccttggtagacacanaagatggcatcaccaagccaggacagtcacacaggcagtagccaggcttcacatagagagtctgaaagtcttcgtgtgaccaggtgtggcagacacagatactttcttcgtgcccatgatggcgtg

SEQ ID NO: 147778 - DNA, 1276 bp, Homo Sapiens
  misc_feature (98)..(98): n is a, c, g, or t
  misc_feature (169)..(169): n is a, c, g, or t
ttgttcttttaggaagtccgctggttttgatgccgaaaagtttacaggattctccttccaggaggaggatggccagtacaggcagcttaccactgacnatagtcccttcaggatgtagcgcgcagatcgaggctgtcctggctgtccatgcgctgtcatgatcctcgcnatgtatccataagctgtcaacagttcttccgatgttggaggtcggtggggatcttcatcctctctaggcgttatgattagtgatacaggaggaacatgatctctcatctgatcaattgggaggattccgctgcaagtcatttctgccttggtagacacaaaagatggcatcaccaagccaggacagtcacacaggcagaggccaggctccacatagagagtctgaaagtgctttgtgtgaccaggtgtggcagacacagatactttcttgttgcccatgatggtgttgattgttgaactcttaccaacattagggtagcccaccagtccgaccgtaagttgcccatctttcacctttctcccagtgtgtagctccttaaagagctccagtaactcctgcttggataccagatggctaaaattgtgtatctgcctcttctgtggggttttcctgctccgagcctcagaatctgcagtagagctttccttccagtcctggctgcagtcctcttccttgggaccgtcttcttctgagcacgtctgccagtcgtcttcctcctcctctggacagtcctcatactcactgtcatcttcatccgttgtgggattttcactaagtgaaggagaatccctagctgggagatgttcggattcactgtgggaaatttcagcctggtcgaaactggaatgtccaaactcagttgtgttgctttgtctatcatctctgtttgcctcttcctcagagtcaccattcaggggaatggctccggccaaagctgaccagaaaataaccttcacatcttctttttcgaagtacatggcccaggcactccgctgctcagcagtcagcaagtctgccttgttgatcagaatgacgttctccttattggcatccatttctttcacataacattccaaatcctcacatctaaacaggagtgggtttcgagcatctactatctggaccacaatatcacttctctcaatgactctccagagctggcgccaaaagtccaaatttcgttcaaatggagtcaatatcagcttctgttcctcttctagccggacaagctgacgtctccattctagaaagtttctttctctgctt

SEQ ID NO: 147779 - DNA, 467 bp, Homo Sapiens
tgggggtctccactctgccctttattcaaatgcaaatgtccagccctgtgagttcagagccttggaactaggaaactgattttgacaggggaaaatgtgaccctagaacaggactatcctcctgaacactgtgccagttggtgtctgcgaactccgccctgttgtgcattctcacttctaagagggtgtccacccctcctgggtgtctgtgggcctcatctgctgagcccaggggtggcaggagccaggtcttcaccgtcatttcacagaccaggatacggaggctcacagtagtcagcggcttgcctggtctctcgggcattggttcaggctctggcccctgccttgcagggatgccccagtctcctatcccagcctgcaccctcctgggggccacgccagcatggtggggcgagagggttctgcagagagagcctgggggcacgtttgggatcttagccctctag

SEQ ID NO: 147780 - DNA, 833 bp, Homo Sapiens
tgagttttaaaatatgtgtcagtatcttctaaaccaagtagacataacatcagtaagaatacaaaacatgcttaataggcttcatctaatggaatatataaaatcctatttcaacaactgtaggaacatattcttttcaagcacacatggaccattattaaaaatttgactacatactatgctataaagcaagtatcaggaaatatcaagcatttggtgacatgtagactatattttccaatcacagtatttctaagctaaaacgtattaataattcttcccccaaaacacctgaagaaaaccccagatgtatgaaaatttgatcacattcatgaaatttgcaaaacataacatttgaacttaattgaaatatgaaatatttcatgtaataaactttttatgaatgaaagtcaaatgatcaaatatttttctatatgccttgttaaaattataaacaataggcaatcataaaaccataaaaggttttggcagaagatataatctgattactatttgaaaaatatcattctggcagctggacaggctggaaaatatcattctggcagctggacattctggtaggggacaggctggaagttggggagactatgtaggaggatggtataatacatagtcaaagtagaggtgatgacagctttgattagtctgctgagaagggggttctgaaatcatatttcctttttaacttgtttatctcctttcgaatgtacgttccatgagagtaaggactttttgttatttacagatatatccctggtacctaaaaatgtacgtggcatatagtagactctcaataaatatttgttaatgaa

SEQ ID NO: 147781 - DNA, 455 bp, Homo Sapiens
tttcaccatatcacagacaagtttttattatcctgcatagagaacccaagaaatataaaaacatctccagaaggaaccccctccgactggccccctccctcccagtgtgagctcagaccagggtaatgggggcttgcaggccacctctgtccagtgaacaagttccatataaaaatagatctgtagagggttcccagagagccatcgccccacatcacatctgtgcagggctgaggcctgggacccaacaggattctgggacctcactcctcagtggaggggagatctaccctggacaccgaagtcctgccaacacagccagggggccttctgcagaaacagctggggtagggggaggagattttgccctgcagagaatgactgatgtagctggagatgaggacgaggctccatccacccaagaagggatgctggtccaggctttccaggagggg

SEQ ID NO: 147782 - DNA, 600 bp, Homo Sapiens
tttcgctatgtcatcaaatatttattgagtgggccttctggctggcatggggcgacacaaatgccccctgccaccatcagagagatcccaggccccagggtcttattgccacagtttctgcagtccattggggggcggaagtggccagggggatgtgggccggggtccaggagcagactccagcctgagtcccctgtgcccatggtacccactctgcccaccaggaaggtgctgcaggctggctcctccaggccctggcaggaggtgctgaaggacatggtcggcttagatgccctggatgcccagccgctgctcaagtacttccagccagtcacccagtggctgcaggagcagaaccagcagaacggcgaggtcctgggctggcccgagtaccagtggcacccgccgttgcctgacaactacccggagggcatagacctggtgactgatgaggctgaggccagcaagtttgtggaggaatatgaccggacatcccaggtggtgtggaacgagtatgccgaggccaactggaactacaacaccaatatcaccacagagaccagcaagattctggtgggagccacctccccagccccaaac

SEQ ID NO: 147783 - DNA, 562 bp, Homo Sapiens
ttttccatagcaatgtttaatgctagaaaaaatggaataatatgacacatatgtgtgtatactgtacatataactaaagacatataaaatggtctgaaattacaatgcacaaagccaatagcattagttacttctgaaaaatgtactggaattgaaaagaagacattggtcttgtgtaaaattttaattttttaaacagaatatgaaacaatattaataataaccaccacaacaataagaacaatgctgaagcaacctcttccaagttatcaggacaagaccatgtgatccaaacaggtatgttcaagttgttttttaagtagaaggaagcaaacctcattttcaaatatacaaggagagacccatctcatgaaataatttcgataagcaagaaatgactggagaagccatgacttttaaaaaattgatagtaagcaaccaatccattataaaattgttagacgattataaaaatgattatagaattacatgctgtaattcctcaaggaagaatatggtgggtgagttcttatatatgtaacattgataaatgtgaatgatg

SEQ ID NO: 147784 - DNA, 461 bp, Homo Sapiens
  misc_feature (299)..(299): n is a, c, g, or t
  misc_feature (307)..(307): n is a, c, g, or t
ataaggcagcatcccgcgcaccaccttcacctctttgagctccacccggctcagaagtcctctccagatgtgcccccacccaggttccccacgggtgcgttcccctctcagctggaccagcagcacccacctggtcttccacctaatggtctcccctccctgcaagcccaggaattactcacacaagccacatcctcccttggaaaccaggggcaccgcaccctctctgttactacaaggcctgccttccccagggctgctggcttcctctgtgcctgagcgcaccccctacgtggccnctgagtgngcaggtggcacccttctccctggcaggagcacacgtggctcgtaggtcaccatccacctcgtctgtccagtgtcagaggccgtgtatttggggatcttgaactttttagggcaggggatgctccacaggacaccatcaagaggggagtaaggca

SEQ ID NO: 147785 - DNA, 622 bp, Homo Sapiens
  misc_feature (155)..(181): n is a, c, g, or t
  misc_feature (532)..(576): n is a, c, g, or t
tttgaagataaatttcatttctatatttcagaaaacctacttgaatacactttgaaacaagagtacaacaaaatagaatatacttcaaatgttgaatatacaaactattatagttcaaaactgaacactggtatttccctcataaacttcaactnnnnnnnnnnnnnnnnnnnnnnnnnnnctccaggtattagagctacctgccaaaaattcatgctgagcctgaacttccaagtgacagcagaactgaaaatggtatgtctgcacaaatgccaaggctaagtgagtgacacaggcatgttacagcaaaaggccagagccaactgttaatttgtccacaattaagaaactgacagacttaaactaccatataaaatgttacatgtatattctataacaatactgtgctaggtacaagatttttaaaatttttcttttaataaaaaagctttacacaaacaagccattagcttatttcaagaaagaaaatcgaaaattagtctaaggcctttgttttaaatcagcttaagcnnnnnnnnnnnnnnnnnnnnnnnnnnnnnnnnnnnnnnnnnnnnnaaatcgcactagatctttttttgctatcctctttctgaagtttttg

SEQ ID NO: 147786 - DNA, 387 bp, Homo Sapiens
tttttgattcaactcagtttcaattttatttaaagcaggaatatgtcatgggaagtattgtttgcactattgcatcaaatcaggagacacataaggttggttctctttctgtgatgtcagcaagaattaatcaccattgcctggacccaagatttcattatgagttgcagacaggtgatattttaattttaccaattcttcttcatttattaactacaatatttcttatagacaaactttctcgcatcaactattcccttaggttaccctgaggtgcagttcttccaggaagggcaagataaacacttgattcattctttttgttgtttctgtttttagaataacatattggtttcccagcattctccaaaagaatcaataagtttg

SEQ ID NO: 147787 - DNA, 1640 bp, Homo Sapiens
aactttacaaaatttgttttatatctgttagaaaatgtacagacataagtattttcagttgacaaagcatcaaacccagttctgcctagtgataagtttcaccctagagtatgtatgtaacgttttagcttatccatcctttcttggagcgcctccatttccattgaaagccaggctggagcaggacccttttggagtagtgactcagttgcttccaaagcccctgctattgtatgcagcgctgacctgtactcttcttcccaggggaactcctgacgagctctttttgcataaggctgtaaagatgacctctttgcttcttctacagtcacattagcaaagggttcccagaaaatacctttttcctgtttcacacgttccactttggcagcttcagtttcatctacaaacccagtcttctccagaaaggatacaactttgttcttagtttcttcagaactgagacactgtggaactatctcttcatgatttgttccctcagcgaactgagtaaacgcctccaaggtatgtttttttagcagccaatctcctgtcagctagcagtaaggcaaccatacaggacaggttgggcagaattctgtcctggatagcttcaggtataaaaagttttcctaaagaagatacaaaatccaacattgccaaacgaacatagtcaggaagctctaatttaagtagcgaggtctgcaaagttactgcctgaagtatcagtttaggatctagagtttgaatgaaaaatcccaacagtggaagtaaaaggctgaatgtctgttgaacataaggttgatctgctacctgtttaatgtttaaaaaagcccaaagctgactcacaacttcgataattgcagtttgttttcctgtatccaaagcttcaccagcagaattacatactgcaagcaaagcagacagtactgtgttcagagattctagttctcccaaagtacgactcctgctcagccatttcctgcattctgcagtgcctactgtggtgacctcatggacagtttgttccctaagctcaggaggtaacgcctggaaggaaatatgttgccacagaggcagattttctgcttcttttggggaaaatttctggataaactccagctgatggggtggtgccatgaagaaaaagagacgcttcaacagtattgataggttgatgagttgataacattctccagggcatgactttatcagatgagccactatggtgacatggtgtgcacacagttcagcagtcccatatcgagcaaggaagcaccatgcatccatagctaacaaagaggtgatcatattagcactaagtacagcattcagcagagcagcatccagttcagcaaacagtgagggatgaaaggaagtaataaatgtacacagatgaacacaaacatgctgatacaaggtgacagccacctcagctttccccttactctttaatccctgtaaatgaacaggtagagagagttcaccagaacactgctcaaaactgtagaaaacggctttgagtagagatatcctggttgtcgtttctgagacctggctgtctgtgcaccacagggtttgcacttccttaggctggacctcgtgccgaattcaacacccagcctcgtacctagacctat

SEQ ID NO: 147788 - DNA, 878 bp, Homo Sapiens
ttttgaattttccattaaatgtttattaataattatccccactggacagcctgaggggtaaagtagatgctctattagttcttctctatcttgtaagttctttttttctagaataataaatataggattcaatgaaagatgaggcacgattcatagtttcctttcctttttactctccttggtttttttgagttaatgggcttttctattgccacaaaaagtcattactaatcatgccgacttaaaaacgtggatcttgagagtacagcttcacatcagagcctctggcagccatggacagcggtgacactttaaaacagtgtccaggagagggtgagcccaggcaaagcttatacaaagaagcctgcagtagacaatataaaccaaacagcataaaaaatgccatacgctatcgcttccaaataaaagctaaatattacagaaacctcacagtgttggaaaaagcaagtttaatttaaaatatagtcactccttccctatcagggtgagccattttttgtctgaatttcctccatgtctcagtgctgcctggcagggcctatgggagagttcatctcaaaagaggtcaacagcaaatgctacagatctgtgtgggaaatgtggctcatcaacattgctaaagctataaccctcattctttagcctggctttccccactttccactcctccccgaacgcccttccacatctactcccttcaagtgacaactgtacttctacctgaattcaaacattaatatgatatactcagtcaaaagatgagcattcatagtgacaggttgagtgaggctcactgcagtgaccacagcaacaaaagttagggtttgcattcactttcaccagcaaatctaagtgaa

SEQ ID NO: 147789 - DNA, 387 bp, Homo Sapiens
tttattttacaaatctatttttatattaatactaaaggaattgtctttctggctctcattctctcacgagtgtacggtggagtttccagaggctacgtggtgcatccacagttttccgaaaagattattcgaaccctgcggcttcttccagctacttatgagtgggtggctgcatctgcaatttttcatattgttactggacctccaggggagctggactccgctcgtctcaagtcctgcttgccgagagttctcctagtggaaaagggtccttggttcttgttttggcatcaagataacgagctgtgcaaccgtctgcagccaagagttcccggccggctgctgagacatatcccctggtactgtccacatggcagccacaagttc

SEQ ID NO: 147790 - DNA, 321 bp, Homo Sapiens
tttgagtgtgtgtctttgggtttatttttagccacagggattcatttcttgccaaaaaaactgcttaaataaaaccaagattaatatttttacttaacggaaagagttagtcaggacaggctttgaactgggactccttatcttgatggggagtgcatgttaacggtctggccttggcgttgacatcaacgaaaagggcctttgaaacggacaagagagaagggccctgggggaccggggtaggatgcaggaaaagcctatttgtgggacttctctgaagagagagagttcctcttcactcaggctgctcgccgctcccca

SEQ ID NO: 147791 - DNA, 756 bp, Homo Sapiens
tgaataacaacactttgttttaatgtgaggtcttctcagaagagcttcccatacatccttgtactggttaattaccccacagaagccagtctaatagggaaggagagatggtgacagcttagcaacaacggtcataccccgcccttaggggagctgttgtgtagaaatgtcctctcagtccagatcttgaggcacaattcccaggcttctgtcttcattttggtattgctgatttcttttgtctttaatttgaaactggaaccttaagccctggctatattctcaaattctacactggactgacaataagtctacaaactgcccccagccatctcctcagactcaaaaccttactgccttatccacactggcctgctattacagacctctgatttccatttatattcaagactcacaccaatgaaaagaatgctttctgtttctagaatcttccatctgcttcaatctctagcataatcttctcaagccatttatgactcctgaagctcttaaacttgctctttttgtgcagacttctcccatggcagcctccagtattatcctcatgtgctttccttctgttaattatcagaatcctgtgctgcttgaaatgcatgagatcagttgcctatatattgtccagttttatagttgcttatggtaggaaagcaaatatagtaacaggtacttcattatggccagtagaagtcttttgagtccttttcctattccactgctagcatgagacagaagata

SEQ ID NO: 147792 - DNA, 496 bp, Homo Sapiens
taaagtgaggtaagggttctgatgtgaaaagctgagggtgtgatgaggacaagtggcagaaagttcacctggcttggtggaagggaaggtcagagaagacctcttagaggactcagtaatgtccattgaggattttaggttgaagggaatgtttgaagtttgagggcccttttgaggaccaccaagaacttcactgtgctgtaggatattgagcaggaggtgaagctagagagatgtgtaggccacattgcagagtttgaacttggggcaatgggaagccattgaagggttttaaacaacccaagtggtgcattcttctgtaaatgttagagagatcagtggctgccctgcacatcaaaggggagaacgattggagacaggcagattagatggaaggacggagttgtactccaagccaaagatgatggagagtgaattaagttagtgcaatgggaccaagtctagagctatttagaagtgagaagtgacacggaaa

SEQ ID NO: 147793 - DNA, 470 bp, Homo Sapiens
gcggccgcgtggtcggtcacggggggcctactcgcaggggccgcggcccgaggggcgcggagggcgtgtggggcgaccccggtctcacgttcccgctgcctcccgccgcgcccggagcccatccagcctgtgggaggggagcgcgcggggcccgagcagggaaccccgaaaccccgtccgggcagggtcgggaaagctgggaagcgtaggcaagagacacgagtcgggagacacgagccggggagcccataggtttcctctgcctttggagcgaacccagtcccttagcggggagcgggcggagtgtgagcgcgcgggtgagcccgtgaccgggtgtcggcaagagaccgcccgggagcctctcgctggtccggggcttcctggggttgcggggcggcccagcgaggcttcaccctcctcgatgtctgggtcacgcttcttgcccaggtggtctctggctggcgcagata

SEQ ID NO: 147794 - DNA, 600 bp, Homo Sapiens
caaaattcatcctaaagatggtatgagatcgactgcctcttttgattcatttttgtttctccataatgcctgctcttttctcacctgtgtaaatccatttcagaagccatttctgatgtatatacaacttcttctgtgagatcagcaacatacacattcctattgacatcttctcgaataattaaaggtttcattttttgagtgccacagagtaaatctgtaatggtttcattgtatatttccatgtaagatacacgtaagagaaattccctatcaggaaacttcttaattttttggaaaatgtcatgaattgccctgggtataactcccaaatgatcttctgaacccatcatggtatatgtttttcctgaagcagtctgtccataggcaaatatagtaccattgtagccttgtatggcagaatcgatgattggtgctgctatttcttcatacacatttttggtagtttcattaccatgaaagacacgatcaaaattgaaggatttacttccatcaacttgataaatgacattattgtcagttttccagtaatcttgggcagtttctccaagtgattcttctctgctgttcagcggccgc

SEQ ID NO: 147795 - DNA, 428 bp, Homo Sapiens
acgcatgtatcgcccaaacataaaacttttaagttcagaagaataagacattctaaggtgatgaagtgctttgagaacataagacactaagcttacatttacaagacgaagagggctggggaattaattataaacgataccttaaagacgctaaaaataagtaacataagccaggttgaggtaaatactctttctcttcaggtttcataaaatttaatgtgtgtttgcaagaagctttccaagagtttttacattcactaccattctatgagtctgaatcttgaacacacaatgcctacttgtttgatatgcaatagaaagtattcattttattttaaaatgtaatttactaatcgaccttgtaatatttaatcaactgactacattgactgatatttgtcataactagcatcaacgtcttttcagat

SEQ ID NO: 147796 - DNA, 434 bp, Homo Sapiens
acgaaacggacagattgtgaagaagcggacaaacctcgcgttaatattcgaaccagtgggtgtccccattggcacggatcacacccccatcttttaatccctccctccgcccgtgtcccctcatttgctagacttgtcctcttccaggcctagtgctcggcgcttctgagaggaataggctcacagaatagcggcgctgccgagacccctggggtacgcgaggcagggggattccgcccctttggaatgtggccgagaccctcagccactaaaggacttcgtcgagacaggagagcccgcagagatcgttctcttctggataaccagattattccacaatcaaactttaacccttttgggggcgctgttccctttaacaaactcggaaaatgtacacaatcttgtgcacaacacgagagttatggacctggaaa

SEQ ID NO: 147797 - DNA, 373 bp, Homo Sapiens
ttttaaggtatttttaagtcactatccacattttgtgaaactgaaggaccaaggccaacgagaaggggaaaaaagtgagcgtgctgctacgtacccctcaaaggaaacaaccaaaaatgtttctggattttattaaagataatgctggattctcgttccccatagtaccaaagatgccacacagagtattcttgctcaaaagagcgaagcacttaatctagaggaagagataacgatgtcgaacgctggtaaatcaaaaaaattaggaaagaggagtggaaaaggagaagacgcggcggcgctgtgcggtctcggagcagctctccaggaaagggttcttgggcagcggcccccctgctcgggtgagcggcca

SEQ ID NO: 147798 - DNA, 448 bp, Homo Sapiens
tttttgggcacataaccatcttatttatttccttatgcgtcagacactttcattatcatcttctggagggagtttgtgagtgaaaacacaagcctcatccttcctcccaactttccaatgtgctctgaacgttggaaatacggcgccatgtgagctatgcagattcgggttccttaggttggagcaaggcccaggaacctgtttccttccaggattcccaggtgatgttgaggcccggtcagtctgcttcactccacacacacacatcctgctgtggactgaactgtggccccctccaaattcttatgttgatgccctaacccctccgtgggatagtattaggaggcggggcctttgggaggtgattagggttagaggaggtcatgacggtgaggcccccaggatgggattagcatcctgacaaaaagagaccccagagagctctctc

SEQ ID NO: 147799 - DNA, 364 bp, Homo Sapiens
aaagggtcttcatgtggaagctttttacttaagtctgatgaaatagaaaactgtgtacatttaaaaatatgcatttaaaattgttttttattgttttgttgggcagtatgaaatatacagtcaaggcagattcgtacagacttgtaaagtcatctcaggaatcttttatgcttaaagtttcctcagccccatttatattcactactatcattcactctttaccactaatatcttccctgctgtctaatcactaatatcttccctcctgtctaatcactaatgtcttccttcctgtctaatcactgagttaagggaaaaatagtcatttactaattccatttccccattaaaagctatgtctaag

SEQ ID NO: 147800 - DNA, 1575 bp, Homo Sapiens
  misc_feature (1285)..(1285): n is a, c, g, or t
  misc_feature (1391)..(1391): n is a, c, g, or t
  misc_feature (1430)..(1430): n is a, c, g, or t
  misc_feature (1499)..(1499): n is a, c, g, or t
  misc_feature (1527)..(1527): n is a, c, g, or t
agagtatgaagtgacggcgcgccgaattcggcacgagggtcgccttcgtggcagggcacgactctctcccagctcgggtcgccgcccacattagtgtggggccctgcggcctagcgtccctcaccagaggcctccccttgcctagctggaccgccgagggacatcgacgagtatcctcctcctgctgtccccggcttcgcctgccgcccctaaccggccagtcaagatggccgccgctgggtgaggcaagctggcgcgccgcgggggcgtctgggagttgtagttcgggacggcgggctgacgcacttcgccgccggccgacgggcgccattgtgcggcgcgcgccgggactctgcccacttccaccagagacacattgagaaggaggaaactatggcctccaggcttccgacggcctggtcctgtgaaccagtgacctttgaagatgtaacactgggttttaccccggaagagtggggactgctggacctcaaacagaagtccctgtacagggaagtgatgctggagaactacaggaacctggtctcagtggaacatcagctttccaaaccagatgtggtatctcagttagaggaggcagaagatttctggccagtggagagaggaattcctcaagacaccattccagagtatcctgagctccagctggaccctaaattggatcctcttcctgctgagagtcccctaatgaacattgaggttgttgaggtcctcacactgaaccaggaggtggctggttcccggaatgcccagatccaggccctatatgctgaagatggaagcctgagtgcagatgcccccagtgagcaggtccaacagcagggcaagcatccaggtgaccctgaggccgcgcgccagaggttccggcagttccgttataaggacatgacaggtccccgggaggccctggaccagctccgagagctgtgtcaccagtggctacagcctaaggcacgctccaaggagcagatcctggagctgctggtgctggagcagttcctaggtgcactgccctgtgaagctccggacatgggtggaatcgcagcacccagagaactgccaagaggttgtggccctggtagacgggtgtgacctggatgtctgaggaggaagtacttcctgcaggacaccctgccgagggcaccacctgctgcctcgaggtcactgcccagcaggaggagaagcaggaggatgcagccatctgcccagtgacagtgctccctgaggagccagtgaccttccaggatgtggctgtggacttcanccgggaggagtgggggctgctgggcccgacacagaggaccgagtaccgcgatgtgatgctggagacctttgggcacctggtctctgtggggtgggagactacactnggaaaataagagttagctccaaattctgacattcctgangaagaaccagcccccagcctgaaagtacaaggatccctcaggggattgtgccctggtcctctaccatanaaagataccttgcaggggggggttcagnaaagtccaagaccccagtgttgaaaccagatggaagtctgcctcaagg

SEQ ID NO: 147801 - DNA, 343 bp, Homo Sapiens
tttctacagtttgttgaaatagaaacatttatatggatacatacatctgcaaaggttagggagaaaacggtagccctggcagagaagagctagttagtgtatttcaggatagggccaagggaagctgtcatttctctactaagtctcattgtggaaaagccacaaatgtccctagtacagtaataaggaaaaaaaggctgagcgtggtggctcacacctgtagtcccaggactttcggaaggattgcttgagcccaggagttgcagatcggccaggacaatgtaagaaaaccccatgtattagaaaaaaagaattagccgggcgtgatggtgtgggtctatgg

SEQ ID NO: 147802 - DNA, 491 bp, Homo Sapiens
atctcgccggagcactggcgcaacagctccttccacttcatgcgggagctcagccgcgtgctgcacaccaacgtggtcttcaagcgtgacgcacacggccagcagatgatcttcccctactacggccgcgaggaggagctgcgcaagcaccccatcaagcgtgccgccgagggctgggccgcacctgacgccctgctgggccaggtgaaggcctcgctgctccctggtggcagcgagggtgggcggcggcggagggagctggaccccatggacgtccgcggctccatcgtctacctggagattgacaaccggcagtgtgtgcaggcctcctcgcagtgcttccagagtgccaccgatgtggccgcattcctgggagcgctcgcctcgctgggcagcctcaacatcccctacaagatcgaggccgtgcagagtgagaccgtggagccgcccccgccggcgcagttgcacttcatgtacgtggcggcggccgc

SEQ ID NO: 147803 - DNA, 175 bp, Homo Sapiens
ttgagcttacttgtagagaatggtctaaatgctagtagcactgggcttatgttgttaccagatgaatttgctcagctgcatactgttgtgttgcaaaatcaaatggcattagatatgcttaccacagcccaaggaggggtttgcgccttactgcatactggatgttgtgtgtata

SEQ ID NO: 147804 - DNA, 355 bp, Homo Sapiens
tttcacttcacgttttattggtttgagtaatggtttagaaactatcttttacttcaaaatgtttgtgcatctgagattttctgactttatatctggacagggcgccgtaatggtagacgatggccgaggttcagggaacctgtttctgtggttcaggacaggtccagcctttctgagccctgtccccgcagagagccccctttccaggcacccgtgtcttgggtcgccgctggccctgtgaggtgacactctgcagctcttgcactgtccaggccaagggtggctgttctgaaacctactcggtttattccatcttgaatcaatgcattttttcaagtccgtgcctcagggtgcc

SEQ ID NO: 147805 - DNA, 426 bp, Homo Sapiens
ctgtgatcttctgttcagcatacacatcagcaaagtgagaagatgagcactaaatataggctctattaactttacttttagatttactgccttcaaaaagtgcctattctgagcaacataaacgttattccttacatatgtatgtacacacggtacccagagtcgtactgtgcagccttcaaaaacataccatcagaaagagtaggtgctgagataaggaaactttgccaaatgaaagaaagtcactcacttccaatatcccctctcaagcggctaccgtgaaacgggctgcaaacacattccctgagcatcccttgctgatacagcttctttatatttatatcctactggatggtagcatattgctaaggtttcctgtactctgcttcaagggaatgtaagctttatggcattgaaacatttagg

SEQ ID NO: 147806 - DNA, 373 bp, Homo Sapiens
atagtcagagttgattaaagcagttttcatggtgcttcctgggaagtacagagacactcatactaaatgaccatttcccttgtttggaagcagccattttgcatctttacagtggccctccttgacccagaaagacaaaggtagccagacactctacccacaaggaccatgatgttggctaatggttgtcagggaatctagctgtgtcattggctacctactgctatggccgttttggctgatgaatgctactgatgggagggcagagagtcagactcctttatttagtgttgagtctcctgggggagcagtagcctaggacagtcacctagaaatgaacctgagctgttctgtgagttaccaggagagttag

SEQ ID NO: 147807 - DNA, 368 bp, Homo Sapiens
tgatttggttttgttgaatgccatagcaggatgaggtgatcacaagacagacatcattgctcttcaaaagaatggagtattctatttattaaaagtatctggaattctattgtgtgtgagtctgtgcaggaacacaatgagtctcaaagtgaaaaaaactttggattcctggttcctacagacttttgttcagatactctctgttattttgctacgtgaaaagggagcttgaatttcatgtgaagtataaaaaccaaggagaggaatcctgcttggggccatcaagtattatagcattgtggtcatgaatgattaaatagataggagaagtataattctcaataaacaccaaatgaattgtttagatg

SEQ ID NO: 147808 - DNA, 1808 bp, Homo Sapiens
  misc_feature (118)..(141): n is a, c, g, or t
  misc_feature (151)..(165): n is a, c, g, or t
  misc_feature (242)..(286): n is a, c, g, or t
  misc_feature (321)..(321): n is a, c, g, or t
gtgggggggaaggcagagcacccttgtttggcttgccccgggattttttcttgggggagaaccacgttttgaggcccggtttccactttctccctttgtgggccgcccgcccgccccnnnnnnnnnnnnnnnnnnnnnnnntttttgtgtnnnnnnnnnnnnnnnccccaaaaaaattttattttctcgttgaggggctccgctttcatgcttgttatagggtaccactgggattgcggcgnnnnnnnnnnnnnnnnnnnnnnnnnnnnnnnnnnnnnnnnnnnnnaagcgattcatagaaggtgtagtgggtgggttgtngtttttcaggagtcgcaatgacatttattaaaagatgcctaaagttagacacaactctggttggagggagaagaacttggaggagattgggggaaacctcccgctctccaaaacatttctgtgggatccctggttcccaaagtcagacagtgctgaggctctgggtgggtggtctcttacactgggttcataaccctcgccaggaaaaggctgctccaggtgaagtggtcgaagatcatgatgatgaagggctggttgaaacgcaagatgataggcttggacgtcaggtttagggttaccccagtggagccagctgtgtccacaccctcctcattgagttgcagcacagctttatggaccacctttgatgacttcagctgggcgtcctgggtgatgcgtgagaaatttgcctggttggtgaacaagtctgcaatgcccatttcctccagcacatctcccgaggtcatagactccagagatggtgacctttggaatgtacaggtccacctggctgctggtcaggcctgcggaccacctgttaatcgtgtcccggctcagtgcagcgatgactgtgttcatcttccccttgtccggaaggatgaagaagacagtcccattgcccacgtagttcatctgcaccagctggcaggggagctccgcgtcatgaaggtaactgatggtgctcgactgcaacatcatgggcaccttcaccacagttgtctcgtccacatagaagttctcctccctggtgcttgccaggtcaaagggctgtgtccatgtgcctttgaagaagatatagttgaccaggacgaggatggctgggctatccagccctgaaaacaagtcgacaattttcccctgtgtcttattcttgacatagctgttgatctgtctgctggctgttgcccagtcctggaaattcatagccaagacctctgactcatagtagtgcttgatgtctgctgagaatgactccagcaactccaggctgccatcaagaaacaaggcattgcccatggtcatttctaagctggtgtctgactttgcaaagagttggtgcaggtgctggaaaccctggtggatctcagtctcagacctctcagtgaggttgaaacccaggccctggagaagctgggcccgtgtgtggccacaggtgcccagggacagcatagctaaggccatggagatgctcacaggggagatgaaaatgttctttttgggactcaaggccactaggtgcttatacaggctgaaggcaaagtcaacgttggctgaagccaggccccggtgatggttactcatgttcacataagcagcgttaggatccatggcctggacggtccagaggccgctggtgggcagccagagaagacaggtgtacaggaggagtggcattgtccagtatagccaggccagtctgcggtgggctcaggctgtttctgctggcttggtcctgctgtcctggaccctagcatgtgtacagtccc

SEQ ID NO: 147809 - DNA, 453 bp, Homo Sapiens
ttaaggacgaatatctcatttatttccctgcagctctcatcccctgctcatccaagcctccctccttccagatgaataggaacaggttacagctgacccagtttcactcccagcttcagaagatgaatcacggtgggttggcggacaaggaatggggcaagctggggcagcgcggaaggcagtgctgttttcaggaggcctgacctctgtggccagagtccccgtcagcaccgcttactgcaggccaagatgcctcccaccctccagaatccgaccgcggagggagcttccagtccaggaacctgcgggaatcttggcgggggctgagggctgcaccccctggcctgggcattgggtgctcttagggatttgcctgggtgcctaagggtcaccggtgtccgcctggagggcgcagagtaggcaactgcctggtgtcggtctaaggtagcctct

SEQ ID NO: 147810 - DNA, 791 bp, Homo Sapiens
gcttttgccgcctgtacccttcctggagcaacccgtgcttttgaaaaatgaccatgccgaaggggaactaacactcccagcctggtgcgggtcttgtcaatctgatttttaaatgatggaggaggaggtttgaggacaaagctcatggtggcattaccactatcagggacgctgcaaagatcaagtgaaaaggggaaaaggctcttctcaatgtgagcacattcacaggctctgagaacagagaggtatttaaagtgaactggaacaaacctgcaacatccggtgcgttctgccttcaaaaatagctgccagttagaaagggttatttacatattgatttcatgctaactttgtaatggaatgtgctgcctgcctgcctgcctgagacctaacaactgtcatcataattttttctaaaaatacagtcagagaaaaacactcattgaaccctccactggaaagtagctgcaaaagaccccctgatcccaaacctgcttgacagaccacagccaagggcagggacactcaacaactgtaaacgaggaacatttcacagcggcagctggcccctctcttcttccaaccagccaatattttttgtctttctagaaaacctgtcttgttcaaaggcctgatggagctgattccggttgtgatcctgggcatatggatggcatatttgctgcgagctagccggcccccgctgctgcggacaaatctttcattcatgaacaggagcttgttaggccaactccggactctaaagccacttaattaaattgtggaaagtc

SEQ ID NO: 147811 - DNA, 377 bp, Homo Sapiens
  misc_feature (229)..(328): n is a, c, g, or t
tttgtgttttctagtgtcactttttattttgacttgcatatgggaaattacacttaaactttcatttgtcccagcacagaggtatatctgcatgagagtcctagtcactacttacatttataatataactctgggttgcaatatttataggtttatttatgtcactattttctattttaatgtaattgttgtttgaccccaccacccaactccccacacataagcatcnnnnnnnnnnnnnnnnnnnnnnnnnnnnnnnnnnnnnnnnnnnnnnnnnnnnnnnnnnnnnnnnnnnnnnnnnnnnnnnnnnnnnnnnnnnnnnnnnnnntacaaactctgtagcttaaaaccacagaacatttagggtattgacaact

SEQ ID NO: 147812 - DNA, 410 bp, Homo Sapiens
tttgaattagggagtgtaaagtttattttcatatctgtcagcaaggtcgtggaggtgggggtaaggatcctaatttctaagactcgtgaagttttataccataacttcctgtgtttagtcctggatttctgtttgtgctgcttgttggggtcttgcctctcatcactttgaaacatgcatctgttgctttaaggcgcctgaagttcatagcagtctatgagctgtggagacttttcctaccactttgtcatctctgggtaggaaacttctgggaaagcttgatgtaagaatggaaggctgaagtccttgcaaagtaaggttgataagatgtgcatgaagttgtgcaaacatgctgtgagctgctgctttcttggtttgaatatatttcaatggctgtacgattttggttt

SEQ ID NO: 147813 - DNA, 437 bp, Homo Sapiens
tttgacagaaaaagttagagatatttatttgacagggtcaaggttggagcctttctcttccctctccccaggtcccataggtgttaggctgagagacatttaatcgcgggagtagcggtttcatatctataacaaaaatcaaataatgcaagatgatttactccccctagcaaccgcggagctcacccttagcaaccaggctagcctcgggctgcggtgtaatcagcttgaaaatatttcaattattgtgttgattttagtggatttgagaagcgttgtgtggagagctgggcacattctccccgcgaccgggatcgatgcatggtccatgcagcagcttctggacaccccgtggggacacccgctgtctagagccatgctgagcagacttctcctcgtatggacaccggcgcccccgccctccactcgtaccccgg

SEQ ID NO: 147814 - DNA, 564 bp, Homo Sapiens
  misc_feature (552)..(552): n is a, c, g, or t
aaagttgtcatctccaggttttattcaacatttgaatcatgctcaaacttgcagacttgacttaaagcttagatgcttcatctccaaaagaagctggccatggagtacaacaaggaatctagtagcagtctggagttttcctctagaaagtgctgtggtctcaaaatgcagtcctgggtatctggacacaatcccacaaagggtgactgctaaaaagaaaagatttcaggattgaggaacatagctccttcttctaatgcacactatgttgggatggtgggatgaaggccgaaattttccaggttggagtcttttggtggtttgtttgcttatcctgtatctggagttgagaagaaaccaagtttgagatttaggatgtggacaggaggtaggagttttgcccataaattacaacagagtctgaacccatggggactgccaagaagacaaagtggtcacaattggcttgggcccgaagccagggcccctgcagagcaggagcccagttggggcctcctcccagagccagtgcagctctgcctgtgcgtggangataagctctgt

SEQ ID NO: 147815 - DNA, 441 bp, Homo Sapiens
ttttcaagtgtttggattttatttgttatcaaggtataactactcatcttcatattgtgagtacttagttatttctgatggttttaaatctgagaggttgattcagttcttaaataggaatgcatagaggaagctctgtttcaacatctcctggtccagcactgtcaggcgggctctgcttttggtgttctaccagcagatgaaatcttgttcttgaattccagcctcttttgggctaatttctgttcttctgctctcttctctcaccaccagcctctagaactcagatgccctgggcttataagtttgctttgggtcactgactaaactgatgagtctctttgatgtggccgcatctgcccatctggacccagtcaggctgcctgccaatttagccctttgttaactcatccccttacttggatctccagtaattactgc

SEQ ID NO: 147816 - DNA, 671 bp, Homo Sapiens
agaggcaagggaacaaatggccaccgtggagagaggacgttcaactgttgctacccaggttgccacttcagaactgtccatggcatgaaagacttggaccgccatctcagaatccacacgggagacaaaccgcacaagtgtgagttctgtgacaagtgcttcagccggaaggacaacctgaccatgcacatgcggtgccacaccagtgtgaagccacacaagtgtcacctgtgtgactacgctgccgtggacagcagtagcctcaagaagcacctgcggatccactctgatgagcggccgtacaaatgccagctctgcccctatgccagccgcaactccagccagctcaccgtccacctgcgatctcacacgggggatacccccttccagtgctggctctgtagcgccaagttcaaaatcagctcggacttgaaaaggcacatgatcgtgcactcgggggagaagcctttcaagtgcgagttctgcgacgtccgctgcaccatgaaggcgaatctcaaatcgcacatccgcatcaagcacaccttcaaatgtctgcactgtgccttccagggccgggaccgggctgacctcctggagcacagccggctgcaccaggccgaccacccggagaagtgtccagagtgcagctactcctgctccagcgcggccgc

SEQ ID NO: 147817 - DNA, 465 bp, Homo Sapiens
  misc_feature (429)..(429): n is a, c, g, or t
aaactagcgtagttttttaattagaaattgttattcaataatagtacatgttacaaataaataccattttaaactgaaaaaattgtagactttcaaatcagttagggtggtcaccctaaaaaagggcatttttctccccttagtctccttgttcatgttgctcacaacaagaaatgggctaatgctatgaataataataacaaacactgccttctgtcaggccctgtgctgaataccgtctgcatatgtataggaaagggttaactcagcaggtcttgtttgcccagactgtgtacatttccaagaaaggtctgcctttagtactggtccttggccagctcctggagaatgagctctcagcttttagaaaattctatctgctgagaatagttttgcatgtctcaggtcttgggccacaaaatatcagtntaatcagatggtttatgttaacaagtatgatttatg

SEQ ID NO: 147818 - DNA, 799 bp, Homo Sapiens
acccggtgtgagagtgtttttatacaacagtgaatgagaaaatgattttcactatttcttgcctcttaacaaatagagctgtgtgtatatggcagaaccataacaatttcagctgttatacatttgcattttgaatatttagacattaaacatttaaatctcattcaaaagattaaaaaaataaaatataaggaactgtgcaacatcgaggaatgaaagatgacttttatgtgataaacataaatatccaataactgcctaaaataaactctgaaattaccatgttgacaatgttatttcctctttttaaaaggacaagaaatatgaaacgaaattgaaatgcaacaaatacatgttttaacctgaccctgaatcttgtgtttatttttgttttaaataaaatctagagctccgtaggtaagataggtgccagcatttgaaactgcagtcatttttaaactgagtatgtttttatttttaaactaaatgtactatgctgtttgcatttcctaaaaatatccagaaactctggtagtttgttgttcagtgctcccctggagaattcatgtgaaggtctaaactattttatactgttgattttattaaaatgtgaagatccattttgtgaccgtgtaaatggaatgtcagtgtttcccttcgaagttcacattcccttgcctgtgttctgcatattccttttccttgctcagaattcttatataggtaaggaagaccttccaaggtttcttttgccacgcttgcttctccaaacactacaataaaatcattttgatgaaaa

SEQ ID NO: 147819 - DNA, 1076 bp, Homo Sapiens
  misc_feature (85)..(85): n is a, c, g, or t
gagtggtttccaggaatcgggagggatctttaggaggtttttcatccaaccgttcaaggatgtagacaaagtgttccatagtganccaaacatgcactttttataaccaactcccataaaatggttatacatgttctctatagcacgattccactttgtcaaacagtccctatagctgttcaagatcaaatccagctatagtaacttttcgagaaaatcattgaatgtactgattgcccggccatctcgggaccatcaaggagaaatttggcattggggaataccctagaaaggtaagttaaagatttcagggcaaaaggatctttattacataaataaggggctggctccccatgcttaacgataatttctagtaagaaggcttgcatggcagaatccagcacttcatcagtaacaccagcctcatccaggcggatcttctctttacttgaccgtgaccacatctgcttcagggccaggattcggggaatgaccctggtttcctctccacagcgaatgtcaggatgtgcgtccagcatggccctcatgagtgtggttccactccgaggcacacctccaataaatattaaaggcatatctttgtgataggcaaaggttttgttggctttgaggtccaggccagttctcacagtggtccttgtgctctccaatttgactggctggctacgttcctctatccggtgatggcattccatggcatgctggcccaggtaaaacacagtcacagaactaatcaccagacatgccaatagtaagttctgcttcagctttccaaccatcttgatgtggttatcttgttattaaacagatattttgctcaaaatgattttcggaaaatgttcaggccatggacagtctacttcagaaagataaccaacatctgggatgagtgaggagccgccgcgccgcctggacggcatcctggcctcagccgctggtcccaccgccttcggtggggggccactcgggagcccgccctcaccgccaagcgccggcagctgccagcctggaccggccccgcagagcagcgccgttccgacccgcaaccgaagccg

SEQ ID NO: 147820 - DNA, 702 bp, Homo Sapiens
tttgggattgcctctacatttattattttgcacttaaaagcatcctacaaatacaatcagtaattaatcagccgacatagtccatttgagaagggagaagattgttctaagagaagctcattatgaaaaactaggaaaaatgaagactcttttcgagccctctgcctcctgctttaccaaacacaggttctagattgccagttccacactcggatggtctgatcatcggaggcactcagaatccagggatattcatgatgaaaaaacgtggtgcgaatataatctaagtgcccaagcaatgtgaaaagacagcgccgaagcttgtaattccaaaccttaatcttatagtcatctcctccagagacgaacagtggctgctgcttatggaagtcaatgcctcgcactggaccatcatgttcatcaaacttgtcaatgagagtgcacatccgatagtcccataactggatgaccccattatgtaaactagtcaggatccaaggtcttttggggtgaaagctgagccctttgacccgcgcgctcttggtctcgaatttggttaacatctctcaggtctccgactccgatgtgttaatccgagccccgacacaccctgctgcccttcggacgcctccacgtcagcgaccctcgtgctgaattcgccacccaggctccctaccgtgtcgggggggtcggaggggcggg

SEQ ID NO: 147821 - DNA, 436 bp, Homo Sapiens
tttggaaaagtataaacctaaggcatcacctttacagaaaatatcttccacggaaacatctaaaggccacagatcagccctggggttcagagggatcctgacagctactcctcaagatcctctctgttgtgattcatccccccggggccctacagtttctccttcctgactcttacatttctttggatggcatcattatttacctgtctcctcccatagttaggtgccaagcactgtggattctgcctctcagtgtccagacacccattttccttcccactgttccttccccatggagaagcctgtggctggctgacagcagagagagatgctcaacttggagaaggtgttacctgggccaggtggggaaggtttgtttgcagagcaaagaagtgaagatcctcatgtgacaggtgacctgccatataatcagaag

SEQ ID NO: 147822 - DNA, 544 bp, Homo Sapiens
  misc_feature (408)..(408): n is a, c, g, or t
ttttttagctagtaagaggtgaagctgtatttgaacccgggcaatcaggttgaagatcttgtgctcttaactactgtactctgctgccttctggaacattcagtggatggtcctttctgtgcaactccctccaacactcttctccccagttgctgcagaacttagcatttgcagcagtccatttcagaagacccggatgctcagggatccccagctgagggcatgagaacctgagtctctgctgctgtgtaaggtggatgctggccataggagcacaaaaggttgatgagtcagaggaaggaatgatcgttctcatcacagccaagccagtggggtggattggtggaggtgggggtccccccacaggggttgtgccggggcccctctcagctgcaggctccacctccnctgtgtcagatcactgtgcgaataggggaggaggccatcgtcaagcgccgcatctcagagactgacctgcgtcctggggagctaatgacccgccttgttctgaagctttctactaagcccttcccagttgcttcct

SEQ ID NO: 147823 - DNA, 480 bp, Homo Sapiens
acaagttgcctaaaataagacttttttgactattctaaattgactcctcttgaccagcactgcttcatccaagctgctgacctcctcatggccgacttcaaagtgctcagtagtcaggacatcatgtgggccctgcacgagctcaaaggacactatgcaatcacccgaaaggccttttctgatgccattaaaaaatggcaggagctatcaccagaaaccagtggaaaaaggaaaaagagaaaagaaatgaaccagtattcttaaattgatttcaagtttgaacaaggtaatgcaaactatgttggtggcagtgtgtagctgcaacaccgtaccttcttcacagtcagtgaaggaagctgtgctacaggtgtctgctgagcatctggacaggaactattttctcagcacgtcaaaattttttaggaaagtggctgcccttgttgggttccttctttcctacttaagataaactgtgagagg

SEQ ID NO: 147824 - DNA, 467 bp, Homo Sapiens
ccgaggtcttttgtttggaaagtcagctacatggaccagccaataggggcccagtgatgccagaagatgggagggaggagccaaccttgctgcctgcgaccctggaggacagcctgactccctggacctgccttcttcctttttccttctttctactctcttctcttccccaaggcctcattggcttcctttcttctaacatcatccctccccgcatcgaggctctttaaagcttcagctccccactgtcctccatcaaagtccccctcctaacgtcttcctttccctgcactaacgccaacctgactgcttttcctgtcagtgcttttctcttctttgagaagccagactgatctctgagctccctagcactgtcctcaaagaccatctgtatgccctgctccctttgctgggtccctaccccagctccgtgtgatgcccagtaaagcctgaaccatgcctgcaaa

SEQ ID NO: 147825 - DNA, 888 bp, Homo Sapiens
ttttcaattcaagtaatttattgattttcacaataaatacttcctgggggtatactatgtgccagatactaggggcgagcaagatcccagggttccttcattgagggaacagagagggcagtggagaagccaggtgagttaacgagcacttgcaggacagtgtggtaaggacgatgggccatacacagagccaggggacggagagagcctcctggaacccaacgagcaaataggacaagcatgtgaaaacggagttggactactgtcccgacaggggaaaggttctggaagctggaggctgtgaatcagcagagcaatggaggagctgaaaaaaatgcggcagagctgtctcccagctgacaggggtagcacgcaggagcttcccaggagtgaggtttctcccaggacctggtctagcatccaagccaaacactgggaggaaagggctcagttcagccaagactgtgactgcagaagaacggggatcctgcgctgggatcccagccatgccctcgccttggtgttttctcagtctgtgtgggcctccttttctccataacttctgcgagctatggtagcaaggcatgccagggcttccacaggtggtccagtgccacacaggaaggtgttgagaggtgcgagatggagcaactgactcagctggtccctgcaagagggggaggatgtggcactggccagctcccaagatgggctgcgtttggtctccagggaggtccagtctggtgggcatttccaacataagcggttgggcaagaagccagggtccatccacaatggaatgtccaccaaacatcctgatgcgcagcaaacactctcttctctcactcttaatcaggtagattgacagcctcattcccagcaagaatg

SEQ ID NO: 147826 - DNA, 398 bp, Homo Sapiens
ttcaagacagcttcaacctagccaaccacctgcgctcgcacaccggggagcggccctaccgctgctctgcctgtgccaagtgggttccgcgactccaccggcctgctgcaccaccaggtcgtccacactggtgagaaaccctactgctgcctggtctgcgagctccgcttctcctcacgctccagcctgggccgccacctcaagcgccatcaccgtggggttctcccctctcccctgcatctcggccctggcctgcccgccttgagtgcgccctgctccgtctgctgcaatgtggggccctgctcggtgtgctggggctcagggccggcggcggagaggcgcgagggggcaggcgcgggtctgggcagctggggggtggcagagggctagcgcggccc

SEQ ID NO: 147827 - DNA, 441 bp, Homo Sapiens
tttggtatttaatctatttaatggatgaagtcgcttagtccatttattttgtaatccatttactggactaaatgaggtgatgctgaggtggatacagagagctgtgtgggagggaagcctggccacatctctctgctctgccagggcagcttctgctcggcagctgggttgaacgccagtcctgccttctgcctcctgccacaaggccagcctgggatggtagagctatgggcaggtcagagtgtcagggagagcagtgatggctaattaaaacttcagctcagggaggcccccttgcgagtggattgcctcagtcagcttccctgggggagtcccctaattggacccctgggccctaggagtgatgcaaactcaccaggcagatgatggcaggcagggagggaggggaaagggggaaggaagcaggctggccaaaaaata

SEQ ID NO: 147828 - DNA, 312 bp, Homo Sapiens
ttttacaggcacagaaaggtggaatgtaggatttattcagaagtaggttgtggcagatgactacagaggtatcagaggacatggtgagatgtttggaagaatcctagaggtagagctcctggagtcttggttttcccaggcctgaagttggcagcagagtcccagccttggcagcagagattttctagggtcaggaggaaggacttgcattttcctggcttctcttatgttttcagacctctgttctgcagctttcctggcagttcctcacactgttcctcctgcctggagtgaaagcttctttcttctcct

SEQ ID NO: 147829 - DNA, 744 bp, Homo Sapiens
tttggtcttctcatactttttgtcagtgaacatgctcggcagtccatttttagaaatattggaactggagtgatgcaaattgagacagggcctgcaaatcacattttctcctgtggagctgatggaacaatgaaaatgagaatactgccagatcagtttagccctttaaatgaagtgttgaaaaatgatgtgaaatttatgctataacatttttacaataagatgtacaatttattacctatatggaatggccaacagatataatatacagtgatcattctctatgccacaaattagctaatgctttcttgtttttatatttattttatggatctttgcccttgatgcactgatgccttaaaaattaacaaggtcattcagaagtagattacattgcctaaagtagaatgtgtaagtaatgctgtaataatacatatcatagtatattataatcagtatgtcatagtgttaaaggtgttttgttttcttattgatacttttccacaggcatctctgcatgaatttcttccacagtaaaaatacgttttttgtaaaggcaattgtacataatactcatcacttaattcaccacactctcacttcctttattagccttatacatctcaaactcttctcttaattaatgataggtatttgagtaagaatgaaaaaaataatgaacatcttcattaaaattgtcattgagacgtcagtgataaatgagctagatggctcaatatgtaa

SEQ ID NO: 147830 - DNA, 139 bp, Homo Sapiens
tttttggagtaaataaatttttaataaccagtttcttggttacaacttcatctatataaatccccttattctaggatctacacagttaaacctaatatttcacagcacatttccaaaacagtacagtttttacactaag

SEQ ID NO: 147831 - DNA, 494 bp, Homo Sapiens
aacaaaacaaaaaacaaagaaagccccaatttgtttttattgctatgtacttttttggaatcctacagtttgaactctttgtatcttacttgaattcagcatggttgtgagattcattcatggtacgagcagcagtttcattgctgtataattttcttttgcatgagtatgtggcaatttatttttctagtcttttcttagtagacattttggattttgtagcttgtggctgtttcgattagagatgctgttagcattcttttgctgtacagttgcactcatttttgttgggaattattgggggagaagataggtacgtgtttagttttagtaggttcttcccgttttcctgtatggttgtattaattcacaccccacgtggcattgcgtaagttccaattgttctgtatctttgacagcacttggtatcgccagtctttcatatttttcaaagctcgtttcttttttttgagacagagccagactccgtctcc

SEQ ID NO: 147832 - DNA, 342 bp, Homo Sapiens
tttgtatgccaggtgcccttttaatcaaatggcctgaatagctcatttaatgttcaaagcaatcttagtagtaaattatgataatccccaggtaacaaaactgaagagatgtttgataagttgccagttgtacagctgataagtcaggtccacctgcctctaacattcatgttttaaccactaagttacatgatatcccattcctgagtatttagagcatttatagtatgctacaggcatcatgaaggaagtgattctgttgtagactctaacttggagctttctgctagttaaccaaaggggcagcaataaacactagatttatcttcatactactgctgc

SEQ ID NO: 147833 - DNA, 1184 bp, Homo Sapiens
  misc_feature (554)..(581): n is a, c, g, or t
gagagacggaggaggaataggatgtgctgaatccggtgctttctcagtagatgcggcgtgcggatatctcactgccggtctctcagtttttaacacccatcctttgtcatgagcctagagtctatgtgttatcaggggagttgcatgctgagcatgtgggtcgcacgacgtgccgttgcgagcggagtctggtcagtgatatgaggggaatgggttcgtgtatggtatgacttatttaggtggggcggcaagagtggtggggtgccttgtcctatgaatagatacatgtccctggcgtgggccggtacagagcaatgggtggtggagccgcagttccaggctccgcagacgcctttgtcccacgagggtatgtatgtccgcagcaatgggcacaggtggggcaaggaaatgatccagttcgagtctccccccgagcccccgggccggcccgcgtagctgctcaggttcgcgtagacaggcgcttcgggcgcggccgccgccggggccagctcgccggggggcgcggagcccgtggccgtgcccgagggcccccnnnnnnnnnnnnnnnnnnnnnnnnnnnncgcgcccgcgccgagctggttctgcttgtgtaaatcctccagggccttgacgaagcccctcggcgaactcctgctcctcgctggccgccaccttggggtagaggaactgtgagctcgtcggcgtggtggtgaccagcccgttggactggatgatgaggcgctcgagctcgggggaggccagcttcagcagccccaggtcgggagaggcgagcaggccgtcggggggtgccgcgctgggggcgccgtcggcgcgcaggggggtaggaggcggcgcggccgcaggcttgagcgctgccgccacctgctcactcaggctcagcgtcagcgcgtccttcttcatcatgctgccggccgcggccgtcgggggcgccccggggaacaagcggcccggggacgcgaagctgccgccgctgccactggcgccgccgcccaggccgctcagcgcctcatcgccgtagaagggtgtttccatcctccgcctcccccgccgcgccggcccgggggggagtggccgcggcctcccgggaaacccgcgcccccccgtccctcgtgcgaattcgccacccaggcctcgctacttagaccgtatacggcccttgggaa

SEQ ID NO: 147834 - DNA, 449 bp, Homo Sapiens
gttgcctttattatatccatttctgtattcgtaccagcacctcgcaaaataattgtctcagcagactcccttgggcaatacttcacagacatgactgtgcacgccagtcacccagagatcatgttaaaatgcacatctggttcagcaggcctaggtttctgtatgttatagaagttcaaagaagacaaactctagccaagagcagtgtgaagaaaagaagatgctatattaatcacagtccagggatgccttctggcttcctggcagcaattccggcctgagattccttctctgtgcatacttcctgtcaacattgtgtgatgtcaagctgtggccgtcacaaaagtactgtgaacacctgtaaatcccaactatcaaaaatcacacccaggaatccaaattagcattattatgtcaaaagaaaaacctgatttcttcactgtcaaaaa

SEQ ID NO: 147835 - DNA, 888 bp, Homo Sapiens
ttttcgtggtttcgtctatttattaaaaaatatttgagaacaaaacctctgcctctttgagtcttgctctggcatccccagcatctctgattctcgctggtgcccccagctcaggaagaaggtggtagtggggagagagggtcaggggggcttggcagggatgcaggcaccatgacttttgtgagcagttcctagagacgcatgggtgtagcctcaggaggaaagcgagaggagctttaccatgggaacgaaggaaagggacaacattgggaggcaaacgttgggagactagtccagaaacttgcagttgaggatacaacagggtcctagtgtttcctccctgggtcagcgtagaagtagagctttttcactgtcgaaggcgggattgaagttagagattgccctggcagaggttggggagagagggactaggaggtggtacatgaatgtcttctctcattctgctaggtccctctcagtggaagatagataggctggtgggtggcttgttctaattggaggctggggaaggagcaaatgagtgccttggagcttggaaaagattatttgacagcctttcccatgatgtggggcccaacaggtagccacttcaagggagggggctgtcgttccatttggatttcggagaactgggcgttctcaagatccttccaggtctctctggtgaggcagcagccatccccaatgtgtttccaggtgggctcgaaaacttgctgccacatgaaggcccagcttccatatggttctgccacatgctcccagaaaaagagcacacctcccggtctcagtactctccggacctcctgcaggaccttccttgggctctgcacagagcacagcaccagagtgcagaccaccacatccacc

SEQ ID NO: 147836 - DNA, 1081 bp, Homo Sapiens
  misc_feature (170)..(410): n is a, c, g, or t
  misc_feature (420)..(428): n is a, c, g, or t
  misc_feature (556)..(629): n is a, c, g, or t
  misc_feature (703)..(711): n is a, c, g, or t
tccccttatttccagggttcacaagcttcccaaaaatgggtctgagccaaaaaaataggaaagtcactgcttcaagattagccacagcccagccccaaaataatacgtctaaaaaaattattaaattggctgggcgcaatggctcatgcctataattctagtactttttnnnnnnnnnnnnnnnnnnnnnnnnnnnnnnnnnnnnnnnnnnnnnnnnnnnnnnnnnnnnnnnnnnnnnnnnnnnnnnnnnnnnnnnnnnnnnnnnnnnnnnnnnnnnnnnnnnnnnnnnnnnnnnnnnnnnnnnnnnnnnnnnnnnnnnnnnnnnnnnnnnnnnnnnnnnnnnnnnnnnnnnnnnnnnnnnnnnnnnnnnnnnnnnnnnnnnnnnnnnnnnnnnnnnnnnnnnnnnnnnnccccctctcnnnnnnnnngttgttaaactgcaaacttcattattttgggggaagaattatgaaacatctgagcactatgaaaagccaatttatggtcaaggtgggttacatctcacacctgaaatggggaagtagaaacagttgcnnnnnnnnnnnnnnnnnnnnnnnnnnnnnnnnnnnnnnnnnnnnnnnnnnnnnnnnnnnnnnnnnnnnnnnnnnattccacacgtgacctcgtgtgacaagtcgcaaagcaccaggcatacaacagtttatgcagcgaccctaagagnnnnnnnnncccagccctcttcagctgcagtgtatcttcttatacaaaaactctgtttcatgcacaaaattatgtgtatgaggcatatacacgaaacacaggtgaattccacgttcagacttgggtcccatccccaaggtctcattatgtgtatacaaatattcaaaaaatgcaaaacaattctggtttcacgcattctcagataagcaatatatatatattcttctatttcgctaataaggtatacgatttgccttctcaaaaatgccttttctggccagacacagtggctcacaccagtaatccctgtattttgtaaggcagaggtgggagtatcacttgagcccaagaggttgtggagagagctgtgtttgcacca

SEQ ID NO: 147837 - DNA, 483 bp, Homo Sapiens
ccccggccttttttggaatatgcaaatagttctttttattattaacattagggtatgtcaaattttaaaatatttacacttaaagacaaaacatttccacaattattacaattggtttcactaaatcagaagtgactacacattatctctacttttataccagaaaacaaaatgaagaaatcaacaaaatataattactaaaactccactgtggatcaggataaaatgtgtccaatattaactcacactttcccaataagtataaaaatgaatataacattgcttggacaacttgtttcaacagcgaatcctctattactatttgttcaataacatatataaattcaaaactggcaggtatgaaaaaaggttactttgttttttgcagatactgtacttgtaaaataaagccaaataaagcatatgtcacacataccaaagtcttacattttgcctttctaatacaagcaagtgaaatattcc

SEQ ID NO: 147838 - DNA, 481 bp, Homo Sapiens
aaaggaaaaggagtgggagaagaaagaatccgcctgagtggacctgactccattccattcatggctccctatttgttccactcctggatcaagtttttaatttaacaagactgcattttgagaggagttttcaaccccatctgtttggggccagagtgtgccccacctggtggtgcaattgatttctgaattaaccgggctttatttcagtacaatagagcgattgtttagttgcttttaagcactaggattcttggaatctgatgggcaaaaaaataaatcagactgcaacgtgtggttctctgggctgctaattgcatctgacccattatcctccacagttctggttcaaactttgacacggctgacttggagtttgaaatgtaaatggaagggctgcttttgcaggtcatcatactgcagaaagtccattcctggaacactttccaaggcctgggtggtaaaaataggtcttcctgct

SEQ ID NO: 147839 - DNA, 564 bp, Homo Sapiens
gacaggtttgttggtgagaaggtaggccagaatttcacctcccatagtggtcaggttccaggtgtctgctgcttgcttgctaatggcaatcaggaggctatagcggccccagttgggcctggtttttctcctccttgcttgtccgggctgggggagcagggccagagctgcaggatcaggctgtggttacagatggtgattacaaacattgggcctcagccccaagaagcaagtcccattccacaatggtggccttcctccaggcactgggggcctcctctctctctggatctgctcagctagagctgagtggctggaatagagaggcagtgacccagggaaacaggagcgaggaaactgtttacttgggttgggctcctggcaaggcctctgctgagtgactcaaatgccaatttaccaaggccttaacaacgatggcctccaggggtagagtgtagggagatgctttaaagaggtaggacaccattgctgggcatggggcaactgaaaactttgttattgggggttcctgattgaagggggaacaccagaacagccttttcg

SEQ ID NO: 147840 - DNA, 577 bp, Homo Sapiens
gtggaggggacaaagaagcagagaaggatgatcagaaggggacccccagcccttggaggagagacggcagcctcaggccgccacaaaggattttgtggagtcgccccaggcctgacggcgttaattatccctggctttcatctttatgctcttgcaggggatgctcaagatgccttgtggctcgacccctgcacggagcccccagcccagcctccccgtgggttgaaaccttgatctgggcctgactgtggctgctctggggacatgccctcgtcctttgctgaagctgaggctccagagggggagtcactgccacgaaggttgcccagaactttccttgctgcaaaaagccccaagacttctccctgccacacacacagcttttgccatcgcgttctaaaagctgacagctttctctccaacactgttctccctgagtagggtaaagctacacttggcttccccagtttcctgtttcctgcctagaaacaaatttttgtcagtctgcttttcaaatgggatatatgattcacataccataaaattcaccactttatatggagaaagacgacaaacg

SEQ ID NO: 147841 - DNA, 1071 bp, Homo Sapiens
  misc_feature (1059)..(1059): n is a, c, g, or t
tttttttctgggaacaataacatgagagtttattatcacatgactactcaggaggggacatgaagcggagcaggatggggaaggggtgtaaggaatgggcaagtgctgctggagcagggctgtggccacggtcatggggccaggataactggggctgttgaagagcctcttttcctcagtctggttcttcttccagcagtcagatgcagggacgcccggtgcagaagcaccaggcactaataatcaggagaggcatggctagattccactcacttccaacatttccttctggtctcttttccctttggttgggaacattctccagcagtacagccacagaggggccagagatgccagaagcagcagaatccagacacccaagagcatggcctgaagggttctgaacaaggccttcagcatgtccatgaaggaggtacataggtgtagccttctgacttcttctggactctgagtgggggctggagtgttccagtcactcgagctggagatgcggcaggcactgttgtaataagagtagccatatcggaaatcttcattccaaagtttgagggcagcgatggctgtggagaaagctgccagcgctagcagagtcctcagcagggcccagtatgtaccaccccgtttctcgtaaatgaaggcagcagctccagccagcacagccacagcccctgtccagatggcagctcccgaggtgacgaggagggtgtagtcgcggatgtagaaaaatcctcctaggactgcactcaagatccccagcacgatctgcatcacccatgaggccaccagcagccggctgctgcccctggcctgggtggcccggggccgcagcgcagagcagcaggtgagcaggagcttggccagggcagactcctggtggatgtgcacatcgatgtgggtgtgctgtggggcctccggggccatctcatcactgtcggctgttcccattgtcagggacacagtctgcgctcctcgggacctgcgagcgggcggcgcctcgtgccgaattcgccacccaggcctcgctaccttataaccgtnagagttactgtc

SEQ ID NO: 147842 - DNA, 549 bp, Homo Sapiens
gagggctagaaagtcttgatttttaatctaacatgaacagatcaagaagagagaaactaatttcttctggcatcagggctatggtggcaaatatgtactgagtctcaggctgaggcaggcactctgctgggaactcgggatgcgacgctgacgaggatccagtccactgggcgaggcaggcctgtgtgtcagtggaggccagtgggccacgtcagagtgggtagcacagatccctgtccaggctccaagcctgaacacattcttgacgtaagaaggtgctctgctttctgagtactatctccaggttctagttttgaactgcttctgttgttgtttaaattcttcttctttcagtgaacgctttcctctacaaaacacctactgcatgtatgtcaggcagggataccatgtgtcgctcacgaattaagcccacagtacacagaaagacaccgtgagctctctgataacggctctcaaagggagggacaaagagaacataccaaatttgggatgtgaatacagcactaactttgcaaagtttaatactga

SEQ ID NO: 147843 - DNA, 393 bp, Homo Sapiens
aaaaccaatctgtttatgggtacgcttttctgatgttacagaacgtctgcgagagagggagttcaagttcccgcctggtctctaagtaacccggcccacaaaggtgcatacacacgtccgagacagaaaaaagcttgccggtcgttccctcctcccaggcctgcaatgaaatgcgctttaattgcattaaagggttcttctcaatggggtttcagaggcgcgagagcggcgttcccagcgagggttcctttccggctggccagcattcctcagtcccgcgcgggtaaggtgatggggctccttcggcaggtcctgaggctcatttccattcctctcgcatacagcctctgttgtgcgtggccgggcctgcagagggtagccgcggctgcctac

SEQ ID NO: 147844 - DNA, 489 bp, Homo Sapiens
gccctggcccgggccctggcccagccccggcctccaaggaccgcgccgaaggagtgtgcccactggagggaggaggcgctcgactttctcaggatactgtccctctcccacagaggagctgaaggagtaggacagaagaactgtcgaattctggaatccttaaagccatgtccaaggatttggtgacatttggggatgtggctgtaaatttctctcaagaggaatgggaatggctgaaccctgctcagaggattttgtacaggaaagtgatgttggagaactacaggagtttggtatcattgggagtttctgtttctaagccagatgtgatctcattattggagcaaggaaaagagccctggatggtgaagaaggagggaacaagaggcgcatgccctggtgagtgagagagaaatagggagacagaagccattgccaggaaaagctcagcaattctggaagaattcagttcataattgacgtttcctg

SEQ ID NO: 147845 - DNA, 569 bp, Homo Sapiens
  misc_feature (22)..(22): n is a, c, g, or t
  misc_feature (34)..(34): n is a, c, g, or t
  misc_feature (111)..(111): n is a, c, g, or t
aagttgaggccttctatcagcngaatcctgttcngatgaggtcccagttgtgtcagcctgggtagcttgaatgctcttacaggaagctgggtgatcctgtttttgctcagncgaagagttagcagcgaccgtgacagaccatcaaatgctcccaactccagggtgccaatccgattgcctgccaggttgagctcctttataggcggtccgtgtggaaagcaggtgttccgcacttccgtgatgttgttcaaactcagatctaacacttctaaggaaaggtaggccttcagctggctcccctccacgctgcgaatcttgttgtgctgcagaaagagagagacgacatgtgatgaagcagcgcccagggatggtaccgctgtcaactcattattattgaggtacacttcctgtaggttcggcaagtcctcaaaaccagcagggtcaatctcagagagtttgttgtaactcaggtttagggtccgcgtccaggagggcaggtccccgggcaacgcagccagcccgcgcccaccgcagtccagcgagtccccagcgcaagtgcaggcggccgc

SEQ ID NO: 147846 - DNA, 335 bp, Homo Sapiens
  misc_feature (323)..(323): n is a, c, g, or t
tttttctttaaactttttattacagaaaatttcaaatagagtatacatgaagtaaatagcatacatgagccatctatcaaccgggtgtgttgataaaggtagctggcttgcagtgctgtccggaggactggtgataaggtgggcagagcctgtgcccagtgcctgggacgcactggcttaggaggcatggaagctgccagatggtggtgaagatgagatgatggtggtgacattcgggtcccagtctatgctttccatctctcttggtaggctaggagctcctccccaaagcggctggtgttgcttcctcctttctcctcctncctgtttttatt

SEQ ID NO: 147847 - DNA, 355 bp, Homo Sapiens
ttttgcctttaaatggatgttactttattaggagaagcatatggaaatgatgacatctctgatgtctcaaatagagactggagacagcaatcctgaatgtatgtgggtggagaacaccctggtgtctcattttgagtggagacaagggtcagatgacccaaagagccttcaccttcacccttcacagcccctggcttgagtgctgggacagcagtagactgattgctgatgtttgggcactgctgccaacatcacataccagtgctgcccctgaacttggacatggagatggcagaggtggatgagatgggccatggaggggagagctagatggaagagggagggaaaaaaatga

SEQ ID NO: 147848 - DNA, 710 bp, Homo Sapiens
  misc_feature (338)..(338): n is a, c, g, or t
  misc_feature (429)..(429): n is a, c, g, or t
  misc_feature (494)..(494): n is a, c, g, or t
  misc_feature (512)..(548): n is a, c, g, or t
  misc_feature (551)..(551): n is a, c, g, or t
  misc_feature (573)..(573): n is a, c, g, or t
  misc_feature (592)..(592): n is a, c, g, or t
taaatttaagtatctattattttcataggaatgacctactcctttgaaaaggccattttaatcccaaatttctattactgtttatcaaccaaaaacattgttcagtaatgcctcatcactatagaagagttgtcccgatgcttctctttaggaatcatgtcaatttgagttatagtacatgctagttagatacagttgctgaagacattgaatcttttcaaagatgtccttaaatgctatgcaagagagtaattataacatgctaatttgtagattctctatttttatgttccttgttttgcctctttttgcctctggccttcggcagaattctgtcncttatcaaaatcacttctgtgtccaaaatcccattcttcagtactgagaaatgagcccatatggaacaacttcattcaacaccaagatgtnccttgatgcctgctcagttttgtggcaactgtggatcactgtgtaacctcagtcttcgtggcttntcatttatggggctctgnnnnnnnnnnnnnnnnnnnnnnnnnnnnnnnnnnnnnagnctgcatcttgtgaaggtcattntgtttcagcacataacctnttcattcttgattttgacatcttaggcaggattggacttgaaaggatatttactctttggctgttgtcatacagctattagtttcttttgccagggcccgcgccccgcccgtttccgg

SEQ ID NO: 147849 - DNA, 635 bp, Homo Sapiens
  misc_feature (530)..(530): n is a, c, g, or t
  misc_feature (615)..(616): n is a, c, g, or t
agagattgtgggaaaggtgaggcctttggtggctttgctagacacatactgtacacaaaactgatttaataataaattcttaaaaatgcattgaatccttgagccatgacgcaggctacagtgctcaccgatccaggcctaggaggagccgcttcttgtcctcctggccgctctcgttcttcaggtcggagaagacctgtgtgaagtagtgtgggtcggcatttatctgcagcatctttgagctcatgaggttgatgacagagaggcaacggtcccaaaaggcctccttgcagctctccaccaggaagggcttgagcgggtaggagatctcgttgcccatgtaggagtaggagaggtacaggcatgtcagcaggacggcctggagctcgtgatccgagcccacctcggaggagataacatccctgcagagcatgtagaggaagaccacgttggccggcgtgatgaagccctggtcctgccagccctgcagaagcagcgaagcgttccacgctgcgcagccagagcacggngtccgtgggggacaggtgcttcatgcggtagcaccggcggcagagaaactcacccaggcagcgaagcagctcactggtggacgcnnctgacgatgaccgttttgc

SEQ ID NO: 147850 - DNA, 489 bp, Homo Sapiens
ttttttttagttagtgaaaatatatatttgccaccagaattcactgggaccccagagccagcagatgtggttggaaagatcctctgctctgtcctctggcctcctgctgcatctgggccatcagttggactggaggagctggacgggcacatagttttcctcagaggcaccatcctcatcctccttgggaggggaagccaggacagggttctcgagagttcgagggacacctgcccctgacgggtcctcacacagcgtaggcagcgtctgctcccatgaagcccagttcacctcctccaccctgagggcaacagagcagctctgaggtttgcctgctttgaccgcctcccctcccaccccggagaggggcgtggccccccaaattgggagactatgcagagatgctctggtggacacagaggccctgaggaggacaggctttttctctgcagggttctgggccacccacttggagccctgtcctgtgag

SEQ ID NO: 147851 - DNA, 620 bp, Homo Sapiens
tttgagttagtgaaaatatatatttgccaccagaattcactgggaccccagagccagcagatgtggttggaaagatcctctgctctgtcctctggcctcctgctgcatctgggccatcagttggactggaggagctggacgggcacatagttttcctcagaggcaccatcctcatcctccttgggaggggaagccaggacagggttctcgagagttcgagggacacctgcccctgacgggtcctcacacagcgtaggcagcgtctgctcccatgaagcccagttcacctcctccaccctgaagcaccagcgctcatccgggctgccatctggcttagtgccaacggtcagcatcacacctgcccgctgcttcttcctgcaccaccaatagccattctccatctccaggacagagatggctttctgcagcttccagatgctccagctgtcagtggcgacactgttgacggtctcgctcatgagggcgatgagcatgttgagcagcaggatgtaggtgagcagcacgtatgccagcagcagcagcagcaccatgctgcggaagtgcagctgctcctggtaggccagctcgcccatgccgatggtgaatttgaagagctccaa

SEQ ID NO: 147852 - DNA, 580 bp, Homo Sapiens
tttagcatggagtaaaacatttattttcaaatgtcatagaaacaatatttataagtcctcttctccacctcttgtgtggtggtgtaagttcaatgaaacttgggcacctctccccttttgctgccgctgtaccactggaccgaagggctcttaaattgtttccaggactggggatggagcagtgctggttcttccacagtttcctcacaggatagccacatgccactccggaagctccggaaggagaaccggtcatccccagtctcccagttgtattgtaccacctcctgggtggatgtgttggtatctccatccagggacactggcatgtcaaagcacttggctgccagacctttctcgcacaggggcttgggcaccttctgtgtgcccacaaaccagtagttgctgagcagggatgttgtggagaagctgagtgatagcatgctgaggatggcagataggagtgtccgctggccagagaaggccttcgagagctccatcttggccatggtcagcgtcttgcagcttgtctggaagaaccgaaggatgccatctgcactccaagtccctttggtttccc

SEQ ID NO: 147853 - DNA, 346 bp, Homo Sapiens
  misc_feature (230)..(242): n is a, c, g, or t
cttcacttaaagcccttcaaactgaagacatcacattcactattagcatggagtaaaacatttattttcaaatgtcatagaaacaatatttataagtcctcttctccacctcttgtgtggtgatttactgatttctctctttctttccttctttttcttcagcttgcttcccatccagtcatcctttttcacaaacattccctggggcatcttgctgtcttctgcagagnnnnnnnnnnnnngtaggaacattcccagctgtgggaatccagaacattccaaagtcatcttttcttttgttgagggggaaggtgggttccctgctcatagggtgaggcccaacctg

SEQ ID NO: 147854 - DNA, 1144 bp, Homo Sapiens
  misc_feature (55)..(95): n is a, c, g, or t
agaaaaccttgttttattcagcccagacctgggcaatctagctctgtggtatggnnnnnnnnnnnnnnnnnnnnnnnnnnnnnnnnnnnnnnnnnctgtagagaaaagtgaagtataaaatggggtctggcatccggaatccctgtggttttcatccacgttcgctccctgaggccggcagggagggatgcccctccgtgcctgtgggttgggggctgggcccctcggcgggaggctgcccggggagcagggcctgctttggaaggggagagattggccatctgtccctcccggagatcaggattggacaattttgcagtttgttgcagaaacgtagcgacctgtgtagtgaatgttgcatctcaccacgttgttggtgaagtcagactccaaaacaatatactttgggttcacgtgcaccttgaggatgtagttcccaggctgcacgtcggttatgtcgatccactggcagtcgatgtccgcattgtaggtgtcatagcagcctgggctcaggccctgggtatgagaggtgcatgcatagcgcttgaggttgccgaagtcacaggtgctgtcctccaggcagaaactggccttgtggccctcggccaccttcttgcctgtggctgcatccagtaggtcgtagtggctgaactcgtccatgctgtggtaatgctggtggcagctgtgccactcccaggtgtgccgtggccggttggggaggaagtctgctgtgccctggttcttcacgcgctgggggaagcgcagtagcacccgcacatcgtagtcggtggcctcaggggcataggctgtgctggccagacacttctcctccgcagcacagcgcagggagtacaggtgggctctctgcacataagtggatgcttgcacatagttggggtctgggaccaagtcagggagaccgcggccgttctggttgggccggtacacgctgcccacgctgaggcggccctgctgcgcgccgttccgctccccacccggcgggggcgtgtcggagctgcgcaccggcaggtagggcggctccagcgcgcgcggcggcccgtacgcctcgggcggcgggttggcgtagggcgggtaccagcccaggcgtgggtctccgccatgggcctgcgccgcctcgggaccg

SEQ ID NO: 147855 - DNA, 352 bp, Homo Sapiens
ttttaccagaggtgatgtgctactttattgaccactcttctgactgaggcttttacactgctggaacctttgcaatttaaatttttggagccctttgtaaattaaatttttggatagtctgcatcaagagggcttcattcgtccatccatgctctcgctatactgagcgacgttacaccggggagcagagagtttatcagtctgggacgatgtttttccttccctttctttttcttcgtggctgacttccttgcgccacctgagtgcggttatcctaagctctccccttctgcagtctaacgcctgccccgcacaggctggagctgtatcagcccccactggcgtggcgctt

SEQ ID NO: 147856 - DNA, 456 bp, Homo Sapiens
tttgggtgaaagcaatgacaacattgtttattttgctcctaaatcttccatttggtggagggatccacatggatggctcatctatgctccacctggctcctctggggggcctcaaaggttggaccatctgaaggctcgccagctcctaagattggtgattggtctggctgtcagcggagatcttagctggggcagtggatctgaacatgtgcaggtggtctcttcatgtgctctgggcttcctcacaggatggtggctcattgggatgtcatgaggcttgcatgatggagttgattcatgtaaatcagcagttgcagggtctggcattggacagatgagtttagggctgtgggctgttgactgacccttgggcttgagtgacatgtgtggctccatcctgaagctcttttctagcagtgctgaggtgggaggagggacttgactctgcaggtgggg

SEQ ID NO: 147857 - DNA, 375 bp, Homo Sapiens
tttgcaggatgaaaaagatttgcttttttactttctacttacagtcatattgtagctcatttgtaaaaatcattccacttgtaaagttaaccatccattagtcagtaagagctgttcccactaattggtggactcccttccttcccaggattgcatttgcaaaacaaaaattcatgcttaaagcaagcatcagggggaatccattgttctgcaccctgccacaaaaatgtctagtgcatcatcccggggataggcctgggagccgggactccatggttcgcagccaagggcagaagctggaggcagggctgtcccacgggcagctacagcagccacagacggggccatgcagcagagtccagatggttttgttcg

SEQ ID NO: 147858 - DNA, 807 bp, Homo Sapiens
ttttttccattcagggtattttattttcttaaagtagacaacctttgactttcatccaatccccagcttctctttcccccgtacatctcttcacgtccttggctgtgattccgcacactgacctcggacacacagctactgcacggagagagggagggagatctggcaagggctccggcagtgcctctcctctccatggcgcagttcgtatttacacacggcccttggcgaacgtcctttcaacgcagttgcccataggccctgggacaggaaggcccagatcagggtcccagcagggcctccctcaggccacaacgctggctgtgccttcacaggagtcagagcatttccagccagtctcaggcgcggggcatgctgggaccaggggcaccaccccttgctccccttccttcactcagcaaagccacaaataatttactctttaaataccaagacacttagctattgttcatttgctcccaggtgaaagaaccttctttaaatatgtcgtgtttattttcttacataaaaacaaagcagaaaaccccaccattaacaagaggacactgcagaggcttatgtacaacacgtgtcccgcgaggctggcgcaggactgccactcactccaaaatttctttggagcagagagacagatcgtccagataacaacttttacactcagcaagccagacacaaaaaagaccacctgaaaaaaaatatgttttgaaaatctgcatttaaaaaagaatactcaactgcatttgaaattttctggatttttttctgcgaaacaccacgagatttggc

SEQ ID NO: 147859 - DNA, 399 bp, Homo Sapiens
catagcatatccacgcaccgatgttcagtatatattaaatatgtgagaaggacttgattcaatccatcatcactgtgaaacactgctcaaagtgaatacatttgggagagttatgaggaccaaatgcatttacgaacaaagtgactcaaatacatagatggatcctggacttctgtgaactcttccactcaagaattctacccaggaggattagagatggctttatctctgttatgtatgtagagattcctattgttgggtaaattttctagtctgttttatgccagatccttgtctctcaatttaccactctaatagtattttctcattcagcatacatttaagaggaaaatgatgtatatttgcatatattaaattactgtcatcctttcttagaaa

SEQ ID NO: 147860 - DNA, 471 bp, Homo Sapiens
tttgttttgttttttacagagagagagaaggaaaacattggaaagtattaaacaataaaccaatttgattcttacgttttaacaggatcacatgactgccatgtgttcatcaaataattttattgcttcccttaatacatagctacatgctatttcccagtttcccttgctagacaggactatgcaactgacttctggccaaaaagaagtagtcagaaatgatgctactctacttccagtcccggcctatgagaaaacacatacacactctctgccagatgcagataatccaatatgtaattaattccatgttgtaaagaaaggtagatccactacacggaagaattctgggaccctgaatggccatgtggatcagagctccttcacctactcactgtcatgtgagaaaatgacaaacatttattgcactaaacctctgagactttggagttgtttgctaagcagttagtg

SEQ ID NO: 147861 - DNA, 390 bp, Homo Sapiens
tttcctgtagcgaactgcatccatataatttatttcacagggactttatttcttgccatctcacatggcatcacactggtccattatgctgatggcaacttgtgaaaggaagcaccaggcatgctctgggggcagagtggggcttccaaggcctcccgagcccagcgggcctggctggctctcaactgttctgctctcagcccctgtggggctggcatggggctggacaccagctctcctccctcttcccagaagcacccgcatggctgtggcagctcacacctaggcctccagcatgtccagaggaaagcttcactcctggtgggagtccaggttagctgaggatgggatctcccacgagcggccacaatgggaccctggcacactctg

SEQ ID NO: 147862 - DNA, 291 bp, Homo Sapiens
ttttttagatgaaatctattaaagtttattagccccatctcagaatacagtaacatctcactgcttcagttcctctttaaattgagcagctggtttaactctattagctttgaggctgagataaactggagtccacaggagccatccacagcgctacaggatagggagcgtcctcagaattcagaaagcagttgtcaatgggctggagctttcagctgataaggaggcatttctggaattgtgagggtgttggcctaccaccaggacttggggcaacttgagttgtccaat

SEQ ID NO: 147863 - DNA, 368 bp, Homo Sapiens
ttttggctagaaaagctggcttgttttatttaattctcacaacaactccacttgacacttccgaattcactttacagatgaagaaagtgatgctcaggaggtgatgtcagctgcccacagtagtccaggtgatcagcagcagcaccaggccaccacctgcttcagcccatgggctttctgcatggctgctcttggatcctgataggtcatttgtttgatgcttttgcttcaccagagcgatcatttcatgtttagtttcatgactaggaactggcttcaaaaacaacttctagtgagtcaaaaacagccaaaatggcaaggacggaaaaactccatgggtcagtagaatcataaaggggagagtgcgt

SEQ ID NO: 147864 - DNA, 545 bp, Homo Sapiens
ccttcccacggaccctgccccaccttcccccttctccttagagattcgcttttggaatgagcggtagaagttaacacagatgccatatcgcgtgactccagtgtccttgtcagtgagggtgaagacaaaagaggtatcatcccgaaggctctatgcgccgtgccgcacgctcagtgcaccctcgggctggcagaagatcactacatctgggggcaggggaaactcagtgtgatcctccaaggggtatcgccgtagcaattcaggagtcttggccatgctatcactgctcgggttcctggcccctacgatcactagatagtcaagtaaccgaggacagaacttcttcttttgcaccatggttccaattcatcagtttatctcagagaagcatcagggcaccaagcaaggagtcagcattcccaggaggaattctgaaaatcgaagtgcgctttggcggttctcggcgtccgagcagggaagccggctgccgagcggtggagcctaccattcctgggcagcgggggtagaggggggcgcgcgggctc

SEQ ID NO: 147865 - DNA, 363 bp, Homo Sapiens
  misc_feature (274)..(275): n is a, c, g, or t
  misc_feature (280)..(281): n is a, c, g, or t
tttgaaagaaaaatacatgaaacagttttatttgggaagggagtggtttagggaagactcgaaagtgacaatggagctatcaagttcaagaaggagttagtaggggaggaggctgcaggaagaagtgcacgcctggaggcaggaacagcatgtgtcccggtagttcagggtggcgggcccaggcgggtgagaaagggcaatggagaaggaaggagaggagaccgtgcagacactgcaagtgccagaaacccgatccacactggttagaggtggnnggggnnaggggtttttcttggcttccatatagaaaatgtccagggacctaccgactttagattcagcgcaaactcatctgggcccggg

SEQ ID NO: 147866 - DNA, 954 bp, Homo Sapiens
acttgatctaaattctagaggacagctctcatgcctattgatgcatgcatggaccattcagggaatacactgaaatgtccaatgacataatcagagacatttaaatgacaaaccaggaaaatacattctgagtttaaatctagaaatcttctctactgactgctctctggacccagagactaagttgatagcttgttctacccattaacctttgtttttattttgttcattttagttgatctggttaatgggggcattggctaaggagcatactccagtgtcttggtattatcctcttatagtcctcattgcagtctccctggtcctggtgcattgtattctttcaagggtattaaatgtatatctgtagccattaaaggtatgagagaaggtctcactgtggttagggtgacaaaaatgggtgaacaacaaaaggaatatttcttccaggagcctgatgttgtgactcaggagttttgtgctgagaagaagaaaaaccagccatgatcatgacagggagtggtgtttatggccatgttgtggtcaatctatcataacaagaggctgataggtgaggaattgctaaaatatttttttaaattgggaggtcatgtataataattaaaaaatatatatataaattgggaggtcattaggctggaatggctcctgggctttaagttcccactaagcaaaccaaatcccagcataaaacagtgaaatgaaactagcgcctttatcagtcagaaaccaccaacagaagttagtttgtggttgctgactggtaaagactctagtcgatattgaaatacgttttctttgccttccttctgcatttagcccataaacttgctgtccaagctgctgcagcagtcttctgaactgcttctggttctgagtgctgcccaactcatgagttgttctgtggaccaaataaactctgttaaatttaaa

SEQ ID NO: 147867 - DNA, 607 bp, Homo Sapiens
tgcaggcgcctgcatgggcagcttttattgttgatgaccacgttatcttcctaattataagatgtggggagacctccggggaagttcttcatggtagaagggaaaacccccttcttggctgtcaggagagaatcccacagtgtaaagttctgtcgcccccagccttggtgcccatgtgtgcccagggtgtgtggatagcaagtatctgccagctgctgctgctatgacaaacatctccacttctcagtggttcccagctgctcacagggcggctgctgcctgcggctctgctggctcagctccgtgcagctgatttggccccagtggcctttgcattccaggccccaggctgcaggagaatctgtctgggctgtgataatgttcgaacggaggtgtgggaggcagcatcatggctcctccaaaatgtccacacccttgtccctggaagctgtggacatgtgacctcctgtggctcaaggggctttgcagggtgagtagagatgttgagatggagagggccctggcacctgaatattcacaaggggtggcaggagggtcggagccaaagagcagcgtgacagtgaaggtggaggctagggtcagctgt

SEQ ID NO: 147868 - DNA, 624 bp, Homo Sapiens
  misc_feature (586)..(586): n is a, c, g, or t
tgcggccgcctccggccaggacgctgggagctgcctgcgggaaggtgcggggagcggagccatggcctccggtgcgtataacccgtatatagagataattgaacaacccaggcagaggggaatgcgttttagatacaaatgtgaagggcgatcagcaggcagcattccaggggagcacagcacagacaacaaccgaacatacccttctatccagattatgaactattatggaaaaggaaaagtgagaattacattagtaacaaagaatgacccatataaacctcatcctcatgatttagttggaaaagactgcagagacggctactatgaagcagaatttggacaagaacgcagacctttgtttttccaaaatttgggtattcgatgtgtgaagaaaaaagaagtaaaagaagctattattacaagaataaaggcaggaatcaatccattcaatgtccctgaaaaacagctgaatgatattggagattgtgacctccatgtggtgagactgtgttatcaagtatttctccctgatgaacatgggtatttgacgactgctcttcctcctgttgtctcgaacccaatntatgacaaccgtgctccaatactgcagaattaagattt

SEQ ID NO: 147869 - DNA, 596 bp, Homo Sapiens
  misc_feature (524)..(524): n is a, c, g, or t
ttttggtttcaaataggaaaaatatttataatacataaacagacaaaaggttttcttaatttacaaagagctcgtataaattaataaaagaaacaacagaaaaaaatggctgaatacgatgaataggatgtttagatttttaatgaacaataaacatgtaacagaatgcgtagacctactgaattttctaaagcaagtgaaaacaataagctaagtatttttttcaacgagactggaaacattttggtgaagttttggtaaaacccagtgatggcaaagggcagaggggaaagaaagttcctcttaaacatttcttatgttggcatactttgatgtagccttccttgggaacaatttcatagcatctctcaaaataaaaactgtacatgcccatactcaatggtttcaatcctgggaatttaacctgtggatatactaacagaaacaggccagcctatttacacaaggacgtttgctacaaaaacctgaaccagtgagtagcaataaagggctagttaaaaagncttcggtatttacatagaacatgaatatgtgcattataaagtttgaggtagcatctatttatgccactgtgg

SEQ ID NO: 147870 - DNA, 189 bp, Homo Sapiens
cttcagtggtgacttccttccctttatcttttttcattcttcccggtcctctgccctgatctgtgtaactcttatcttgggtacttgagcagacggtatattccagaggtgggaggtgggaggggaagggagaaatccaaaacaaagtgttcttgctctgacagaatattaatcttgtacgcttggaaa

SEQ ID NO: 147871 - DNA, 420 bp, Homo Sapiens
  misc_feature (243)..(251): n is a, c, g, or t
ttttttttcaaagtatttcatatgcctttttatttcatgtcaaatgtaatatccaaacaatgttgaggtatttccagaactgcctatttggacatttaaaatcttttgaatattcttagttcttggcccgctcattcacatttgagagcacatgacacaagagggttcccatagcctcccacaggtaaaacttctgcagtgacttccaggctactgattcagcaatagagacaatattctgannnnnnnnnattacatttcccaggataaagcctgcagggttttgcccagattacatttctgttcatggagtattccagtgaggcctctatctgagttagattttcattaaacatcaccaaagtgaactctcattgaatgctatttggctttgcttgggaaaaaagacacaagcctctc

SEQ ID NO: 147872 - DNA, 657 bp, Homo Sapiens
tttttacaatagcaggtgagattttactgacatttcctgtgcagatttccaaaaaagaagggaaggaggtccaggccctgcccttagagaacccaagtgcgtagggccagatcattacctctgacaaattataatagggcccaagtgtgtgttttgaacactcatactgggagggccaggcgagactcccagaggaggtggcccctggaagattagcagaactttcctgggccatgaggtagagaactgaaatcacaaagaaccgtcagggccagaaggaggtcagatgccaacaattgcaggtccctggctcagggtgactgtagcagcagagagggagtggtgatgctgcctttgctttcttcctcagctgctgctaccgaaggtctgttcaggcctgcgtgtttcacttgacgctgagggaaatgagggaagcgagccttgttttcttccacactcgtctctattggtagcgcaaagcccaaccaccaaaagggtgcttcatagttccacagtgataacaacacaggctctgcactcagatgggcttgggtttgaatcctggctcctcaaccaactggctatgtgaccttaggcagttcacttcactgagactcagtttcttcatcacaacctgctctggcaccatgctgttca

SEQ ID NO: 147873 - DNA, 444 bp, Homo Sapiens
cattgccaaaccttcagccagagttccatacagacccatcgggccagcggagccagagctccagccagagcctgtccagctagcgcaacccaactggagcccacagttcatccggccaccagagccagagtcccaacactagtccaccaccaaagcgccacaaaaagactatgaactcccaccactctcccatgcggcccaccatcctgcactgccgctgccccaagaacagaaagaacttggaaggcaagctgataaagagaaaaatggccaagaggatccagcaggtgtacaaaaccaagacgcggagctcaggatggaaatccaactaatgagaccgcactccttggcttgttcctgcgtgtttcacccaaaggagaaaatgctaggatgaagtcaatcttcttgcaggaacatgttactatggtgatttctacgcaacac

SEQ ID NO: 147874 - DNA, 586 bp, Homo Sapiens
  misc_feature (479)..(479): n is a, c, g, or t
tttataatggaaagaattttaattacaaaagtaatattcgaaaatgaggtaattaaaaatgatacagttgactcgaaggcgaaggcttaggaataagacattcttggaatggcaaggaagtctatctctctgagaggcagttccagcacctgtgagctgaaggtgtgcctacacccatgcaattgttgggaggaaaaaaatagggaccatagaattcatctcgttccctctctctcagacctttaagctgaaagggctgagccaggaaggcgtgctgtcatttttatcattctgcaaaccgagttgctgggggcccgaaagccttgtgtttagaagaagcgtgctttccaggtaagcagagagcggcggagccattcgccatcagaggcgttaagtggtttctgaacggctgcagcatgattaaattaaccacttaaccaaattgctttctattgccttgatcagatgcaattgcaagnagataaaggggcttaatgtgaaaagcatggctggcctgaggactaatgaattaactgttcccttccccacgcagcctcctgcctgctggcacccagcggctcacggt

SEQ ID NO: 147875 - DNA, 415 bp, Homo Sapiens
tttcacatttaaaatcagcttttatttttattcaaaatgcaccactttattttccttaccagacagccaagcattaagcacgttccagtcacgtgacttcttcagcgagcccccaggcttccactccacgggagtctgggagctcctggacagaggagtcctgagatttcaaatagtcaagccttctccccagccacaagttcctttgatgcttgggttactgaacacaaacgcaatggattgtttgtcttcaacataatccgtttctgttcctaaacgtgttggctgcgctttctttctgatgagcacgctgactctaatttgaacttcatcaaaatcttctttgtcgtcgtatgttctagagtataagaaaagccaatacggcccttggttcggacatcaactttcttttaaa

SEQ ID NO: 147876 - DNA, 432 bp, Homo Sapiens
ttttttgctctcaaaccgtctatattcaaactctttaaagcattcagaggctccagcttgggatcaattcagagctgccttgtcataagcattaaggcacaataagggaaggaacagtttgtctcttaatgaagtgtgattccaaacagcccatggcctcgggaactcgcccagcgcggggtagacattgcatctgttcattgcatcttgttggagaatcagcttaacaatgaagggacttggaagagaacagaatgtggacacttaggagccaaagggcctcaggcccacaagggactgcctcctgccagctttccctccccattgccttgatctctggagacataggaggtgggagccacggtaggaggctgttaatggctgttgagggagctggaagccaagtgcattttctctgccatgttgcatcat

SEQ ID NO: 147877 - DNA, 931 bp, Homo Sapiens
  misc_feature (50)..(98): n is a, c, g, or t
  misc_feature (633)..(668): n is a, c, g, or t
aatccgttggagacagatcatctcccacttcaaaggcaattcaattgtgnnnnnnnnnnnnnnnnnnnnnnnnnnnnnnnnnnnnnnnnnnnnnnnnnacaagtaagcgtctatgcaggcatcacaaactttggcggatacagtagatatgtatttctttgatgctgaaaggtcagtccctaagacaaaatcaaatgtctcaaagaattaaaagcaaaatgcatgtgtcttcctggcaaaggtttccatttgcaatgtaatctgcatttctacaaatactcaatgtccaaggccactagagggtgaaaaaccagggcagcgtcttccagcaggagtcagggcaaacccagagccaaaactccatcctcagcccaaccttggaggcccagcagctggggcttgagaagtggggcccaggcaacgccaggccctcactgcccgccaccctctgttgtgctgggtgcttggggccaggggatgggcctgcctcttcctgagccccgggacaggctgctgccgggtctgctcaccttctctgacccaagtcgaagacagcaggcaagaattggcatggggagactcagtgctgtttctgagtttcaagtatgtctgaggtgtaggggagtgagtgannnnnnnnnnnnnnnnnnnnnnnnnnnnnnnnnnnnttacatgctcgtgcaccttatggaggggaaggccagattctgaggctctgaactttttgcagtgtttaaaatagactcaggatttatttattttctttttagctttatagcaattaattggctattgattggttggaatgttcaactctccatttcctcaaatacaataaaatagtttcattaaaatgtattcatgcttgaaaagaagggcgccattaaatggtttcctttctgttccactccaagggaaatgcgccgtttgt

SEQ ID NO: 147878 - DNA, 382 bp, Homo Sapiens
tttgaagtgtctctttttattgaaaattggactgtgtgaaacagggtcaaattaagggagctttctcagcagtcacctgaggggcctcttctctctaattactaggatcgcaccagatgactccctttgttctgcctggcttctgaaataacagcttcctctccgaagttgcaggcatgcaaaacacggtgttgatctggtattctctgaagtggttaatcttcgagccacactgggaagttcaggccaccccagtaactttcatcttgggagccacagggatgatcttcaactactgtttttccctccattccaattcgcccggctaattgacaaatgtgcgtcctgtgcatgagctgcgaagattttccatgatcagcag

SEQ ID NO: 147879 - DNA, 519 bp, Homo Sapiens
ttttgatgtttaacctcattagtatgtaaagtttattacataatatctgacactaagtgttcaatagtgtcagctatgatttttgtagaaagtgctcaataagttatcatcatcatcactaatatcatgaacgctgttctttgatgcttttctcttccctccatccatcttcatcatggcaattccacatggtctgtattcactcctctcttctcttcctaataaaatttctcctttagcaagagcacccatcgcaatagcatcaagacactgctctgcccgtcattcccctttgttaactcatgctatggtagtatgccactgttaaattattgatgatgaattggttgatcccctttgataagccccaagggcaggcaatacatgggacagctacattgaacagcaggaggagagtgaagacaggggtcagctgcagcttgaaattgcatcagacagaaagctaagcttgagatcttggttagcccacggcgatctgagagccaagaggtggggtag

SEQ ID NO: 147880 - DNA, 451 bp, Homo Sapiens
tttcattgtttaagtgaagggcaatcgtatttgaagtaatttgaagattgacaggaaattcataaagggaatatggagttccgtttacaacagcaagagatgccttgtccatagcttcctgacctctggaagaacagaagttgctgctggcagagttccaaaacatgaaaatgtaaaatggaattgaataatctctcctaaatcaattttgtgagccaaatgacctagagagtgatgtgatacagtgcaggtagacgacacagggcgctgctgtctgctgaatacatgatggcagttgattctggagataaccaaataccagcttccctttggtctctggagcctggtttctaccattagcctccacagagcccatcttggggaggtgtgcctcttttttctggcttcggtgtgctgattccagagtctgttgtgagggtcaccttgctgg

SEQ ID NO: 147881 - DNA, 276 bp, Homo Sapiens
ctcaacaaattctgagcaactgccttttttcaagaattggtctcagcacaatggttaaactggtgattaaacagatgagtccctgctttatgaaatttacattttctacctagtgtacattgttcactaaccctaacatgagtcagaaataacatgtaataaagaatggcttggttatatgcattttctcaaaaggagatacatagaaaacacttaaaagagcccaacctaaaaatctgttacctaaagtaagacatcccataattttcttcaaat

SEQ ID NO: 147882 - DNA, 529 bp, Homo Sapiens
ttaaagatctcaattgggtttattgtgattctagcattgggcaacacttccttctataaaatagaataagtgttctaatgagtgaagcagaggagattggctttatagacagaaaaggggttggataaagaagaaaaaaagaacaaaaagtggattggtctcagttaatagggttgctccagaaaaaaagtggattggtcattttagggtggggacagggagatagaataatggaaaaataagctgattggttaacatcaggttacttcagatgaaagattaaaacagagagagcttcatacgacgtcagttgaaactggcctctttgggaaattcattctctcgatttcttgacagctcaatttcggtttggtgagcatgagtgactcctttataatttttagtctggacagttgggcctggtgttatgagatctttggggtgtcacttttccagccagagacgtctgtggctgatggcgcccttgcctgagttttacttgggcccactgggcttgatctgtccatgg

SEQ ID NO: 147883 - DNA, 1654 bp, Homo Sapiens
gtttaatttcttaatggttcaacaagtgtttattgagcagccacatctgccaggtcttgggatagccagtccctgtgctcatgggcttagatcctggcagaggcctagtggagaggcttggggtgggggtcggggcatggaaggctgtgctattggccagggactcagaacacaggagagtgcaagggtgacagaagtttctttcttgggcaaagaggcctggaatggtggcttgaatctcagccatgccttagccttcccctctcagccagagaagacccaggtctccctgcccagaggtccatgcatagccattcattcgttgattcattccttaaccaagaattaatgagtgctactctgtgcagggcctgtaagagcatgggctggaggaggcagctcaggggccgggcaggggtgttggctgcaaggttacaagagaagggtagcactctcagaggcctgcttgacgggcgcctgggactgggctgatggggggcctttctggggcacagggtggtgggaatgtaattggagaggcttccagaggcacttggacttgagaggcctccatggagcctctgacagagtccccagggggaacacctgctccaagagtctgggctctgctttcccctgcccccaccacggaagacatgtcaagctgggaagccatggaggagaaggggagggcaaaaaagttgttgagccactgggataaatgggaggagccccggagggagcggctgcgggatcgcacagcccctcgtatccggtggggtgggctgatgcccctttgcagctgggcaggatgttcctgggcattggcaggatggttgaggggccctgtgatggcaggagtgctggcttggaccacatggggagaccaagtccgaataggggcccgatgcaattgagggtgcaagcggagggcatggcgaaggcggatggctctctgtgctctgtacaacaggtagcggatcccgcggtggacggcagggcgctcctggtgatcaggaggctcgctgtgaggctcagcatcgggggtggcagcctgctcagcgggctggtggggaggccaagctggggggtggtatgtgccacagggcaggctggaggctccttgtgctctcagcagagactggactggcgaggagtgggctggcgaggagtgggctggcgaggagtgggctggcgaggactgtggctcggcggtctccatgggctccatgcactttccaatacagaacctcagactgagggctggaagagacctcaggggccacccagtccaacctttcactctattcagatccccttttcccctggacaggtgatagtccagcctctagtaataaacctctagggacagaagggtcactacccacgaggccacctgtttcactgtggaatggatttatatatctttctacatggatggagtcaaacctcacttgtttggcccctatatagctgccctgtggcctgacaccccttcactggcccccactggctgtaataaaccaaggaatggattcttgtccagccctcctcactgaggacttagaggacagaaaatgcataaggaagctccagacaaaggtcttggacattccagaaaagagcctcgtgccgaattcgccacccaggcctc

SEQ ID NO: 147884 - DNA, 990 bp, Homo Sapiens
gcaaatgacacgccaggagcccaggtgagccggagtgctctgcccagcctggctgcagttgttggccagagctcagagctctcctgggcctggcagatggctctgcatgcatttctttttgggactccgagaactaaatttgaaaggggtgggggtagccccagggagaaccccctttcattggtcaatcttgagttcaaagaaaaccagaggtctgtcttctgcttgggggtcagcaaggttctcgtccaggcccctgagggtgctggggccttccagctggaggtcactggactcactgctgctgtcatccagctctcgggaggacgagttttcggcatctgagtcttccgagctgctgatcaccacaacgcgttcctctggctccccggcgccactgggcacgtggtttgctgttgggcaggaagacctcacttcctatgaacggggctcctggggctaggcggtccatccaggtggggtggtgagactgccttggaggtgctgggcctgggctggtccggggagctccgagccaaccttggctccttcccctcctcagactccatcttgatgaccttcctggggcactgggtctggcttgacttcctcttctgggctgtcgttgtattggagacatccaggtccaacgtcaatagggtccctgggagtgctggcagcctctgggctggctttcttggatacagctgcatctttcccctgggtgatgcaagagctgaggtcctgcaggcgcaccttgaactcgtcgaagccatcggtgcgcacggcagcttgcaggctctggggctcctcctggcgcaggcggcagagcgcctggcgcaggaaaccgtgcatgtccagcacctcctggtccgaggcgtagcacttcatcctctgcaccagcgcgctgcccgtgcggatgcgctgcagcacagcatccaggcggcccagccgactggccatctcctcgtagtcgcgctggtaccgcgc

SEQ ID NO: 147885 - DNA, 346 bp, Homo Sapiens
ttcatggtctcctggaagctttggctggagactactcagctcgtcactgaactaacggcttttgggggttcttttttcccagttgagtttctgtgtcttttacacgtttggttttatggtccgttggaggttttttcacgctgagggtgaagattcttagtttcctcaattagcataaaagctgctccaaggctgctgagtcttcagttccattccattcaaaatgttaattcctgagacacgcaacctacgccctactgtcctttgtcccacggcttctcgagattatctctgtgttttaatagataaaacgccttctctccccacccgtgggtgacaaagcaca

SEQ ID NO: 147886 - DNA, 527 bp, Homo Sapiens
taattttaaatgtactttaatgacaccatcttatgtatattgcaggtattatccccagtaaaaattactggacatcatgtatcttcagcgtgttcatcaggagtcacacgcagtatcaaatgttgaatgtagattccaaaggtctacaatctgcacatagaagtgtggacatttcttcacttttaggggacattcaggttgggttttccctttttcttctggaagagtaagacctagggcagtgatagaaaggaaattgggctggagttcaaaagagtaggaagaatttcccaaacttgtgacaaattgctgctgagtgtaggacagcatgagagtatagagctgcttaaagccagaaacacaaagggagtttgcatccattgccatgctcttcacacatctcatcacatattccggtgttggtatccctcatgccaatccggtatttccacacccaagttctcctccttgctattcaggccaattcactttcccaaggccagggattaagagccgcacggtcagct

SEQ ID NO: 147887 - DNA, 634 bp, Homo Sapiens
  misc_feature (620)..(620): n is a, c, g, or t
tttttttagcagaggctaaagtcatgtttattgggagatgaggacatgccatgaccactagtgtgtctatgggggagggggtgcaaggactagttcctgacacccccctagggactcattcctggatgtaaaggttgctgggagcagtaggatcatccactgggcgtgtctccaccactacaggcctgggggagccaagcaaacggaaagtgagggtagggtctctcagctcctgtagcagctgatccgagcctagagcccacacctgcactccatgcttccagaaggcctgaagctgacctccaaccatagccacggcctccaccgcttcggtcatggggatctcaggtgtgcgaagtccccggactggggacccctccggggtcaccaggctttacagagccatccatcaacaccattaccatattttcctctacctgggtcagctgtacgggttccctttgctcggtgctcatctcgcccagccagcaagagagcgcgccaaagcgcaccgtgtggagagcaccgacttccccggccgcccggggctcacgccgatgcacacagggggcagctcaaagccctgcccggtcagcagcgcgaacaccgaccagagcgtncgcagtgggaccag

SEQ ID NO: 147888 - DNA, 856 bp, Homo Sapiens
tttcttgtttgttttatatgacaatgaattttctttgctctagcagatgtctcctctctgggacataaggtgaaggtccaggggacgggtgaggccgtcctaacccaggtggtgatgtgtgtgctccagtagggcagggtccccgtctgacacactctcccctccttcctttgcatttatccagttcctagcagagaaaattgtttgccggagtaatgttcatcagctgctactcttcgaagagccagtgttgatgctgcagctgccacagaaaaccaggcagatgtggtctcagccctcaggggttcatactcttagcagcagacatcaattcctttaaatcagttcctgcttgatcatccaggttgtctcttttccggattcactttacgtatcctagtccaagtcacccctctctgccccccacagtgttactatcaagaagggggccaggcgagggtgtcagacttccctggctgtagacagggatcagatctgtcattctctgtcatgtgtgacttggcctatgcttgtggatgtggctttactaggttcattgagattgtttatttcttcttttaatttttgagcttattatgaatggttttagactttcctgaatatctacatttttatccagtctgttaacattttctgatattcttcactcttttgagataattttaaggaatttttgtctttgtcctgatgaaccatcatctccccatgaaacccagcatgacctgggccttgcttaaatcttcaggcaccaccacagacttggtcatctccagaaggagctgaagtgaagaagccggcagccagcagtccctccatggggccaaaggctcttgca

SEQ ID NO: 147889 - DNA, 371 bp, Homo Sapiens
tttgaaatcaagcaaagcctatttattgagagcctgctctaacaagggagtcacatgcaatcacttgtattttggaagagatgcgaaagcaggacagaggagtgggaaagcttcctaacagaagaaaggggcatcttgaccagaccccagagccacagcttcttgcactaccctgcactgtcctctactgtctctgtcctcaggtcatctttgtatgagagctggttctgctacataccagctgagttactttggtcaagctcttggacttctgagcctgtttccttcaccagttgtccctgggtgactttgggctggtgactcctggggctccctgctgcagactctaccctcccctcctgaagcctcaa

SEQ ID NO: 147890 - DNA, 567 bp, Homo Sapiens
  misc_feature (524)..(524): n is a, c, g, or t
ctttcacttttgctgtctcttggcaagttcctaacccatcctctactttgccatctgttatgggcctttctcattcttcttttctctgtctctggttttctactgctctctcagtccctctctctatctcctgatccctttggcccaggcgggtttggagtaatcacaggcgggtttggagtaagacgcctgcatcccgtagaagcgcattttccagggggtggagctggacaggaaagaacacctggtatcataggacaagcccctgcgacccagcccaaccctggctcaggggaagcgaagacttggggagcagcagggcccggcaccaggagggacgtggtgggcgacggcaccctaagagaaaggtgggacctgcagggtgccaggaccaggcagaggacgcagcctccccggggctgggggcggggcgccgcgctccaggtgccaactggggcgatactgggaggcgcccatggctggaatccacctcgcgggtgaggactttaaaaagcacggggcgngaatagtcagaaaaatgttttgagcaggagaaatacgcgatag

SEQ ID NO: 147891 - DNA, 870 bp, Homo Sapiens
tttaatctttaaaaattctatttgagacccagcacacaagaatacgatagatgtcctcaaatgggggcttggctcacaggtggaaggacactaaattggtcccatctgatttcttgaggcaagggttgaacctggcttgcacaaatcacacctgtccaaagcaaccacgagttctactattttgcagcccttgctgctgggcgacgacgacgacctctctgcctcttctttccaccactacatcgcctcctggggcagcttctccctactccaccctgtgtacctttcccagaatacagaacctcaggccaaagagagatgccagccccattaatcacctctactgtaccccaatcatattacggaaagtcagacccaggagacaggactcaacagccacgctcatagggcagattccgtttgctgcctccagcccctcattcccgccttaattgtagggctctgcattatagccgcataattcatgcctccctaattatggctgtcaacagccccattgtaaagctgtaaaatgtacagcacctgctctccaggaaccctgtgccagggattggtagaggggagtgccaggtgtggatgggggctttgccaaagggttcactgattggcttctcaatcgccgtgtctggcatttatgcttgattctgggagcatggacaatagccaagaagtctcttgccgccaggtatcccgggacagaaaggggaagaggcgggtggggtataggaaagttaggggtttcctgtgtgctcttgctacaacttgcaagatttcacctctcccctagagggagctgctagggaaacagcttgcagaaagtaaaatgggaagtctggcatggtgggtcat

SEQ ID NO: 147892 - DNA, 540 bp, Homo Sapiens
ttatttttccttgtaaataaaaactttataaacattgtaaatgattgcttgaatacctgtggttggatagtcaatgattatttgtattgagcacttgtatgtttctgtctctgtctcttagctttaggctaactttcagtgtttggattattttcttcctgtagatttctagaagtggttctatgtatatgtgcagatgtctgcttgtcttttaagtatactgaaggtcatatacatttcacggtctctgccaccagaatgcgttcctgctgtaggagttcttgtcttttccaaagcatcttaaccagtctatgacttcattgagcttattttgtataaacctctatacaagttaaggattagtcttttgttttatgaaggagtaaacacagaatagtttaattagactaatggagctctcttctggcttttaaatgatcttgtttacatttgagatagctgtgtgaaaatagcacatacttctactataacattgacttgagtgagcataatattgagagcaaggttcagattgcagaa

SEQ ID NO: 147893 - DNA, 1362 bp, Homo Sapiens
aaaaaatagcgtcgagaaggtggagccgggacacgagcggtaatttgtgtaaatggtaatatactgtgggggaaaagtcggggagaaaagcaaataatgggcctttagtataaagccttttcagctgaacatttaccccaaagacctggtagcggccccaggcacctgaggaggcaatgacagtctaggaggacatcttctgcagcaacagccatcaggagaccagcagcagcacagcactcagggctcggtgtccacctccctgcagatcactttctccctcactggaatcaaccgcagcacttggagtttactcatggagtaggaacttttttatgggggtctggcagaggcaggcgaaggaaatcagatgaagcccggtgttttgccaagagctttttttccagccacccgggcacagacacagcaaggttctgggaccatttttggcttctttaaagacctgcaaggcctcagggtccacttttcttcttccctctcgactctggggcccagcgattcccacttcactagattcaggttggctccaaattctacccagcaggctcacgaaggctgcctcacagccgtggcgcagaacagcatccatgacgcacccaggggagcccctgtagaatccctgtgtgttgacaggaccattgcagttgaagtcagggttcgcgccagccaggaggagcagccggaagcactggaggttgtggtaggctgcgctgatgtacaaggggcagaccaccaaggaggtgagccgccgggagaatcgaggctggacatcaggagtcaggtggtggttgacgtcaacatcagccccgtacctgatgagggccttcaggatgtctgcccggcccacgcgagaggcgtggtagacaggggtgctgcgatggtgccggcttccgttggggtccgcgccagcttcgagaaggatctgggtactctctaggtgcctgttcaccacagccacatacagggccgtctgtccttttacgtccaccagatccacctcggcccccttccggatgaggaagtccacacagctcccatggcctgcagtggccgcgattcgcaacggtgtgcaggggagccagccacagcaccagacagacttctcgttgatgcggctccggtagctctcctcttgcaataggctcctgagggtctggaggtccccgacgtaagctgcatcatggagcctcgtgtcctcacagtgctccagcggatgatcacaaaattgctccctcagccactccttcagattacgacctgcggagcccggccctgcccgcccgtctgggctgccgccctccgccatggatgcttccgcctccgcggccgcccctgacccgc

SEQ ID NO: 147894 - DNA, 603 bp, Homo Sapiens
tttcttggaaatatctttattgtcagcaaggcagggaatggtgggaaccagggtgtcccgctggagggtcaggagggagccacaagccgcctgggaggccgtatccggtcgttgatccagtccacatagttggccacgcgggtgtagacccccggcttgtggagccgcccgcagccgtcaccccagctgatgatgccgtagaggtaagccacgccgttcttctcgcaggccaggggcgcccctgagtccccctggcaggcgtcggacttgcagtcgaagtagccggcacagagcatgttggggctgatgtcggcgccgtagacctcagggctgctgcacttgtggtcggcgaccagggggaccagggcctcccgcagggagctaggagtagccgctcactttctcatccaagtggcccccagcccgcaatctgggacttgtgtcctggcggggaggtgctgccgggcttcggaaggacaatgggcttcacaacctggaacgttttggacaagggttcccctgctttttaagcggattaagacaaggtccttgtgcgccgggtttaacaccgcgtaaaggtttacggggagtaatttcgatgcc

SEQ ID NO: 147895 - DNA, 493 bp, Homo Sapiens
tttaaaataaaatcacttttaattgtatatgttattatttcaaattaatataaatgtctttaaatagatatttgaatattataatttaacaggtctaattattttcacattcttcgagaaaaacattaagttggtactctaatttgggttaactgaatcactattcagttttatcttctgaagtgttttccaaacaggactttgctcaatgatgtaagctttagctgttatcattctgtagcaaatgctatctatgtatggtttggaggtagtctttgctatagtgcacataagattaatagcatttactgtgttgtgtactggaagtattcgtaagttacaacccaggaatcttaagagatgagctaataataatggtggttgtccattttattttttcttttccactttcagccatctgtctgtggatcaacctagcttctaatggtgcaacaatctgctcaccaggtcctcagagaccgctcagggtttc

SEQ ID NO: 147896 - DNA, 382 bp, Homo Sapiens
taacataagacaagacaaaacgaggcaggggaacaatcagatatgcatttgtgtctgttgggcaggggggtgactgtatctgtaaagataagctatcagtttacattttaacagaaacaccttagggtaaagatcttgcggctcactagaaattttcttgtgggcaaaagatgggggaggtatgtagcttttcttcttgtagccatcttatttaggaactgaggactaagctctgaattttttatcttgcccaaatttctatctaattgtttgaaggggtcatgccctacaaaccataaattctcatcagatgggttttatttgaccctatagatcgtgacttactttccaatctgactctggcgtaacattatgagacaag

SEQ ID NO: 147897 - DNA, 419 bp, Homo Sapiens
ttttagtctggcggtttctgttctttaattctcacattaggcctgaattcagactaaagccttgatggtccagccctcgactctccttcaaaattgaaggaagaaatgatgtggagtccggcgtgcctccccgacccggttcctcttctcagaatgaaagtttttcttgaaccctttggatgggttttcgctgctgcttctggtggcggagaggactcttcatctcagagcttcctctgtgtcacaggcagggagtgaagcgtggtggtcatgtcttcaagggatatgaactctgccacttactgtgtgacattgggcaaattatttaatctatgcttctgtttcctcatctgtaaatggaaatattaatggcatctaccttagagggctgctgtcagcattcaataagttaacatatg

SEQ ID NO: 147898 - DNA, 255 bp, Homo Sapiens
tttaaagttaacaacatttatttaatgtgagacacttgatgttgttttgctaatattaaggccctccttgctgtgtgtatacagcatgacatggattctttagaatttagtgatccatctcatcatcttgactgcccattgggaaagacgctcaatctctacccatgtggattttcttggaattcctgtaagctccaagggtaagttagggtgtgcctgggtgtgcctaattaggtactgttgccccaaaatctg

SEQ ID NO: 147899 - DNA, 1383 bp, Homo Sapiens
  misc_feature (61)..(82): n is a, c, g, or t
  misc_feature (813)..(834): n is a, c, g, or t
  misc_feature (1357)..(1357): n is a, c, g, or t
  misc_feature (1367)..(1367): n is a, c, g, or t
gtgctaagcgaaaattaaccctcactacaagggaataagcttgcggccgcatacgcggtcnnnnnnnnnnnnnnnnnnnnnncacaaaaagtattttattattcttaacagtactcactttaaaggaataagaggatagcatacattttttacagacaatatataaatgttgtacataattaacaataacttagttcactaatccaaaataaaacaagccaaataaaacataaaaacagaaaatactgccgattctttttcttatgcggacactagtacaaaataagttacttctggccgtggtgctccctgcagcgactgcccgcccatattgcacttggtcactacatcagcacaatcctcctcctgggccaggggcccctcacaggccaccacaccccgccgtcaccgcatacagaatctaagctcgggacacgtttatatacagctgtaccttgggaaggatccagacagccacagtaaagctggacctgagaccccagcagggacacagcctctccctgggtcctggtcctgacctgcccccaactcctgccttcaccccctgccaggccagcaaatgccaaccagcccccagaaaccaagggcagcaaaggcccctccccacccccagctttcatactagggctgtgggatcccagctcttttccaaaaagaattgcaaagctccaaccttgtgtgtaggttttattcctttcatagcagggctcctgtggctacgtacaatcaactggacccaaaaagagtgtaaaaataaaacaattaactcatcagcgagttaagcctatgcannnnnnnnnnnnnnnnnnnnnngtctcagagtaggaggcgagggggttgaagggttagcaggtaaaggatgtatttacagggttcacctgacaagacaggctgtggcttgcggtcagttaggggagacagtcacaggaggttcgggctcaaagccaagggagcgatctgggagacgttttccctttcaagagaatgttgtttccttcctgtgacgcagccctggcctgggaatctgtgcaggaccgcccgtgattgtctctgccctccagggcctggcccgtcaaagcaggcaccagctcaccctccctgggccgtggccactctggctttgggctcagcccagcctggagttcggctatttcagagagggaagccagaggagaagagggtgcaggctgaggtccccacaaaatctgcccccagagccctggcaagtggacccgccaatcccgaggaagaacctggaggacttgggacagctcagaccaccaagtctccaagtccttgttagaaacaagagcaaaataaattatttttgcctaancctttttccntctaaaaatggttgcc

SEQ ID NO: 147900 - DNA, 340 bp, Homo Sapiens
tttttgcttcagaataactacaaacctttattctccagatattcatttaacgccaacctaaagcgtgccaggcaggttaaaaatactgcatttatgtaagcacctccaccacacacacacgctctcacaaggttaaatagggagctctgaaagaatgatttattgccactagaacagagccccaaaatagattggcaataaaaatgattggtcccagtggggttgagaactaatgtaagcaacgtcctggctatgagaagcgaccaggaaagagcaccagggaccagggccctgactctaactctacccaagttccactctggggggcaagtcatgaaac

SEQ ID NO: 147901 - DNA, 193 bp, Homo Sapiens
gtggcatacttttttttaatgtctgctgttaataaaatatttttacagagaccaaaaagtcagaatagtgcaaaacatctcaacaccatgcattcatgaccacttctcgtttgtgttaaacatttgttccaagtcacatatttacagagaaatgaaggcgtctgtgcagacactggaccgacggggtagaatc

SEQ ID NO: 147902 - DNA, 237 bp, Homo Sapiens
tttttaacttcattctgtttattcattcattcactaattgccgctcaatgcagagattacacacgggaaccctggattcagacttggttcatttccaagcatcgccatctgctagttagccaatggcttagcctctctgcacctcaatttcttcttcctctgagtgggttactcagctgctcagggcctcggttttctgacgcagaagcatacatccatagctccctcacagtcagc

SEQ ID NO: 147903 - DNA, 412 bp, Homo Sapiens
ttttaatgtttcactttatttattttgcagactagcttggggagaaatgatatctttcccttgtattgccttttcctgtccatgaacacaattgcttgcttcattcattccgtttctcatatcttttagtaaacttttataattttctccataaattcttggcatcagtttattgaaacctctcactagacaagaagttgacttgcggccatgctcctgcttctccattctttggccattgaataaagtctgcactgcttgaggctcgctttgggtttcatgtattggcttcacgataccatctttaggggaaaagctgactcagttggtaacagttactgtccgtcttgaaaacgtgtgtggaacgagctgtgtctgcttggctccataagcaggtgagcttcctttctgt

SEQ ID NO: 147904 - DNA, 451 bp, Homo Sapiens
tttttttaaataaactttttattttggatcaattttagatttacacagaagcttcaaagatagtacagggagttcccatggcccctcatccagtttcccctactgttaacatgtacatttctgtggaaacccatacccactgggttcctggcacaatggacagaagttccacaccaatgaacatgactgaaatttcagaaacagaaacttgggggtcagagagggtgggctggggaaataaaaaagtttacatataaaagaacaggacttgtattctcatcaaacttgtcagtagccacaccagaagctagaaaatcaggaaccaatgtcttcaaaattctgagtgaaaattattttcatcataaaatcctgtacaaaactgcatattaagagcaatgttagactaaagacaattccagagcaactacagagttttgaaatatttatgtcc

SEQ ID NO: 147905 - DNA, 828 bp, Homo Sapiens
  misc_feature (93)..(93): n is a, c, g, or t
  misc_feature (96)..(97): n is a, c, g, or t
  misc_feature (99)..(99): n is a, c, g, or t
agaggtccccctacccgcgggggggccgcgcgccccaaacgaaagggttttagaaaatttcttcgagggccggagccggccccacaatttccntcnntnttgtgttctcccttttttggggggggactcgcctttttctgagctgggggcgggccccgggaacccgctgagcgaggtgggtggaccctggcggaggtcacaggaccctgtgggcgccatcccttactggggacgcagcactcacagaaggatcttgtgagcacaggtgagttccttctgcagctgggcctgctactgtgacaggaagcccaggctcctgctccacttggtgaagagccccatggcctcctggctggctgtctccgtcagactgtacagctccacggtgttgaagggctcgttcccgaactccagctgagtgaagatgatggcatagtctctgaagttggtggccagcacccagagctccagcacgcctattgagggattctcaaacacccatccggagtttcgctttatcaggtccatgacactctggtcacaccctcccagcccgtgctgagaggacagcgtccgcaggttgttttctggagtgagggtcaccaccacccccacgacgttcttcatgtccttctccatggcaaagcccttttcccgggaggccaccgcaagcacgtaccagggcccaagaagctgctcagggtccagtcttcccaaccacacggcctgggccctgggcaccgagaccaaagccagaaaagcagccagcagcaggccgcccatcctcccaggtctacactgcgccgcaagcccaggatgtgcagtccc

SEQ ID NO: 147906 - DNA, 742 bp, Homo Sapiens
  misc_feature (467)..(467): n is a, c, g, or t
  misc_feature (541)..(541): n is a, c, g, or t
ctctctctctggcaactcagttttgctaaacctgtgcagctcatcaaagacctgaggattctgtgacttctaaaattaacataggcttccatacctgcggcagggctgtgagaacacagtagacagccatacagtggattagattgtgctagaagttatggagatactcttttaaggttgtgattgggtagcctgaaacatttatgaaacattttatactttgggcagagactaatgtctggtttctctccttttttcatcaaacgcctccaaagaatagcatatcagtatgaaaagcttccttggaagacatctagttagtccaaagaatttgataactagaattatagactctcaggaagtctatttggaagggaccataaagataacttattccaattactcagctgtttcctgagtctcctctatggcattctcactgaatgagccttaaactcttgcttaanctctttgggcctccacttctccttattactaagataaaatttgttactttgtaccttccattcactgatctcanttctttggggctatacaaaatattctaatcccttatgaactttcactatttgaaagtaattctcattgtttcctcatatttgtcttcccaggggaattctgcaacttcctgcacacttgagtctttctctcctgaaggcatttagtttatccacatcccatgattgaactaaatgtatattcagggtgtgggctaaccagc

SEQ ID NO: 147907 - DNA, 444 bp, Homo Sapiens
tttttttgcagagcgagtgctttaatatttcgataaatataaagatttctttattgtggtcctcagtttacaaataacagacaggaaccaggggactgggtccagatgggagtaaggaggaagccaagaaaaccatttattcctggggctctggtcagttttagttgtaaatgggaagggaagaaaataacatgaagtggaggcagtaggaagaagaaatgaagaatccctgagtgaggacaggagtcttggaatgactccacggtgcacccgcaccctgctttcatctcaggcggcatcctgtcagccagtagaagagtggccggcctgaacagtgcaacctccattctaccctgcggagaaaaaagacatggttcttgcctcacactcagtaactcttccacacacatgacccagttcttggtgagtctcgcatatggagca

SEQ ID NO: 147908 - DNA, 550 bp, Homo Sapiens
gaatacttgcttatttattcttatacaattaatgatcccctcttaagaactaccattgcagtggctgctcccacagagccccctccaggcccttcccccaccaccctgggtatccctagcacctgtaggacagcatcgttgaaacattaggggtgctggggtctgagagggtatcctgctgggacaatgcccgcggaacctcctgcctgtctttagacatggacaaggaagatgcactgatctgttttgaggagcacatccgagctttggagagggaagaggaggatgaacgggagcgggcccggcttcgggagcgacgccaacaacgcatgaatcgggaggccttccaggtatctttgctgtcctttctagatcagagctcagctctgccctagagcacaacctcttcacccattccctgcccccttctggatacgctgcctgttctttctgtgcctagccctgtccaagctctatgagacctctctctgcctgcagtctgtttctgctgtacctcctcaattctggactgtgctcttctagggagact

SEQ ID NO: 147909 - DNA, 543 bp, Homo Sapiens
tttaaattttatcttttcatttttgaataagatgaaaataatctcttagggctctcatataaaaataaaagatgcttttcctggtgtttcaggaaatataagtgagtttggggcctggggacagctgcatcggctgttgcaactctctagcgagtgtcatccatccatatactttgagttataaactgccatggctatgttgtccaaactttctcagcctcacatttccctctgtaaaataggaatggtaacactcagtggtgtgatcgatgagaaagtgctgtaaatgccagattctatagaggaaaaaacagcaggttcttaatgttatctttaaaacaggaaaacaaaagtacctaagttatagataggatctgaactcaatatactgatgaattctgtactattcagtgctccgccaccttgaaaaggacttctttggaaagcaggaaggcactttcttgccgggaacattcactgtgagcctggatgacccaccagagcagctgagagaggaatgttttcgttgactggagagttaga

SEQ ID NO: 147910 - DNA, 432 bp, Homo Sapiens
  misc_feature (198)..(198): n is a, c, g, or t
ctgagacttgggaggagcacggggctcctgtgctaggtgagcacttgctatgtgcggatgctttgcgtaggtgcacgcatttgatcctcacagatgctgcaggaaggcaagcagcatcactgccattttgtcgtggccaagggacatgtgcgtgtccccatccagcccctgcctcgaggtttgcttggctgaccagtncccatccagctctctgctccgcaagccactgggaaacccatcagcccagccccacacagggccagcttctccggctgcccttcccaatggcgacgcctgtgactgtgtctgcctcccaacaggggtcaccacccacccacgtccacccgaaccccagcatgagggttccgcccccttcccccacttacagacacaacggggtgaaccttggagccattccttgtttccacccag

SEQ ID NO: 147911 - DNA, 473 bp, Homo Sapiens
ggagaccctcctggtgaggaactatgcgggccttctgggcctcagcagctccagcccactcctggcctggcaggccacctgcccacccacccacccatctgcctctgggcccccagtgaagtcagaagaggcaggagccccgcaggctgtgagcctggcgcaggtcggctgacagcgagcttctcatctgcctggtggtagagcggacgctctcggcagcctgcacggcccggctcagggccttgttgagctcctctaggtcgcccaggtcgagctggatggagtgccggtgtctccgggctggtgggggagaggctgtgggcggccacttggcagctggttgggctgaggtaggtcctgcaggcgcatagtacacagcggcaggtggataaggcatgatgggaaccgaggagatgtaggcaaaggctggaggggctggtgctgggggcgctgttgccagataccacagtccg

SEQ ID NO: 147912 - DNA, 519 bp, Homo Sapiens
ttttttttaaattagtcaaacattttattatagagtatatatttatatcaaaagcacaaaaacgtttattctgaaaaccaggaagattgtgatgttacagaagaagattcaataattccagtccatttctagggtactaagtgtctgatcacctcagcgaaaacaagatacaaatgaggccaaggtcacaggtctggccaccctgagtcccttcgcactatttggtttctcaagttgagacacgtattcccagtcccagttagccaccttccaagtgtttgctactagccttaatgggtacttagccaaagactacacccaaatataaccaaagcttatgttaagtcataagattaatccttcaataataaggatagcataattggctttgttacctaattctacataaacaaaatcatcaaatatcctggcataactgaaatgacttacagaggaagtagtaaagcttggaagtattctatggtaactgagctgaaaaaggggaaatgccaaatgttg

SEQ ID NO: 147913 - DNA, 267 bp, Homo Sapiens
taagaatcccttttcatggtctgatcttaagttgtttgaaaaaagattcacgcttttgcatccacctctgccctcattctgtcaattgtgtgtggactctgagaagcctgcttgataacttgtcttaagttctattaaggcagttagactgagatttctaatgacttcaccataaagattatacttctgcctggcgtcgtttctataaaacactataggacatttgttttcaaaagcagttgagtaacagcaacataaaccacattt

SEQ ID NO: 147914 - DNA, 656 bp, Homo Sapiens
cttgttttagaatgatagcaccaagcaaggaaattctaggaggagttttcaagctcctctactctcaatatggaaggctgactaaactggtgactttgagtgtgtgtgggagccacctagtatatctcatgactcagaacttacatgagtcacttctaaggctaataatgagcttgcaaggttagaagggctgtgtctccctaaagtctgcttttagacacacatgcaccagccttgtgcctgttctaggataggttgtgtgctttgtcttgggtaccctgatatcactgttgagaaatttctcagtccactgggagaagaaaattgttcatttccatgctcacacttcctctgctctctctgtcctgattggctaaccatggtactggggtgagaaagctgagactagtggtgttgctagagcgaggttgtcttgacttagaagagctgattgtgaaattttcagaaattttgcttgctgattattagtcacagccattattaaaaattaatgtacatggcatgaagcatatatggcaagatgttagtgaatctaactggtgtgtatatgggtgttcaatgtgctattttttcctattttctgtatgtttaaaagtatatatttattttttaaaattaaaaaggcaacacaaaca

SEQ ID NO: 147915 - DNA, 935 bp, Homo Sapiens
tttttttcctaggaatggtgagactatatttgcatgatgtggccactacacacatcaccagagactgtggtccaggttcgaagagtgaagcctgggtaactggcagggagacacgcgcacatctcccacctggagcagccagaatgggacatcaccccacaggctttagggcgctgggaagagaagggtgatctgggaggaggcacgaggagaccagaaggcagaaggagggttaggatgatggagtcagcaacataggctggccatcccctcagcccctcattgttcttgatagcagtgcatccaggagctcgaggtggggttggggcttgggccgctctgcaggaagtgtggatggatgcatctctgctttccatctcagtgtaaggaggacagctggcttctcggtgccctcagcccctgttctgtgtgggtctgaggacttgggccctctgaggtccttctgtgtctggggtgggctctgtggctcacctgattctctccacaccccgctgtgaaatgagtgctgttctcttctgccctacatccccaagagtccctggagcgatctactgcccatcttctccaaaaacacacaaggagagccctgccccagtccaagctgcaattctgcaagagctttccggggcctggggcacctcgaggcaggtcctggagagaagggaagcagatcctgcacagagtccccatcgctcctccctctacaagccctgaccatgagcagtgtgtctcctctctgtcacagtcctccgcttcctgccttggtcaggcccctgccctctcccgagcctggtgccggtccagagccagctggagggcgcacttcaaggtctccacgttgttcaggacgttgtatcgactgagggccaccagccgataaaagtcctggggctcataggtgaagttcatcatgc

SEQ ID NO: 147916 - DNA, 664 bp, Homo Sapiens
ttcataagtcagattgtttattttctttctctgtcagtagactggaagctccctgagaacaggagttgttctgcagtagacaggcctatgcaaacctaccccaaagtctgaggaagttgagaagttgaagaaagaggctgagaaagctaggggactttccaacagaagccatgtaggtgtctcaggcggcaatgagatgagatggtggatccccgcattagcacccaaacccagggctcatataccatagggtaggagtggttcagatgggatttataagacaattgaagtgtgatatcatcaaggttgtttgacctacgagtagcacttacggacttacagtaagtatctgctcttacacaggaaacaatagataaactggaaattgtagaggccctgccttggaactggggtcactcagttaagtcaatgtggcaggttagcttccaagatggagttgcttcagcttccacaggggtcatgtgttttattcctgataggtcagcggcttgtagcatagagcctgcacagagcaggtgctgactttgagccttggccatgttccggagacacccctagcggctggggcccagagtggagggtttgcatttaggtcttggtgacttcaggtttctgacttacccagcttgatggagagagagag

SEQ ID NO: 147917 - DNA, 265 bp, Homo Sapiens
ctggtgcttttttggattgatgactgtctcactttgactatacccatgttttgcatgcaatgactcatgcatggttttcttaactagctaatattaacaatttattccatataaaaatggaattttgcaacatcctttaataaggtgagggaagcatgaacctcagacttctggcactattacatagtaagcacatgaagtagtttgataataaatagcagttctagtacttcacatttcacccgtgtgtgcaatgcctttttct

SEQ ID NO: 147918 - DNA, 465 bp, Homo Sapiens
ttttgatggagccattttatttaaggggaaggaaaagtactcattgtggtgatggagaatgagcaggagttgtctattatttcctttctcaaatattatgctaagtgttaggacaataattagaatgaagaaaaatcagttaaggttttctcctaaactctccgggagcccaaagaatttcagtgccatgttgactacataatgcttgtatcatgtatttgttctcttttagacattgcttttgaagccacttttagcctctgtaacaggttagactcacagtcatcgttttcaccttggaattcagaaagcataaaagaaaactgcgtaatcagttgcagctcagctgtccccgttttttcccttcatgcttttgttccaatcatctgcattttgaggggatactttgaacacacacacaacctcccattctactggctgttttgtaacagatttaaatatttg

SEQ ID NO: 147919 - DNA, 918 bp, Homo Sapiens
cctttgctttagaacaggtgaactagacccttgggtttccagtgctagcaggtgcagccagtgagagaattcctggtgccggtagtgaatgatgcaagtgttcagaactagggaggctgagaggtcaatggtggtcacctgcacactagccttgagggagttgaggcagacaatgcgttggcgactctgggacaacaacaacccatcttccagcagcagttcagtgctcatctgtgccatatcagagtttgctgtgaagcttcgaaggggcagctgatcctcatcacggtggtacaggaactgcagcagcttcagagtccaagtcaggtgcctcttttgactattcatggacaataccacgcttgtgttctccatcttaaccttgacctggtctggcagctgctggagaaggaataggccaggcagagttggctcaactaagttttctgtcacctctgaacagggaacaggcttagatgctaggcttgggccctggcacagcagttggctctggaagaggccctcatgcagttcagcatggagtgtccacacatccacagtgatagcagtgagatgccgactgctaatgcccacctttagacacaggtccagggccagtgaaagctccactaggcaggtgtcctccagctgaccactctttagaactttgctgttgatcttacataagctcacctcacagattagccttttcccatcactatccaaaagaaatctgcttctactgatctgaatatgccataaggactcagaggtatccaccttgagaaccatgatgtttatagcatctacatgaatggagaatagttggcagaagatcttcaataaggatgggctgaaggacgttccttttgatccaccccgcgctctgggagaatgggcgacggtcacacactttct

SEQ ID NO: 147920 - DNA, 179 bp, Homo Sapiens
tttttcgcagacgtacacaaacctatttatttaggtgaccttgtaataccagtcatttattttcatgaacaaaggaaataatcagaaagcagaaaataggtacaaactcagttacaatgcaatagtattttaatgcacatgcaccagagttataagcaagatgaatttgccttaagtat

SEQ ID NO: 147921 - DNA, 931 bp, Homo Sapiens
ttttgtaatcacaacagtttttattagcaaaagaacagcaggaacccttctgctgtccatatggacagatcccgatgggtattcatgaaacagtttgctacgggaacagccgtgcttaaaactcctcgtccaattacctttgaacttgccttttttgctgcagtggctactgctgctgcatgtgaaacatcttacacactcgtttctccccaggagggaggcatctgcttcaccctgtttggggttctttgccctggaggctgggcagcggtgggtccgaggagattcaggagttttgggcctggtcactcatcatggatgtccaggcggtcaactcggtttcatttgtcctgttaaattggccagctaattggagccaacgatagcttttggagaaaccccttagccctgttagggcttagaacaaggggcaattctgcaaggacatttggtgagagggttaagaacttgctgatgtaagcattgtttcctggccatgtccaaatgcttcccaggtagagggcaatgggtatagtgaccatgcagcctaggtgcttggatacatttctaatccccaatacctcttctcaccatccctactggtatctataagttcagatcaagttatatgccacaattctaggaaagaaaatacagtttttatgtatggaggacagaaatatgtacatcggaaataggatccctgttaaatcagaaagaagcccctgccttctgcaggttgcaggtgccagaccttgaaattcattggctggaagaagacagagtaggagcatcatgcaatttgaagctggcaagtctcagagttggtgaaaatcaatactgggagtggccaacaaaacaaacacagttttagtggttgatgccttgtgaactgagcagatctgccgtggatatccaggtcagagagaag

SEQ ID NO: 147922 - DNA, 483 bp, Homo Sapiens
ttgtaaaaaattattttatttttctaaaaagatgcaacaaattatttcttactgtaaatgacaatttataattgtataaatttatgggttacaaaatgatgtcataatctgtggatacaatgtagaataattaaatcgagctagttaacatatccatcacttcaaatacttagcattttgtagtgagaacatttgaaatttactcttagcaattttgaaatgtataatactctactaactatattcaccacactgtgcaacagacctcaaaaaaattataaaatggattcttcctgtcggagattttgtaccctttgaccatcatttaaattttttaaatgcaacaaaatatcaatttcaaaacagcatgaaaaattgagtgtgtttaaccatattcagctgataacagggcaaatgaattgaacagaataacattctattccatgtgtaatgaactggcaacaagagaaagttggtggaaga

SEQ ID NO: 147923 - DNA, 831 bp, Homo Sapiens
tttctcgaagactttttaattaggaaaaaaagggaaatgttatttatcccagatttttctggtagtccccatgttgaatttctaaatatatacaaataagtttaagataaaccactatttctccaaacttttcttaatagtgtcagcatttcagcatctctacgcagatctaagtctccttcccctgtgggtcacttacctatttcagcaccatttgttgggcatctccttgagcctggcactggctgggcacacgatgcaggtgctaagggcttggtctgtgatttccatggatgagggtgttactcgtgggggtttaactcagtccctgttttgtgacctagagcccgatggttcccagttacacacaagtgtaaaatgccaatcaatcaatcaggaggaaaaacaaaggcttgtcccagccagccaggggcttatgataacaagggaagatggtcctggtgttcctgccctgagaacgcagcctgagtgctggtggctgtggggactccagcatgctcctctgtcccagttctggtggtatcttcctcccactgcggggagtccatgaatgtgaaagtactttagagaccactagtgtcaacaggattacctttcctcaactcaccgcatcatggctctactttcctctctggtcgcaacatggaactgaagtagccttttaacattattcgttactgttacagaatggagtttgctccctgttcttgaagtaaaacacagcagaattaaatgtatcttcgtttcaaatctagatcaatttttttcccttatacgtaagccctgataattttttcccatggacttgag

SEQ ID NO: 147924 - DNA, 498 bp, Homo Sapiens
gacgtttatgaaataccttggcttcatttgctgaaaggctctaagtgttgagcattgttactatgttacaatggttgttttattattaaagcagtgccaaggaggttacacaacagcttggatcaggaagtgaaacaagggcggtgatcccactgaagctacaggggatggggatttgggacggtaaaatgttaattacccaagatggaatgtgggctagagtccagcgttgtgctcctggagatcatttcggtcgcaaaagctcactggcaatgggtcctaagcgtcctgccctcctctggctgaaatgttggattcacttcgatgaatgctgctatagggaaagaacccagtggccaccagccaggagcacacgtcttgctcagcatcaactatcctggaagatttccaggagctgaagggctgttctctttgcatgcaataaattattcatttctaagacgatttattctgtctctctctttagacttgatttct

SEQ ID NO: 147925 - DNA, 424 bp, Homo Sapiens
gcttctccacagtgtaagttttatggtaaattatttttactaagaatgaatgaatgagtgaatataaagaaaattataggacttctatttactgtcacgtggaatcattacaatcgcaccataaaatgcacttccctgtaattcagcatattgctgttccaccgtagactctggaaagtggttaccaatagccaaaaggcccttctgataaggcagcctttacagcaagcctcccatgtaatcatagtgcttataatttcaagtaattaaaaaatataactactgttaagtaaagtaaccatagtgtttgaaacattaccctgtttccctaacctgtataattaaggaaaatcacatttttaaatgtaccaattactttagtatttttaaaaaaatttcttgacactgttgaatttctcctttg

SEQ ID NO: 147926 - DNA, 523 bp, Homo Sapiens
ttttttttataaatgtgggaatatttattaacataattttgtttaacacatttctttctacacaaactgaatttaaaagtgtctataacattttcaattacagtaataacacatgaataaattataaattaacaaaatcttcatatctactttaaaaaatcatttatcaaatgctaacctccagattatctggaaaattaaagttgcaaattgctataaacctggcatcccaattaaattacagtttttaaaggtatataaaatctccctcaaattccaagttcctctccagaaaattttattttacccttttcttaagtttacagcctgctaaacattttacccaaatgtgagagaactgcctggagatgcaaagcacaataaaataattaagtgaaaagaacaaacaaaagatacccgttaaaacagttattttagctggcagcacttgaaattggtaatctgtattttttttaaattgcatagctgcaagatgattcactgctgattaactgttgagcag

SEQ ID NO: 147927 - DNA, 278 bp, Homo Sapiens
atctttattatttacttatttatttgtttattgagtaatcatgccagtaaaacttttgcattgagaactgagaaatagtgaaagggggataaaaataaagtccagtttctataatagaaaaaggctggatgcacataggatcccgggagtctgtggtagattattttctttgttgtgccgcactgttgcagcagaaccctacttatcctgcagaggatgccccaggtaacttcttcatcctaggttacagaatgtaagttacacagagcagaaccaaa

SEQ ID NO: 147928 - DNA, 368 bp, Homo Sapiens
ccacgaatggtatttattgttgttactgcggttgttagctataattacgtactacagatatctcaggaagcccttaaattcctccactgtaagccacgggcaaggacagtcatagactgtagtttctaggaagaccagccgattccaagaagggtgctcggcgggagaacctaatgccgaaagcctattggcgaaaaactcttccttcccggacgctaacgtctggcaaaccacattgcccggcagaccccgcagcctgggaccggcgctcaagtcatgcattctgggattggtagtttccaggcttcagtgtcggcctgtgccgcccagctccaggaactcgccttcccagcttgcctcgcggccgg

SEQ ID NO: 147929 - DNA, 394 bp, Homo Sapiens
  misc_feature (49)..(57): n is a, c, g, or t
  misc_feature (282)..(293): n is a, c, g, or t
tttacactttaaatatatataatttattccacatcaattataacttgannnnnnnnnaatggatgcaataacaatcttggtcattgacacttcaaaaagtctggtttactaagtctctattgactctaccatctagctccccaggccacgtagaggcagacctgcttcagtggcaggaaatacaggtgagcaatgaaggccatttccatcagcgttaagaggattgctactggatcacaaaagccgcaccaaggacaaccgaatctctcttgacttcatccnnnnnnnnnnnngtctgtgcagcaatggccttgaagtaaacaggccagagaggctacaggaatccacaaaacccttgttgtctctagtaataacttgagctacaagacacaca

SEQ ID NO: 147930 - DNA, 309 bp, Homo Sapiens
cttacgtccaacaatgcagactttaatttgtgatgtacattcaataacaagtgataaccacaaatggacccaggaagacaaacttttgcttgagagccagctcatcctagctacagctgaaccactctgtcttgatccttctatagcagtcacctgcactgcaaacagactgctctataacaagcaaaagatgaacactcgcccaatgaaacggtgtttcaagaggtattccagatcctctctgaatcggcagcaagatctattctcattgtccacctcctcctcagctgaggttacttgatttcttac

SEQ ID NO: 147931 - DNA, 549 bp, Homo Sapiens
tcagggctggccataagctgctgctgcatctggctctggagctcagagaagttggtcgagctcaagctcaggctgctaaggcctgcaagtcctcccaggctccccaacccaaacgggttgctatttgtggaaataggtgtggagttactcctgggagtcgacgccgaggtagtgttagttcccgcggcattgctaggctgcgtggactggccctgaggtcggttctggcttttgatgacaaggtgaacagtcagcccatcatggatgccatgctggatcaaggtatcttgatcttttaagatttttccggcaaaaatcagcactagctgatcggtttgggatttgaagcgtttcgaaatcgcttccttaaactgctgaaccgagctgttctcgggcaccgcgaactcctctttctctttgggagtcttcaccgtgactttgatgattttaggctcagccggggcagcagccgagccttgggccgcagcagggccgcgggaggggcgcggggggccgctggtctcgccattctcgagccatggcggccgc

SEQ ID NO: 147932 - DNA, 651 bp, Homo Sapiens
tttaaaagaaaaacagcggctcactttattctagtaaggtctttggatacaaagaacagcacaagtatttactctttagagattttaaaaaacaattgtatcgacatgagctaattcctcaaacctctttcaaactgggattaagtttgcttggattttgctcattttgagcatctgagtttgaacaaatttttgagggcagagattgtgtttcattcgtctttgaacttctaggaccctaaaacaaggctttctccatgggcaagattcaggcttgagcaccggggcctaaggcgattggccatactgtggctggctcccagtttgggctcccttacctgatataggtttgcaagatggtggttagtttttatcaaaaatggctggttcacccctgggtggtccacatcgtgtgctgctgagcacagagtccaagcatgatggtccaaaggctgagaaagcttgaagccggttaaaagaccaaattgggagattgatgggggtattttcccaatagggccccttttcattttgggcaaatccaaccccatggatcaatccccggggccgaatttctggccctcgggggcaatattccctaaggtggggcgttttaaattccgaactcaggcaaagggtttcctctgggaa

SEQ ID NO: 147933 - DNA, 858 bp, Homo Sapiens
tttgttaaatgaatgttttattttattcagaatctcttttcaatgaagcatctcacagaactagttccatggcaaacactttgggaaatactgaaccacagtcttcccattcatactcctgtttgttctgaaaacatcttatgttgcactttcaagtagacagaaggaagtagcaggggcttttctagagccagtggtggccgtcaacagttcaggcaactttacttagcttgtccttgcccacttcttcctcatttggaaactgctctttatccttcaaaactcagctcgaatatccccgctgctgagacattttctccaacttccccattagttggttctttctctaagcttctacaacaatttgtatacattaatggtgtcatctcttaggtgggaggtgatggaaaccatcacattggctgaaaattgtgtatggtcacaattttttaaggtcacagcttaagaagctgtccctttggagatcagtatatttggtttctctaagttgacacagtctgttcctctctctgtctctgagacagatcatattccatcagttaagtatgagttgaggcagctggcatgtatctagaggccatgtttaaggaaaaacactgatttttaattactgtgaaatcaattgtgtggatggtagattctccgctgccttctctagctcactctggggcatagactgattgagtggaatggtaagtagaagattccggaatacagtacagagaaggtcctccttatccgcagtttctgcatctggattcaaccaaccgtggacgtgttcaggaaggctcctttttgtctcttctcctcagggccgcccaataactccagtataca

SEQ ID NO: 147934 - DNA, 962 bp, Homo Sapiens
tttaacaatttaaaggttttgggggcaaagaggaattgggagttttaagatttttgcttagagaacaatctgcccagctaacatctactcatcatttgagattcagcctagatggcatcttcccaggactgaatcacgtgctcctcttgtaaaatatatccatgatacactgtagtgcacagtagtctcctggtacttaccatgcaaaattttcatgtggtttatcacgtttcttacaatgagctccttaagaattacctgataatggttaaaattatttcaactcccagagatatctgtatttcattaggtgactagagaatacaaaagtttttaatatctagcagtgaaactttcagatattttaacaggaaaaactatgtgacaccatgtaatataacacaatataatcaaacaataccatagaggcaataaactactagtaagattagtctgacatattttttaccatggttataatgtactaaaaacacctttacagtattttttcatgacactttacatttttatgtgttcatatgattatggttggccttagattatctgtccctggagggcatgaactatttctatccaaagccttctgtgtactctttatcactcatctgtgctaaacacaatggaaatgtatcaattctcttaaaggatcacttttacagccaaattttccctaattcctaatattccttaaatttaaaaatgatatctatcacaatgttcttctagtttctagtcaaaaaagatatgctcttagtccaaaagaaagataagctgcaatcatacacaaacactgtaagtttccttccatgtaaaataagcaaaattaggcatgtttaaaaattacatttgatttcaaaaataaggacactactacataagcaaatctttttttaagattattggagttcaccttgaaagtttgtaccacctagatgaacata

SEQ ID NO: 147935 - DNA, 1071 bp, Homo Sapiens
  misc_feature (302)..(302): n is a, c, g, or t
  misc_feature (391)..(391): n is a, c, g, or t
atgggccctttttatttcttggggtgagccaccaagccctggccccacgggggggagttatcccatggtgccggaattttttccagttgtccccaaaaccaaaattttcaaaggaaattgggaggccccccaaggcttccccttgttgggcccagtccactggattaagggttcccattggcctccaaccaaccctatagcttctgggacagggggaggccagagttcagacgccaaccacctgtccctgtgtccccagacagtgggggaagggagggacacctggggccctcagtgctcancccgtggcacaggcctgagtacgttagctcttctatactaagtgcaccaggcttgagcccccacacaggggaagaagggagtgggtggnctgaggccttcagctacctgggagcccagcagtgttctcggccagagatgagaaggctcctttaaaccaaaaatgtcatggctctgcccccaccctgcttaggcagggagggtgaagcctggaggggggcaattcctatgctccacaataaaaaaaggttttttaaatatattcatcaaaatagttttcttttaaaaagccccccactgctgacagccccactggctggctctccatcatatccctccccagtccgacacagccggaggggtcctgagtggcccaagcgcccctttgagtctttcccacccaggaggtctttgtgggcagggaggagagtgccctgaggtccatggcgtgtggggtgggttttccactgatgctcttcatcactattccaggcccaggatgtagttgatgccttggactacaccaatgatgacaggctgccaggctaccaagtatcgaagccagtccagcagttgcccatacatgacgtgaggcctctcccagggattgctgaacatcctcttgaggtctaccttctctttgcagtagggacacgtttgcttctcttcccacgatgcaccagccacggatgcagaactcgtggaagacatgattgcaggacagcctatacggttctcaatgatccctcttcactgacgatcccgggaatc

SEQ ID NO: 147936 - DNA, 769 bp, Homo Sapiens
  misc_feature (75)..(75): n is a, c, g, or t
ctggatttttgtctgttttattcactgttgcatgccaaatatgcaaaagggtacctggtcataacagaccttcancaaatattaaatacatgaatgaacttagctttatgtgttttggggaaatgtcacaacctccccggactttagattccatggccttaaaatgagagcttggtggcgtctatggcttgacccattcctgaaatcctggagctccacagatgtctgtgcattagtcttcctatatcattacatgacagagtcatcattttacttttgtcaactgtttcaggttggattttattccttaatcagtcactcgttcgtttaaccaattaagcattttcgagttcttctggacctaagcactgtcagtgagcagttccagcagacaccaggagcacgtggggtggaagtggtgcttgtcataatgaggttctgaaattctgacaggtgagagagagctgccacctcgccagctggcttcagctgtgcaggaagtgtagagccaggaggccctcagaaccttttgcttccatggatttgaggtactcgagagtcacggggcctgggttttgtggggtctttggctctgggttctctttctttctcaatcccccacttttattgccccctactgacacacattcatcttacttttaagcagatgtctatctcattgacacactgaatttgcatatggttgcacactggagcagaaggaggtgagggtttagggttctggtgtgcagtaggatattcaattcaa

SEQ ID NO: 147937 - DNA, 436 bp, Homo Sapiens
  misc_feature (170)..(170): n is a, c, g, or t
  misc_feature (177)..(177): n is a, c, g, or t
  misc_feature (240)..(240): n is a, c, g, or t
ttctcaaaagcccaacaggctggaatggctaagttacccaaacaacaaagatggtggcctgccctgtcccctaggaagtcagtctcaggtaggtaaaacactgttgctggtggctggctggagttgtttccttgattatgtgagtaatgcgagtacctggttgtttcagntgaaggngctgtattgacttgcccttttcattcctctccatgagagccgtgcaccctagcttcttctagncagtcatcttggccacacacccccataatcgtattttttaactaaatcattctttaaaactctaacaaaatatttaaacatttaaaaagtgtgagctttagaaatgcctaattacatcttaggtttgagacacgtagcagttatgtacattgtcaattccagattttgcatcttacaaggaaaggacttagatctt

SEQ ID NO: 147938 - DNA, 527 bp, Homo Sapiens
tttttttaagaaaagcaactttattattcgcggatcggcatcaggggacagcaggagcctagggtccctgctccccgacaaggctcaggcaagctggccagggtgggtagagtccatctgcacatgccctaggcagcaccacagccaagggacgccaaaagatgctccactctaggttttatacctaggggaagttgactcactgagcacaagtgttgcaggacatcttgttctaggagggacagggagagaccttggactgttccagccagttccttcttatctcaagttgttgcactcccagcacaatcaacagttattctgcatgtacactctgtgtcttctactgtccaatagcttccatcaggtcttcaaagggctcacaatcttccatataaaaggaagtaattcacattggagagggtcaagaaaaatgccccatcatgtgttggccagtattgatctcaggccacacagcaggagacgagcggctggggagctagtgaagcttcatctgttcttacggc

SEQ ID NO: 147939 - DNA, 595 bp, Homo Sapiens
cagccaactggaagtcccagtttgttctcatgtgaattattgctaatataaatctctaacattgttcctcaaactagttcaagatctaagcaattttttagtgtgagagtgctccagtgttttagtcaattcaagttacagacactttgaatattatttagctcttcctgtgttactgttgataaatgggttttttacatgtttacccgagttgggttttttctttttacaataaaacatagcccttgggcttatcactagagaacagagatttctctaacataaatgcgctaaccaacactaagtacaagtgttcagtttgattctaccaaatgctactatttttttctcattattttttaaccagagccatttgcatggaaaaaatgctacgattaactgacccgtaattttcctcttatctgtgatgacttagcaggtgagagagaggaaagtagctcctgtaatctgggaactggcctgacacagccaggcttcagagctgttagggctgacctggtgctcacaggtagccaatgagttctcttggacacaaacaatctcacaaaacaccagcatcagacaaggtcactca

SEQ ID NO: 147940 - DNA, 481 bp, Homo Sapiens
tgtccatttcgtttgcagttgtagtgtttgtggtagtctctgaactctcgtaatcagggactgaaaatctatttgtccatagcaggtgggaactggtgtagagtgagggtcttgacgtagaaggagatgctggcgtggtgggtttgtctggctgagctgggcacctcaggcgatgacagataggctcttcatccagactcctgccccagggctgctggccctccccagcttctgttgctggaactgctgagggctcatgcttctcagggctcccctcaagcccttcagtgtctgtgggcttctcacgaggctgctcctgagcttgcctctctgccctcgaccggctgaatgtcctttctgcttcttgaaggtctgttagggtgacaccttgagtagaccttcgtgtctgccgagcttgtctggagcgtgctttccgtaaagactctgcttcctcatcccgtaacagagtcagataggacct

SEQ ID NO: 147941 - DNA, 808 bp, Homo Sapiens
  misc_feature (169)..(207): n is a, c, g, or t
tttcaaatatgttttattctttcatgctttaaaataattatcattaattgaacagaatggagcaatatagattgcaaagagttttctgtactgctgttttctcttaatgttaaattaatccacccatcccaagagcagctataaaaagccattaagttcccctaatacnnnnnnnnnnnnnnnnnnnnnnnnnnnnnnnnnnnnnnncgttataagaaaaagcgtctatcactttatgttaatcctaggttgggatcttccttccactctgaaagtttgtttcaagtttggaaacctttttaaaataatacatacattactctccttcattagagctgttataaggagaaagaaatgtatgtgtgttaatctgtgtatatatgtatgtttttcttattaaaataatttctcataatttattatacaaaatttaggaaaaaataagcaaataggagaaagaagttatttccattcattctctgattggttccaatgctgttcacactgtggcatcttagcagtctcatttctgtgcacagacaaaattacttattgttgttgttatttctttgtttgccattaaaaaacaaacacatacaaaaacaaagcaacaatgaaaagcaagcacctacagtaccctacatcttttatttaactgcaaatcatgaacagcttttcatcctggcagtcattagttctgatcactaaatacgttcagttctctgccttctcctccctggccatgtgacttgctttgatccccacctttgaaaggagaccgcatatacttttcgaggcagaagtttgc

SEQ ID NO: 147942 - DNA, 741 bp, Homo Sapiens
  misc_feature (239)..(367): n is a, c, g, or t
aataatacctacttcataagactcaataacataataatatgtaaaatgcctgccagggctcaataagatctaaaacttactaagtgttactaatatcaactattttcattattaacgatttgttcattttgagtacacccactgagccagattacttgttcaaatcccagctccatgccttattgtctttgttaatcttgagcaagttactaaattttctgtgctttattttagctttnnnnnnnnnnnnnnnnnnnnnnnnnnnnnnnnnnnnnnnnnnnnnnnnnnnnnnnnnnnnnnnnnnnnnnnnnnnnnnnnnnnnnnnnnnnnnnnnnnnnnnnnnnnnnnnnnnnnnnnnnnnnnnnnnattctaccatcactttatttttaggaggtttcaaaagggtagttctttgtgaaagataattgtgaaggacttagaaggataccaaagacacattttatttacttcccaacatggcctaggtccaattctggtacaatctacttacaaaatctaggtggcaatccctctcccaaggttctttcctagtaaggttcttttaaaaaagttgtttacacaaattctgaaagtctgcccatcccccacccctcattcccttatgtaaatcttaataattgattgatctgtggcagagttctatttttctgtaaaagttttataagatagagatttataatttgtttttcagaagaagattgttactaaattggtttaaa

SEQ ID NO: 147943 - DNA, 424 bp, Homo Sapiens
tttgcaggctttgagcaatagttttattacttgtcacaaataaagcaccgggcatagtctccaaagcaggaaagtgacaggagggttttatggggtgatagagagggaagagggtatgtcgttgcatggaaaggggttgcagttgtgcagatgcagtgagtcgttatttcagcacacaggtcacatgttatggtaatgaagctatagcatctcccagggtgaagatactagcatggtaatgaggaaagtacactgggatccatctgtaaattgctgaggtctgtcatgaactggtttaaaccagctagctggctgcattccacacagggtttggggaaaaaagcaggtgattactcaagttgattgtactcctatagtccctggagacccctcctatctgcttccagccccacccaaccctctg

SEQ ID NO: 147944 - DNA, 505 bp, Homo Sapiens
tttgatggtaccagcctgggcacccagccaccctcaccccagccttggggagaccagcgtggctggctgctgcttccgtttctttattacctgagcccatccggaccctcaagacaactggagcccaccctgccctggaaggctcagctcccctgcttgaggacgccgcacacctgttccaggacgtgacacaggctctggtccttgggcgtcctgctggccaaggagatcttaagcttgtcgaggtaggtgtgctcctggctccagggttcctggagcctcacgaggtcaggggaacccttgtagaactccaccagcagcatcatctcgtgaaggatgtcattggtcaggaagctgtcctggacgtaggccatctccacatccatggggatgccatagtcactgggcctttgctcgggaggaggcatcacccagaaaggcgagatcttggactcggggcctgggttgccagaatagtaaggggagcagagcagggcgaggcagg

SEQ ID NO: 147945 - DNA, 378 bp, Homo Sapiens
ttttttaacagcagatgtttttattgtttaactcaaacaataagcttatatattttggatacttttcttcaaaaacaaaggcatataattattttaacaatggcttcatatgccctctggaattctttgacaacttgagtataaacagggttttcataaaaggaatcaatactgaaccaggtctgtgtgaaaaacttaacttttggtattatatagctaattcaagattgaccttcttagtacttacttatcagttgggggaggaaaaaacaaggatctccctgcttccctccccaaaatttataattgattttaatattatagaaagagttctcatctacaaatcagaaatcctaggttcttgtgtcacctctgtct

SEQ ID NO: 147946 - DNA, 441 bp, Homo Sapiens
gtacatcaagaccacagcaaggtggttttatcaggatagaatgtactatccaaatttacaaacttctctcagaacacctagagaaagaactcttttctggtcaagagcctcatatcaaagaaagaatacctaaactagaagcatgggtaaaagggcctgcagtaatcaaacaggctctgccaggcaggcaataaaggggagctagtgctcagcttccagaacatgaggtattctgaatatataccccagagcttggtacaccaagagcataataggttcttagatctcttcaaggaaatttataggcttcagaattgctctcccggatttaatccctacaacaaatgatgaggtacggacgcgtgggttcgacgatatcccgggaattccgaccgtaccagcctgctttttttaccaactggttcatatggtcactatgct

SEQ ID NO: 147947 - DNA, 767 bp, Homo Sapiens
attcaggagactgaggcagggggattgtttaagccctaggagttcgaggctacagtgtgctatggtcacgttactgcaaaaaggaaaaaaatcaagaatatggaccctcgaaagtcaagtgaaaaaagtatatcaaaaaggaagaagtgacaaaacaatgtcaagtaacacgtcaagaaaaattagaactgaaaattaaaaatttatcactggatttagctgttggtgaccataagagcgtgggtacagtagagtggtaggcgaaaacgtctggtcagagtaagaaacaatgggaggaagagaaggactgctaatagcgaatgcattcaactctctggaggagttttgctataaacaggatcaaaaaattttaggcagtagccagtgaaggaagtaagactttagtgtttttaagatgggagaagagcttttttgtacaaaaagaacaacatgagaggtaataaatatactagttatatattcaagctctgaagtcactctcctaaagtttaaatgctggctccactactcactagtagtgtagcaagtcacctaaaatctcttagccccagttaattctgcaaaacaggatctttacctatattatttcctaacattagctaccacacaggattaaggagtaaatgagacaacgctcataagtacttggtacaatgcctggcactgtagccaatagtaatgacagcagtggtagtgttacattaagaaagcacacacagatttagtcacaagaacattcagagtca

SEQ ID NO: 147948 - DNA, 412 bp, Homo Sapiens
tttctgacaaatttatttattagcttcctttctgttggctgtccaagtttcaagacctgtaataagagacattcttgaataattctgcttagaaatatataagtaaaataagagctccaggccaagccacatattccatgggcagaggcatgggcttttcacaaaatcaccactcccatttgtcttttaatatagttatttatcaaaatcacatcaatctcagagcatataaatgaaagttaaacaattattttattacccattgttttgttgtttgtttgcttgcaagggattcagaaaaggggcaactttggaaaaatatcttggagaaaaggctatggaatatggctgagtagtaacatatgctattctcaacaccattcgttgcttctggagaaggtaaggatttatg

SEQ ID NO: 147949 - DNA, 2196 bp, Homo Sapiens
  misc_feature (37)..(37): n is a, c, g, or t
  misc_feature (89)..(89): n is a, c, g, or t
  misc_feature (1001)..(1001): n is a, c, g, or t
cgggaaggccagaaggccaaaagaaagcggaaacaanctgagagaagtctcatttgtcccccatttacttgccccaaccaaacagtttntgtgtgccctcgatgtaaggctccttcaaccagcagctgcaggacagccttgagccccaggcgggggatgtctgagacaggcgggtgagaagctgacaggctgaggcccacacctgggggtccatgcagcctcagagaggcaaagaaggcggtgcaccccagccctttaccagtcccaggagctgggagggggataaggcttcagaaggaaagggacaaatggccaggagagaggcagcagcttcagctacttcctcctcaggatgtagcaggagaggagccaggtcagacagatgggctgaggcagattccccaaagtgcgcccctagggctgcagggccctcgccaccctgctgttcccaccctactagcagtgccaagttgcgcaggaaccgggccgtgaagggaggctgtaatgtccctgcatgcacccgagccagacagcttcggaaagccaggggcaggaggccagagaggctgaccactagccctgcatataactgggtggccaaactcaactcttcagggcttcgggctcggctcagcagatggcccaaggcctcaggtccacagctaggccgggtatagacagacagcaggcccaagagctggtgctgccagaggaagcgcttccgttccaatcgtaacgtctctccacacagctctccaacatggtttttgagcgcatctaaaaagggcaccaagcggggaggtgggggcgggcctagcaccccttccccaggagaccctccccggtgatgaaccagtttttgcaggtgcagcagcagcagctggattagccggtcacaagcctcacgcacggtgtctggcacagccaggccctgggtggtaatgaccgaagcaggcatagctgtgtccaccaggaactgcagcaagcggtaggcacctgcnccagaggcctggctcaccaggtgcacagccaggttcaacatgttgtccagctcctctcgggggaatccttgaaggtgttgctgcagctggctcagcacagctgggggcttgaggcaatccacaagctctccagagacagtgcccagcaaagctggtgacatgactgccagctgcagtaggaacggaaccgtggcctgaagggaggggtccccactgcggcctccagatccccctgccaggctatcatggaacattccgcaggagctcccgtcggatgctatctccgtggcgggaggccaggtgacctaggatgcctacaactgaggcaatcttgggcacccgtttctccgcaggaatggcaggagatccagggaaggggtctgtagagggggtctgagaagagcttccaccactactgccagctccacctccagccccaccatggacacaaaagtccttaaggccacaggagagaacccgggaaatgatggtgccaggaaaagaggagccaatatgtgccacaacccagtcaaagtgtggagaatgctgaacagaggtatccagcaaggcatccacacacgcatctgggcagctaccaatgagagccgagaggcactgcacatagatgtccattaatgtacgcgtggccctacaacccatccacagctgtagcagttcattaagagcgccagtagcgtggggaacacgctggtgctggcctgagtacgtgctgctcagttgccccatgaggtcaatggaccatgcactaatcacaggtgcccaggcctttgggttggcccggataaactcagacagcacctgctgcacttcctgaaccacatcctctagaccaggtccaccagcagggacatgagagggtggaggtggacggaggtgaggtggaccagccacaggggtttcatccagggcagccaggtgggcccggacactctcatcaaagacacctctcaagtggtcaagcacagcagcccgagcaggtggcaaagaacggagcaggagaagaccacagcgagcatgttcccgggttgagagttggtggcccagaatggggtctacgccagtcagaaaagccttgatttcctgggacagctcctgagcactgagaggcgcgggaccgtgggtggccggggcaggcccaggtggccctggggccccgggagggtcgcacagcgcg

SEQ ID NO: 147950 - DNA, 490 bp, Homo Sapiens
tttcaaattcatggtcttttatttctttcaacaatttcatacattggtgatgattcatagtatttgcagaagttatattgctgcaagaaaaatcacattagatacctaaaacatgagaagaaagacataattctattctggaatgcagtatggtatagagaaaagagctttagaactaagcataccagggttccattctcaactcatgtttccaacagggtgactttgggcacgtcccttgacctttctgagtttcagattccttatctgcaaaaaaggaacaatacccccttcctacgcatagtgctattgggagattaacttagatggcttagttaaaagtccccagttcacttcacataataaatggcagttgccatcctctttcctgggatcctttcggagaatatctatctgttattttatcttctgaaagagttcctggctgccaagtgtaacttttattcatgctctgggttctccagcagct

SEQ ID NO: 147951 - DNA, 442 bp, Homo Sapiens
tttttttaaaataactttagcaagagccttcattttaatgaaaattgaatttaaacaaaagttgtgtatcttcttctggctcacagttgtacagtaactgagttcaaatcctgggttcattcactagtttagtgacacggattttgcatccctacttataaaatggaaatgatactgcctaaatcaaggttgtgctgagaattaagtattacatgggaatgtgtgtaaagtgcttagcacattgcctgggacatatacagtaactgcttcccaccatacagatactgaaaagcccaatcactaataacaatttgttatatttactttacgtggtgttttttatgtgagttcgcttatgagtaatgagatgcaaattcgacttgaaagttttcccacacacggtacatttaaaaaggttcgctagcatgtgggtcttctggtg

SEQ ID NO: 147952 - DNA, 716 bp, Homo Sapiens
  misc_feature (217)..(231): n is a, c, g, or t
tcaattttcacttttccccccttcggtcgtacagatttccacagacttgatattttgcagttgttcttggaagagagctattttgtaattgaaactctagcattgttcgcatctacgggacttggggctccagcactctccagcgccctttcttgagctaatttaggatttggctgcacctgacctctcacatagcagtagaaaatatttccttggnnnnnnnnnnnnnnngtccttctcccctttccctcctcccctttatctggcaacgaatgtacctcgtgactccccagatgcctctaatatagacatctcaagtttggtttctgccatgaaatcgaggcagtttccaacaaagatccaattttcaaatgtgctgggttgccacctggcctcctctaactctgcatagcaatggtgaccttgcagatataatcaagaacccaagcttgccctcttcaccctcgccttgggtttgaattgcaaatagaaaatgtggggccgacctgtggagaggtcaccatgatgtatggagggtccatctctaatatgactgagctgggccccttctccaacctttgttcatttgtgctgcagattttcaaagcatttgaaatcggagctttcaggatatctgtgtgaccattggcaaataattgttaatagatccgatggtgtgactttattccatacctgctctgcttcaacccaacaac

SEQ ID NO: 147953 - DNA, 875 bp, Homo Sapiens
tttttagcgctggggtcagatggaccctggtttattagaaaaagaaaagcatgtggagtccttgtctttagaggaaggccccctgcatgctggttgacttgcagcagaactggctggaacttcttcttcccaggaaggacatcttcctgatatgccagcgtgactcctttgggctcgaagatgcctcttcatcagatgggtctagggattcagatgctacgtcactgctgaaccctggtcccctccgcagagggcaatgactgctcctctgggggcaaggatagctgctcctccccgggcaccagcagccactccatggatgatgatgactgcttctccgcgggccacagctccacctccataggctgctcgctcgtggacgtggacgattcttccagacttggtggcagagtctccacctgagatttgtgggtcttgtctggaagtggcaccgtcccctccttgggggtgtgaggctccttttgccagctcttccggaacggtgtggagggcttcaaaaatgctgacttctcctccgaggagtctggctggctctccaacgtcagctggcctgaaagaaatgactggctccccagaggctgtggctggctctcaaatgacgacagctggctttctctgtgcaacagtgatttctcctgaaaagaatgtgacctctccttggtcaacagcaacttctcaggagaaggtggcctctgcttgggtgacaatgacctctcctgtgcccttggcaattgctcttggaaagactcagatagcctgttgctgctggtgagcacatatttggggagggcaggttggttttctggatgaagagcggattgtctatccatagaaaatgatgagctaggtgtagg

SEQ ID NO: 147954 - DNA, 694 bp, Homo Sapiens
aacaacttgatttttcagagctttttgaatttcaaaattgcaagtattaataatacttggcactggaaatgcttaataccaatctactaatcctacttctagaaatatattttacagaaatatatgcattaataaagtagaagtcctaatcccagtagctggactcaaaattgtccccatccatgtttaaacaaggtgacagcaactggtggccagggccaagacagacttaaatcatgccgctagaccccagaatttcttgcaggctagcggtacaggctcactctggtcatttcattaaccatataataatatgattttctgcaatgattttggggaggcctcatttacgactgggttttgccagatttgattttttatcgtatccatgaaaccgtattaaaacaattgaagtctgcttctaaaaaagtacaaagtcatactcattaacacagctttattagattcccctatttcccactcttcttttgtaatccaggatacattttcttcctggagaggcagcctacgtaaaagttaccttaaaataggcagaaaaagtaagtcattcagatatgacactaagtaaataaacaagtacaattaaaaataaaattaaagtcaggagtggtggctcatggggggaggcaatgaggggggatagatgtctaatttcactttgaaatcaagtttt

SEQ ID NO: 147955 - DNA, 627 bp, Homo Sapiens
tttatgttgaaggtaattgatatttactgacatgttaaaagggcttaaaatagaaacatttatgcattttgtcaatgaaaaacggaatgactgaaatatgaaaaaagtcttgcctgtgtaatgtcagataaccttaaagtcagataactttatataaaaataactgtaaatttaaataactaatttttgtcttatccattatgttattatatgtcaagctctttgaagttgggaccctgttttctctattgactaagaggcagatctttgtgtttagtagcgaagaaaaccctatgtcactgatctagtttgtctcaaattgagccaggaaccaaatccacaccatgcatgccgaggtgaggttttctgtttctctatttagcaatggatgctgtcagaaatacagaaaagacagacacagggactatttttgagtttgcacatgggagcacatgcattgtgcaggaggctctgcatcctggagtcatcttgggcacttggctgtgagggctggcgtgggcatcttggttttagctgaatcctagcacattgctataggtacctctaaggcaggagaatagggcctggaggcagggaatccaaaaactccctagaaccaaatcagat

SEQ ID NO: 147956 - DNA, 504 bp, Homo Sapiens
caatgtgcaagaaatttattagaggatatgcctgtgaaagaaaatgaggaggagggcaggagaggctggtggagctttcaggccatgatgcaagtccgaccctaggtgaaggagagaaagagggaagggtggaggaaccctaaattgccatgcatttctaaggaaagtctgtcaaggccatcaagcagtcctagagccaaattcgcccatcggaggatcctgcatctccagaaataggcctgcctcaacaaagatgccaggcttattcacaggctgggagcagcccgtgggaagcatagacttgcactgtgatgaatttccaaggcagcagctgaaaccctgggtcactcttgttccttgcagtcagagaggcatgttcttgtggtcaccaccagtattattcaatgcagattctttggcaaaccatgtgttattgcttcatgcttccagccaacactttgtgcagcagaaagtcctcgaactggctccaaaacttttcaattc

SEQ ID NO: 147957 - DNA, 435 bp, Homo Sapiens
ttttaaagagcttctaacagcttctgtccatttattggttggatgacaaatgaaaaagtttctttggccttgacaatctccatcaaagaaaccaaataagcatgttaaggaaacatacagtatatgaacagttaattcttgtattgcttggacatcaataaatctaataaaaacgaccaagaatagtcactcagttttacaatatagaaggcagagaaaactctgacactccaagttgtgaagacaatgaaacattccagtactccattagaggactttttgtatctacagctgcctgtgctttgaaggtaaaaacccagaatttaaattcaaacatattcagttaatgcacttatgcattttacaaatttttgttctggtatagcatatgaaagggagctatatctgcccccatttctcttttatgacacatgc

SEQ ID NO: 147958 - DNA, 647 bp, Homo Sapiens
  misc_feature (20)..(21): n is a, c, g, or t
  misc_feature (86)..(86): n is a, c, g, or t
aacagggactgtactgctgnnagaatggtgcatctgccattacctggttgatagacgatggtctgccttcagcagtctgtgccacntgctgtcctggacagccaatctgctgctgtgtctgagtctggccagcagtgacagccgtctggggctgctggatgatgatctgctgggtctggccctgctggccctgcacctgcacagcctgtccaccctggatctggatctgtccaggtgggaccaactgtatttgctgcaaaccctgtgttccagaaacaggtacttgcatgatggtttgaccttgtccaccagggacagcctggaccatgatgggttggccagttgatgtgattagctggcctccactgacctgcaccattaatggctgcccttggacctgctgctgaatctgtcctgcctggacaacaatctgctctgtcgaactattgctgtttgctgtatactgctccatggtccctccaagtgagattcctgtccactctggagatcctagaaggctgtgaggtacactccgtgcctcgctcccccggttcgctgcccgcgctgattggctccagtaccggactccgaaacccaatcagaggctccagccgccgctgccgccgccactgccgctgcctagcaaa

SEQ ID NO: 147959 - DNA, 511 bp, Homo Sapiens
  misc_feature (432)..(432): n is a, c, g, or t
  misc_feature (458)..(458): n is a, c, g, or t
agcagtccacgggggttggcgagcttctgggaggaaagggtggaacgtgactgtcaggtacagagctacagagaaccccagcatgaaggagtaggtggcaggggagaaggactcaacagagatggagaaagactaagcccaaaggtgatcaacaacaagagtgaaggaggaagtggtcagctgtggctggggcaaaacaagcccagtaagttacattggcctgtgtttggtcatccagggacaaagtgacctttttagtgcctgtaggcccagcgcgttggggaagaatttagaatgcagtggggataggtgtgagaggagcgggggaagtgaagattgagttgagaccactggctggagaacttgaccgggaagggagggcagagagcagcatggggtgaggggagggaatggatccaacgagcgtcttangatgagggagttgtgagcgctcaacnaccattacaagaagggatcggggattgatagactgacagatgcatgcacagag

SEQ ID NO: 147960 - DNA, 501 bp, Homo Sapiens
ttttctagagcagaataatttcactttgggaaattaactaaatcaagaaaatgatatgaaacaaacagagacaaactggacaaagtgcatacccacccctaggctgcaccaacccagcgctcctggaaagaaatcccgaggcagggacgtaggtcacagtcacgccagcgtgcagggcacacgtaacccccgtcacggtcacgccggcatgcagggcacacgtaacccccgtcacggtcatgccagtccccccgaaggaaatcccgacgcagggcccacgtcacagtcacactggtgtgcgggttcacgagtttttccttttctctgccgttatatttatgtggttgcttgcggttcccagagcgaacttgctcacagctccagcaggccgactgggcgcccgactttggtcccagctcctttgtccccagttggggggccacggccacgggggcgaagaagttcctcattgcttttaacatcaacctgctcgcacaaagg

SEQ ID NO: 147961 - DNA, 122 bp, Homo Sapiens
gaaacatgctcaaagctttttaaatcaatatttagaaattagtttaatgatttactattatacctgctagtgatatttatgtgatatttataaatgaaaattaatgcaaaatttttaacaaa

SEQ ID NO: 147962 - DNA, 458 bp, Homo Sapiens
attgcccctggggtggactgccccatggaattctggaccaaggaggagaatcagagccttgtggttgaattcctggtgcccaaaggggtttacctgaaattccctgggcgcatgaatgcaaaccttaggaccattaagcagctgctgtggcaccgggcccagtatgagccggtttttcaaattgcttaactggcccggggccttatgtgttcacttgcatcaaccagacagcggagcagcaggagcttggaggacgagcaacggcgtctgtgtgacgtgcagcccttcctgcccgtcctgcgcctggtggcccgtgagggcgaccgcgtgaagaagctcatcaactcacagatcagcctcctcatcggcaaaggcctccacgagtttgactccttgtgcgacccagaagtgaacgactttcgcgccaagatgtgccaattctgcgaggaggcggccgc

SEQ ID NO: 147963 - DNA, 713 bp, Homo Sapiens
aagaccagaagagatgtctttattgtacattttcccagatattccagatatcaatgcttacacttttgaagattgttttcatacaatacaatctaccaaagaatgtttttaatttatgtcaaaacctctgaaaattaaatgtggtgaggctataagaagaacaaagaaggtcaccttttgagagaatggatgaggactgccttcagttctaaacacaggatcacctcattaacgagatgtgcccccaggcatgcactttccaaataaatatttgttgagtacataaacaaacactttaattttaccatttttattaaatagtttctaaaatgttttataaatgcccttgcctccttaaaaattacttttagaatgaaaatgtaattgttttgtcttgtgtcatcactgtgaatacccactgctgtgttacataaccatgtgtcttgtctgccctttaagttggttgctttctctttcagttccaagttctcagttaagatgtttctactgctatgctgtgcctgtgtctaataacatttcgcattcttccaatctgtttttcaagattcttttcttggtttaaacatgtaatcttgtctctttgctcacctgctcactcttcaagcaagcatggtttccttggatactggatgatgccattcaggtctatgtttttatctgaaagtggtgcccccctaccagcagcctccgag

SEQ ID NO: 147964 - DNA, 648 bp, Homo Sapiens
  misc_feature (76)..(147): n is a, c, g, or t
cattatatgtctcttgtatgttttgaaactcttgtatttatgatatagcttatatgatttttttgccttggtatannnnnnnnnnnnnnnnnnnnnnnnnnnnnnnnnnnnnnnnnnnnnnnnnnnnnnnnnnnnnnnnnnnnnnnngattgtttcattctttgcttgtcatttatctgttgattagaccactaaagtgaaggattcaagctaaatacatcaacctttctatttaggctttatcagctatatgtaaattcaattctatcaaaattttctgagtgcctcctcagtgtgtctctctgatggttcctgcccggtatggctggcatgaagaagatcctgtaaaaaagagaattcatttatttattcacttagtttgttcatgcatttgtttaataaatattgagatgtaccatgtgcctgacattgtggtaggtattgggaacacaggagtgagcaaaacaaaattcttgctctactgcagttaagggccagggagaggcagaaaaagtaaataagtaaaatctatagtgaatttggtggtatgtacaagcggaggggaaggggttacggttttagatggactggctctttcagaagctgacacttgtacagacctgaaagatgtgaggaagtgagctatgc

SEQ ID NO: 147965 - DNA, 995 bp, Homo Sapiens
  misc_feature (264)..(407): n is a, c, g, or t
  misc_feature (598)..(606): n is a, c, g, or t
  misc_feature (689)..(746): n is a, c, g, or t
ggggtgggtcaaggagctagtttacaggcttactgtgatttaagcaaatgtgaaaagtgaaaccttaattttatcaaaagaaatttctgtaaatggtatgtctccttagaatacccaaatcataattttatttgtacacactgttaggggctcatctcatgtaggcagagtataaagtattaccttttggaattaaaagccactgactgttataaagtataacaacacacatcaggttttaaaaagccttgaatggcccttgtnnnnnnnnnnnnnnnnnnnnnnnnnnnnnnnnnnnnnnnnnnnnnnnnnnnnnnnnnnnnnnnnnnnnnnnnnnnnnnnnnnnnnnnnnnnnnnnnnnnnnnnnnnnnnnnnnnnnnnnnnnnnnnnnnnnnnnnnnnnnnnnngggaagaaagacaaggtaacatgaagaaagaagagatacctagtatgatggagctgcaaatttcatggcagttcatgcagtcggtcaagaggaggattttgttttgtagtttgcagatgagcatttctaaagcattttcccttgctgtatttttttgtattataaattacattggacttcatatatataannnnnnnnnacattatatgtctcttgtatgttttgaaactcttgtatttatgatatagcttatatgatttttttgccttggtatacattttnnnnnnnnnnnnnnnnnnnnnnnnnnnnnnnnnnnnnnnnnnnnnnnnnnnnnnnnnncatttttggattgtttcattctttgcttgtcatttatctgttgattagaccactaaagtgaaggattcaagctaaatacatcaacctttctatttaggctttatcagctatatgtaaattcaattctatcaaaattttctgagtgcctcctcagtgtgtctctctgatggttcctgcccggtatggctggcatgaagaagatccacggacttgcgaatgctaacgcggggcttggggatgggtttggag

SEQ ID NO: 147966 - DNA, 593 bp, Homo Sapiens
  misc_feature (420)..(420): n is a, c, g, or t
ttttttgattttgaacatttatttataatcatctaaaggacccaagcattttatagaaaagacaatatactttccaaagaccctggttaactgacatacaaatccaccaactaagaactgtatttctattagttaaggcttctgtggctcaactttaactgagccaaaaaatacactaatgggccaatggggacacagatgggttagggaactacccctgaacccaaagttcatatatagccaagaagttcaatgacttcaagctacacgaagttagcacttaacctatccacggttcttcatctgtacaacaagcatgtctgggttatatgacctcctgggtccggcttataaatctaacatctacaactgcaagtcaagagtaccaaataccaatatacaaaaccacctgcgcagacncagtgcagcaacttgtaccaaggtttgaaccacacattcacacgtccagcagccacagagacgaaaacgacacgccagcctgtcctgacctcacactccccagtctgagggcccggcagaagcgccacatcgccttcctctcctgttttttcttatggctgctgctgcctcgg

SEQ ID NO: 147967 - DNA, 502 bp, Homo Sapiens
ttttaactttaagaaaacaaaacaacattttatttttagcatcccatataaaaagttgtattgcatggttatgggtttggtttttattttgaattttctcccctgtgcagaagcaccaaagcatcttcagtgctaagacctggaaaagtcgaagtccctcctggagatccagtcacaccacaggagagcagagctgggggtgcctgctgagttcactccatccaccccaccccactcccagaaccgtacaggctgagcagtccaggccaattcaggtaccctcttctggctctatgaagaaagtctaggaagggagtggagagagttctggtgggtgggaagtccaagatcaaagcgccagaggtttgtagtctagtgagggctgctctctgcttccaagatggcaccttgaatgctgagtcctccagaggtgagaaacgcagtcatccctgggtgactttgggctggtgactctcgggcttcctgctgcagactctgctct

SEQ ID NO: 147968 - DNA, 342 bp, Homo Sapiens
ggtttttagtaaaaggtttatagaggtgagcagccatcaccacacacaacctaagaacattttcatcatccccaaaacaaacccacacactggccactgtgtccccagccccaacccccaccaactcccggccccggcacccttcaatctctggctgtgctgggacactccctatagccggagccttccttcagttagcgtcaggttccgggttcatccacggggtgcctatgctggtgcctcactcctttttctctcctggtgtggatttcccacgttttattctccattcatcagctgacggacatgtggtttctagtttttggctactgtgaacagtgc

SEQ ID NO: 147969 - DNA, 619 bp, Homo Sapiens
tttttaaaacataacaagttttcttattctttattagtttaaaggaagctagaacctaataacaatacgccacatacggttcagaaccaaacaaaagctgcttagttatttattttgcatttgcattttgtaggaagtgagaaaaaaacagctctattgggactcaagtttattttcaattaaaatccccataaattaggaaatgtcttataaaacggagaaattgggaaaaactgttattcagaaaaaaactttcttgagtgtgcttgtttcctgtagcaccttggattttgtgatcagtcttttaaagatattttttaaaaaattcaacctctgtcttcacatttaggacagggcataacagtgtcttgtcctttcatgcaaataagaggaaaaatttatacttgcttagtttcgagcattgaaagcactcgcccctaattctgccatttgctcatgtcccacatgaataaaaggatacagcttagaaaccagggccttgctgctattgtatttttttctaattaaaattcagagtattaaacacagttgagtacatccatgcatacatgacataccgtcatcacataccggaagctccaatcaagagccccgagca

SEQ ID NO: 147970 - DNA, 472 bp, Homo Sapiens
  misc_feature (41)..(77): n is a, c, g, or t
  misc_feature (257)..(351): n is a, c, g, or t
tttattttaagttctaaacagtttcggtttctcaaccgttnnnnnnnnnnnnnnnnnnnnnnnnnnnnnnnnnnnnngtgccactgttctatttctaggtctttaaggcttagcattcgttcaaaacttgtctgcattaaatcatcattcactaacctcttttctttaggtcgggtatcttttgatgctggtgatgacttaggtttaggcttatctgcttcagattttagtttgagtaagctatttatttgaatttnnnnnnnnnnnnnnnnnnnnnnnnnnnnnnnnnnnnnnnnnnnnnnnnnnnnnnnnnnnnnnnnnnnnnnnnnnnnnnnnnnnnnnnnnnnnnnngttttttctttaagggataagggtttttcatgttgtgctttattaccgtctactatacttgattttttttcttcctgtatgtgtttggagttagttatatttatactttctttatctctag

SEQ ID NO: 147971 - DNA, 419 bp, Homo Sapiens
  misc_feature (41)..(77): n is a, c, g, or t
  misc_feature (257)..(351): n is a, c, g, or t
tttattttaagttctaaacagtttcggtttctcaaccgttnnnnnnnnnnnnnnnnnnnnnnnnnnnnnnnnnnnnngtgccactgttctatttctaggtctttaaggcttagcattcgttcaaaacttgtctgcattaaatcatcattcactaacctcttttctttaggtcgggtatcttttgatgctggtgatgacttaggtttaggcttatctgcttcagattttagtttgagtaagctatttatttgaatttnnnnnnnnnnnnnnnnnnnnnnnnnnnnnnnnnnnnnnnnnnnnnnnnnnnnnnnnnnnnnnnnnnnnnnnnnnnnnnnnnnnnnnnnnnnnnnngttttttctttaagggataagggtttttcatgttgtgctttattaccgtctactatacttgatttttt

SEQ ID NO: 147972 - DNA, 622 bp, Homo Sapiens
  misc_feature (64)..(161): n is a, c, g, or t
tgctgcacttggtgatgcaggccagcttgtctcgaggcacacgcctggaatccatttcaatatnnnnnnnnnnnnnnnnnnnnnnnnnnnnnnnnnnnnnnnnnnnnnnnnnnnnnnnnnnnnnnnnnnnnnnnnnnnnnnnnnnnnnnnnnnnnnnnnnncttctttgatccgaccctggaagacgtactgaagatttcttcactgtggtaaccttgcgggtcttcttgttggttttctttccttcaaacttggagaatatgagggattgggccccttggctgctctgactgctggcaaaggcctcttcttcctcccgctggagtcgttccaccagctcccagtactcctgaatctgcttctgcctggctttgtgctactcttccctccagcacttggagcagaaaccctgccaggtagggttgccacagtaaccacatcctttcttgcacaggatccacatgaattcctcggcgttcagacctaaggctcatcttcttcctcgcctgcgtctccaccggcgtccaaagccccgctcgcccgcgtcgttcgggtaggtctcgactccgcggtccgctaccgcctcatacccaccctcctcgtgccgattaaccacccggcc

SEQ ID NO: 147973 - DNA, 1138 bp, Homo Sapiens
  misc_feature (770)..(867): n is a, c, g, or t
tcttgttcgtctgttctttgtcatgttttcccccctgtttccccatgttttttgtcccgtccgctctcttgcctttttctctctaccctgtccgttatccctccttatttacagcactaatttgccatatactccctacgtggtcaccgcctaactcgttccatgtgagcacgtaaccgttcacgtttcagagccatactgtcacgttgaattcgagcttaattcccagtggtattctcaacgatgtctgacttctcttgcatgccatctgtccatcatgaggtcttttccactttctgggcgtcattcatgatcctttcttggtcgttcattcaactgagacagagatccagttcttatacatttgcttgacgcctaagcaagcatcaggagaccaactctcagcttcttgcttcctgggagaggtctggccagacatgtagcgatcaaaatcctcctgacttagattcaaagactgggcgtctagcttctcaatgaaagccacagcacagcacagattggtgaaatagtagccatcctctccagtcatcagtcggcttggattgcagaagcgcgtgatatactggatattagactgaaggcgtggggggttgcccttcaaaacaatgtagatgagggtggggaggaagtcatctgctgacgccggctcgttcttggtgatcttgatggcattgaagatgtgcttgctgcacttggtgatgcaggccagcttgtctcgaggcacacgcttggaatccatgttcaatatnnnnnnnnnnnnnnnnnnnnnnnnnnnnnnnnnnnnnnnnnnnnnnnnnnnnnnnnnnnnnnnnnnnnnnnnnnnnnnnnnnnnnnnnnnnnnnnnnncttctttgatccgaccctggaagacgtactgaagatttcttcactgtggtaaccttgcgggtcttcttgttggttttctttccttcaaacttggagaatgtgagggattgggccaccttggctgctctgactgctggcaaaggcctcttcttcctcccgctggagtctcgcctgcgtctccaccggcgtccaaagccccgctcgcccgcgtcgttcgggtaggtctcgactccgcggtccgctaccgcctcatacccaccctcctcctcgc

SEQ ID NO: 147974 - DNA, 406 bp, Homo Sapiens
gctgcttttctgcttagcatctgaacaagttaatttggaaacacagccttctggaaagaaatggcgcttctctcagcatcccatggattcatgagcagctccttgaatgcaaatattgcctgatattttcatggtgagggagaatgggagaaacaagaaatgattacattattgtggatacttttattcaccacaatggaagtctttaaacataaagttgatgtacattaagaggcaagacccagggcatatcatctaaagaagattcctcccacttttcttctgcttacaccaatccatccaaccatacatgaatttatattcaatgtactcaatttattcagtgtataatattgctttgtgaactatgggaaatataaatatgactcagtttttcccctcaaaa

SEQ ID NO: 147975 - DNA, 295 bp, Homo Sapiens
gactccttccctcctgccccgtccatggctgtggtggccgtgttggagtctacgctgtcttgtgaagcctgtaaaaatggcatgcctaccatctcccggctcttacagatgccattattcagcgatgttttactaaccacttctgaaaaaccacagtttaagatccctacaaagttaaaagaggcattgagaattgccaaagaatgtatagagaagagactaattgaggaacagaaacagattcaccagcatcgaagactgacaagagctcagtcccaccatggatctgaggagg

SEQ ID NO: 147976 - DNA, 820 bp, Homo Sapiens
  misc_feature (437)..(437): n is a, c, g, or t
gatgttttggcagtgcttttattactagggctaagtcaattctggaggcccttactactttttcaagttccagaattttctgactcaagttttctgcaagtgaaggtttcttctaggctccataggacgcaggagggactcagggatgccagccaacacagaggcaacttcagtcacctgtgtagagaaccgtgcttggtactgtcgccaagagatccttggtacattcaagagtgtagagtgctgactttggaaggcgatggtaccacttctgaggagaagctccgtaagaggtttgaggcaaattggaggagcctcctaagttaaatgtgtatccagacctattgcttaaaaacaaagttcctagtgcagatgatacacacttggagaaatcaaagtctttaaaaagcagtatgcaaacgagaacatctcttcancagaaagaacatttaaaatacacatcttcggtttcattgtagacacgggcagctatcttcatccactgatgaagctttcaaattctctggagagctgcacttaaaatttattgctttggttcaaatcaaggagaagcaggtcactgtttcaatcttccaggctcctgaaatttcttggcggatctcttaaaaggtctcaatcccgaggaaacagtccatttggggcagcatggttcaaaacttgtgcgcaagattccgttcggcaagtttcccgttaagatgccagaaatggctttgccctcaaccgagtttttccaaagggtcctggaaccgtcgaaataggagggggatcccggtctcctaaactctcaaatccccaaagg

SEQ ID NO: 147977 - DNA, 561 bp, Homo Sapiens
tttgtccgtgatgatttctttattgtcaggcgagagccaggctccccgcgctcacgggaccgggcggttgggagcgggttctggagctcacgcctggcgtcggcggaggtgaccccagcgccctcgcccgtgcaggggaaacagctggttcccgcccggatggggaaacctggactgcgtgggctcgggcgcctggcaggcatgcggggcctctaaggcttgggcactgtcacgggtcctgtggttgttgcttctcccctcgccacgcccttctcctgggacggagattcattccctggcgggtgtcggggacctgggcgcagattcattccctggtgggtgtcggggacctggcgctcttgcagggacgccccccggagtctgatacgtggactttaagatcagacgcttcggggccgggctgggaaaaactggcggaaaatattacaactctactctcaatgccaggctgttgtagaagctcctgggacaagccgtgaagtctccgcaggaggcttcagagatatactaggcggctgctcagttcgccaaggacttttc

SEQ ID NO: 147978 - DNA, 795 bp, Homo Sapiens
  misc_feature (65)..(110): n is a, c, g, or t
  misc_feature (121)..(121): n is a, c, g, or t
  misc_feature (259)..(259): n is a, c, g, or t
caaaaaagatgtttctcgcatctcaggtatgcagatttcagcagctgttttttctatatggctannnnnnnnnnnnnnnnnnnnnnnnnnnnnnnnnnnnnnnnnnnnnnggcttcactgngttgccatagtttcttaaatggtcccttgaaccctcccagagctattttggtttgtacataactatctatatatttttttcttggggggagtgtgtagagctaaaggctggtatatcctgctcctgctccccgaaagngacgttattcccccaagctaatatttcaggctttcaatttattcatgctttcatctgtttaaacataagtagaaattactttttctctccacatttagatttgatctatctactttaattgctaatagtgtcttagtcatagaatagattagttagaaaaaagtgtttttgacattataaatgattctttcaatttgtgtctaaaagtggaaaatactagaaagcttaacatttattattgtattcagaccagtatttcctccagatgacctttattacaacaaagataatttaatgaagatctctctaatggtaaagctgatggctttgtgctattacaatatccttcaaataaagtgacgatctggtggaaagaacaactaaagcaaggattaggaagaaaacagttaataccttcattttggtctcactctgcattaagagttttcattgtgttaaggatttattatacattaagtaatttaatgttcatttaataataaatggatcctattaaatatgatttttaaaattat

SEQ ID NO: 147979 - DNA, 413 bp, Homo Sapiens
ggaaggtccacgcttcccccatctgcaggggtcttttggcaccagccgcaagacataagaccagtatccttggaatagcgcagccagggaaagtccttgagccaggaggtctggaaggagcattggagcttctgcattagagacttgggccgcgcgagcgggaagtgctggacagtctctccttcgccagctcccacaccgctgccctccacttcgtccccgccatcgccgcccgaccgcctaggtgctgctgcaggtgccgccttccgccccgctgccgtcgcccaggctcgccccctcctcctcgtcctcggtgctgtcgctcagggacgcgccgtcctgcatcaactccttcccctccagcgcgtccagctccagatccacagtcgccggccctcgcccattgaaatgcc

SEQ ID NO: 147980 - DNA, 354 bp, Homo Sapiens
tttgcatgttaaagataattatttatttgctttacataaacaaacattttttcttagtgatggtttttgttcactgctataagaccaagtacactttatggctgagagggaaagattttagaaaatctaatattcgattttgtaaatctaatgtaaaattcagcactgtatgccttaagtatggacatcattcaagctaatcattacagtagcatttttacactgtgaagcaacaatttggaaaaaaaagacacaatagaaaatttataaaaacaagtgttgttaacacattttaaaaacaggtatgttagatggcatctgtcaagatggcagctcaagaaaaccttgtttaag

SEQ ID NO: 147981 - DNA, 544 bp, Homo Sapiens
tttattctccctcgctcttttatcgtcttctatcattggccagagccaactggaaaccaaagcagaaaggaaaaaagaaccagtaagggtagacagcaagacagggaaggcagagagtgagttcatggggcaaacagaaaacatccagcacctcattgtggataaaactcaagaacaagtgttctctcagctgcaagtgatggaaactcaagttacacttgctttagcaaaaatgagatgatttaccaactcatgccattggaaagtccagcagtagattgtgtaaggttcagtcgaggtgggatccagaagtggaagaactttctgggggaaacagccatcactgcaggccaagatgcacttcgctagacttgactggggctgctagctcctcccttctcctcaggctcctgcaggctacaggccatttccacacctgtgaatgggagagaactagcatccacattgtccatagtagaaaatgatggtcttctttggagatgagctccgtttccagaaggagaagccgtggcttgcccatcct

SEQ ID NO: 147982 - DNA, 299 bp, Homo Sapiens
attaaaaataaagttgaaaaattaggttgttccttttttacgtttaaaacctgttgagagcttcccttttcaatcagaatgaaagtcaaagtctcagagtggtgtgcaagggcctgcatagtctcttcagatacaccaggatatccttccactgtgtccccaacttgaaatgcttaggtatccaaaatggctccctccttctttcaggtctttactcatgaggctgctgtaatcactctagatgaataacaactcacccaccctttcacttccttgctcttttttttctggttagcact

SEQ ID NO: 147983 - DNA, 924 bp, Homo Sapiens
gtatgtgattatttccaaatctgccatcacaaggtggagcatattttccctttcccttgaacctggcctgaccttgtgattttctttgacccaaagaatacagcacagcaaagctatatgacttctggggttagaccttagggaaatgtcctaatcatttgctttcagtcttgaaactcttaggtctccatgttccaaataagtctagtctagtccaccaaaggatgataagtctcatgaaagaggcacaactgctgttagctggaacaaacttctggatgaaccattgggtatctgtagccagctaaattagatgataattccttatacttgccctagtagttttcacagtattttgcatatattatctcatataatctttatcttcatgaatcacagggctggtaagtgagcaggaaagggctcccaaagaagtttttcttctagaaagcctataaggctgtgccttaggccatgttgttgaaaacgccaggggtataagcctgctgttggaacacacagctgtgagatgggctccagaaaattattgatgggtctcatttcatgcacagttctgctctgaggaactaagaagcaattctgtcttctttgtcaaggtctggaggctatagagacgggtcacaattccttgatactcctgaatgaaagtctttgattacatcttcaagttctggttctttcttttggccaagatttacactgtaggctgctaagacagttctagtgttgccatcagttgaaaggtgggagaacatgcaggcagttttcattgaccaggtgtgaaggtgtaggtggcacagatatctctattcccattccattggcttagatttcagtcaaatgaccacagataacatcataattatcatgtttgtgagaagtggatttgcagaggtgcttgga

SEQ ID NO: 147984 - DNA, 1089 bp, Homo Sapiens
caaaagacatttttattgagaagtgaggaaacacacagatcagagaagcaggttctaaagggatcgtatccacagttattcttgtaatcaattagccagaatgaatggatgttctcaacagaattctgggacaagaatgaatgagttcccacattttctggttcatgtacaaatgaattacagactcaaaattctgaaaaagagattaccattatccaacaatgggtaaaatgctcacctgtagctagtggaacggatacctgaaagacactaccacaggaagcaccccagagaggggaggtatttctccagagaaaacaggggtgctcatgtcaatcaatggacaacaggcatggaactgcaaaatataataaacgttcattataatgagttctcttaagcggcagccctgtaataaatgccagatctgcttatgaaaaagaaatcaaaagataattagcatttaatatggaaaatactgggggatattattccacaaactatcaaatatatatatagatagatagaacaagttacattaaaaaataaagtacaaaaaattttagaaatactattcagtgttaactcaggaaagtcacattaaatatccattaactttaagactctgttccctgcgtttttcctgaacattatttacatatttttaaaaaaacaactttatactccaccatgaggtcaactgttcataccaagattttattttacaaaaacacagcttcaaatctggaatgtgactttccatggaacacactttcaatgggaaaatgcttccttaatttattgaacttataaggtgttcctagtgtaaattctctgaatcttcatgatgatactacaacatttgatacatttattgctccacattccttccattattttcatctacaaagatttgtaacttatttctgaaagcttttacactcatcccaaatatggttggtctctctcctctctgatttttgacatgagtgtaattttagggcctcctgcttgtaaatcctgtctatattatccgaagtctcctgaacatcagtttctcacattgcatcattctgatttctcatttat

SEQ ID NO: 147985 - DNA, 961 bp, Homo Sapiens
tttcaggatccaagcccagttttatttctaagagaaatatttctctacaattacaatcttctataaccctataaaacagcttcttcagttcagattcttcctcagaaacatttctatttttcaaatgctgccccctgcagttgattcgattttgtaatggatggttttgaagctatttctggagcaagtgtcggagcttaggaaacagttttaatgcattctgtgtcgtcacttctataacttcttccactgagatccctttcacctgggcaatatattctgctgaaatagaaatgttccagggctcattccgtacctgtttttctggtcctagtgcaggtgaatctgtttctaagcatatagaagttaaaggcaattgtttcacaagtttctgctgtccacttcttatgatagaagggggaattgagaagaagtacccagctcttactccttccatggctacagatggccgaccatcaaatggctgcagcagtaccttctcagcaccttgctcttgtaaaaggttgatggtaggtcttccagcagagcgtgagtgcacatttacaggcaaatttagtcttttggctaactggatctgtctgattaggacttgtctttgctcttccttctgttcaccagtgccagcaaatctgggggagaaatctagtccaacctctccaattgccaacaaccgatccttataattctcaataatgggcaaagctacatccaaatcctttagtgtgacacttctttggtcttctggtggaagtccttgaactggatgaacacccaagcatggcaggacaaacccattatacctttctgaaagttgcataatctttcaaattctcctgaatgttcggcaactgccacaagggccacaacattggccttcttggctttctccggacgcgtgggcggacgcgtgggtcgacgatatcccgggaattccggaccg

SEQ ID NO: 147986 - DNA, 1215 bp, Homo Sapiens
gcctgggtggcgaattcggcacgaggcagagccgcaggacaagggaccagatggactgtcgttttatggggacagatggtctggggctgtggtgcgcagggtgctgtctgggcctgggtccgccaggatggaaccaagagagcaaagggtggaagctgctggtctggagggggcgtgcctggaagccgaggcccagcagagaaccttgctctggaatcaggggtccacactcccctccctgatggactcgaaggcctgccagtccttccacgaggccctagaagcctgggcaaagggaccaggtgccgagcccttctacattcgtgccaacctcaccttgcctgagagggcagatccccatgccctttgcgtgaaagcccaagagatccttcgactggtggactcggcatacaagcggaggcaggaatggttctgcacccgggttgaccccctcactctgcgggacctggaccggggcaccgtgcccaattatcagagagcccagcagctcctagaagttcaggagaaatgcctgccctccagccggcaccgaggcccccgcagtaatctgaagaagagagccctggaccagctgcggctggtgaggcccaagcccgtgggggcgcctgcaggggactccccggatcagctgctgctggagccctgtgcagagccggagcggagcctcagaccctacagtttggtgcggccggctaactggtgtctgccctgcggcccgtgggtgctgttggctgagtgcctggcgccccgggtcatccgtaacctgctagacctgcccagctcccggctggacttccaagtgtgcccagcggaaagcctctctggggaggaactgtgcccatcctcagcgcctggagcccccaaggctcagcctgccacccctgggctaggcagcaggatccgggccatccaggagtctgttgggaagaagcactgcctgctggagctgggtgctcggggtgtgcgggagctggtgcagaacgagatctagcccatccgtcatccacgtggaggtgactgacgacgaatgtccggggaacgtcaggggtctgctgggcccggccgggctggcgggactccgagcctgctgcgggcagtgccgtggctcagagccaggtgctctgggggcgtgccctggtccctgggtgcaggtgcccggccatgagtggggacacgcagaggagctggccaagg

SEQ ID NO: 147987 - DNA, 405 bp, Homo Sapiens
tttatctaattcagctagtttattagaatttccatttcttgtctccacatccccaccttccccctggtttggcttcaggtcttggcataccaagtgctagtattaccagccttttctctactgactagatttggtgggtaggggtcgatggttatccaggcatttggctaacaccttttgcaaacccctggtaagggaagccttgagggtagggaaggagagatacttctccatgtgggcccaaggacagtgcttacagtggcgaggggtcaggatgtcacttgctcttcgccctgcctctggctgatcctggggacccgaagctttggggagaagcagctggggaagagcagtgtgttgagagctctggcccctgtgttgagacctttggggaaatgtgcttac

SEQ ID NO: 147988 - DNA, 760 bp, Homo Sapiens
  misc_feature (39)..(39): n is a, c, g, or t
gattgctatttttaaagttatatacaaatgtttagacanatctgtttgtattattttctatactcagcactctgatttagtgtaaatgtctaaagcttgaatgccctagatatttctactgtgaattattccctgatatttacatagacttaattttggattgaatatctttcatatttaatgtatctgcaaaaatatattttagtatgaacactttggtgttttataatttgtagtttttgaaaaaatgtttttccaaattcattatacttgcagggttttcttaaactccctgatgttcaacaaaattttaacaactgcctgagggtttttctctagtataaaatgtgtacaataagatctgtggtacaagtaaagatattacaatcctcttcatatgtgtaatgtttttttcaaaataaatgctcttctatactttaaagacatactttctgacagatcttctgagagtaattagaattttaatgcttttatttactatgaactctacaattttgagtaagatgtgagcaggtgttaatggattttttactttgccaatatttgtacatttcttctcaagtataaatgctttcctgtgcaatagggtgtgagcattgtcgaagcttggccacgttgttcacactggtagttttctccagtatgaattatcttacctacaatcaagtgtgacaatcatttaaaggctttttcacattcttcacatttctaggatttttcagcagaatgattttcttta

SEQ ID NO: 147989 - DNA, 621 bp, Homo Sapiens
ctgccgatacacaggtgaaaagatatacaaactccctgctgtcatgaagcttacagtcacattgtttggtcctttgtttgctaatagttaattaattggacacagcataccttggttattctcatttcttctctttggctccttggcactggtctggagagtgataaaggctgaggcagtcgcttttcttgctctcctgccttctttccaagaaaaagcattctttgaagtttcctgttttgtttattaaatcccgatggtttgctctacaatatggccatgttaggcttaatataaatatgatttaaatgactatttaatttgcttgcttgcttttaaatcttaaagtaaaaatgatactccaggaagatgcatcgtgttaattccactggggaatactgttatccaggatgagcgggtgtggccatcagtgagcttgccgcttgtcagaagaaactctggtccgaagccgggctgcagactcactgtgtggttttgggcaggtcagtcctgtagctgctttggtcctcagcttctgttttcgcaaatttaatcctccaaaagtttaagtatcaaaacttatgcatcttcaaggctgtcccttccatctgaaggctgaat

SEQ ID NO: 147990 - DNA, 705 bp, Homo Sapiens
gcaagatatgtgtccatttaatgtatctttcacattgaaaacaaaagccaatatattttataattacagcctataatctaagtttttaaaatatataaccatagatgttatatttccccttcagaactgtagtagtgttcttaataaggctcactgttagtcaaatcttcatctccaaataatacaaatttgaatgttcaacagtcattcaaataaacatcatataactcaaaattaagacattcatactatagaaaccagtctttaattactaaagttaacatatattattgcaaactaacatagctcaatctatatttgctacactcctaaagtggccgcttatcagtaaggggaaacatttattattgacatgcattactgtgaacaagaaaataaatagggttttgaaaatatctcttaaaaatttaattttaattaacaaaaataaccattcaggttgctgaacattaaaatggccaatctattgaaaatggcttcaataattgcttttaaaaatgaatacaaaactaaacagtgattaaggtgctagcctcatcaataggacaattaaaatctaaaaacattagtgttgattttctataataaacttaagccaaaaacaatgacctcaatatttacttaagacttcttgttttcatacttttctcctcattaatataaaaacaaagagctcaaggcctc

SEQ ID NO: 147991 - DNA, 641 bp, Homo Sapiens
  misc_feature (540)..(540): n is a, c, g, or t
tttattgaagttgggttttaatgaagagtttttaaatcctctcccagcaattatatgattacaacattttgaacccaaacgtttttccatacaatatagatatttcaaatagagaagtagcttcgtggggaaattttctgtgagttggaaataacacacatagatcagcactatcagcttttataacagtaaaacaaaatagatgaacttggtcagtaaaatccaaggaagtaatttaggatccattcagcttcagtggctgacaggcatgagagagtacaacagatggcagaaacaagtagctcaccacagtcccattcatctgaactgtctgagcagtcggcttcaccatcacaccacaggtcacgtgacacacacgcatggtttgcacattccagctcatcatcttgggcaaatgagcagtttttctcgtccctgtaatcagggcagtctgggaacccatcgcagatcactgtgtgcttcaaacattgtttattggatggacattcccaaagatctctctctttacaaccacagttntcctcatcactgtcatcgtcacagtcggcctggccatcacatcttctggaagccagaacacactgtcctgagcggcacttgaaatgactaggtgagcattc

SEQ ID NO: 147992 - DNA, 539 bp, Homo Sapiens
tttcaaggatgcatatttattattaaatgaaacaacagctcctgagtttgtgctgctaggcttagaggttaggccctaggggaagagatggcctcaacttgtatttgtgttttcctcttcaggctctgcagatggcatggggaggaggttgcactcagcccatgatcctggtctctcaaagacttcaacagcagaaatggagcatggtctccatgaagccagaacagtgcgtacttctcaggtagcagcctcaggtgctaaggtgctgggcctggggtggtgtgttggggaaggaattatggagagatgtgacagggatgatgataaggcagaggcatggtgatatggggctatcagaagaaaataaggtctatgattgggcttcttttgaattagaggagattgttacatggccactatcttaccaatacatctaattcaggtgtctattactactgagtcttcccctactctttcccataccctgaggatactgtctgtgggaaaaccataagtctggtattatgtgtctgcctgta

SEQ ID NO: 147993 - DNA, 492 bp, Homo Sapiens
agtggagcatccaaggggagagatgactctggggacgacgacgaggctaccaccccagccgacaagagcgagctgcatcacaccctgaagaatctttccctgaagttagatgacctcagcacgtgcaatgacctcatcgccaagcacggcgccgcactccagcgctccctgacagagctggacggcctcaagatcccatctgagagtggggagaagctgaaggtggtgaatgagcgggccaccctcttccgcatcacatccaatgctatgatcaacaagccactgccggaggcttcccaggcactgcctccctacccgagaccaaaactgctttgtcttgaataagcagttttggcttttccgagataatgagcgtctcagctggctgccgtcttgcacagtcttttatcagacatcagaggctcatctgtgtttacgaagccatcagaacagctccaagtttaagtgcctaatgaattgttttatgagaaa

SEQ ID NO: 147994 - DNA, 536 bp, Homo Sapiens
tttaaaagctacaatggttttatatggctcataaaagcctttaaaaagtaggcaaatctgataggtcatgtacactgatcctaccccaccaaaacccttcaaaaatgctttctcactgagtttaggataaaatccaaaatcctttatgcagcttacaaaggccctacctgatctagtttccattttcctctacagaactaggcccttctctctttcctgttcttcactggccttttttctgttcttcaaaagtgcccagttccttcagaccttgtgggatttgaaattctgccctttttcctaataaaatttactgatgacatctccctactaactcttaccccgcttccaggtttcaaagaggctttaacaatccactaagttttattgggttctcctggtatatactcaccttaggttgatgccttacaatttcccctttgagtaatgctatacaatttattataggtagggttttaaaaaatctataaatgtctgcattctcctggcctgtaaactctatgacagcaggtctc

SEQ ID NO: 147995 - DNA, 642 bp, Homo Sapiens
  misc_feature (131)..(165): n is a, c, g, or t
  misc_feature (486)..(486): n is a, c, g, or t
tttgggtattcaatcatggtttatttattgaatgaatgaataatgaagaaggaagatttaagttcaagtaggcaaacagttttttccccatcaggaagcatgattccttcactttgaattgttaagactannnnnnnnnnnnnnnnnnnnnnnnnnnnnnnnnnncgggggggtgcgtaggttacggtgcattgttttttggtgttctaactctgagctaaagaattgagtaaaatttcctgtgaatgaaaataaaaataagcatagtcactctttcgttcattttttttccagggtagactattaataataaagaattaagtttggactctcttttctgccaacaatgatcagactttctagccatagggaaaggcctagaatattaaatgatatccaaaagctagcctctgaaaacagtagcagtttacatgtttcttaggaaccatattgcatcatctaaaactcctctgaacttgttgaaanttgaacacatcttttcatttggagactgccacaaacacatcgcagcatcagggtttcttctcccagcccttagttgctctgctgagcaacatcttctgtcacttgtattactttctcattcaattctgttgggtcattgggcattggctggccact

SEQ ID NO: 147996 - DNA, 372 bp, Homo Sapiens
tttttctgatgagaaagggcttttatttcttaattttctgaggccctgcagatatgagagggaccctggcggaaaagaaagccactgagatggggagggcaaagctgcaaatggactggacctgccatgaaggcagggttcttgccaggctgcaagaatcgagggtaaggtcccaaacctgccccgtccgcttcagtctccagaaagccttcctgaaggaggccaagatagcagaggtgccagtcttaggtggaagaggaggtgagatttcaccctgtccctcattctgtttcctgacctgtagtggttgagaggcaaagaggtgcccagctctccttagattactgcatctccgtcccctacacttagcca

SEQ ID NO: 147997 - DNA, 552 bp, Homo Sapiens
tttttttttactttctggtaaaattcacctagtctcaatcaaggcctatatatcataaggctttgttatgattagctttgcagaaccttgtagtttatagtgttgttgagtacaatattgacaattcctaagacagacttccatacagaagtgcctgtcaatttatatttcctcctgggtggtcacatattgaaactccagccccttaagcaaccctcttgttctgaaggcaggtctggtaagaataggtaagtatcagaaagaaatcacctctggaaacacaacccaaatccaagaatactcaatgcagttcttcccaaggagaagggcaataggcctttttcaaactacattttatatatttttcaatctatactttgtggtgatagttgcagttgaatatactaagtttttcattaatattgaattaacaatttatttataacaatgtatgcttagatttttccagccctatttataactgataacactgcagtatcctttttgcatacaattctctaatttcacactgctatgtggaagatatagcat

SEQ ID NO: 147998 - DNA, 1006 bp, Homo Sapiens
  misc_feature (645)..(666): n is a, c, g, or t
agccatgtctattttattaacaaattgaccctaagcaattcacttaacctcttttcatttcttcagtggagaattctttgcttccaacctctttgggttgatgatcaaatgagataatggaaatgcctctgtttgggaaaaaatgcattttgaaaggctatatgaacaccaggtctgagtattatttttccatcatgttacaaatttatccagggctgatatctgctcaaaggcctatttaccattactgctttcccaagtatgacccctgcctttaagtatctctctgtttttcaaattatgtatttctccagatgcatgttttcacttttccaggctgatctcgtttgttcatttcctgtccatatttctaatctccctaggttgctctgtactacgtctcttgcttactggtgtttataacaccatcctatttaccctcatctgcagacataattaccataataggtttatggcctctttccaagccattaataacaacgcaaaatgaaatgcatctgaagctcatctctgcaacatcttcctggagcttgtaccatgccatttttcattcttgtcaaatttttcagccaatattgaggtcattttcatggttcagagaaactcctaacccaacccaagtcnnnnnnnnnnnnnnnnnnnnnnaaatcatacgggaaccagactttgtttctcttgcttgtaataaaataaataaaataaagtcagttgcaacatgccaaaacatgaagcagggcacttaaagtcctgagaataaatgagtaggtttctatccaaagatcttttttcacatcaatgtgagagggctcattgtgattttgtctctgtatttatccagcaaacaggaagacctgagttttccaagtagaattccatatccttgtgtttctttcccagtggagaccaacagccaagttcctcagtaataaaccttgtccttggggccgaggttctgcaacacctctttgccggtggcgctccggat

SEQ ID NO: 147999 - DNA, 427 bp, Homo Sapiens
acagctgggcctccgggggtgtcatcgcatattggtaggactgtgatggcaaccccaagccacaaaaccagcaagtttttattagggattttaaaaggggaggggatgtacgaacagggagtaggtcacaaggatcacatgcttcaaagggcaataaaagatcacaaggcaagggcaaaattagaattactgatgagagtctgtgtcccgctgtgcatgcattgtcttgataaacatcttaacaggagacagggttcactgatttcaaacacatatgttttacaatccatttgtacaatagtggtcctgaggtgatgtacattctcagcttacgaagataacaggattaagagattaaagtaaagacaagcataagaaattataagagtgttaattcgggaagaagtgataaatgtccatgaaatct

SEQ ID NO: 148000 - DNA, 691 bp, Homo Sapiens
gccttttggtttgagcttctgatgtctcctcctgcctctaggtcacagcaatattttgtattttgttatattcaattttatagctttacatttttacatttaggtctttagtcctgtgacactcacttctctatacggtattaagtagagatcaagtatttttctccataaagtgagacagttttcccaacaccgtctactacacagtctgtccatcctctttgatttgtgctactttactgtatattaagtccccaaatattcatgggtctgttcctgagctctttattaggttgactcactttctattcttgtgccaatacaatactgattttatttccatggttttgtaagatgtactaatatcaggtaggaagggccaaccccacccacacctcccacatttactcctctttattgaaggatgacttagctatttaggacctttattctttcataaacatttttgaatatgtttaccatattcctcaaaatatccaaatgaaacttgaattggaatttcactaatatgatattaggttgatttatccaagaaaataagaattatctccatttatttagatcatcttctctgaacacacatttttaaccaaaaaaatgacattggcagtaatgattttgattcaagcttaagcaaaacattcaccacatacatatatacctaaataag

SEQ ID NO: 148001 - DNA, 750 bp, Homo Sapiens
  misc_feature (632)..(640): n is a, c, g, or t
tttacttattgtatcatcattttatttttagtgtaaaattaatcacgcaatatgtagtactgaacaaagaagagggccttcttgctttctcccatttacagaatttttttctcagagaaagtattgtttagatagtttcaaattcccacacttaaaatatttgtcttcttgagaaattttaataaaaaactaaattttataatggaatggagctatgtgagattatctgagatatgttttcccaaccagaaggaaataatcttccatatttgtcaagaaggaggagagacactttgcttctcccaacaacttcctccaactctttttatattaaaactttttttaatttcaattcgttgttttccttatcatctcctcagcagacttacaatttgccttgcaaagaagtagaaatcctccaaatggattaccaaaagaaagtatatccctaccaaaactaaacatattaaagcatttaaatatttttaatcagaactattacaaggtttaaaacagagataaaatggcttcagtgcagggatactgagaaagccctagacccggtggagcttgtattaccttccttcccttcactgcactcagcaaagatctgagcatagaggttgtcgtgnnnnnnnnncaattattaccttccttcaactaggttaattagctatgattccagccaagaggttctactgcttttatacttgtaactaaaagacaatctctaaacacactgcagaaatg

SEQ ID NO: 148002 - DNA, 474 bp, Homo Sapiens
tccgctacaaaaagattgtattttttctttattttcagttttataacatccaactttccattcaaaataatattgcacacattgtataattcaattaatttgcacatccaactcctcaaatctggtctttttaaaatgaccaactgcttaaacttcatctgtattgaaaaatacaacattagatccagccatattttaaagtcatcagaacatactctataaatcattatcagctgttagaaaccagttcaaacattttctaatgagtgagatccttacaatggggatctaaggttggttcattgtgacaaaccccagaagagaccactggctcctcctgtcagttaatttgggacttgacttcgctgctgattaagagagggcagctgagtaagagggcagcatcctgagggaggagtctaattactgcttccagccaccatggtaggaaatcttttcttggcagaaacaacc

SEQ ID NO: 148003 - DNA, 1056 bp, Homo Sapiens
tttcttaaacccaagctgactttaatgagaattttaaaatttttaaataggtctctggcaaagaacaatgcaggagtaaggatccaggcacagtccaacatctccctgaggcctccacacaggcccctcaaactgcacccattctgaccatgcaccactttccacagacctggtcccacagccgtcccttcatttggggaagtagggaagggatggctttgggggatgcagagcccatcctcagccctgccatctgccccacttcttaggacttcctgggattgtccttcccttgactctcccatccctctggtcccctggtctcacacagcatggcccctcccaccctctggcttctgctggttctaaccatcttctttgatccctagtgccacctccccatggtcccccttagccacctcagccttgccgtccttctcaggtagagccctctgacttgaccccagtcttgtcagtccctactctagagagcccacagtcccagctccctgaggccccgctcttctggacctggctgtacagggctgagttgtggcttttgatgccactgccagttgcagtaccaggttcagggaaggctgggccctggggcttgggagcaaggaggggctttgtgctccgagggggtggcacagcgtagtcatcagtggcagggttgtaggggagctcatagccctcctccttcacccgagcttggcaccaccatgcatccttgggctcccgaggcagatcataaaggccctggggagggactggggccaggccctcaggttcatcatagatgggatcctctttggggtctgtcagcttggccttcagcaactgctgctgcgcatgctcatacaagtcccaatagagaggtttcttccgttgtactccctctcctgcctgagcagacgtgctgtccaaggggtctgagtatagggagtcctgggaagggcatggagcaatgcgcagggagtctaagggctcagcatacagggctgggggactgtcgaggagctcttgggggccaggtggggaaggcaacttccc

SEQ ID NO: 148004 - DNA, 381 bp, Homo Sapiens
tttttttaatgaagtagaattttattacagaatttcacaaagaacttaatatctaagtgtaaagatagaaagcattgaaattcattagcatctataaatacaagatgattttctcatacctacctctaccacaaccctaaatcaaaacaatttcttatgaagcttcagttttcccagaggtaaattccagtacaatatttggcatgctattaagtgagtgggtgctgaaatcctacttcgttttccttttctttcaaagaaggaaaataaggactgtgcatatcgaaaatcagcgtttctaggaagttgaaagtttgggacagtcttcttggacactcaatcctaaatacatgaaaggcagctactagcgcagccaaggct

SEQ ID NO: 148005 - DNA, 367 bp, Homo Sapiens
  misc_feature (50)..(50): n is a, c, g, or t
gtagcaggccctctgtcagcactgacttctgtatcatgtcagggattttnagggcggcaagctcaggtggacaggcagttttgttctgtttcccatgtcaagtccagccccagactgactttgtgaggtcacagacggagcctcaccccatccaaggcggtgtcctggactcccactgtgctccccagaggcgagggtgagtgcgtgggatccttttggcgggcgtgggtgcctctgtggacctggcgtgaggcttctctgtttctgagtctcctatggaccatctgtgttctgtgtggctgctgaggaatcacactggggtggccgtgcgggtggctgaatgagaacaggacccccatgctgcaca

SEQ ID NO: 148006 - DNA, 602 bp, Homo Sapiens
tttacaattcaacctcatgggcatttttattctgacacttataactctaagtaagaacaccatccatcttgggagaaaaagcacaaggagaatgtttctttaataaatatgcttaatgttcaactaaagtgtgtctgtggcggagaagagggacaatggatttttcttgaaatttgtggaagactaagttattcaacacaggctgtctaccttgaataaactttatcaactaaaaacattaagaatttgggtctttggatgctgacattcttaaccttggatacaacccaaaggaagtgattgcaacaccaatggctatattttgtctgtaatattcagtctgaaggagagactaattatgaatgcaactctgcctttttggtgtaaaattacttagcttaccatcctaatttttgattcagctctatctgtgctaaccaagtagtttaatcaattctctcaagcaattttcttctctctgccaccatcttggtccaggctgcctcatctcctgctcttagtaacatgacaggtttttatctgattctgttatcctcttctcactcccactcatcttctccagtccattttcaatagccaca

SEQ ID NO: 148007 - DNA, 561 bp, Homo Sapiens
  misc_feature (465)..(465): n is a, c, g, or t
  misc_feature (479)..(479): n is a, c, g, or t
  misc_feature (514)..(514): n is a, c, g, or t
  misc_feature (536)..(536): n is a, c, g, or t
tttttctctttcaaaaccctcacggggccatgctttattataatggtctgccacaggtcctaacccacactgtatttgattatatacagtctcataattaagtcattcctctttatcacacccagcacttagtccactgctgcccatgtaggaggcactcaaattggtaaaagagaaatctatgcaagggaatgatcttctggaccccctccaaaaacaaacttgtgactagaagaggcaccagctatagccacattcctactaacagggctgatttaaatgccctttttattggcttggtcatagtctccaacaggtgccaaggcttttgctagttaaaccagttttcattggatcattttgttttctatgtgtgttttgaccaaaaacaaagataggttctctaacaacagggagagaatatatgacataggaatatgtctataagacgacagtctaccagtntggtatcttagcgntccataatacagatcatttgcttgtcgtctacccnagaaccgcagaagactgctcgncagaattagtgctttcccgttgcgc

SEQ ID NO: 148008 - DNA, 457 bp, Homo Sapiens
  misc_feature (70)..(70): n is a, c, g, or t
tttgtctttcacaatgtcagaattttattgaggctatttcaatccctaaagccacgagccacacggcgtntcccaaggaggcatgctgcttagtgctcctttccctcagtagtgagagctgcggtcacacgggctcaagccactgcacatgtcagccaatattgcacacgacaacgtaatagtgtacttaatcagtatatacatgttacaggttaacgttccacaacaaagaaagtagcatttaacatccagaggaaacagagataggagaaagggttcacgaaccagtccaggagagtgaagaagacacaagaagaagacagaaacctcctggtctgggccagtctgtggatcttgcaaggatgtcttcgaggtggtggagcctcaggcggcagatggtgagttctgctggggcctttccttctttgttggccaagtgccctgggaagtggaggag

SEQ ID NO: 148009 - DNA, 890 bp, Homo Sapiens
ttttccaatgagttttactttatttttaatcaaagaagcaaaagggaccacacgccttccattactgagacttgtggccaacaccaggtcttctctaagcgtctcttcctggagcaacaaagtgcaccaacgtaagcagctttttctccttcttgccaaagctgaggccaggggtccccttctcaacaactatgcatgagatgcccttggggcgtggtcctcctgttcggcacatgaccacatagatgtctgactcaccagcaccactgatgaaggccttggagccattgaggatgtaatgatctccctgtttcttagcggaggtcagaagagaggcagcatcactcccacttcctggttcagtgaggcagtaggaagcaaacttctccatggtacagagcggtgggcaaaatttgtgcctctgttcctcatttccgaagctatcaatcatccaggcacacatgttgtggatgcttatataggctgtggtgctggtgcagcctgtagccaaggcttcaaaaatgacagaggtatcaagacgtgacagcccagacccgcccacatctgtttgtatgtagacccctccgaagcctagctgggctgccttccgcatcacatccactgggaacagctccttctggtcccactctgccatatttggagccatctctcgggcagcaaagtcaaaggccactttttgaaattctttctgctcttcattaagtcccatggaagggtcgatgcaggaggtcaagctccggtggccggtctggacgaggacccggagaccgccgggcaggcagccgaggcgcgccccgaaacgccggcagccgctccacagcatagccgccgcagctccgcgttcagctaagagtctgaacgccttcccc

SEQ ID NO: 148010 - DNA, 240 bp, Homo Sapiens
acctttttaggacaagtctataaaacatctttatttatttgttacatatgatgtttaaatataactttgctttcaagcttcaaactttttttaaacccctggtaaaataagacttttggttcaccttaacaaaaactgacctaggaagaaacatttttagcaaaatgttattataaaattcactagaaaatacggtcctcttgttgccaaaatgttacataaaatccttattaaaaatac

SEQ ID NO: 148011 - DNA, 928 bp, Homo Sapiens
tttcattcacttagaagtatttatttagtgcctgttatatactcagcagtgttccaggctctgggaatacagcaacaaacaagacacaaaatcccccaccctcataggccctacttttcagtgctgtagcccaagtatatctagtttaaagtgtcctcaccttggtgcccctggttggaagatacttaatcctcaagcaaacttctcaatatttagatctttaatgaatatgaaaattaccaaaatatggtatttacctttgaacctgtttaaagttagtggtaaactgtcacccatcctcctatctgctaatgcccaaggtctctgttttatcaaaacacaggttcatgcaagacaaagctttctgtgcagcacactaatttcaaacaaaataactctgatcaacgtatgcactgtttagtggacctggccaacgaatgaccatttttagtaattgtctatgagaaggaaatagtttctcccaggcattttcagaggatggtcttagagcacagctgcatctgactatgccactaataaaatgccctctctcaggctttcatcatttagctgacagtcaaaacagcggtagtttataggcagtaaggctggttgagaagtgcatgctggttggcgtggagggataataccttccttgtcctcttttcagcagcttgcactgttgacaactctatgctggttggagctctcttctttggattccaggctccctctgtctcctgcactggagccgcttgagctatgtcaggctagagatgcatatttgggtgtcattgatgtagatacagaagttgacactttctgagttaattggaatcactggtttattataaaggataagaagtgaaaagcctgatgaagagataaatagggcgatgtctggaagagtgctgagcaccgagctgtg

SEQ ID NO: 148012 - DNA, 368 bp, Homo Sapiens
  misc_feature (110)..(185): n is a, c, g, or t
  misc_feature (299)..(315): n is a, c, g, or t
ttttttgaagtttaataatatattttatttaacccaatatacactattaaaaaataacccaatattttcaacatttaatcaatgtaaaaatggagatattacatgtgtgnnnnnnnnnnnnnnnnnnnnnnnnnnnnnnnnnnnnnnnnnnnnnnnnnnnnnnnnnnnnnnnnnnnnnnnnnnnnccaagtttttaaaatctgaggaatatttcacacttacagcacatgttaatttggactaatcacacatttcaagtgctcagtagacatagtggatagtgaagacctaaagtaccnnnnnnnnnnnnnnnnnaattgtagacagagtcttatttcagaggtgggtactatgaaatcacagactgt

SEQ ID NO: 148013 - DNA, 420 bp, Homo Sapiens
tgaagctgagtagcacaggctttgtaccaagggagaaggtaatttacgtcatccaaggtgccaaaggttatgggtttgctaccccattccgggtattaccccatcccctgctctgccaggagccaccctgaaggggtgccaaattatttatcactgtgctgttggagggtcccacatggaggtagagatgcagcaggctgggcctgaagtctaattcccagcccaggattctgcagttcccctggtgtggcctgtactagggaccacatgccagctctcctgctgagcttccctgaagtggtcatcatagcacttagtgtcccagacactgcttggtattttagtatcaacttatttaagtctcaaaattacatcaaccttatgaagtagaattaagtcaggcactgttctaagaacgtc

SEQ ID NO: 148014 - DNA, 559 bp, Homo Sapiens
ttttaatgaaaatattttacacttttatttacaagttaatttcataaactatacttaacatgactaaacaacaaaaagttcttgacttccatcctttatggctagaaaaataaattattttaatagttatttaaacatgcctcctgcttccagagaaattaatgtattaaatatatatatttttcaaattatccctaacatttacacaaacttgagtagatactgctctatttttacacagaattgtaaacagccttttaaaaagctagagtaactttccactagttagaactgaacattgtaaaatataaaaattttataaaccctataatgcaggtaatttaattatgactgatctgtaggaatatacaataaaaatttgtcagtcatccacaattaagtacaattatttatggagaaaaattttactatgtccagaaaaagattttattcatgttcttgaaagatagctttgttcccaataaatattccctcctactatttttgtacattttaggaaaagatgtattcagttcaaaaataagtaacatccagttat

SEQ ID NO: 148015 - DNA, 897 bp, Homo Sapiens
tcagctgttgccttaacggaagttgagttctttctgagaagctgtgcattctcttctgctggtcactgggggaggggctttaccaacttgcctctgcttaagctaatttctctgcttgggattttttaggatgatgctggtagtgtgatttcagcccccaaaatttgcagggatggggttgtcagttcagatattggagtttttgttccctctttccattgtcaaggaagaggtgcgcagacctctttgccatcccttctgcatgtagttgcttgcttttatccctcattgagactatagatgtttagtcccccactttttgtgaggggttctcctttgagactccctttctgggcatctttttatggtacataacagtgaagtgtcacaatcaacagtgtcttagatttggtgaaatatggtgttttaataattgtaattttttacataatatctggcagtagaagttctcagtataccatagtctttgcagttatcccgaatgaagttcgaaataatttaagttcccctgacgctctctcccctaacaaaacaaagcaagacaaacaaaaccaaaagaatagtaattctaggattttgccatcaccttatatggaaaactcagaaccttctatttcacatatgattcgttcactataattgttttatttacttcttcttacacttggctgtaaaatttaggcaagaatttaagtttctaatactatactaatgtcataagataatccatttaaaatgttaacaattattctatacatagttcattcaagcttagatcagttttgctgaatggttgttttatgttcatgtccttttagacctttttaggattgttctttgaaaagcctcaaattggccaggtgtggtggcttacac

SEQ ID NO: 148016 - DNA, 853 bp, Homo Sapiens
  misc_feature (830)..(830): n is a, c, g, or t
cgcttggcgcagtggacttttatcgactgcgcaagaagttcccgctgcccaagaccatctgggacggcgaggagacagtctactgcttcaaggagcgctcccgcgcagcgctcaaggcctgctaccgcggcaaccgctaccccacgccggacgagaagcgccgcctggccacactcaccggcctgtcgctcacgcaggtcagcaactggttcaagaaccggcgacagcgcgaccggaccggggccggaggcggcgcgccctgcaagagcgagtctgatgggaatcccacgactgaggacgagtccagccgaagtcctgaggacctggagagaggggcggccccagtgtccgccgaggccgctgcccagggctccatattcctggcagggaccggccctcccgcgccttgcccggcttcctcctccatcctggtgaacgggagcttcctggcagccagcggctccccagcagtgctcctcaacgggggccccgtcatcatcaacggcctggccctgggcgaggcctccagcctgggcccgctgctgctcactgggggcgggggtgcccctccaccgcagcccagccctcagggggccagcgagaccaagacctctctggtcctggaccctcagacaggggaggtgcggctggaggaggctcagtcggaggcccctgagaccaaaggggcccaggtggctgctccgggaccagcccttggagaggaggtcctggggcccctggcccaagtggtgcctggccccccgacggctgcacctttcctctgcccccggggccagtgcctgctgtggctgccccacaagtggtaccgntcttccccaccccggggtatcca

SEQ ID NO: 148017 - DNA, 315 bp, Homo Sapiens
  misc_feature (216)..(256): n is a, c, g, or t
aatttttcggttattttatttttgaaaaatatttcccaaaagaggtaaggaatatgatgtaggcataggggtatccaagggagagaatacagtcacgggttctaaccggccagtaaaccctcttcttcatccctctttcctgcttatcactagagacagaaatgaaaaaccatggcttcaggctgctaaaagcctaaaacaaaacaaagtagagannnnnnnnnnnnnnnnnnnnnnnnnnnnnnnnnnnnnnnnnaataaggctgttggacaagcaagctggtcagccaaatcctctgttgttgttgatggctt

SEQ ID NO: 148018 - DNA, 841 bp, Homo Sapiens
  misc_feature (226)..(243): n is a, c, g, or t
  misc_feature (471)..(485): n is a, c, g, or t
  misc_feature (667)..(667): n is a, c, g, or t
  misc_feature (684)..(684): n is a, c, g, or t
ttttttttcataaaacaaaatttatctttaatttgtaagtgtcaacagcagtacaaaagatggagtgatgacaactagattagggtagagaggacagtcttgaggtaaatgagcataaataggcagttcttatagacactcccctaaggggcctgagccccatcacggcatatacattatcacccaaagatggcatgttgaacatatcaggaaagcaccttgtgcnnnnnnnnnnnnnnnnnngtagctaaggtgccaacatacaccaggatagataaagacagtgtgtctttcaattttgtcttttcccttaattatgaggcagaggaggggaagactttgaaaagtaccactgaaagattattcaatgttgagctttatctcacgtcaatactgcacaacaaaatccaagaagtttgtgtatgcaacaaagctaagaacaatgattcattcctgtaaatttgaagagannnnnnnnnnnnnnncccatttctttaatccttagcaaactttttattattattattatcaagaggagagtgtgagaaagatgtgatggcaacccttaaggtcatttaaaaactttacactggactgtacaagattttttttgataactattacattttagacttcaaacatattcaaagcagcatagacactagtntttatgttttttctttnttctaattgcccaataggtacagccatgggccagtggtacctgcatttacatagatttctacaaagaaatctgcggtaaaattgcttcagatgtataatgccctagcattcaaggccacaccagtgtgctatagaacaaagccagtacttgccacga

SEQ ID NO: 148019 - DNA, 509 bp, Homo Sapiens
gcactcaatgcaggatcagcattcattttatttggaatgtcctctcttcactctgcttcttctgcctggaaaaacagagtaatttgttgggaataatttgaaaatgtaagtgaacataattaagcttctgttttatggtagtctggtcatttgtctccaggtgcacttgtctctgtagatttgacactgcagatgcctttctcctctgtccttgttacacagagaactgaaccccttctctgtctccatttatggagtatttgacaatgactgatagttttgtgttttccatagctgccattgcattaaaatgcagttgctgttacacgaagtctcggagggccacagagtaaatctggtggaagatccaacagtatctgggagtaatggagttttctcgcatggagttcagaagatggtaattctgactgggttttactgacacttttttggcttcaaggaatagcaatgacttcaatggtgctttattcataaaatggtacttgctc

SEQ ID NO: 148020 - DNA, 580 bp, Homo Sapiens
tcgtgtcatcccccttcgtacgcaaggctttgcgactgcgatggttcaaaattcccatcccttggggtacacttgaaagacttgatagctgtccatgtcattttcccagactggacagaggagaacaaagtgaacattgtgaaaatgcaccagttctccgttaccctgagtgaactagtctccctgcagaatgcctctcaccacttagaacccaacatggatttgatcaacctgcttcacgctttccctggacctctatcacactgaagatgatatttacaaactgtcactggtgctggagcctagaaattctaaatcgcagcctacctcccctacgacgcccaacaagcctgtggtacccctggagtgggcattaggggtgatgccaaagccagaccccacggtcatcaacaagcacataaggaaattagtggaggtaagtggttgagggagaataaagagagggcactagaagaccctttctctttccagaatgttctgcgattgtccaggaatctgatggaacccctgaaaacaaccctctggcagcctgggagacagagtgagagctccgtctgaa

SEQ ID NO: 148021 - DNA, 462 bp, Homo Sapiens
ccgcgacacggacagtcgcgtcctctcgtgtggtgtatttgccaaactttcatattttaataactcccaaataatgcgagccacaggtaagacttacttttgacaatctgttttctgagcacctttttcatgcttctctttttccaggcgctttttgtttctctctgtcaccagtttttctccaggaatctctggaacccccatagctgctgcaaactgcgctgcgccttggtcagtcagaaagcaatgaggtgtcttttccatgacaagccgagcaagtttaatgggatttgctatacactggactgcggacactgctcctgcagacaggtcttttccatccatgatactagcatccatttcaacctcaccatttgtgttcaagacagacccacaacctgcgttgaactcgggatcgtcttccagggcgacgacagctccctctacggcatcgacggcgct

SEQ ID NO: 148022 - DNA, 1002 bp, Homo Sapiens
aacttagctagtacgaggctggtttaaatcggcagaggggtaccgggcggctgcggggctggctcgacccagctggaggtctcggcgtccgcgtcctgcggtgccctgggacccgccgacatgaatcccatcgtagtggtccacggcggcggagccggtcccatctccaaggatcggaaggagcgagtgcaccaggcatggtcagagccgccaccgtgggctacggcatcctccgggagggcgggagcgccgtggatgccgtagagggagctgtcgtcgccctggaagacgatcccgagttcaacgcaggttgtgggtctgtcttgaacacaaatggtgaggttgaaatggatgctagtatcatggatggaaaagacctgtctgcaggagcagtgtccgcagtccagtgtatagcaaatcccattaaacttgctcggcttgtcatggaaaagacacctcattgctttctgactgaccaaggcgcagcgcagtttgcagcagctatgggggttccagagattcctggagaaaaactggtgacagagagaaacaaaaagcgcctggaaaaagagaagcatgaaaaaggtgctcagaaaacagattgtcaaaaaaacttgggaaccgtgggtgctgttgccttggactgcaaagggaatgtagcctacgcaacctccacaggcggtatcgttaataaaatggtcggccgcgttggggactcaccgtgtctaggagctggaggttatgccgacaatgacatcggagccgtctcaaccacagggcatgggggaaagcttctgaaggtgaacctggtagactcacctgttccacatagacagggaagacggtaaagaggtgcggactacgtgggtaaatgaagcaggtaagtaagtggcccaccggttgcaaccgggacgggggaagggcccactcaggctggacgcaggaggaggcctgagagcgggaaaaaacagccccaagggggaagtccagaaagggaagcgg

SEQ ID NO: 148023 - DNA, 497 bp, Homo Sapiens
tttagattaggacaagtcactttattgctggcaacattcatggaaggtccaggtttctcataaaaagactaagtttgattgggagcagggcagtgccttactcacagatcagcagaagaattacagaaatcaagagacaaccttttttttcctttcaaagtagcaaaggaacaataaaagattggctgactggtgagtggccccacattagagtgcatagctcatcaggatcaaggctggcatctgtgaacagttaacttcataagagcacaagtgggcattatatcatctgcattacagatttcaccctggaaaatatctgaaaatattttatgctcaaatgacagcctgcaaatgacagtatgcattccttctccttgagtacccaagtataaatctaaaatgataagggggcttcttcagtctgaaggcaggaaatccttgcagcagagcagctctagaatttcacaaaaataaaagcagcagctaacgcctct

SEQ ID NO: 148024 - DNA, 654 bp, Homo Sapiens
tttgatggtggaattgtttatttgtgacccggccacctgggcgactacgtaggcctggtacaggaggcaggagttgcctctgtcgccactgcgctttccttaatcgaagagcgggtagatgccggccaagcaaagtgctcgaaagtgtagctgggacgcccacgccggaagcctggagaggcaagttgcgagttcgcagggcttgggagttttttgcggcggaagaagctgaatctaggggctgagtccccgggaagggatggccgcctcttagctttcgccaggagattatcttggagcccagcggccgagattgagagctctttctgcggaacctgcctccggagtcagatgagcaaggggaccgccacgtcctcaccgagctcccagcggcctttggggcgggtccggggacaagccggaggactaggcttctcccagagcgcggctgtctttcccggaaagacccaagtgcgcgatgtcagcccgcctgcacttcatctgagttgtccttatgtggccatttctgtttcaaatttcagatttttctactcagccgggcaggtgcagaggtgacaggcgcggcagccgcggttcgtccggccgaggggcaggaggaggctggccgccgccttctgctgcccgcaggctgag

SEQ ID NO: 148025 - DNA, 493 bp, Homo Sapiens
cccaggagggcttgaatttgcagcagcatgcttgcaccggttgtatattgtcgtactaacatccagaggcagtatgaagacaataagaaagcagagataccaagcaagcagtgttccaataatcacaagtctatgctgtttcttaaagtctccatatcgatgaagtagaaataatgccagaaaaaagacaaaaacaatctcaagtcccaaagctgcaccactcattattgaatatttcactctgactaaccaaagttattcatgtacaggtctggaccatatctggccggcgggctgggctactgtcaccactcagcagccaaggacttgggccccgcagcggcggccactcggggtctgccgggtcccctctctttccgcctgctctcggccccggaccccagactcaaaagcgcctcacgcgttccgccttaggctcaccgtccgatctcgccagacagcgtctggacgggaccgggaaacggcggccgca

SEQ ID NO: 148026 - DNA, 788 bp, Homo Sapiens
ataggaggaagacagtctggtgctgttttatataacagttttggaattatgggtaaagctagtgacacagaaaggggtggagtgctgacatccaataattcttctgattctccaaccggcagtggctataatactgatgtctctgatgataatcttccatgtgaccggacaagcccttcctcagacttaaatggaaattctgtttcagatgaacaggttagtgactttctaatagtaataataatggtgctttagaaaaataacaaagaaaactacatatgcaattcaaaattagtttctggagtgtatttgcctgtctttccctattttggatttatgatatctgcttaaatgttagtcaaagtgtgttggtgaatatactactagaatataatttccaaagtatatcatagatatatttatatccatcatagtcctagcattatgccttgctcaaattagatacctaataaatatttgttgaattaataaattaacaaaatttaagagaaatccacctatagggtgtggaggattttagcaggcagaagtcattttgttattggtagtattttatgtcagttctaaatatttttgtcagtgtttgcttatttcagttaagagttctgaatggcaccttatattcaactcactttttatttttattatggtagaattacatgggtggtgatgagtacagtaacagcaacaacaaaaatattccaaatttttggttgaagaaatgtcgtgccactaactggtgacctggggcaagttcctaacctttt

SEQ ID NO: 148027 - DNA, 812 bp, Homo Sapiens
agccggccccgaatatttgcaggaatagaaagaaacacctaatggagatggtgtttacaaatgcattctccaagcctcaatgtgctctgcaatatacacaatcagaaaatatccttaataaatagattcacaaaacaagtctgctattatcacataccccgaatagagattctatataaaggtctcaatactaaatctcaagattgatttgagtttgggcttgtcctattaaagcttcatgaatggggatccagcaggcgggagctatcacccaggcaaaagaaacacaacagaacaagtcttaccgttcgttttcagcgccacaagcttccggacttctcgacacccagttgagtttcttctggctttccagggtggcctggatgtttctgtcgatgagggctttgtggatgatctcccgaaactgaggacaaaactggcaagttctgaacatttccagtgtgtatcggtgcatggttttaaaatgatgaatgatcccattagtaggtttaaaaatgtcttctggagttctctcccgtatcttcacagctttccgcatattgctcaaatacaaagcctgaggaaggacttgttcagccattgtgctctccaacacctctccgggaggcgcggcggttacctctccgggccccgcgatcctttcgcaaagtcccaagtcctggtcaaggcaggagccgccgcaggcgggggtcggggcagggaccgggcggaggcgacgctccatggacgcctggggtcgggctcgctcgctggcagggtcggctgggggtgtgatctctcttggcggccgc

SEQ ID NO: 148028 - DNA, 316 bp, Homo Sapiens
ttttttaacagtggtcatatttatttccctagtggcgaagacatggtttcctcccgtgctactcaaattcactccttctttaacttgatgctcagtaggttgtgtttcacttgtctttgcagattgttaggaagatgagaatcagctttcatttttgatgttgccatagagaaggctctatggtaatgcttattttcacagtcaactttctcttcttttcccccagacagaaattgcaaactcttaggtgagtgacagctttctggagtctgcaaacatagattattttccctcttttgatggcaaatttcttata

SEQ ID NO: 148029 - DNA, 1051 bp, Homo Sapiens
  misc_feature (230)..(230): n is a, c, g, or t
  misc_feature (353)..(353): n is a, c, g, or t
  misc_feature (889)..(919): n is a, c, g, or t
  misc_feature (948)..(956): n is a, c, g, or t
ccaataactgaaggaaattttcgctggaaagttggttggactgggcggttcctttgacttcactttctttgtcaaaccttgagtctttttacctcatgcccctcagtttccacagcatcttcatctggatgtttatttttcaaagggctcactgaggaaacttctgattcagaggtcgaagagtcactgtgatttttctcctcattttgctgcaaaattgccctcttgcntgtctgtgctctcaggcaacccatttgttgtcatgggggctgacaaagaaaccttggtcgattaagtggcctgggtgtcccaggcccatttatattagacctctcagtatagcttggtgaatntccaggaaacataacaccattcattcgatttaaactattggaattgtttttctctgaagaaggataaacacagctaacaaccatcacattcttttctactcctctgagaaatttgtctgttcctgtatagtttctccttggatctgttaacaattcacatagtcgctgaatagtaaaagggataccattaaatccagtgacaattttcagtattctttccttcatttcatcaaagggaatatattcgacattagggttgggaggacctcttggctcaggagctgaagttctgaaatcatccatcactttctccagtttgaaaataaaatagcctttaaattgggaccactgaatcattgtttctccagtcttggctacatgacaaagaaactgatccaggacaggacaaacttcctttttccccctcttctcaaaatctttcagcgcctcctggagcctctcgacgtccatggcttcccggagtccctcacagcctccgcctccctccgcgggtctcttggggaccggaacgcctnnnnnnnnnnnnnnnnnnnnnnnnnnnnnnntcgcacacactccggcacgcaggcgaccnnnnnnnnnaaacgaagggagccgggggaagcgtgcgagagagcaagaccgacagagcgagcacctccccaagccgctaccaccaaccctccaacatcccgaaa

SEQ ID NO: 148030 - DNA, 513 bp, Homo Sapiens
gaagacagctgcttaaaaaagtaattctaaaagctctgacgttggatcccctctgctgcgttttttgttagtatcaaactgtctttcagagggttaagggagaaaacaaaacccatgatgctccttcacttgctctccgaggcgcaggcgcacagaaacagcggccacggaccacagaaatgcaggacggagctctcctgctcccacgccacgaggctggaacatcagccccagtgcctggtgcacacacaggctcaggaaaactagctccttccatcaagttaaaaacatctcaatccataatcactctgcttataaatactatttgcacttaattggaaaatgtaaaaatcctaggtcttactactagataaacactcatttcataagtactagtttcagaatatgaaatctaatatatttagcatactatgaattgacaataaactgatatgaaatatttaagttcacagtacacatataaagcttcatattatcgcatattaaaaaaaa

SEQ ID NO: 148031 - DNA, 451 bp, Homo Sapiens
tttgagtgattctgctgtttttaataaaggttaagtactgctaagtttagagaatttggggtgacgagacaggcaaggtttcaacaggcaaagcagcagaattagggcacagggcagagctgggtgggtctcatcacacatctaatcctcgatgacagcacaaagccacctctccttgtgcttaagtgtacacgcacattgattgaaaatgcactaaaatccaactcatccaccaagcaaggctaaaggcgcgcacacaaattcaacagcgctgcgttcgcgtggctggagggcagacggggaatattccattttacttagtagagtatcaacacctagctgcagggttaaacctgcttaacaaaagctggcgaggggctggagaggtgcacaccatcagccctctcccgagcgccgaccggcctcgccctgcctctgcgctgcaccctgg

SEQ ID NO: 148032 - DNA, 687 bp, Homo Sapiens
ctgggccagccagccaaggtttaacatctggttcgtcattttcttccgtaaaaagccatcctgagtgagccagcggcagctgcacaggcatatttcgagtgtcgttcctcaggccggggtcatcgaggaaatcgtccttctccagcatacgcaagatctgtttagtttcttcgtctgtctctctcttctcttttttgatgttgatgatatgagaaggtcccatgtctgacacatccactgtcttatcccagttcccttttttcttcatcatttcggctgggccctgctcaaagatggagtgagactggatcacttctggacggcctcgccctcgtccatgcccctctcgttgtcggtctctgtccctttcacgcttctccttcttgacagttacttcttccttgggctcttccttgatcttccgactgatgatatttggggtgaaggttttcttcttgactcccccgagggtgaggtccctggaacggatggagggaaggcggccgggggtgaggggaggcgccggccgccgcccgatgagcccccgggccccagtcaggagaggtcggggccctcccggcgtgctgggctcgccggcggcgtttccttccgacatgttgcctgggagagaaggggcgacgagatcaccacctcgtgccgattcaccacccagcctcgtacctagct

SEQ ID NO: 148033 - DNA, 802 bp, Homo Sapiens
  misc_feature (608)..(618): n is a, c, g, or t
tttgaaattcatataaatgatttctttataagtacacataaaactcttttctcttaaaatatacagaaaaagaaaaatgtacagctgctcagggtaacaaagtattgccttctagaaattctcaggcttcttgtctttaaggataaacaggaagcatttctaattagtgtcttggttgtttgcatattgagcttccaaaatgctttagaaggttcatcttttcaatccgcccttcgcagtcctttatttttcatttgctaagcagaggtaaacttaaaaccatctctatgtgacttatcataaatcccaatcagtgagacctcaaataatgaacttggctctcatttatacacgtgacaaaaggtatacctatataaatatctaataaaaactacctaacagctaaatacaacaaagagaagcaattttcctctctttttcacccaatggctctaattaatcatgcagtacagaaaaataagaaaccttttatgtagcttttagtggttttgttcattctagtttccacctgtgagtagcattcatttataaacctgtcttgctgagcacagtgctttcaaaaatgacttgcttgtgactcagaaacnnnnnnnnnnncaacaatctttgtaacttttaatctcatgcaatttcttcagtttcttttgttggtgattacacgtacaatttggttttgaaataccatgtatcaaagcacaaacaaatcatcccttggagtcgtgaagaagctcatcaatgtatcacagtcttccagtcaagcccataattcagtctcctacag

SEQ ID NO: 148034 - DNA, 455 bp, Homo Sapiens
ttttaagggtatggtattttattgagttattcaacagctgcattggaaggtgcacacacgaggacacggttttgtttgattttggcattggagttttcgtctgaatgccccttcctctggttctctgtcagtagacgatagaggaggccaacaatagtttttgattttcctgttccaggtggtccatgaatcaagcagattttggcaactgatggtgagtgtttcaccatagcatatgcagtttctattgctttcttttggtcttcattgaaatctcttaagtacgcaataattctctcagatgttgtagtcagtaaatcttttgtacagaagtccatagggtttggattcagaacagctctagccagttggttccgactacccaacagagacatggctttcaacttcctttgtgtagttaccagagaactgattacaatacaattcacaagttc

SEQ ID NO: 148035 - DNA, 533 bp, Homo Sapiens
gagattgttcccatttccaaaatcgtcagacaccgatttctctgcgcttttcttgcctggtgtcaggacagggaaaagctatgcaggagacatggcctctagctctgttcaactgtcaattctgctggggaccttagataaatctgttaacctctctgccctcagtttccccatctttaactcgagagtgtagatctaaatgctagaagagtactaagggactcttccagccactttttggcagggatcagacttcggagagtgaactcagggagcaaagaggtgaaactggagcagtgtgagggttaaagggaaggcggctggcggtgccgagcaggggagcacgtcgggggtacagcaccagggctggaggaatcggctggcccacaggtgggcgacctggaaccctctatgtcaggtggtacatgctgtagcccacatgggccgtgtagagtcccacgggcgccacaggcagcgcggcgcgctggaaggggccagaggcaccgtagagcgaggcacccgccgcggccgca

SEQ ID NO: 148036 - DNA, 389 bp, Homo Sapiens
gcggaatgcatcctcatgtgagagccccaatcccttgtgcaagttgtgtcctggtataagacatcatccagccacttgtccagggagcacatcccaatccagttcctgaccagacagggatctgcccttctttccagctgggtgacctggtatatgtttagaaagttccagaaggaaggactcactcctgcctggaaaggacctcatactgttatcctccccatgccaaaagctctgaaagtagacagcattcctgcttggattcatccccctcacatcaagaagaccaacaaagcccagcaagaaacatgggtccccaagcctgggacaggccccttaagctgtgtttaagtcgactgaagccgtttaattaattgtttgcatttttc

SEQ ID NO: 148037 - DNA, 814 bp, Homo Sapiens
  misc_feature (567)..(567): n is a, c, g, or t
tttgaggtttgtaagaattttttaaacaaaacagaaatcacagtgaccaagggtaatgcgagtctgtgtcttccttgcccatgctgctccccacagctctcggtgggtactaaatgacgcgccactgcatgatgcttgtgtctttcccgcccgtggagatgaggtggctgtcttcacagaggaaatcgacattggtgacatggctgctgtgcccgccgtagatgtggcttggagccctgaactgcgagcaggggtatgagaagaggtgcactttgccaaagtcgtcgcctgttgacaggagtttcttctcatgggcccgacagacggcatttatgttggttccgtccgagccttctgggcacactccaaaaacatggaatcccaaagtggaggtataggtaggccattcaatgtttcttggtagtttccacacttacgacttgcttacaggcagagggaacccagtagaggatttcgtagtctccggaatttgacacgaggaactgtgagtttacagaccagtccaggtgagtaatgaagctggaatgacccgagcacttgcccacntcgcgtgtacttccttccgtttgtcactaacggcatatatatagatgcagttgtcctgtgagcctatggttaagaaatttcccatctggtgagtattgcattacagagaagccgacggttccatcctgtgtgaagggggaccaagtcttttgtttttcgtgttaaaaacaacccacctcccagttagtggttcgacttcaacccacgacccttgagggatgaaaccaagagaactggccggtttctc

SEQ ID NO: 148038 - DNA, 420 bp, Homo Sapiens
ctacagttttctcactgttctcttcacaccatgtcatttcacatggtatattgtaggttttgatgagagatcggtattttaaatgcgctgcaagattggttttaactggagattttgcatatcaatataattttctgatcagttaaattaaaacaaaaagcatacagtgtccacagatgaaaggattaaatcatttagcgttgtttttctctgtttgttaaagaataatcttattaaattcttacacaaagtgtggcaaatataaaatttgcttgaaaatatatcttagaaattaaacttttaatttaattttctacagtatacttatgccacaatgtacgtttccatgcaaaatcttctgtttgtaagtgtgaacattaaacattgcaaaatagtaaaatgacctctgtgattttgaaa

SEQ ID NO: 148039 - DNA, 645 bp, Homo Sapiens
tttggggccatcctctaaagtttattttagcttatttatccccccttcctgtcatcttctgtgaatcttcacaacccagtggagtaaacggcaggtgtgaactgttgagacacaggctcccacaatggagcattactgagggttgggaagtaatccagtcaaatcaagagttgtatcaaaatcttgtgttgcaattgacatttgatgttcatgaagttttctgaatgcttcttatttgcctttaacatctctgcagtgttgtgtacttgcagataggcatatgcctgatgacatggagtacaaagacacagtatacttttgatattgacatggtgaggagaaagtgaaatgatagaaaaacaaggacacatattttctcttctggtattcctccgtgatttaaatattaacagcatattgtttataatttaatgcaaaaaatatgtgcactgacagcctatatctaatttcttcttccatccttcaacaatctccgtttagattctggttggtacttggcagctcttcctttcctgccagtgttcaggcaatgatgtatcttctggtcagtgggtccctccacatcaccacaaagacaagagaatacggagaagttaagcatgcatcgcaggataactccaatta

SEQ ID NO: 148040 - DNA, 566 bp, Homo Sapiens
tttttttgaccaggcagcattttatatttaataaaaccaacatgagttaatactgaacaacagagggatggtcattaggatggtttgctttgactctattcgggtaaaaaagaatttttggcaagttggaatttgggttgtttttggttgtgcgtctggcatccattctctcatttcttcttcccaagaaaacaccagttgtattaatgtactggctgattttccactcagctcaggtgtcttgtgaatctgatcctacccgtggttgaagagtgactgtactaagatccagcataggaaggatcacgtgatataacatcgtaagagggggcgtggccatcacatgagggtctttttaggaaagatgttcctcactcttctgagaagggttacaaagatgtctctttctcttttccctttggaccatttgtcctgtgcacctgtcgtagagcgactggtgctgtgtcaagaccaatctgaggaggaagcagcagacgcaggagagcagagccatagagactgcgcgcgaaaatgtagcagagccagtagatgaaggcaacactgaa

SEQ ID NO: 148041 - DNA, 423 bp, Homo Sapiens
agttacccatgaatcttttattggttaagaaaaaatgatgtacttatacaacctccaatactatgcagcaacagaagagcatgaagtaacgtcttttgcagcaacatgaatgcagctctgcttcaggccattctaagcaaattattgcatcagaaaaacaaatgccacatgttctcactcatacatggatgctaaaaattgggtgcacatggaaacaaagatgaaaacaataaacactgggaattctaaagagaaggaggaaggatgggagacaagcattgaaaatctggttaggtatgatgtatactacttgggcaatggaattattaagtgtccaaacctcaacatcatgtagtctacctgttttacaaatctgcacatgtaccccttagatataaaataaaaacaaaatgtttttggtat

SEQ ID NO: 148042 - DNA, 375 bp, Homo Sapiens
gctaggcaccaagattcttggtgcgtcagaactatcttcatctttccttttccagaacaagttctaggcactaagattcttagcacatcagaactatcttcatctttccttttccagaacaagttccagctgcctaaacaggctgaaagtctggggctgtttcggcgatcaaatgaccaaactagagcaggcaatggcttccacgtagatgaagctgagcattttaaattcaaaaatttctgcccattggctactacgtaataacttaaaacacaatttagactgacttaggaagcttctgtgttgagcaacttcctcaataatcctcaaagacctgttgcattctgggccctgcggagaggaaatagtgccgtc

SEQ ID NO: 148043 - DNA, 1231 bp, Homo Sapiens
agctctggttcttcttaaaggtcgggggtagcataaggttatgaaatcgggcatgctggttagccagtagtgttccccttgaatctaaaaggggtaattgaggagagggctgctattctcgttcgggggaggcaaggcaagacgcagggagactgccatttgcattttatactttgaacagtgtggtgcctctactgggtttgttgggagactgtccttgtctccaaacatgggtgaagccaactgggacacataattcaaacttgtttctccagctgggatttctcccagggagttcatgtagtttttttctagtgcctttagtacattttcaggtgaggtcattagtcccagcatacttggggcttttggggatactggaacatggccacaagagccagagtcagaagctgcctggttataggtcaagttctcaaaacagatgcaggggccagggccagagtgattcttttctgttggaaggagataaaggtagttaggcttagtcaactcggtttctgtgagtgacttcctagtgcctaggaactgtatctttgtcccttctggcttgcttacaacttcaatagcatctgggatacagtcactgacattcattattattaggtgagggttctccttgaattttattaatgacaggatgctgctcttgtaagggtcagggatgtcaggataacaggtctccttgatccactgacttttcaagtagcacatgaccatgatgagcaagacgcagaaaaccatgggtagtaggatatgaatcagcatcgaggagtgttcatccggagtcgtgaccttcgtgaacgtagcactggggccttcaccagcactagtgaatggagtgatgaaaaactcatagaaggattctggctttaggttgtccacaatcaatgccttttcttccgggttgtcaattttgtatttgcaacattctgaaccatctgaaagaactgccttttcaaatcgtgggtggcactgcctcgccttggatttcagatagacatggtacccttgtataaaaccaggttgagattcagtagagtaatctttccaactcagagtgaaggagtgggatgtcaatgtatccaccagcacgtgagggttgtctgaaggagcaagttcctgagagtatcctgtttttttctctaataaacaagcaacctttttgtagataacccataattctgaagtcatatcgaactcctggcctaaa

SEQ ID NO: 148044 - DNA, 647 bp, Homo Sapiens
ccgcatagtagcttctggtgccttttgcatattgccttttgccctgtccttatttctttttggacatttgatttaagaggcaaatagtactagatgaggaaatcaaacccactaactgaaatctacgctgagaagcaaatgattatctgatcttttgctgagaccaaatgctaagaatgtgttgagatcttggaacccaaaggtattagatgaacattgagcaagaagcatttaatcgcaaggctggttgcccagtccaaggttctttgaatgttgttccctgctagtgctagtactatagtcttcagaagtccatagtcaaaggtaggtagatgctggagtactcacagtcagatttctgagcagttgaatacaatggcttttcttccctttactatgatattttagaaatagaaatgactagatgctaacatattttagcttcaatatatatcaccttcttgtcattaattcaattctttggtttattttgtttctaattgcacagataacaagaatttcctaacatttttctcatacccctttggccaccttaatgttcccatgctatttattcctgttcatttttcactgtttgatgatggttattgttgaaatttagcaaataaaatgtcagctgtggcaaa

SEQ ID NO: 148045 - DNA, 451 bp, Homo Sapiens
ttttgaagctgaggcagctttattgaaaggaaggccagtgagtgggactcacatttgatctgccccagagtggggctgggaggttaccgagaacacagtcccgaggtgggggaggccctcagagtcacacctccaggctggactgagaggagctgggcttgtgacccatggggctcttgcccatcacagtgccagcgccagggggtggccagtggcgaaccacgtgccggtaggaggtggccaggtagtcgaagtagttgatgttgagtttccgggcgatgtaacggcccaagtattccatttgctcgtagtgctccgacagctgcaccagcaccaggggctccaacctgtggccgccgaggaccaggtggaagaagcaccttccgtgggcatcggagctgagcgccaggcgcacgtagaccagatgcaaggggccctggcacacggtgcg

SEQ ID NO: 148046 - DNA, 962 bp, Homo Sapiens
  misc_feature (182)..(182): n is a, c, g, or t
  misc_feature (262)..(262): n is a, c, g, or t
aaaccattttcaatttggccccagcatttggggataaagaaaaaaatttttataaggcagctttttcgcaccaaagtcatctgggtgattctgcgtggagaccatccaattatggatatgatccccagcagatgtaaagttacgacgaatgtgttctggtaagagatgcttctcaatctgtnggggaaaaattgttccccataagaaatgtactactcaaatccaagattttaacattgaggtccactgctcttttacgctnttctttgtctagatggatcccactaatttcaaaatcaaacataaacagttcagccactcgccttgtttctggatcaagggaatccacaagttttttatcagctagtaatttttgcaaactttgatataaatccacatttgtgttcaacttctctaccatggtgccaatacttctacaagcttcttccgcagcttctctgaatgctggctcagggtgagcgattttcacaaaatcagccaagtcggccactctgcataaggaatccgagagctcatcgaagatcagcacggtctggggcccaggtggggtggaacatgcacggtccacaagcaattctgtctttctcaaggctttttcttgtgcaaatatgaaatcccttctggggcactcagctcaggaactcccaaaagaccccggcgctcagccgaacaggtccaagcaggctgcccatggggcttgacattgaaggcggcagcccacgggagaccagctggtgctgacccttcgggcccggatcccggcttcgaggcttccccggcccgcccggcggggcggcagagctgctgctctggctcccaagccgcccagccttccgacgcacagcattctagcaccagagcagtcccttcctccaacgcagatccctgccctgctgctttcgctgggagcgcgcgctatcccgggaattccggaccggtcc

SEQ ID NO: 148047 - DNA, 676 bp, Homo Sapiens
tatattacaggtatattttattaaatacacacattaaagtacaagttctaaatgtcaccttttcctataacattttccccattcctaatgatgtatttcatcacaaaaaattatacccaatggatctcaaatagtttcagacatttttaactttataatctaatattaacagtaaacaacaaaggataaatttcacttaaattttaacaggttgaaagagaggtagcttcaagtctgaggcaaagcatcttaccaagtcggtcactctgcacaaggaatccgagagctcatcaaggatcagcacggtctggggcccaggtggggtggaacacgcacggtccacaagcaattctgtctttctcaaggctttttcttgtgcagtatgaaatccttcatatttcatatgaagtatgtgccttctggggcactgagctcaggaactccaaaaagaccccttcgggccggatcccggcttcaaggctgccccgacccgccgcctgcgccgcagagccgctgctctggctccgaagccgcccggctttttggcgcacagcgtggtatcccgcagaagtcctttcctccaccgtgagaaccctgtcctgggcgcagcagcctttacctggagcgcgcgctctgcgtttccaaggcagcggcccacgctgccccacgtggcggc

SEQ ID NO: 148048 - DNA, 512 bp, Homo Sapiens
tttataatgtaaaacatatttatattgacaaagcactataaccaaaggtttacacacatgaatgagcatatgtaacaaattgggacatttttctcaaatatgccaagatttatgaagtctggcaacaatccctttgctttttcttataacaacagctgctaattccctctgtgacttctaactgcccaattttgtgaaagttggatcagtttaaatttagaagatactctattccaagaaataaagttcaaaaatggagtcatctttaagttaaatatgtccaggccaaaatgttgtctttctgcttctgtttcttctgcatttccttcagaaatggagaagtaccagttcactctaggttttagcaccagctttgaaataagttgctgtctgaactacagcaagctactcctcccttctctcagtcttctcctgtgtaaaataggtaaataaaactagataatttgcaaaggtcaacccaatgctcccattatttgttctattcttttttt

SEQ ID NO: 148049 - DNA, 444 bp, Homo Sapiens
tttattttcatttcagttttaattaaaatatggaaaaaggcataatcattcagtttttagtattgctctgtggcaaaatttcatgaaattcacggtggccattcttatgttagttttgctagattaacatatcttaaaattcttttctttttctgttttatcttcagtttccaaaagggcaaaatatctgtatctgctttttacttttcttcccccttttagctcatatcaaatcaagttttcttagagtcgtccatgcttcttctttccttctcacaccataaaaaagttcaaatagatttaccctcacaatatacccataatctaccacatattttcacttctgctgttactggccgacgtcatcatctgttaccagaattgctacagtagactccaaactggttatccgtttctactcttgtccccttcagtctcttgtta

SEQ ID NO: 148050 - DNA, 264 bp, Homo Sapiens
tttactgtggaagctggaggtttacttttcatgttttagttactttcttgcaaacagcagtccaggaaagcaagcaagcaggtaaaactccgggtgtgcatgaggagatgatccaaggccagtgggctccccagtgagaaccaaacaggagtggccaggctccactcctggggccagagtgaaaccggggtttaatcactgggctatgtggtctctgtgtctctggcctgaatgagatctcttcaatgtcgggggacagggatc

SEQ ID NO: 148051 - DNA, 603 bp, Homo Sapiens
atgttttgatgtgaagggggatctccattttatttgacaataaaaggtttttaaaaacagtgaaaaggaaacagtgactacctgagcatttgtcttctgaagactgtggagactgcagttggaagacagaaagctttggagatcatgacttataggagtagggctggaccacagaaaagtaaatgatttggggctggaaggagtaaggtctcaggggagtttctggacaatgcccttggcaatggggattaatgatgtacacgtagaagggagaagggcagatgggtgggagatgcatgatctcagaacacagagctccagaatcagttcgggctcctccaaggatcagggaagagagttattcccagaacattgacctcatgaatgtcctttacctcacccagggcccagactactcatcactacttcaggctccagagagagaagcttcagtgaggaccttagcatgactgagggagcagaacagctcttgagacctcattacccgacatctgggtcctcacatatcctttctgagcccttagctggatgacgattccccccagaaggaagattagcccaagtaggaaggctgcaatgccc

SEQ ID NO: 148052 - DNA, 502 bp, Homo Sapiens
cttaactttttttacttgagaatttacttgaaaagggcctctacacagagttaaatgaacttggccaggtcaggtttccctgaaggctcccagagcttggtcctagcatttcagtgttaagagcacctacctgagaggtgcctgggggagtcattaagcaccagacctggagaaaatcacctacatgtaagacaggaaactaatttccacatacttcttatcctggctatttggtggacaaaagcaggcactccaaatggctttatgcactggctgctgggagtcagtcttaaatcttgaaaaaacatttccctttaagggggcaccacagcatcaccatccctgacaactgggcaagtcagcagaataacactgatgctcttcctccatcttctgtggtgatggagttattccttatccaaatcagtgccttaaagcaatcctcttcctcgttgagagtgaaatggttgcaaggaactttcccgtgtaccgccgctgactg

SEQ ID NO: 148053 - DNA, 986 bp, Homo Sapiens
gctggcaactcagtctttattgatggtttcatttttggggtcaccagtgctaagaggtggaaggtgggggggcacctttatgtgtgtcaaggaccccagagcacccccctcacgagagaataaatccaatttagaacttacaaggtggtggggatgggaagaggaagggacacagtatgtacagatgcttaaggggatgctggagggccttcagcaacagggaatggaggtgccaaagaggaagtcgggcagagtcagccactgatctggacgccctcagcctcggccagagggtagatctcaatggcttccaccaggggtagcgcctccacagcagtctccatgacggccaggccaacgggcagcctccgccttttgccagttgctgccgccccagctgcctgatgctgctgctgatgggtcttgcggtgcttccagaggttggagaaggagcggtagctcttgccacagtcagggcaggagtagggtcgttcgcctgtgtggatgcggcgatgttctgccaggcgcatggagatggcaaaggccttgccacacacttcacaggcaaagggccgctcacctgtgtgcaggcgccggtggtctttcaggtgggtactctgacggaacgctttgccacagtctggacatgggtatggccgctcacctgtgtggatgcgccggtgcacctgcagtgacgtctctgtgctgaacagcttcttgcactcgctgcactctagaccccggcggcgggcaggggccgcaggggatgctgtagcagtgcttccaagggctgctggagaggcaactggtgcacgagtggcccgtggggctcgaggggcagggggctccttagccaggacctctccaggcccagcagctgcatgggccgcctcgtgtgcctgcagtcgagcagctgagcccactttcttgccacaggtgccacactcaaagcgccgtggggcctgggcagcagcggctgcacagcg

SEQ ID NO: 148054 - DNA, 578 bp, Homo Sapiens
aggcactgtgaagccccgttcctttcttccccggggatgcctggagccctgaccgctcctgctgtgcccttcctcccgccggctcactgacagacactcgtggaaaaagcatatgcaccagtctcctgcgacacacctgctgtaactctaatgacaaggttagaacagaaacctaaaattaagaagataacatgtaaatactgtgttattttagcctacagtacagtaatctggatacaaatgataagggagagccacgtttcctttcccccacgctgcctctacttgcctacattagaccggccttcaatgcaaatcttaacctcctgaggaattagagaaggcttaggaagagtcaaaggtggttcgtcttctgacttctccagtttgcggctctctggcgccgaccacctcctcttcctcgttgccgcgggcttgctgggttctattttggtgaggaagggcgctgcagacaatcccattttctctggaaacttcagttcgccattctcagagagcatctgggcactcccctggttgattccgttttcctgctcggcatacctgtgtctgctgcc

SEQ ID NO: 148055 - DNA, 482 bp, Homo Sapiens
tttctgtttcagacatttatttccatttaaatgacactttgaaagatcgaggagccaatctgtaccgcaaagacaacttatcatcaaagactctagaagtacaatcgtatcaattcacaagacttgatttcttcaacttaaatgatagcttttagttaaaatatacctgagagaagaactccaaaggatgcctgcctcataatctgccctggacttgtcattcccgacagggcacctcaatggacactgccccaccccattaagactctgaagcgtagggtcccattgctttgcttccgaaatccaaggggaacaagaagtacccatctcttacaaaaataagcatgtcaacattgttcagtacatttttctacacatataaaatcaaaataaattgtaaaaatatttttccaggtacaaaataaatatagaaaacatcaatgtaaaaacaaaaggattgtccgattcagaccattaccttg

SEQ ID NO: 148056 - DNA, 537 bp, Homo Sapiens
cgaagcgggtacagacaatgttagggacccagcaacaccagtcggggtgttagggtgcgggatggaattgcttagggacctggcctacgtggccagttcccaagaactttgtcttttccaggtgagtgcagccccttccgctccagtaggttccagattaattttttatccccaagctctttcctgctccttcatgggtctcaggtctcctggaaatccaggaacagcaattagcccactgctatttagggcctttgtaaacattgaaggatgattcggagcttaggctttctctcccgtgtcaggaatcagtcagatgaagcctgctgcacgcgtccctgtctagatcttgattcaagtgattatatgcatttggatctccgtggatgcatctggtggcctgggctaggccagtgtaagttaaatctgctttcttgagccagtcctcagaaatgacttggtggcctagttgttggtggaggtaagtgagtgggagttttagccccgccttccagcctccagatcagactctatctc

SEQ ID NO: 148057 - DNA, 392 bp, Homo Sapiens
aaaaagaaaggaatacatttcctccccaagtgaacatcttctaatgctgcatcaaagctgccctgaagctgcactgaacttctcttgttctctttatctgtgttgagctttttaaaaaaacaaactcaaaacactattgaggcatataacgtctcttataagaaatgtagcatagtgtggaatcttaatttctctccagtttcaaacactccagaggaatgcaatagataagacatacttgctgtttatctaaagcaactgtaatattggaagatcagtccttctgtattatattgtataatagttgctataacactacttgcatgtcttcatggtaaattatataaatatttataaatatatagagagacatatccttatatagagtcaaa

SEQ ID NO: 148058 - DNA, 491 bp, Homo Sapiens
tgcaggccatcccggagatggacttcgagccctctccggcggagccgctgggcaacgtggagcgctccctgcgcgccccggccgagctcctgcccgatgcccgcggcttcgtgcccgcggcctacgaagagttcgagtacggcggcgagatcttcgcgctgcccgcgccctacgacgaggagccgttccaggctccggccctcttcgagaactgctcgcctgcctcctccgagtccagcctggacatctgcttcctgcggcccgtcagcttcgccatggatgccgagcggccggagcacccgctgcagccgctgcccaagagcgctacgtcgccggcgggcagcagcagcgcctacaagctggaggcggcggcgcaggcgcacggcaaggccaagccgctgagccgctctctcaaagagttcccgcgtgcgccgccagccgacggcgtggccccacgcctctacagcacgcgcagcagcagcggcggccgc

SEQ ID NO: 148059 - DNA, 463 bp, Homo Sapiens
ttttgactttcacatatttattacactggaatattttgcttggggtagctgtcaaacattggttaactgtattatgacctcctttgtgccccgtacactcatccacatgtttacagcctttccttaactgtaaattctcatattcacattttccgtatcttctcagtgtcactttctggaaagaatcttttatgttctgctctggccaaaggtcttgggcaaaatgaaaagacattactgggggtttggctaccatctcatgtctttttatattccagggctcttttttttgctccagacaggtgatcagatatggcttagagacagcaatacccaaaaagaccaggtttctgtagttctctaacaacacattcctatataaatcccgctgtgcagtatccaggcattgcacttctccagagagaattctatggcgacatctttaaatgtcagtggttccttt

SEQ ID NO: 148060 - DNA, 979 bp, Homo Sapiens
ttttgttgtagaaatatatttattaacataagcagttcacaatttactgtaagaaaaaaagcaagctacaaaacagtgattccatgtttatattaaaataaacatacacaaattaaaaatttccttagatatccatttaatctctgggatcataagcaatgtttaggtattttttgctcatttattgcctaggttttacacaatgagcatatatgttaattgtgtaatttaaaattatggaattaagtgcaagagttcctaaccaccttttacaaaactgttatgagaaaatacattctagattcaaacaaaaactaagcaatatatcccttattctaacagctctaaaatctgttcttctcattatactcccacctaaaatcccacatccaaaaagtagaaatagctgcttctgaattcctgaaagtatcggtaggaggttgggaggagaggggccgggatatgaagagagaaactgaatatttgaggacagactgttcgtgttttgagggaaactttaggaatagggcttggctgaaggaaggaggctgcgaggttccatgaataagtttcagcaaaatagtttctcctctcaccagttttccaccttattcaggtgtgcatccactgctacatgctccaaccaattgctgttgagaccccagagaccccagcaccacgtgtgattaggaagcgcttccatcattgaaatggaatagagtctacttgctcacagtaactcctgtttctattcctttgctccttccttagcaacttcaggtctttcttcagtaaaattttttgctttgtaaacctattttttttcacctcctgtaacatgatatgctgcccttctacgacctttgacataccaatcatctccatctgaaatacttctatccctttcccaaccctatcttgactaatttatttcgtactcatttttattttcatttaggtgccacttcctcagggaatc

SEQ ID NO: 148061 - DNA, 543 bp, Homo Sapiens
attgctgctttttccacttactgcaagtaaaagtggtgtgaggtcatcctggttttgtgcttcaatatttgcatcatacaaaagcagctttgttgctactgatatgtcctcattatagacagcatagtgaagagcagtgttgccatggacatccgcaagatttggatcagcaccatgttctagcagaatagttgcacatttctcttcctggcattgtacagccttcatcagaagctgtcctgttttccgttgtccacagacattgagctggcattttctgtccaccaggagagttactacttctggatgaccattggcacaggccaaatgtagagccgtcctgttcatcttgtctctatcgttcaagccattcttcctgagcaaaaggatctgctgcactttcgccacattacccgcgctggcagctttgtggatcttgccgagatctcggtctcggacgtggtagccgggctgcgagtaggcgccctcccccggctcgcccccgcctgtgagtgtgtgtcggggaggggggagagcggccgc

SEQ ID NO: 148062 - DNA, 361 bp, Homo Sapiens
ccaagtcactgtgcctttctggctttctttacctatgtcctgtaaaacgccagccagaagcaaatgaatatattatctgtccgaagcaagacatggggcaaatggatctatgagtcgtgggtgattgggactcctcgctcgcgtgggggtgtgactgtacttcagaactcattttcaccgatgctgacatacaagacagtcctcggagacctgtctatcaaactgcaacatgctctgcagaaaaattagattactcatgctcagacagagggggcgatggcaatttagagtggccccttaaatgccaattacacttgtatttacaaaacaaattaaacccacgtataggacattgttcaaa

SEQ ID NO: 148063 - DNA, 1177 bp, Homo Sapiens
  misc_feature (73)..(73): n is a, c, g, or t
  misc_feature (96)..(96): n is a, c, g, or t
gtccgctcccgctctaacttagataggacggttaatggcggggaataatatactggtccggtagggcctaaanagattggggcgtcgggctccatncctataggggttgtgtgtaataataaaatgttttatatatagtggtcggggcgcatattacagcggcgataatctaagtttgtgaagcgcggacagtggaagggattcgggggatatggcggagggatagagtgaggttttaattgcatgttcagtggaaggacctttagggcaaggggtagtttattcattgggaatttccgcgcgcaggatagtcgctctatctaaattcagagcttgatttatgatgtaaaaaattacccagtagttgaaaagatatatgcagagaagtttttctgccaattcagtggaagataaataccatcggtgcatcagtagaactattcttggcaaataactattatccagctctccattgtcatcaaacatctcaatgcaagtgcacagcagttcatctaatgttgctgctttcccaaggccacttgatcccatggttatttagccgttgtcaaaaaactagagacattttcagcatcagatagaccatctccataatcatgcaagtcagcgatgttagtgcctagtggtgacctgtccttagttgtacttcaagaaaactctgttgtttccatacagatacagttccaaatctgaaagaattttaagggcagttagcatcattgggaaatgcatggaagaagcagtctgtagaactggtttattcaacctgaatgataagtattttggagaactgagaatcttggcagtgaaatcagagaatccaaatgggtcatcagaggggtgccgcaggttcaggtagattgggtgtagtttccatggcaaagaagagatatggatgttttaaaagaaaatatcctttgcagaactgcaataatgttgatccctatagtgaattgtctttttctttccacttcatcacctctagcaagtttctcttcaacgtgcctaaacacctagaattcctgttctgtcttctaaaatgctgtcatcacctccattgcccaaatctagttcaaaagtgaggagagaaaaaaaacctgaaatttgcaagctgtttatgcctaactacaacattgaagctgctaagctttgagctcaa

SEQ ID NO: 148064 - DNA, 632 bp, Homo Sapiens
ggatgcgggactagccgggcaggctgcgggcggccgtcgggccagcgaggcctcgcagcgggcgggccctggcgagtagtggccgggcgccgccccctgcgccctgaggcccgggccccgccgcttctgctttcccgcttctcgcggcagcggcggccgaggaggcgcccgcgccggccgcccccgggggaagccgcgccgtctccgcctgcccggcgccctgacggccgctgttatgcgtattcccgtagacccaagcaccagccgccgcttcacacctccctccccggccttcccctgcggcggcggcggcggcaagatgggcgagaacagcggcgcgctgagcgcgcaggcggccgtggggcccggagggcgcgcccggcccgaggtgcgctcgatggtggacgtgctggcggaccacgcaggcgagctcgtgcgcaccgacaggcccaacttcctctggtccgtgctgccctcgcactggcgctgcaacaagacgctgcccgtcgccttcagggtggtggcattgggggacgtgccggatggtacggtggtgactgtgatggcaggcaatgacgagaacttactccgttgagctgcgcattgcctcggccgtcaatgaagaaccaggt

SEQ ID NO: 148065 - DNA, 631 bp, Homo Sapiens
ttttcatcattctttgtttattaggaggaaatccaggaaataaatcaagaaattagagcattctctggagttttactgcggctcagcactccttaaaaaatatgtcctgctgttcatttattccaaagtgtacttgatgattctctgggaattcgctgtccatcacatgttagaacattgcaccattcaaaaattcatcgcttagggacataaactcattggggagagtttcttcagctgtttttctcattagtctttaactttccagaaactgcctcagagaaagctttaaatgctcgctatttaaactacaaatatacagcagtgatcttcccattttgtcaaaaacttccaatggctgctgatggaattgggtcttcatggagtttataattcagaaagaaccactgagaatttgaagtgtttatgagcacatgacatttttgaaggacacctggcaggtgttatatgtgaagcagattcatggtgcgccagttaccagtcctaggggagggctcccactgcgtggaaaacagcagaaatcattatgaagtcaatcatgaggaacaggagtccaaacgctttcatccactgcattttgagctgcaatttctacaacttgcacaagttt

SEQ ID NO: 148066 - DNA, 402 bp, Homo Sapiens
tccttttccctaattaggactccacatttaaaaatatattgttgattataatacagtgagtaattgtacctgtatttgtctggtgctcaccttgttcagaattgttttcctatgccatcttgttttatgggcaccatccagcagaggaaccagttttgttgctagaaattagtgattgatctggagcaaaacttgggttctgcccacgaggtttgccctatctattctaggcatggatggactgtccagggagtgccatattctgaggtaggtcagcagaaaaacaaaggtgtgacttcccctagtcggtaattacttatgtgctgaacacccaggtctgctaaatcagaatctccaggttttagcagaaaagctcctaagataattctgctgggcagttag

SEQ ID NO: 148067 - DNA, 464 bp, Homo Sapiens
ttttaaaactactacaaagataatgtttattttgatgttgtaatctatgttgatgttgcagtttgtctgtccttcaaattcttctttcgtatttgcttgtctttacatacaccaatttcatcaaaaaaaggacatggagccttgggttccgcttccttgcagccagcattgagagcaatggcagatctgcactctgagccaaattcgtctttcgctcagtgttccacagcctcatttgttatgttccagggatggctgtgtatctgaatgtattttgaaaaacagttaaggccaagaattagccttggcatttagagtaatctgtagatctgccttgtgctttcctacggaatccatgtagaagccatgtaaaagaaggtggaactgcctggtggctttggagaacgaagtgtctggttctgagctcctttcatcaattttttctactggggggaaaaaacacc

SEQ ID NO: 148068 - DNA, 996 bp, Homo Sapiens
  misc_feature (590)..(590): n is a, c, g, or t
  misc_feature (659)..(659): n is a, c, g, or t
  misc_feature (811)..(811): n is a, c, g, or t
  misc_feature (862)..(862): n is a, c, g, or t
  misc_feature (866)..(906): n is a, c, g, or t
  misc_feature (922)..(922): n is a, c, g, or t
tttagggaatgaactttttattgcttcaattttagattgataagatcacattatgatgtatcattaggaacagctaataacagtaatgatctaataagtgtaatgcaatctaagacacttcacaaataaacaaaaattaaaccaaactgggcaaaacgcccagattacttcctacacacaccaacaaaatactataaaagtaaaaatggaaacaaatgtctcccaaaaatggtggttatttttgggttgtaaaacaatggaagacttttcttctttttctctgtattacttcttatttctgttttaaaaataagcatgaacatcttttgataatgggaaaacatttaatgatataaattgttattatacgtggcataagaatacaagagaaccacttcttgaaatcccgaaagaaaaacgatgaggaacccacctctatctcaccaacatggggattccagctacttgatagcaggcaacttgcctttcattgattttatacacccctaacagggatcctcacagtatactttctccaataagtagtttttgactattaatgactctggacacaggaaaaggaaaggttntaagccatcccaagaatatattttggccctgaatttaactagaaagagggaatagcagaaatgctcccnctactcaccaagctaaagataatattttcagcacttgtcaagtcccatcagtgagccagctagggagctcagttccttctccaaaagattagaaagtaggcatcttgttctcttaaggagagactgtgagtaggcttaaaattgaattcacncttttcatcactaatggaaatcaatgttactattccttctgtttccttccncagnnnnnnnnnnnnnnnnnnnnnnnnnnnnnnnnnnnnnnnnntttacacacacacacnccacatcatataagtaatctctgttagctggatgtgttggctcacgcctgtaaacccagcactttggctattgt

SEQ ID NO: 148069 - DNA, 433 bp, Homo Sapiens
ttttttcattgatatctaatttattcactgttaaattatattatccatttttttatgatcaaagtctaaaattcagggcaggactctcaggcagtgggtggaacttgttcagattgtggccactccaatgatggataagtcccttgttgtgatcaccaaatccacggaggaaaggtacaagaatgagcttgttctcacatacaaaggatacagatgaacagccagatggaagggatgcacagtgcaaagtatgtgggcaggcatgtggagcttccatgccctctccaggcacctccacatgctcagcattccagaagttctccaaatcccatccttttgagtttttatggaggcttcattatttaggcatgattgatgacatcattggccattggggatagactcaacctcagtacctctccccttccaggaa

SEQ ID NO: 148070 - DNA, 609 bp, Homo Sapiens
tttgatcctttgatcatttattgcaacatgattctgcatgatgttttatgataagtgccctgtagtatattattaaaaagcaaagctcttggagtcaccagctatggtttgctgatggttggtttatgaattactaggtttgcagacccgagacatagttttaagtgaggtccttctatatgcctgaaaatataaactattacatatgtataaggaaatgaaaatgtggttgcagtaagaaccatagtgttgaatttcttcaaccacaatactgcagaaaaaacatgtttaaaacttcatataaaagttatcaaatatggagacctgtggatttaaaaatacaatccaggctcatttcactggaaagtgacatttttgattacaatattgctgaacgtgaaaataggagccaaagagactagatgaaactttggtagtcagcctaacacattaattcacctgaactagagccattacccaaggatgtgtagcactatggtttacaaataccagtcaggaagttgcagaacggctctgtgctgtttgatatttgcaaaacataaaaacacttccctccctgctctcctcttcctcaacacaacactcaag

SEQ ID NO: 148071 - DNA, 432 bp, Homo Sapiens
tttttctctcgagtggttccgcctgtactcctaccaagcccaagcctggtggacatcgtgacagcactgggatggaattatgttttgacactggcttctgaggggaactatggtgagagcggtgtggaggccttcacccagatctcgagggagattggttatccatccctgtttgggattcagggctgccttcatgaatgttttgctatactatgtcaagttgtttaccaatttctgcttctaatgcagctgtcagatgctcaaactgtctattagtcgaagaggctctctactgaccacctttctcaagtttcttcttcttacatacaatgtttttgacaagactaagcatatcaaaccatcttttaacaattgtaaagcctaatattggccagcatacaattcaattcattaaacattgtagcactgaaa

SEQ ID NO: 148072 - DNA, 329 bp, Homo Sapiens
tcaataaagggtcgtattcaacaagaataatattccaaatagaactattccaaatacgtatacacccaatgttggagcacccagattaagaaaacaagtacttctagacctatgaaaagacttagacagcaatataacagtgggggactttgacttctcactgacagatcactgaagcagaatactaataaataaattttggacttaaactctgcacttaaccaattgctcctaatggacatctacagaatatgccatccatcaaccaaatatatgctcttcttatatgcacctagaacacactcgaagattggccacatgcttggccg

SEQ ID NO: 148073 - DNA, 400 bp, Homo Sapiens
gtgacagtgacaacgcgggcgtccctggggctggcacccgggggcctggcggtggtcggcggcagtgccggagcgggagccagggcccgaggctggccgggcagccgacggtggtgagcggcctctggcagccagcccgccaggcaccgtgaaggctgaggagcaccagcggcagaacatcaacaaatttgaacgccgacaagcccgccctccagatgcctccgcagcccggggaggcgaggacaccaatgacctacagcagaagctggaggaggtgcggcaacacccagcccgagtccggccagtcccctccctggtgcgccggcccgcccagacatcacttgtcaagttcgtgggcaacatctacaccctcaaatgcaggttctgtgaggtggaattc

SEQ ID NO: 148074 - DNA, 423 bp, Homo Sapiens
tgtctcagaaaaaaaacaaagtgtacttgatttctaatactaagaacttggtctagaacctaacttttatttactaatagctataattttgacatcagttgcccttttatagatggtaatagcctttaagtttgtgattatttacaaatcaaatttcctttttattcctttaaattataagaatttagtataatgtagtattgctatcctaaagccatcttgaatacttgaaagattttgtcatagccattttgaaacccttgtatccctatattgcagggcatcttccaacagggttccattttgtttcagagtcttctatgaagtctccatgtaaacctccattgctgcccaccttatcatgttcattctgtcttgttttacaaaggcaaacatcacattttattttattctgtcactgtc

SEQ ID NO: 148075 - DNA, 445 bp, Homo Sapiens
agcaaacatcaaacttttatttccatctagaggtcacatacagatacatacaagtttgtttcaacttctgccatgtcgtctttttcatttttactttttagttgggaggtaactaaattgattattcttttgatatcatactaagatatttaaaacaggcctgttcactaacaagaaagacatttctttttcttcgtgttttaaatttaagaacacaaacataaacaactttagttaatatataaatgtcctttgtccatatttcactacctttattttctttcatgacattttatagatgaaaaatgcatttgcagacaaacaattacatattatacagtggtatcttgagagctatgttgcaagatttacactgatttccaggaagtcttccaatgacgtatgctctgaattataggagtccaaactactaggatttccaaag

SEQ ID NO: 148076 - DNA, 580 bp, Homo Sapiens
  misc_feature (313)..(325): n is a, c, g, or t
tttagatattctatatttcttcaatcttcattttgaagaccttcatttcttcaagactagagagaggaatctctctgaattctttcttactttctagaaggattcccagtctaagctatgtcagtcttttcctttgcttctattcctttgttgacatagtcgtaagtgtggcgtggttcacttgctcttatttgctatgtctgtgcatagatgctgtgctgcttccctctggatagcttcctccagccagctactctttcttcagcgagtccagtgtggaggagagtgaaatgagaatttctttattcgtttnnnnnnnnnnnnngtctttcagagctcctagcaggtgcagttaactgtggctggtacctgctgctggttgatcactttcccttttgtttgatatgttacttcctaggaagtccatgttaacatacaactgcaacccagatgttagatgagaatcctctccattccagctctccttaagcctggctgggactggctttaatgcggctttggcttttgtatgaccctcgaccttgtaaagttttactctcacgcccatacacaatccatt

SEQ ID NO: 148077 - DNA, 819 bp, Homo Sapiens
ttttagtggtgacctggatttagtgccattctgtatgaaacaaaaccagggggctgtgcttccggctgtttgtgcggttttgtgcttcattcttcatgggcacagatgagcacggtgataacagtgtttacgaagccaggtgccggagacagtgaggatggctgctcctgggaattcatcactcgaagcttcatctgcttcaggtaggtggaggtgaggggcatgttgtaatcaataatcccagagaccagtggagatggaggctcgttttctttgggttccaggccattggagttaaagtgcatcctcttctgacactccgtacagctcatcaggaaccgggtcacggcctctctcgggaggaaggcataggtctctgcgatcgctcggtaggttttcttctgcccagcgtgcttgggggctttgcctggctccgctgagctctccacatgcatcgagtagatgatgtcaaagaaatcttccaccacagcgacccgcttcagagagatgccctctggctccgacaggccatctgcccccgagcccgtcttgaccggcacatacaccacttggcccatcttgggttcccggccgctgcccaggcggaagcccttggagcgcacccagaactggaacttgcctttctcgccggctgcggggccgctgcccgcgccagtcccgccgccgccctgcaggacctcggcgatccgctggtatttgctgcgtgtcaccgtcttggttttggccgagtcgccgtaggtgcgcaagcaccagtcccggaactggcggcccagctccgatcccgggaattccggaccg

SEQ ID NO: 148078 - DNA, 564 bp, Homo Sapiens
agtaggtatttgataaatatttattgaatcaatgtattacattatagaagtgaatgaaagtcagaagggagagcgttctgtgagttgtagtgagctgagaagtttatacagagggtgagtatccttccatctttcctccactttggtgaacatctcatttattactcaaatatcttctgttccatgatggcttcctcaggttaagccaaacatatttgtttcctaacgacttgaaaggcaacctagtagagcagaaagcatactggtttttgcctcagaaaaagtgggtgtaaattccttctgattttaaccacctactagcacaaaactttggaaaagattggagaactttcctgagcttcaattttcttatctgcaaaattgagaataaaacctagcagattgtatcattgtgagccttaaatgagaccagatatatgaactcacctggcacacagtaggagctcaataatattggtccctttctcttccctctgccatgctccacttggacttggtaaacacgtcaacacattttttccccaagagactgcaagtttctat

SEQ ID NO: 148079 - DNA, 425 bp, Homo Sapiens
tttaatttctttttctgaggaacaaaattggccatttaaataaagttcttttctagtgagtaaagaggtttctcagagccagaaatcactgaaaagagagtctgtcgaccctgcccatggaaaagcccagagatttctctaaccacttcttgccaaacttcctagttttgtgattggatgtttcttggtttagccttgtttggtgctgaatacattttgcaattcttttgttctctgccctagagcttccattaccctggacttcaactcattaccaaattaaagaattcttttagaagatttcttttaagagtcaggtcacaacagaaagggcgccctcctgttctcctaaatctcaagggcatctcaggttgtgtctggctctacgttgcaccttccctttgttcccttttaatgcagcagca

SEQ ID NO: 148080 - DNA, 1044 bp, Homo Sapiens
caagtacaaagaaattttgctttatttgtaacggatttacaactttataataactgatatatttattcacgataaaacagaaaatacaactttcggtccacatgttttcaggtcattattaaaacatcccaagaaggcattcgttaagcaaattagctactgaagtctcctgtattatgttaaatgctgggaatatgaattccaattacacaaattccacgccttaatgaaactcaagtttcttaagcacacagaattgatccaaggtttggctgttcccagatttaaagaacatatcccactctagatcaactaaggatagggaaaagtgaccatcacacgtaagcacttacgtagcccagagttaattagttatttttcccttcagaaaagagactactagtagggagtaagaaagaagttgtgttgtgtgtgtaaatgtgttttgagaagggagtgggacagagactagactaaaaggaaaagaaactggaaacccgggtttaagaagaaaactaaatgtagattggcatatgagaatcacatttgttcacgcatcttttacacagcttttctgcacagagctgtaatccttacacaccacttagtaaagggccttacaggccctgtgtttcttggctccaaagaagcttcagtaaccacctattccgcctcttccgcaccgcccagcaaccagttagcgtgcgacaaccccagccccaagtccctcccgcccgcctcataaataaaagcggccccgggacgctggactggcgcggaggagggcaggtcaaccgaggagcagacaccgtgggaaacgctgcagagtacgcgtccgggccaagggaagggtcagcctcagcctccacctcagcttggcccgtacagtgagggctctggtaccaaaaagacaccagagaacccagctccccgaaagcagcgggtactcccgaacggcttcccagcgcttttagtctttccgcacccgcccccacccgaagttaccttcccaagtgacatcgtaaagctctgagaccttcgcca

SEQ ID NO: 148081 - DNA, 401 bp, Homo Sapiens
tttgagaaaataaattccagtttattaaacatctccagttgccaggtacttttcatactttgtctcaatattcacagcaacttaggttttataatcttcattttatggataaaaatgataatgatattgataacaataacaacacactcctctaccagtctttatagagcaagatgtgtatcaggtatcatgccctgtgctttgtacgcataacatctgatctccacaataatctcgggagatgggcatagctattcccatcttaggtgaggatgctgaagctccacagattcactgttcattcatcatctgggatgagccttatatcattccagacacaggagatacctcattgaagaaaattaacatccttgccttgatggtcttgcattctgaaattt

SEQ ID NO: 148082 - DNA, 644 bp, Homo Sapiens
taaaacatacaattcaacaaattttaatatattcatggagttgagcaaccagcactacaatcatttttagaacatttttatcattttgaaaagaactagtcaatttttgaggagttgaaattcttgaaagtacaatctcattgcactttcccctcatcccttggttaccatcagtctacattttgtctctatggatttgcttgttctagactttcatataaattgaatcatataatatgtggtcttttgtgaccagcttccttcacttagcattttttttacactagatgtaatttgatgtacacttagcatgtttttaagattgtagtatgagtacttcattccttttaataacttaataagtcatcatatggctataacacattttgtttatccactcctcagttgatgagcatttgggttgtttctgctttttgactattaacaagtaatgctgccatgaacattaatgtacaggatttttgcacagatatatattttcatttcttttgggcatatatccaggagcggaatagttgtgtctcacatagtaactctatgtttcacattttgcgatactgacagaccattttccacaattggtgcactattttacattcctaccaatgatgtacaacgggtcc

SEQ ID NO: 148083 - DNA, 483 bp, Homo Sapiens
agcctcggcctccacacactcattcctacaccatcagccacgcaacactggaacgaattggtgcagtacctgtcatggtaccagcccagagtcgggccgggtccttggtataggacatgaggaaatgttgtgttcagaaatgaataaatggaatgccctcatacaagggggagggtggggtggggagtgctgggaaagaaacacttccttataattatattagtaaaatgcacaaaggagaaggcagtgctgttacttggccactaagatgtgtaaaatggactgaaatgctccatcatgaagacttgcttccccaccaaagatgtcctgggattctgctggatctcaaagatgtgccaagccaaggaaaaagatacaagagcagaatagtacttaaaatccaaacctgccgcccagatgggcttgttcttcatgcctaacttaataatttttaagagattaaagtgccagatggagtttaaa

SEQ ID NO: 148084 - DNA, 680 bp, Homo Sapiens
tacgtgggaaagattattttcttttgtatttaatacagtgaatgtgtagtcagcattaccattgaactaaacatctgaaatttgatacagtgaaacaaattagtcatctgttaatggttactatccactagatacatctgaggttgtagaatatcaggcttatagacatttgagtacacattgtcagcacagaacataaaagtctcacataaggtataattgaaagttatttcaaacagttatctcatcaataaactttctgtagtaacatcatgttcatggaacattatgtttttagcaacaaacagtgatggtatgcagacagaagcatgtcattttaaacatgatacattaaataaagcatgttgaggtcaaagcctttctgtagaaagggaatttaattgacattcaagcatagtatataaacagatcaaaatagttctattataagaaatagtatttaacaacttatctctgaaataaaaatactttaaaaatcagcttcaatgagattacatttattgttaaagaatcttcctttagagtgaaatatacatttcttttagcttttgtagtagcttttccagtataacccccacttttaccccatgccagtttattattaataaagtagtgcaaagcattgtgtgctgcgatttcaactgagtgtgatgcgctac

SEQ ID NO: 148085 - DNA, 911 bp, Homo Sapiens
aattaaaaaatgaacaattttttaaaaataaaacagcagacactccatacctgtcggttttcctttatactgaatccagtgtgttacatgataagcatgaccaatgcagacagatattacagttccttgcttctctgcaaaaccaccaaccacctttcctaaatttgagtagatgaggcacatgctgtgagggagaagggcctacaaaacatttgaaaagtgtgtttttgtattctggtataaataattctttaatggctctaaatgtctttctgcctttattgtcaagctggcagtagtacctagcacgctgtcttgcataaacttcaaaaaaagtactctgctggtcaatggctgttctttatcctccagccaaatgcctaagggactgtatgaacctattcacatcagtgaacatcaacatacagcttccttaccagacagaatcacactgtgtactctaccaccactccacactatgcccatcaccaaacactacccagaaaagcaacgaggcacacagcactagtaaatgccccatttgtcctgttcctcaacaaaacacaagccagcccacttaataatgtccagaagctgttatatattccaagtaggaacagacatggccagagctgcctaatggctcccagatcccagtttaaagacaaccctaggccttcctatatcacattccaggtgatcccatggctttgggagaataaaaacagctcctctctaccagtacctaggcctggctaccatctcaaattcattatgagctgtgtgatcttaggcaaactgcttagcctctctaatcctggatgtcctcatccgcaaaatggtgccagtaatgtcacccatctatatagctcacagagctacagtaaggataaagcttttggcatccaagt

SEQ ID NO: 148086 - DNA, 544 bp, Homo Sapiens
tttctctttcactttgcttaggtaacatttatttgtcctcacagcctcatggaggggagaccacctgtttcttgctcccagcggttggtcatgtcgacaaggctgttggtcctggtgatggcggtgatgctgcccagagtggtggtcgggtagtgctggaaggatttgaaaacccaaagattatcttcacatgcttgtagaacagatttgaggccagtgtagccagagagaaagaagtggttcccacaaaacaattcagattgtgctccatagccctgaaaagtcttcctcagatttaccctctatcaaaagcagaagctgaatttgaaaatatctgtttcattctttatgtatgtttctgtgctaactatataatttactggaggtgaattattttattttggaacgcattttttctttctttcttgttttgaatgaaacaaaatgtcatttctcaaactgccatgtttttcctttgggatttttagattccacgcttacttgctgtggacactaggggtcagcaaagaatagatgtgttttc

SEQ ID NO: 148087 - DNA, 549 bp, Homo Sapiens
  misc_feature (50)..(62): n is a, c, g, or t
ttaaagattagggagttagggaaagagaggtagtggagagactgtgcttnnnnnnnnnnnnngtcatctaaaaagaatgaaagatatctgtgccactatagcaagaccttttaagtatatactctgaaagtgtggctaatatgatcatgatgctgtaggaaaaaaaggttatatgtccaagtgtatgtacttgtaaatgtgcctaaagaaacctggaaggatacacaggtcttccctggggtacaagacggagaactgggatcatcatcttaactctactcttcctttttactcttctgtcctcttagagactttcgcctgtatacatggattactgttacttagcaggggcgaccggttggccaaagccttggtgtgcccttggcacaattctgccaagacccttaccctctcctctcctcagggctcccttaacccctctccccacatctggaaaaccctggatacattttctgttccatctttagttttctgcctctggatgcgtaaagcttcaacctgctggcttttagagggagaggacttgtt

SEQ ID NO: 148088 - DNA, 510 bp, Homo Sapiens
ttttacacaccctttatatttttattgaggagagaaagctttagcatacagagcagcttcttatcttcacaacacagtaatgcaacaataacacatgtattccaaaagggtttcctcccgagcctctgggagaccttgggctgccttcatacccctgcatgcatcccctccccccacccctctttcaacccaagaaagctcccaaagcccacagttcctcttacagctcttatggctgttacatcacaacaaatattgaagatctgggaaaggaaggaagagggtcaaagggaagcccaagcccctcctgccccagagggtggaaaccagctcactgctcatctgctctatccctggctgtagctctgagggttcagggtgagaagcaccatgggaacaggcaggacctgtgctgaagggtccctggaagtgtgggtttaaggcacccgtccttcacacttctccacagggacatggggcagcagggccagagtgttgaccatcagcaaa

SEQ ID NO: 148089 - DNA, 525 bp, Homo Sapiens
tttgggttaaatggtatgtttattttaaacaaggaatttgccatggacaagatctatctggcttactgtgagttagaagtacgccctgccgtaacactggtatttccacatagtatggaagaggaagagaggaaaacttaattaagtgttgcaaaattgtttgaggacctattttggtccattccttatcaactccatgtgtgatttcaagttatctaaagggcatgtgactttatttctgactaacatcaagttcctctcctcatcataacaaggcgattcaaacctaaactgtgattcttaggagatgcttccaaggggaagctccctcgttggacatccagaagattgcattttctcttcagagtacaattttccatctgtcagagcatgtctgaataaaaatttgaacctactacaaactacattagaataattttcaagtatttttctgtcacaaaaatggtgtgacagaatgtgttgaaaaacacaaagttcacagctgagattaatttagataaccta

SEQ ID NO: 148090 - DNA, 531 bp, Homo Sapiens
ttttcatgttcctccttgccatattcctcctcgtcatcgtcctcgtcatctgacatttttttgacacgccggtacttttgtcctcttttgactttgacaccccaattctcctcaatgaggtcaaaatcatcatcctccaggcggtcatcaaaagaggtgcgttttctcttcttgtggccaacatcatcttctgaatcaccagagtcactgccctcatcctcctccccttcatcttcatcatcatcgtcattgataaagcctttcaagttgccttgctcatcctgatcatctaggttctcctcctcctcctcctcatctcatgtgtgataacttctgtgctgagcctgagcttttcatcagcaagaatccaactatccaaagcttagcaatagtggggagaagcttgaggctggggctcctcaccatcatcctcctcttccacaaatttcttggtgactcggggtaccactcgccttcatcattgtattcttcctctgactcctcagcctcgctttccacaaaatcagacat

SEQ ID NO: 148091 - DNA, 889 bp, Homo Sapiens
  misc_feature (457)..(490): n is a, c, g, or t
tttaacagtgctcaataaacatttattatgcctgggagggatgcattataccttcctgggacagtgtatattacaaatggaggacacagcaagatattaattctttctgatctattgattgccttggaacaacacgggaagaagacattcggaattgcaggattgtgtgtgtttaggcaggaattatccttaaaaaggtcaaataagtaattgggatgtaataggattgtgtgagattacattaaagcctacagttattcagtttattacattttgctataagccactaaaatgtctatctatccaggcaaattgaagctgattcagttatgtttaagaatgctcagaaaattaatattttagtggcctcattactgaagctatggataaaacatgttttctttctcaaggaaagtggtcttgcccaggaaaagatgcatgattgagaaaaacattnnnnnnnnnnnnnnnnnnnnnnnnnnnnnnnnnnctctttcaatttcttaattttccttttcgtcctgttgcttttctccctcctccccattcccagctgtatgtaagatggtatctcattttaatagactgttgttatttaaatagactgttgtagtttctaccgcaagatgcaattgttgagagcgtgatttctaacattttacataaaactgccgtaaaaggtttactggaacttaatatacattgcctatttggttgatgctttcaacactctgtagggctttcacacaggactagcctcagtggaattttatcgattaaattaatctaccaatgggtgattaagaattatctgttttattgcatatttaataggttgggggggcggaattctttctttctacggctaattgccctcagttcaatttta

SEQ ID NO: 148092 - DNA, 457 bp, Homo Sapiens
tttggggaataaatgagaaaaacttatataaagcattcagcacaggccttaaataaatgacaactgttaaggttattaactactgaaagcatgagatctagttttgccccatatcctatactatcttgcaacaaagggatactaaaaataactgggacaccttttggggggtccctagtttagcctaagtaaaaatttccaggaatcttgaggctaactttaaagcatggagtctggacctaacagtggctgcttacagccaggccatggtagaacttgcctttcaattttctttctgcctatgatagcatctacagcaggatattagctcagccctatgataattcgggtgattcagttctagtggatattagttgccagctactaaccctgaaggcaaaagcaaataggctgaaagaaagaacaggctctggtcaggactaattagattgttgct

SEQ ID NO: 148093 - DNA, 913 bp, Homo Sapiens
tggggaggccctgtggacagaaaagttcatcaacaaacacagttcaaattctaccctagattaggaggggacaggaagaagggcaagggacgcagggcccggcctgcgagctccctgttggcctctgctgccaccctgctggctccccgctgcggtgctcaggcaggaagagaggaggctgctgtgtttaggcccaggacgctcttcattccgtttgcacaccacccaccaaccactgcctgccccactccctgtcccccacttcacagagtgcccccagggccagcaggtggtgcgggtgtcttgcccgtgaccttgttggcacagtccagcagggcggtgtgaatgtccttggcacaggaaatctgggctttgatgaccgccaggtactgtgggtaggggaggctgtcaggctgcactgcgtcgggcttggtggctgtgggcaccaacgttggagagtgcttggcactgtcacaactctgtgacaggcactcatgcgccaggcgcaggcacagctccagctggtcacagagtgcatagaactcttccaggcacttgtcaaagcgctgtatgggtccatcactgctcttttgtccattgtcgatgttagtgttctgaatcaagttttgggccgcaaccttcatcaaggtctgtagactctccttcagctgcgggatgagcatcttataacgctgcacaggatcgaagtcctgttgctgttgctgcaggaggccgctctgggcagggcccaccagttgtgctggcggttgcggctgctgctggggacccgggccgccagccgaactaggacccgatacaccagcagctgaggaagccgctgaagcttgctgctgggatgcagccatcttcctcgcgtagaccgccggaagtgcgttacgactgcgtctctccc

SEQ ID NO: 148094 - DNA, 726 bp, Homo Sapiens
tttaacgtaatctgctgctcatagtttattttccaccaaccagtgatcagctgtgagtgatgtggctgtgacctatagctggtgcttggcgattacaaacacccaccagctggtggagcaggcgcctccctgccaggatgatgcttcaggaactttctgggcacaaagtgcttcttggtggacaatttttaaaaacacacagagccacgtgggtcacctattgtcaccaagagaaaaaagaacctcaaaatcagtgacgcgacaggaagaattcggacctgttctttctgaggaagttcttatttttcctgtaactgtatgacggcatcacaccttcctcctgaacgtgggggccatagtcactgactccgccagcctcccaccagtgtgctggtgtaggaggagctgcagacgtcctcaagcagaagtcacttctgcgtcctcagtggtaactcctgtccctgctcaagtcctccgccctcccccgcagctgtcttttcccttcgaaaagcaggatgcttgccgccatggccgagttgaggctgtccacaccaggcacaacggggatcagcagcctcttgccaccagtgctctcggccagctgcagggactccaggctcacgccgtaggtctccccgccaatcaccacagctgccggcgcctctgtccagtccgagtcgtaactctgaacctcaacatgaggcagccaatcttgactggctcccc

SEQ ID NO: 148095 - DNA, 789 bp, Homo Sapiens
tttttttattcattcaacatatgcatatttattaatccccttttgtgtgtgccaggtacagcagggccacgggaatgtataaagcatggcatgtaccatccacccaatgggttgagagagctactgttgttttccaatagtaatacaaagcagcatagggtaagtgtcagaactaatcttttgaacaattaacataatagaagttcaagggaataaagaaaggctaaggaaagcctggaagaggcacttccagttggctttttgaaggacttagaggcagagagggaacaggaaggaacctcaaacagaccgggacgagcagccatatggcggtgaaaatgagcaagacatatttgggcagagtgaagcccagaacggcatgctcctacactcactgtaacacagcagcacccagtgctcctgatttggggatgcaggctgccccacacgtcaatattctctcttcccctagcatcctggtgatacatcctgtccccatcttcctctccctcttcctcctgctccaggcctcgggagacaaaatccacaaagagagacccagtggcccagcagcagccccctgagagcccacaactttttaactcttacgctttaattcttacattcttttaattatattttaagatttaagactataatatcaaccccgattaaagccaactccccgtaggttcctatgaatggcagagttgggaggggcactaaaaaatccccgtgggaactcattcgatttatcttctgtagttgtcatagactcctcttaggttc

SEQ ID NO: 148096 - DNA, 439 bp, Homo Sapiens
ttgtattctaatataactttattaacactgaaatttgattttcgtacaatttttatgtgtcacaaaatactcttcttcttttgatttgctttcaatcatttacaagtgtaatatcaatgattcttagctcctagaccatataaaaacaggcagcaggccagatttgacctgtcttagatggatggatgaatttttgtccggatggaaaaacaaggctaggaatcagagaatttgcctgagcagcatccatataccacattgctctgcctgtggtgaatatggccggagctgatcacacccagttctgcttggactagcacccaaagacactgtgggtacagatagtagtgaggagtaaacaaagcatgtcctttgaactgttaagacagttttggctttggggtcttcatggttaatgtctgtcttctccaaaagcctg

SEQ ID NO: 148097 - DNA, 818 bp, Homo Sapiens
  misc_feature (540)..(540): n is a, c, g, or t
  misc_feature (602)..(602): n is a, c, g, or t
  misc_feature (621)..(622): n is a, c, g, or t
  misc_feature (646)..(646): n is a, c, g, or t
  misc_feature (652)..(652): n is a, c, g, or t
caatttaaattaaacttcctttaatgaaataaaaaacaaatggtgcattgcataatatttgtggtcacagtataaaacaatacaattagttcatataacattggatatggacaaaaatacacaagatcctttctttgtctacggaaaattctgcagatccttatgtgccacacttaaaaagaaagtcagcgttttctcttctagggatctgcacacatatttatcactgagaatttggtcaaacagtggaggagaacttacccaaatcccagttcccttcttcctctgttgtcatcggtgaagctaaaaaaaagttttctgaaagtagcaagttgtgtagtattgcttattattcctgccaaaaaggctcagtctttggctcacagatgtcagtgacaaaatcatggctgcaggcagtctgcaaagcaagaagcaagggccaccggggaaacaaacgaaggtctgggcaggaggggcctcctctaccaagatctcagggagcccctcagatggtgagggtgagggggggaaagaactcanataaaacatttttaaattaaatttagcccagttggtgagtcagagttctactgtcccatganacatctcaacagttgttannaagtcgatttgcattttttttcanagtganacgtgtatgtaaacatcataaagtaaacaatttacaggaatttcgaggcttctatctgaacatagcttaggctctttctggggctatttttatgattaggaaaaaaatcccaaactttttataagtcctttttgtaagaagtgcaatccacctgtgtgagacgcgg

SEQ ID NO: 148098 - DNA, 486 bp, Homo Sapiens
gacctttattggttatcttttaatacatatgcttatatcattctcaattaggcagtaagatttttgagatcagggagcttctcctatctttatctgtaccccaccatacttaacaaaatgctttacccataacaggtacctgatgaactaatttctctttctccagccaggtagtaagttctaagggtagacaacttatttattctttctcagcattttgcactgctgagtaggctggggtcaatagaggataattgtaactttgctttgattttgccaccacatgattctatcatattcatttatgacttggtactttttagctcagaacacacaaccaagttttccataaaaggaagctcactaaaggattgaagacttaacctaggaaaatttcagatttgaacccctccatcagtgttttatgttatacaccaagaatttaaaacaaatcagatttcttaaatgaattcaagctaaatgaat

SEQ ID NO: 148099 - DNA, 697 bp, Homo Sapiens
  misc_feature (65)..(184): n is a, c, g, or t
  misc_feature (198)..(317): n is a, c, g, or t
acatgtgggtgaggatattaaggggcaaaagaagaactactatagggctgggcatggtggctcannnnnnnnnnnnnnnnnnnnnnnnnnnnnnnnnnnnnnnnnnnnnnnnnnnnnnnnnnnnnnnnnnnnnnnnnnnnnnnnnnnnnnnnnnnnnnnnnnnnnnnnnnnnnnnnnnnnnnnnctgtggtggtgggnnnnnnnnnnnnnnnnnnnnnnnnnnnnnnnnnnnnnnnnnnnnnnnnnnnnnnnnnnnnnnnnnnnnnnnnnnnnnnnnnnnnnnnnnnnnnnnnnnnnnnnnnnnnnnnnnnnnnnnntccatttcaaaaaaaagaactacaagttctgattccggactcccagatgtgagttttaatctcctctccactgattgatcctgactaatcactagccccctgtgcccaatttcaacagtatgctggagtcaaatctgaaccccaaactatgccctcttaaggggggtccctctgggatgccaacatgcattcacttcttcacctggctaggcattccatgagtattcacattgtagtcactcccctagggctatgccaggagttagtactttcctaccacttggtgatcttgagtgagttttggatgtcctcaatgggtcctgagatgagtcagaggagagctagagttgggaactgatcaccagtggcccccccagtcc

SEQ ID NO: 148100 - DNA, 490 bp, Homo Sapiens
tgctttcaatacatgtttattgcaaaaccacaagcacagtaaccataatgtcaacataaccgtatttcctaacggaacaggagatcgccatgcctaagtgcgtgcgttttccaaagaaatggcggcttatttggaagctcacacgctgcaagtgatgacgagaagccctgttgtgaactaggagttctaaaccattaaacatttaattaccactttggcaaagcaatgcacattaccatttctacaatggaacagcacagagattttaaatgcatctttattttttagaatcttcagtattcacaatgtgtaaaatgaagcagcattttaagtaaagctctatgccaaaacagtttcttaaaaagtctggattaaaaagaaggaaaaccacacatgaataatatttatcagtgctcacagttgacactaactatagtcccctaaaagaataaaaatactcaagacttcaacatttccttacaaaagtata

SEQ ID NO: 148101 - DNA, 423 bp, Homo Sapiens
tttttttccagaagcctgaaaatatgcttttatgatgttgggagtctcaaacgtaaaaacggactcctaaccctctggatgtttcggctgaactctcaactgtccaccagctccccctacacgtggctccttagaaagcgtggaaaagggaaaaatgaaaagagaaactgccaggacttaagatgtctgcttaaagactccctcgaactgcagtgaagggtcctacccgcttccaaaatgtccacccgcattcctgacgtcactggatcggctccatcaagccagaaaacgagagtgcgctccaatcagggctcagtccccgcccttgccttgcgtcacttccggtggtgcagcagccattttgtcagtcgccagcggatcccgcgcgctggagaagtgagttccccctggttaccaactcgc

SEQ ID NO: 148102 - DNA, 1103 bp, Homo Sapiens
atggcttaattaacatctttcaattttttttgtttgtttaagtggaaatccataggtaactttttactattagtaagattgaagactggagggcttgagttgaaatacttccttagtagtaaattgacttggaaatatgaattaagagatgaaaaggaattgcattagcaatgcgaatagaaaattaatttaattggaatgattctattgtggattttatagtgatattgattccattcattatgagtttatcttttccacataataatttcagttcctgattaatgagagttaaataagacctgtaactgtactgttttattagatttctaggtgtttagtatatcttaagtctgagtattagtgtataccaaaaccctactaacatgaataggaatcagaaatatagttagatcttttttgtgtagttgccgttgtactccagttagttccttttataaacataatgcaggatctttcaattcttgtgtattaaagttaaaaacaaaaagaattgagagtatcacatttaacttgttggaaagaaatggtggatttcaaaaactggtactccaaaactcttttggattatagcgcgaatttgtatagttaaatttctgaaagatctctttagtaaattgaatctgtaaggtctctgtttagaagatctctttttctgaaagcctctttgcctttcattataaaagagcctggtactgctttctgttttaaaaatccagctggaaaattacagagcacaaacatttgcccatcggttcttcatttggagaaaacagaaatatgtcttcaaaatggaggctgacatttaagtatttattcctatcagcgggagctgtagtttgtattttttgcattttacttctgtaaccacatataatatatcttggcttctgcgtggtgtaactgtaaaacaccatctttattttatgtcattttgtgattgttgttcaaatcctccaatgatctgtttctgagcccctcagaatctctaaaaaaatcaaggtatccttccttttctttttggctctattaaattgaaacataaatggttgattctaataataaaaattggctcatataat

SEQ ID NO: 148103 - DNA, 491 bp, Homo Sapiens
caggggatgtttaataaggaggttagcactgagcttggggacgtgctgtcacaccagcaggacgctgcaggaaggagcaggctacttcctttcttgacgtgcaaataactcgtataggctaatcaacaggcttataagttaaaagggctaccgctcggccccttggggattccatcccctcctctgtaacttggagatgtttgtttctgctgcagactcagagggttgcgatgaagagtggtgggactgagttgagaagcttatcccttcgctgggtgggaggtttctaattgccccgttctttgggggatccttaagtccagcttccaggtgggggcagcgataggaccaagttctcctagtagtctctgggaagccacttgagggaagctgccggtcatcccatgcacccattggtcttctccagcaggccctgtaggtcgtccatgttccatgccttctgggttcttgggggagaaggaagctgttga

SEQ ID NO: 148104 - DNA, 441 bp, Homo Sapiens
caccagcttcgaactgtgttagggtagtggctggtttgccagaggatgttttcctcagtgtctgttcgaccttcagcttttttggtcttccttttacgctgcatctgagctggtctgcctccacgttcttgcgccttacaccgatctccagtgtcaccttggtttaaggctcttatctcataggagcaaagaagggaagaaggactcagacagggcttcgtgtctttccaaaaggatctactgtccctctcctccagggggaacagtaagggacactttctcagtacccacacccttgcctcaatcttttttgtaagcatccaatgaaatctgtggagaagagcctgtgagtggatacaaactccccctgtgtctgcagccccccaggcgatctctgttttcttgctggtccacactaagttcattaaattttaactgaaa

SEQ ID NO: 148105 - DNA, 348 bp, Homo Sapiens
tttttaaaaaagattaggcttaggtttgttcatatccagtctctggcatctctttgtaagcagggagttgtttcattcactgctctgatgcttcctggcaaacagtaggccatatatgtatatgaatgtgaatgaattaatgccttcaacaaatatttctgacagtgatttcatgactgcttttattagttattttggcaatcacttataactgctaacgtctgcttgccgatcagcccttagcttaaatgtcacttccttcaggacgccttcctgatcccctccactaggttaggtgctcctgatctctgctccctttcatacaactcttatgactgatcctcgtgc

SEQ ID NO: 148106 - DNA, 586 bp, Homo Sapiens
actttatgttctgctggcctggcattcttagttcaggaggaaggaatgctgccaccaggagatgcaccaatgatccataaaactggaagtaaagattgccacctggacagtttgggctcctcctacatttaagtcaacaggctagaaaggggagttacagtgttagttgggatgactgacccagactatcaagatgaaatcagtctactactccacagcagaggtaaggaagagtatgcatggtatacatgatattcattagggtgtctcttagtattaccatgccctgtgattaaggtcaatggtaagctacaacagcccaatccaggtatgactccatatggctcagacttttcaggaatgaaggtttgggtcactcctccaggtgaatatccatggcctgctgaggtgcttgttgaaggcaaagggaatacagaatgggtagtagaagaaggtggtcatcaataccagctacgaccacgtgaaccagctgcagaaatgaggactgtaactgtcatgactatttccttcttcttttgttataaaacatgtttgcacatgtaaacacttccactgatcttatcaa

SEQ ID NO: 148107 - DNA, 670 bp, Homo Sapiens
atgatgcggtcaaagagctctccaccagtggccagctccatcaccatgtacacccgctcctgtgtctcgaacacctccaccagctggatgatgttggcatgacgcacccgacgcagcacacgcagctccgactcacacacctcccgcccctcccggtacttggtctcaatcatcttgatggcatacggctgccgggttgcccggtgctctacacgtaccactcggctgaagctgcctcggccaattagggccttgatgtcatacttagctgtaacacgtgggtcaaacttggccctgtacttagctaccctggccctgcgtggtggttctgagggaggctccgtgtggccagcagtcgggggaccggggcaggggtgtgcatactgacttgctgctgggaacccggctttgacagggccaacactgtccacctctgtgatgaagtgcttgtacacgtcactcttagtgccactgaagggctccaccttcttgaccagatccagctggacatccttgggtggctcgggaaggaccttgcttgtcccacagcccatcacggacacgagggcatcctctccagcgaggctggcaggacctgctctgaaggcagtgccccgtctacacctcgcgcgggcggcgggctcttcggcgtctcggcggctctgccggc

SEQ ID NO: 148108 - DNA, 625 bp, Homo Sapiens
gcggccgcatcgcgtctgtgggtggtgcagggggtcagggaacagcggtcagttcctcctccgctgctggagggcggccctggctgatggggaagatctggagattggaggccccactaggaaagacggggccccgcggccaaggagctgctggagccatgccccgcagatgctggggattctcagaacgtgccttggctgggggaggacggaggaaagggtgcagccccctcaggccctgtcagaagcgcccctgcctcccttagccccaaacccagtcctttgtggagaggtgcagtggccagatcagtgaccaggacaaaggtcctcaaagacggcagagtccacggtggtgcctgagagcagaggaccagccccagcctgagtggccaggccggggtctgaggtcagcccggctctctgagctgcagctaggagatgggagaccacaggggcaggccctggggttctggaggcgctgcctgccctgggtccccaggagagtgtggggtggggttctccagagggggactcctggacctgtgacaccaagccccacatagccctctgagtgaccctgctgtggcgaggctcataaatgtctgcgctgggttaaagctatcag

SEQ ID NO: 148109 - DNA, 579 bp, Homo Sapiens
ttttgaggttcagtggccatgcatgagttaaagatagtagaggccagtttactggatgaaatgttatattatggagtggtcatttgaaggatggacttgcaatggtccaggggaggagcatctgcttagcaggacacctccatggtctggtgtctgtccaggacatcaggggactcacaggattcttgagttccatctgactgattgctggtgacagaccggctgaagggactttctccagagccgaggctactcgaggttgagtgggttcgtgatcgggcgagccgagtcatgctggcagatggtatgtagcccattccctgcaaaaagtacttgaaggcctcggtgagcttcccaggctgaactacctggggcagtcccccacagtccgccatctttagcaaagttgtatttatagggttcaggcgggaattgcattcgaccacagcctcaactgcaggcgaattgtcccctaccaccagtaaagtagaacactttaatgtttttgatttgtatcatttgcaccagtatggtctttcgatctccagttctctctcctgcagggatcctgctagagtc

SEQ ID NO: 148110 - DNA, 677 bp, Homo Sapiens
ttttttcttttggaacacaaggtttagtccatcactcactcacttttccacttttgataagatgtaaatattgagaactatttctcttctccagtagaagaagagcaacaggccatgtgtgatggtaaatggcagctgacacttgcgacagtatcaagaaggcactaaggaatggtgagaaggatgacttgccctttctaaagtggcatctcagcttgagtctgcagaatgccttgcaaatccagctcagtactgctagataatccatattgacaagagaagctaaagattcagattttctatgtgaagtttcctggttttaaaatgttagcaacaaattccaaatttttacagaacactgtacaggccagaaagaacaatctgtgtgctaccagtttacaattagctatgcttcttcctcctcagacctggcatgccctttccacccccttgcctttgctcttagtaccccgtgtacactccaacctcttccacctacaaatttctaaatgcacagttcaaatgttagttcttcagattcctgtctctgtaataacacttgcccctttgtataacagttctcatgtatatcttcctattagaccatgagctcctgtggtagaaattgtgtattcattactgtatccctagtgcccagtaaaggatcacagtagaaa

SEQ ID NO: 148111 - DNA, 455 bp, Homo Sapiens
tgtctggggtttgtgcccgctttcctgtttctaatgttccctgaacctacctctacagtagcaaccatattccattatacagtatttacttattgacccatccctcttccctgccagaccttgaactccctgagggcaaaaaccttcccattctcaatctctgccacctaacatggcgtggcagtttacgaacgaacaaatgcttaaatattaacttattgatcattgaatgaatgaatgaatatctaaatcctgttgtctatttttaaacacagggacaattctcatatagtctaacatctgtatgataaaaagtataaagatggcattaagaaaaacagaaagaatatgtaccagaaaggcttaataatggttattacatttcttaaaatatattttctatgttataaatgtactcattttataataaaaacctcaatataagataaatagta

SEQ ID NO: 148112 - DNA, 574 bp, Homo Sapiens
tttctatataacaaaaagtatttaatattttaattttcaaaaatgtctctgtaaataagatacatcttacacagactgtatgtcttacagaatagcaattatattcaatatgtttatttctttgtgttacaatttccttgtttgccttatagagatgattcaggaccctaccaaatccactaggctgttgcaaatatcaagatcatctatgcaatagtcatttgagaaaaataaagcattatgcaaaatattgctatgctgataccaactatatgagcaactagggattaagccagatccccgtggggaacagaatattcaacttcctccttgcagtgaggtgataaaacctgtatggaccagctaggtaaccctagggggaaagaaattgtttaaagagacctttctaaggctggtaggaagttgaattttcttaccaatagaagcagctgaactatttgttttttacacattaaatttgaagttggtctctgatttccacccattgcccaagagtttaagaaagagagatgaccacagctactgatgattaacagatcaaatgtttttgtct

SEQ ID NO: 148113 - DNA, 496 bp, Homo Sapiens
tttcaattttggttaaatttttattaaaataagcgttaaaaataattttttgagtgtgtttgaagagggcttttattgttgtactcaagagtgttatttctggagacaaagttgcctgtgctttaatacacggattctggggagaatccgagccataagccataaaattttatattaataaattccatacaaagcagaaagtatacatttgctttcagcatattcaaggtgtttagttttccattaatcacctaaaaacttattttgttccaataattgtgttttcttctgaaaatatgtacaaatgcatatttaccaaacactcacttcataattttcttacacctaaggtttatcttcagaggaatatgtgtatatttcactctatgaaaattaaaagtctttacgtttgcaggcagagtgaccacatgttcaaagaaactatataacaaatatttattaataatttttcaggactcagaaacgtaattttttt

SEQ ID NO: 148114 - DNA, 326 bp, Homo Sapiens
ccgttgaacctcgagatttttattgaccttcacttcagagaggctcctggccatagaggaggttaccggagccctggaactagtgctaaacgggcttgcggaggcacagcttgataggggaggtaagctggggttcagtgagtcaccttctttcttcttcacctggcttccatctgcaggagccgcgatgttcccccttcgggccctgtggttggtctgggcgcttctaggagtggccggatcatgcccggagccgtgcgcctgcgtggacaagtacgctcaccagttcgcggactgcgcttacaaagagttgcgtgaggtgccgg

SEQ ID NO: 148115 - DNA, 437 bp, Homo Sapiens
cagaaggtctgggtttgcagatgggtgccctgaatggaactactttaactaatccatagggacttctggtatgctttcctctctttttaaaggaacttcgtgacactaaacattagcccaaaggacttcttagccttcaattgggagatacctttggtctgctcctgcaccaaagccatatgggtggaagtcagttggcctccctggttctgcagagggccagaagaatgagagagaggaagactgctggcagggaaatcgaggaggcgagactagaactgcaccagcttccctgatgtctgcagccatggctttgcagcgcagacagagcttctctgggatgctgggattcttgcctgtatgaatgcatcaagtattcatttattgcccgaataggcattgcattaagtcctctgtaaggtgtcaggcaagccaaa

SEQ ID NO: 148116 - DNA, 552 bp, Homo Sapiens
  misc_feature (113)..(113): n is a, c, g, or t
tctccctcctctctgtgatctcccaggcaaggttctccagctcatcaattctgtgcgagcccggtcatctccagactccaggtgtgtgtggctggaccgggcgtagaggcctnttcatcgtccgtcccgttgacactggaagcttggaatgattacttgaggtctcgattttctcctgcgtcttgtctttggctatcttggcagcttctttcacctcctggaatttctctgcaaactttgtcagctgctgctcagaggaaaaccccaaaccaaacactgtgttggctctgctgtcggcccactgcccaaacttctgtgacgttttggtgaaggtcatattcggtgtgattgtgctgtttatgatcaccttggctccgtccacactgatgatccgatagctgttccttgtgacatcatagaagtaggaaacggtgaccgcctgcttgctcgcaggcatccagttcttcttggtgttggggtcaatctggaagacccgcgctcggggggtgaagatgggctgttctcccattctgacgctgctccagcggccgc

SEQ ID NO: 148117 - DNA, 596 bp, Homo Sapiens
  misc_feature (16)..(16): n is a, c, g, or t
  misc_feature (144)..(144): n is a, c, g, or t
  misc_feature (190)..(190): n is a, c, g, or t
ccacagattccagctnagtaagtatgtatgcagaaatagatgtacacagatactaattttttttcaaaagaagccccgaaattcagtatttttaggtgaaaactcaatttttaatgttggagttgggtaaatctggatttgagnctgtctctgccacttactagctgtagaattgtctaagataattgtntgagaaaacctgagtgagttttcgcatccataatgtggggacgatggaatctattcttacaactttagaaggtagatttaataatacatcatgaattcgtacaatgtgtaatgtttattaaatgttgactgtgattagtggttgtccagctttaaaggtgtgggagcgggattgattacaagggaacatcagagagcttttttgggttatggaaatgttttgtgtcttgattgtagtgttggttgcttgactggacatatttgttcgcacttatcaaacccttgaagttgatggattttttgcatataagttatacctcaacaaagctgattttataaagataactgcctttcccttttctgtgtactccagttacatcaactgttaataaaatagagttgatacc

SEQ ID NO: 148118 - DNA, 360 bp, Homo Sapiens
agggctggagccgggtcctcagctgtctgctcagcagccctggacccgcgtgcgttacgtcaggcccagatgcagggcggcttttccaaggcctcctgatgggggcctccgaaagggctggagtcagccttggggagctgcctagcagcctctcctcgggcaggaggggaggtggcttcctccaaaggacacccgatggcaggtgcctagggggtgtggggttccgttctcccttcccctcccactgaagtttgtgcttaaaaaacaataaatttgacttggcaccactgggggttggtgggagaggccgtgtgacctggctctctgtcccagtgccaccaggtcatccacatgcgcaaa

SEQ ID NO: 148119 - DNA, 328 bp, Homo Sapiens
taccatgtctaaaaactacaatcaaaaaaagccttttttttaaaagttactttggttttaaggaataagaagccttgaaacactcagccctggactgaatcctccaggcaccagagctgtgctggtctggacccttccaccccacttgaaacctgttggccctgttgcaaccctctcttgctttccctgagaaccctaaggtgaccccaggggctgctgatggagacagtcacctccttgccctgctccctgcagcctctcactttggctgctttgctatcataaggaaggaaacataaaagctactttttagcattacaaagttaaa

SEQ ID NO: 148120 - DNA, 504 bp, Homo Sapiens
taaaagtcctaatttttaatacatagcaactgaggaaatgggaaagaaaacacatatcccaggatagagcacaaatgcaatgtgaactgaaggagttttgtagagggaagatcgagaaggtgctagctaaggcaggagaatggagaatatggagggcattagtgcagagacacaaaagaataaaatgtgaatggagctgaattgaaataacactgaggatatttcataaatgaatcctggtctgtttcttcacttaatccctccaggacattcttccatctcttttccatgtgtttgatttcagggtaaagatcaaattattaggaaccttctgaatgaaaagccacctaggggttagcatattgaagggaatattctttatctacgtcagcaacaatggaggaaacatttttccttctatctgtgttgacactagaacaacataaggctgagtaacctttgcttagtctttgtcaactatgtaaccgctctgtccaatgtttt

SEQ ID NO: 148121 - DNA, 870 bp, Homo Sapiens
  misc_feature (481)..(481): n is a, c, g, or t
  misc_feature (503)..(503): n is a, c, g, or t
  misc_feature (560)..(560): n is a, c, g, or t
  misc_feature (586)..(587): n is a, c, g, or t
  misc_feature (608)..(608): n is a, c, g, or t
  misc_feature (697)..(697): n is a, c, g, or t
  misc_feature (699)..(699): n is a, c, g, or t
  misc_feature (704)..(704): n is a, c, g, or t
  misc_feature (727)..(727): n is a, c, g, or t
  misc_feature (730)..(731): n is a, c, g, or t
  misc_feature (761)..(761): n is a, c, g, or t
  misc_feature (766)..(766): n is a, c, g, or t
  misc_feature (811)..(811): n is a, c, g, or t
ttttttaatttttgctttatttgaatataattttctcatcaattttgcttgcataaatacagtttgttgcttgttctggtttagtctaatagtaagttggagaagtcctggagaatgggcatcctggtggggtggcagaatggggttctcgcttcagcagatgcagccccccaaacacagcactccatggatgaggactcaaaagatgaatgtcattttctgcccctgtgtctcagagatgccctgaggctgtctgacaaggtgagctgttccacacaaaaaacaaagaattaatcacaccttagtccagcctgagttggggccagtctattgcctgggtcctgagatgtgctgcctcaaatgtcttcactggacgtggtcatgcctgagaccagaatggaatagaacaatccatttgaatacagcgatggatggtcagagatgtccacacacatctctgctcaccctcaccttcctgcanactccattcatttatttatggngaaatttgatgtttccctcaaatgtcctttccctctcagagaataattttgtttccncgtcatcagatagcactgagaaaggnngcagagttgggcctctctggngctgttcctgcagtactcctgggaacctttaagcctcggtcttgggtttcttcactggattgacaaattccttgacttttctctccaangncttgnttctcttctcaaaatcttccggnagnngttcatgttgccgaagctgatttctaaggntgcanacttctctctttccttctcagttctcaatgagcctcacactttanccaaccgcaaaattctctcccaggggttttaacggtccccacaatttgtttcgtgttcc

SEQ ID NO: 148122 - DNA, 541 bp, Homo Sapiens
ttttttgtcgttcagctgagctttatcaccagtttcctgttgctccatagcagcttcactggcgatggggcagggcctggcggaacttggggcacagatgagggaggcagttcccagacacccaggggatcaactggagcccagacgtggaccccgggagtgaccaccccagaccagcctcccagcgtaccaggctctctgagacaagaagctgtgttcccaagtcactgggccaccccacccagagcaccctgagttatacagactcggcagccagcctcggcctcgcctctatttctggttctgtgggctcgccccgggcgctgagcacctccagggcctccaggttgccgggttcctctgcaacaacaggcaggggctcagagtccccttcagcctcagcgtcctcagtgtcactggctccgccctcagtgccttggcctgacggggcagctttagcacaacgcaggcagcagttggtggcgacagccatgaagaccccagccagggcccccttagagccggccaggtagaagatgat

SEQ ID NO: 148123 - DNA, 442 bp, Homo Sapiens
tttgacattttaaaactacttttattttgagtaagttttttggctccttgtcttttgaaagccttggttttgttctcggtgcctgctgctttatttcttcagacctggccaaaggaaattcccctgcgccacaaggtatctgcaaaatctgctgtcttacgtgcttgcaaagggcagagggagatccacggcccacttgccatgtggcctcacatcgagggacgccgtgtgatatggcttggagacatgcacttgacggcagtgacaacagctctcagccatgtctggcagccacttactttccccaagcacatcatatcatcacctgggaacagcagctcgcctccttgggaacacaggtttgaggtctcatggcttcccagggataggggaaaaatgcagcagaaggatttggggccaaaacccatttcttctccccaga

SEQ ID NO: 148124 - DNA, 415 bp, Homo Sapiens
tttttttatggtataaaatgtgtttttatttcaaatatgagttgtgttaataaaaacaaacaaatgcagcaaaatactgtggttctttgccaagacagtcacttttctttcctaatacattttgatgaatcaggaaagacctcagagacgagagacactttctttgtacatgtcccacaagcacagttccaggattttggcactaagtaaacaaataaaaatatgcaacagacataagagataatagtaatgtgtattgagaaatataattttatatagttgttcctttttcccaagattctttattaatatcaccaatagttattattagaaaacactttcagagttagaaagttgccagaaacatttctaattgactactgttataattaatattttgaaatgctgagacatt

SEQ ID NO: 148125 - DNA, 542 bp, Homo Sapiens
  misc_feature (193)..(205): n is a, c, g, or t
  misc_feature (211)..(224): n is a, c, g, or t
  misc_feature (431)..(472): n is a, c, g, or t
gtaaagaaaaataaggttgtgttttctgtttgaaacaaaacataaaaccccctcccgctgggcctgttccctggctctgggggatgctgggaccgcaggtctgggcaggagaggccaggctgcccggctgagaggagggagcgccctcagagccagagatggagtgcatttgggaatggagtttgattaagcnnnnnnnnnnnnncctcgnnnnnnnnnnnnnngcctgctatacagaaatggggaccaagaggcgctgcctcgagttggaaccatgctggcaagctggactcaaaagtcctgatgctgtcctggggcccccattccccacgtttcaggggtaggcagggcaggaggcggcatccacagctctcaggacaggagtcaggggagaggagggtgacgtcagagcaagctccttccccacattnnnnnnnnnnnnnnnnnnnnnnnnnnnnnnnnnnnnnnnnnngaatcctccatggcagggagagttgggggcatcctgcttactagcaaaatgcctgacctggcaaaatgtg

SEQ ID NO: 148126 - DNA, 181 bp, Homo Sapiens
tttcttccaggaaaggtccgatgggccttaaagtgatttatttaagtacagtagacatcacaatttacagggcattcaggctgataaaaaggaatctgaccaagggtctcccaaatcacatttttacagtactttaatacagaaacaaatttactttattttttcttcagacagagtctcg

SEQ ID NO: 148127 - DNA, 684 bp, Homo Sapiens
ttttccaagaaagatgtgtattctccctaacaacaacaaaagagacctaaatgggctgctccctgaagagagccctcagctcttttaccgtgatgcacactcggggctgggtgtaggctgtgtgatcaaatgtatgaaggaagaaggaacggagagaacgtgggcaatcaaggcctggcactgccctacaggaggcttacaggtcacactcccagaactgtctctatccccatgcctctcctagtaagattcattacctatggtttcaaagaaagtgcagtttctagggagtgaaggaacacgtgaaatacagaaaataaagacagaaaaacacacaaattattaaataaaatttaaacaatagagggaaaaaaagtgtagtttgttctgcaagccacagcccaaagaagtctatttcctcccacaggatggctagagtttaggagccacgttctcctctatagctcaccagaggatgcagcctgaagagctcagggtttgaaggttgggccttgggcgggagtcagctactatttctagctgttctagaaagacctagaaacttcctgtgtgaaaacaggattaggaagctctgggggtgaaaatgccatgcacggagctggcccatgccaagtcccttctaactattttaaattacatctttggccaggcacggtggttcat

SEQ ID NO: 148128 - DNA, 750 bp, Homo Sapiens
ttttattgcttagcataatttattgtttaattacttgtacaaataagatctatatcacacaaccataagtgaattcagtttcaggtcaggaatataagaaacatgagccataaaagttaattctcctaccagtaatatttagcctctttttcatcatcaaatccttgaataatgttctctacaggagatccatgaagtgggaaggtggcatcaatggatattaagagagtagttatttgagggtgttgtaatcaggattccaggtaactttaataaaacagtcgaaggttcagaaacacagaaaataaggttctctcaaggacagatgcaaagtgatgcttgcaaacatttagactacaagcctcacagaagggaagaatcaaaggacgttgtgcaatgtgagtctaggatgaacagataccatagagtgacacatgtacaagctggcatacccattgggatgggaggactctgggctttcagagcttcttcaaatggtctttgtatggcagactataagtaactcaacaaaattctgtcttctcctccacatgggtgctgtatttcacaaccttccctacaattagttaagtgtggccatacaactgatcatgaccagtggaactgagatgggagaattgccttggccccttcatgggactcctcacaaagggggtggctcatttactcagccaccatgcactcaaaccccttacaggaaggagagaatgcaggtgagctggggtgagc

SEQ ID NO: 148129 - DNA, 575 bp, Homo Sapiens
  misc_feature (484)..(534): n is a, c, g, or t
caaaaagaaagccaacagcatctttattcgtgatcgccaatagccagacacagttccaagtgtccatgaatacatcagataaacacaccggtgtgtttacactggactgcttggcaatcaaaagaacaaactcctgagacatgaaacaacacagaagaatctccagaaacatgacgctaagggaaagacgccttacacaaggacatgtacccaatgatccattagtatgaactcttagaacaggcggaagcatagtggagaaatcagcacaggtggcatggtagcagtggacatagaatggaaaggggcataagagaattttctggggtgagggacgtgttctatttgtcttgatggcatcttcggttacactactgtatttgttaaaactcagcaaaaggaggctgggcatggtggctcacgcctgtaatcccagtcctttcaggagggtgaggcaggaggatcgcttgaggccaagaatttnnnnnnnnnnnnnnnnnnnnnnnnnnnnnnnnnnnnnnnnnnnnnnnnnnncaaaatcattccgaccttgccagatgtttgacgttaatcat

SEQ ID NO: 148130 - DNA, 323 bp, Homo Sapiens
tttaaaacagtaagacagggtttatttcggggttattgtaatgggtgccaacacaatcacaataggggagctttgtcaagctcaactctgaatacagtaaagacacctggggacttacagccaatgagaaggatgaacggttattggatggaaaataaataactcagagaagatctcaagggtagggggattcttgctaaactgacctgacagcattgttgctgaagacaggccagggtgatcagatatcaaggatgggtgatgaggactttttgatcagactgagatatcaggggacctagttgaaataaagcaaggaccta

SEQ ID NO: 148131 - DNA, 486 bp, Homo Sapiens
aaagaattgaaaagatgtttcacaaaagaagaagtctaaatagtcagttggcacctgaaaatgtgcccattatgcctcatcagaaaatcaaattaaaatcacaatgaaacaccactatataccaccctagaatagctcaaattaaatagactgataacactaagtcttgatgaacatgtagaggaattggaactctttcattcattgctagcaggaatgaaatatggaataaccactttggaaaacaggcagttatttttaaaagttaaatatatacttaccctatgatctcttctaccctatcatctaaggtatttgctcaagaaaaatgaaaatatgcatccacacaaagacttacaaaacaatattcaaagctgctttttaaaatgttcatatttataataatatccccaacctggaaacaacccaaatgttcatcaacagaataatgatatattcatagaatggaacactactcagcagttt

SEQ ID NO: 148132 - DNA, 565 bp, Homo Sapiens
  misc_feature (35)..(35): n is a, c, g, or t
agtggagaaatgctgaaggctggtatgaatataanagtgattaaaaggaaatagattatgcagaagtagaaaaattcattggattcatcattgtaattggtgtttataaatctaaaattgaaaatgttttgcagtcatggaccaaagaagataactgttctcttttcaacacaattgggagccatcagtggttttagaagtgttgcaatttgacagaacaaatgcaagaaagaagaactagattaataagctagcgcctgttagaaatattttttgaaatctgaaatcaatatttataagataaatatgttccaagttcaccaaaagcagtagatgagcagttagttgcatccaaaagatgttacccatttcaggtatagatgccttcaagtccaggaatagttttgggttatcattaaaatgaaaatttagagtgaagtttttttacaatttaattattcctctgcaaagttttgctaagatgacttaaatataaaagattgaaaagattcgttgtatctagattgtaagtgataatgcctgtttttccttaatggaagcatta

SEQ ID NO: 148133 - DNA, 564 bp, Homo Sapiens
ttttaaatcagctttaattattttttaatgacgagaagttgatagcttataaattccatttatctctttaaaatgctcattcatattgttttaaaggaagcaaagggtataactgccgcatagcttaagaaaaactttacagaatgcttatgggaaaacaccagattatttaggccttttaatgtgcttaggcattcagttattacagggagaatgagggtttcttccttaattatagagtttaattctgaggtatatttgccatgagtttgaaaagaaccatgcttcaatagcacgcagaattcagattcacaaagttttcctctcgtatctcttcaagtgttttacactgtgcttcagagtttgcatgctttcttgcctaaaagcaaaagaaaacatttatgtagagaaagtacagtctctagacattgccaaaagattgtctattgaagatagtatcgcattcccactgtaagcacatcttcatgtttgaacaccaacacaatctttccttcttcctcaaaatagaaatacactgtgaccgaatatttattcagcatctaa

SEQ ID NO: 148134 - DNA, 568 bp, Homo Sapiens
aatctcgtgcttttcacatgtattcttatttttctcaatatacggtagggcacatggtaatcacatttattcacacgtggattttaaatttttattgagcacttactcttgtgccagacactgtaacagaagctaggaatacaacaatgaataaagcaagcaaggttcttgccttcttagagtatacattctagtgagaaagataacaaacaagaacacaactatttataattatcactcttgaatttggaaaattgggaaaataaaaactactgatataaacaaagtccacaggggaaaacaactttgtggaaacaattcaattcaggcaagtgttttacatggaatttgggagaaagggacaatactacaaacatatatttaagttgattgcatagagattatagctgaaggtttaggaggactaaagatagactgtaatgaaaggcagagcagaagcttcttgaatggccatcctgtgtggaagccctcagagatacaaatagcccattatcacaaaggagcacctattttatgttatcttggttccatcctctggccttgatgg

SEQ ID NO: 148135 - DNA, 518 bp, Homo Sapiens
gccgacggcttccactgccactgcccccagggcttctccgggcctctctgtgaggtggatgtcgacctttgtgagccaagcccctgccggaacggcgctcgctgctataacctggagggtgactattactgcgcctgccctgatgactttggtggcaagaactgctccgtgccccgcgagccgtgccctggcggggcctgccatagtgatcgatggctgcgggtcagacgcgggggcttgggatgcctggcacagcagcctccggcgtgtgtggcccccatggacgctgcgtcagccagccagggggcaacttttcctgcatctgtgacagtggctttactggcacctactgccatgagaacattgacgactgcctgggccagccctgccgcaatgggggcacatgcatcgatgaggtggacgccttccgctgcttctgccccagcggctgggagggcgagctctgcgacaccaatcccaacgactgccttcccgatccctgccacagccgcggccgc

SEQ ID NO: 148136 - DNA, 854 bp, Homo Sapiens
  misc_feature (606)..(606): n is a, c, g, or t
tttgaaaagacatacttttaatgtgtgtgtttcagggttgctatagaacttaatattattttccttatttagtcctcaaatcatggtgcaaggtaggagttatctacatcttaaagaaagaaaactaaagtgagaactcatctaagacttcaacctaggtcagtgtgactccaaagcccatgctctttctgctacacgacaatgttttcgcaaaagcacttgcacgtcagcataagtgaattatgtccctgtgataccagttttgctgagaccagattgcaactctcagcaattgtacctgccatctgcttcctgtgcccagccttgaatctaaatacttgtgaagtgagttggagggagatccacaacattctcttcataggctaactgagatattatacctcagaatgttgaattctcagcacgttctacgattattcttgagatctcttcaggcagcctagtcttcttctcttctgagttcatttcctgatatttccagaagttcttactccaagccaaccttgtcttgccaaacagcttgcacaaaccctcaagtctcttttataattcagtgcaagaacagcttggccacgatactctgtntgtggtctgggtcattaacatgtactgcaaagagcccaggtataatcagatgctccaggtggagtaaagtcatcttcatatagtcattacccagatgttatgtgagttgcttgtatgccatgggcagctcactgtcctctatcttggcttgctcctttttcctgacttatcacatccatgtgtggcctaaatcattagggggttgctactggcttagacctgttactaacttaccctcgttccgaatt

SEQ ID NO: 148137 - DNA, 474 bp, Homo Sapiens
aggatgccttttgccaccacttttttaatagccaaaggaaatttggggttaaagacgatgggtgtgcaagctgcataattttctatccactctaaacatgtttgagtaagaaataataaggcagaatttccagggtggttcagacactggttctggagaaagctgttaaagaggctcagaagagaagttttctgagaagggatagcccctgtggaacagctgtcatgcctctcaaggtgacccctggaaggggacagcaactattggcatggataaagtctctgcacagttatacagctccattccaggagggctcaagagtccttttcaattctccagtggaaccctagccacgtgtctcttcagttgtcaatcacttgactcggaaagcttgaattacaatgagtctgaggctcccatagttcctgaggagcaggagagttccacccaggtctgattctctctctcttttat

SEQ ID NO: 148138 - DNA, 787 bp, Homo Sapiens
  misc_feature (152)..(152): n is a, c, g, or t
gcctctgggcagaaatactttggttattctcctttccctagggaacttccccaaagatcgaagcaagaggggctggggccatccaagcagatccaaaccatttaaacagggttggcactgcggctatctgcggcatggcagagctgggtccnccgcgcgcggtacctggtgttccaagtgcttggctccgcagggcctgggagccgggggccgggagaggcttaagagactgtgatcggggctagtcatggacataggggagggctaaacccaagcgctgagccccagaggggccgggctgggtagatggaacggggaccagaggagtctccccacagcccagaggaagcttagctttgggcaagagcgcaaagagctgcagcaggcgctctttgtgcttcttatttcccctggtggaaatagtctgcttaaactcctgttctttgcgcctgcaaactcccgtcctcccacctctgttctcgcgcgcggagaggcctgcttcttgggaagaagggagacagaatcttttggaaaggcagccggcctgcgcctcctccctttcgtggcgggcagggcgaagagcccggagctctgcgcgtgagagacaggaggaaagagatccagaggcctgagcttcccaggccaggcagtagtgagccggctgtctgggacctctgcgcaggacagagctcagcacattgcacaaagcgccggcagctcccttttcagcctcacacagtgcgggccctcctccctatgtcccttgacggaacgaagagggattttc

SEQ ID NO: 148139 - DNA, 417 bp, Homo Sapiens
ttttaatttaaaatatattaaaatgatttaataaaggtcttttattattttacacatcaaatttcatgcaatcagtactccactgaaggagaaaagattatgaaaaaacaatgaaagcacaggtagaaaataaacaacacaaaagactaattctgattttttttctgtgtccttaataccctgtgctgtctttgacaacaaagatgccttacttatgtgattcagaggcccggaagtgaaaaaaatacaagtagttaatgaataatgcatatgttcatagcaatggtcaaattatactgtttcctaatggataccatttttctttatcgagtgggacactacagagtcggatgttaattgctcccacaaatacagttttactcttcacaataagcattaagacatgtccttggagct

SEQ ID NO: 148140 - DNA, 849 bp, Homo Sapiens
ttttgagttggtaagaacaattcccaaatttaatgaagatcaaataaagccactagtagcaccattactcaagtccaggaaagtggacaacagggtttggggaagcacttcagagtgcctgccgaataacgccattggagacagcccatcttcacacccataatagagttagagctggctcctgcttgtcctccaggacttggtttgaagccacctcctctgggctgccttgtggcccaccttggccaggtgaggccctttggctgcctgagcagcatacacctgctctctgaaatgtgcctggcaaccatgtgggcacctgtcaacccatttgtctcactcccaccataggctctgtgaggccggtgacctgcctctagccacagagctgtggacagggccttcaatagcagtcccttgcttcctcttcctgtgtgtcactacagcaagtgggttccatgggaatgggctgggtgctcaccttgtgcctgtcacaggaacactgactggcaggccaggctgggccagctccccggagccttaccgggcctaggccagtctcttggcctctgaatacagaggactttaggacagactgctggccaatgacactgaaagtcaagtctccaggaccttgggtaggtgacaaaataaggaaagaataaggaaaggagggagttcaattggtgtccctggcctctggggatgacctgggtggaagaggcccatccaggaggaggatgcagaggtgtttgagctgcagctgtgcagaggctgcctggagcaggcagagctcacaggtgcacatccccttgtgagcccaggtagggcttcagggcggcctgcagc

SEQ ID NO: 148141 - DNA, 523 bp, Homo Sapiens
  misc_feature (327)..(335): n is a, c, g, or t
tttaaaacaacaactaatatttattatctcacacagtttctgtgggtcaggaacgcaagagtggcttgtggctgggtagttctggcttattatctcccatgaactcgaatgacagttgggactgcagtcatctgaagactggactggggctggaggatctgcttccaagatggcacactcttgtgaccagcaagcccatgctggctattggtgaggtgcctcggttctttacaacacttggatctccccactgggctgcttgggttcctcacagcatagcagtcagcatccttgtctacacatttgtcactgtagatcaagaacaannnnnnnnnccctgtagtgattgatttatgcaggtctcttggattgggttaattgtcaacaatgtgagctcctcctgccaggccacgaagatcattcactcctcgccatctccttcttagggcactgaaatggttgctgaaattgtctccctgtttcgcccttgcccactggcatttgtttcccacctccctcttag

SEQ ID NO: 148142 - DNA, 867 bp, Homo Sapiens
gatctgcataaactttttaatgtaatttaagaaaaatcagtgccaaaaatgatacttcaaagataacagaagattcagaacgtaatgggttacaacagttccaaaaagaccacattgtaaggttatcttactagaatacggtctctgacacatttaattaacattctgttttatttcagtggggttacagtggagaggattacaaataaatgccctcgtccactaacaaagagcagcattgaggcttattctgaaaatccagtcctgaatgggctgacacacctaaaacaatctttggaatacacctcaagttaaagaaaaacccagaagtcatttggccctcccctcaataagctctgcggcattcatatgacccccaggcaatactcccatcttctttcacccaaggggaagggtcatggagggaaccggtgtctgcttcctcatctggggagagtggccccaccttgggcggtaggtcatttgacaccgtcatgaaaggggtgaaggggtaaggaggcggggtagggtaccccggagtgtggtgcagatcttccagagcatgcagcgagtatgactgagccccagccagggatgacccccagcttgagcccctgtgctgggcgatgctcccggactcaagctgggagaggcaactcgtgctgggtggcaaggtcagcagggcatcggcagacacagggtcaggctggctgagaccgtcaggcaacgtctgctcccatgagtccctaaataggaagtgagctgggtctccggggaagggcggtggcaggagcggcggtaggggcgaggcgctgaacagagagcccgcgttgggcgtcagcgccggaggccggtagtctccgtagg

SEQ ID NO: 148143 - DNA, 422 bp, Homo Sapiens
ctctggtccctagcatggcacccagagcctcccctcttcttgtccttcagccaaagagaaactttctctgactttgaactgaatttaggtctctggccaatgatgggcctgaaaattccataatggccagagaggagagttcgagcccggctaagatcccctgagtcattctgtgagggaccaagacccacagtccaccagccccagggccctacctcctggaatgctttcctggatccagcttcccgaagatccgaccagacccagggaggacggcaccgctccgcgggagggaaagccaaagcatggtgcttcaccagctggactcaggggcgaggggacatgggcgcttgtcaacgtgatgtcattcttttcccaccgtttcttcctgttgatattcaatgaatccgtcaatctctctg

SEQ ID NO: 148144 - DNA, 1415 bp, Homo Sapiens
  misc_feature (68)..(68): n is a, c, g, or t
tgtggaaatgtgtgagagaatgaagatattttggatttttatatttttgtttaggtagagatatatantttgtataaaggaatgaatagttaaaaaaaggaataaatattaaaaatagatttacaaatattctataaatccatttcagcataaactctcagctcttttccccatcctcccccccaaataaaaaaggttgatttccaaaagtcacttgaaagagcctagaatggccccaggtatataccacagagattcccgtagtgtgatcacaagtacccatttacagaaacatctcaaggtgcaggtggttctagttccttcccccatttcctggcagagagaccggctgtgaaaggaagggaggaaggccactgggggaggacctccagccaggactccacacaacatccgttagccccctggcttcagaggagctctggatgaggcatggtcagtatgggcttgagggcggacctagattcttaacctgaagtttaagaagtgatccaatcccagtcttgccttcagaaaggccaagttgaatccatttttctgccagggcaactgaggcccaaagctcaagaagaacctggcagaacagtagaagacaatgtctcttctgaacacttcaaaggtaatcagagctggagatactgacaagtcagtattaggttgacctcaccctaccctaatgtccacccttcaaaatcccctggcttccctccccgctaaagtccaagccagtgcccacaagcaagcttcacgcgtagaactcattggtgggggctttcttgtagatgggtttcttgcccaggtcatagctgccttcatccttcttcttcatacggtacatgagcagtaggatcaggaagacggcaaagaggatgcccacgatgccacccacaatcagagctgccaggacctccgttctctcaaagatgttgctgccctgcacagtgctggacattgacaccttgttggacacatcctcactctcttcaacgggtgagattctcttggggataacctcattctcctctagtttcttgggttcggtggggacttggctcccagaccctgccctctcagggatatggttatctagaggcaccaagggatggacaacttcagggccgatcatggagtcttccaagtcatccagatctccagagccagacagctcaaagtcatcagattcctgcccgggccccactacatcctcatcgtctggtagggctccggagaagtatcggccttctaggaggtcctgggggtcgatgacctcagtctctcggatcgactcggcgactccgcctacgaagagcagcagcagcgcgaacagacgggcgggggccatggcaccgcggactggagaaggcgcgcagatccggggaattccggaccggtccagc

SEQ ID NO: 148145 - DNA, 523 bp, Homo Sapiens
cttttaggtttgggggtacatgtgaatgtttattatgtaagtaaacatgtgtcacaggggtttgttgtacgtattattttatcatccaggtattaggccaagtacccaatagttaccttttctgctcctttccctcctcccatcctcctcacctctcatttctaagcacggactatttcaaagtattttgctgataaggaatttatatggtttaagtcattccatgattgacccacaacttcagtggtgatgacgttatgatgtttattctcttagaagtttgccaaatctactagactgacttttgctacattaacatgaactgcatttgacacaggcacatcttgcctaaacatagtgctcttctccaaactgagctgccagtgaggcacttgacaaatggccatcatccccaatgtgactttgaggagccaagtacgcgtaagttttgactgtctaagcagctgacttacccagggctgagcccacgaataccagaggggagtggtatgttccacagaag

SEQ ID NO: 148146 - DNA, 499 bp, Homo Sapiens
ttttttataagcaatataggattttctgaatttctttatttaacatatcaagggctaagaaaaagggtttctcccaaacccccatttacctttaaggctcagccagaaagccagagtcagcctggtacgagatattctggaactacaatacactgtatctcttacagagttatcaaggaaggttgcatagttacttcaggagacttaaaggaaaaaggtagatcacttcctctgaatgccatggagggatgtattatatgaccccaaacagaagacaagtgtagcatatgagcaactaaaaattctgaggctctaagaggctgacactcattttgagtttggagtgcagggagccaaagaagtggaatcacaaacagaaacaggttctataaaacatagctgagttacttgcctgctcatggtctcaataaagagaaggtaaaagattggagaagtataccattaacactggcatttacatagcagagctttctctgag

SEQ ID NO: 148147 - DNA, 1188 bp, Homo Sapiens
ttgcagttcagctttattttcatgcccctcatgtccagttaaggctcaagatcagccccggccacagtcccccagcactgggactcagcttcccacctggacagggcagggggttctcttgccaactcctgccagcctccttcagctgggggatcccccagagaccgctgcctcagcgggagccaccctggaagaaccagaactccagcctggagctgctcgtgggggccagccatcccccctgtccacacactcgtcccagctccatctccgggccccggcgctgaccgtggaggatctcagggccccaggcctccttgtccaaggactccccttggggttcctggctccctgagctcttgggctgcctggggcctccgctgacactccagtgccgagaaggctgcactcccaagcctgctgttcccacggtgtcactggctgagggatggggtgaggggacgtttctccggttcctgtacctcagggccctctcggttggcatctgtttcgtgttcctgcagggtctcagcggagttctcccatcccacaccaggtcctttgctgtgggagacgggcgcccccagggggcctggatggcgctgtcggaatcgttgcctaggggtgtccccagggctgaatgactcagagcttcgccccaccgggaaccttgagctgagtttccgccgctgcccgcctgccaaggtctcatcccgcaggcagagggagctctgggcccggcgcatgggtgccggggaaggggaccttggtccggggcaggggcacaggctccagcacgcggtattggtccatgatcttctccacgagcttctgcttctcgcggcgcagggcattaagctggtccaggtactcccgctgttcgcggtgcaggtggtcccgactctccaggctgcgctccaggagctccctgttctcccggctcagggcctgaacttcagccagcagctgccggttctcctcttcctgggcacttcgcagctgtgtcaatagctcacactgcgtggtcagccggcaggcgctcaggtccagctgctggttggactcgcgcagctgctggctctgcatctccagctgtgcccgctccagctccagccgcgccagccggccccgtagctccccgcgttcaccctgcagctcaccccgctcccgagacaaggtagagccgag

SEQ ID NO: 148148 - DNA, 700 bp, Homo Sapiens
  misc_feature (547)..(559): n is a, c, g, or t
aaacaaacaaaaactgtatatttaagacctacctttacttattgaaggaggccacttcaaaatggtaatgctcctttcctgtctaggttccccatacttagggtaccccagacccaccaaaccacacagtgccaggcctctttgtctcctataatctattcctccttaaaaacccagctagagattttctcttctaccctaccaagtaaagaatgtgcccgctttcctttgcatgcctatctcttagaatattaatcccataaattataatttccccaaagagacactgatcttcaagggtatgactgtgtttttcttattacttaatacctagaactgtattttgcacatattagaaacttgacaaaattaagaaacccaaaggacattcaaattctttctcccaatttaaaaattatgggtacagggacaagagtggagttggaaaacgtcagtcaccctaataaacaaggcacatttaataaacaggatacgcatctctattttcttccccatccccagataattgtttttgagtgatgaaccnnnnnnnnnnnnncctaataaatgcacaagtttataatttgagaaactagcgtgacaaaaatgaggtcatcccatggatgtcataaaataagcatgactttcttctctcaattcttttacttattgcccatataattaaatacagttgtaattt

SEQ ID NO: 148149 - DNA, 227 bp, Homo Sapiens
atgatattgtacaaaaataaagtctgtagagaactttggttttataacacaaacgaccaagacagatcagagaagtcagaacttccaaacaagtgcactccttacggtatcagatggtgatcgcaatgataaagaaaaatcacaaactttacccttttgtggatttggtggagcaacttgcttccattaaaacctgcttgtggtgtgtaggtgatgccgggaacgag

SEQ ID NO: 148150 - DNA, 558 bp, Homo Sapiens
caactttagttgtgcaaaagaaattctaagtgaatgcgcgtatgacaggtcaacgtattaggaaggagccagaaagtattcatactgctactccttatgagatagccaagaagcatcatgtcagtaactgggagtggagagggagttttgttttgaaactatgcaggtatttttcagcatccatttgtacattagtatggttctacaggaccccagctgtggaagtaacaaatttcttctccctccagactcttggatgactacctagatccccagcttaccggttagtttcctccacaggcttccatgagctcagtgtcccaagacagcaaaaatctggtataccctgtagaagcaggggggtagcaaatttaggctctcttcgaaattacttgtacaatacgagtgccttcgcagcttagccccaaagtgctacttatgtttcccaaggtcttttctattcaaatcatatttggtttcaggcccctttatgggcatacggtaacagaaacctccatcattcatatgagacccttttgtcaggtggtaacatcttgg

SEQ ID NO: 148151 - DNA, 509 bp, Homo Sapiens
tttttaattaaaatagagtttattagcttttaatataaacatgagaaataaaaaccacataaattgtagcattcttttcaaaataaaactgcaatcaatacttgaatctccaaactctgaattccataaacaatatttgtttttttgagggtggtagattgtaatatttgtataccattatttatcatttatgtctctgtcctttaaaaatgatggaaactgcagcacaatatgatgtgaagcattgctataatagaggaagtactcctgtcccagaaatgctttgtttataagcaagattcctaggattagatttgagaaagtaggagaaacagatttcacatagttgagaacactaacctcttcttagtatttcaaatttaggtgacattatcggtctcctaaaattatttgctccttgccttttaaagcctgaagagttcctaagggttatgtaagtatttcttaaatagcaggacttaatgggacacctacagcttggtagcatg

SEQ ID NO: 148152 - DNA, 409 bp, Homo Sapiens
  misc_feature (370)..(370): n is a, c, g, or t
ttttagcttgcctgaaattgtggaattttttttcctcttgattgtataaggcattttgaactggaaaaacgtctttcctacacactcttccaaataatcacagggaatataattgctgattcagaatacaaataagacctctttcatctttctccccactcccccgcaaaatcattctacacaccccaagcccataaagtacaaggcaggcaattgctttgcgagttagcaggcaaaccgtgtccacttgggggatgaggtcgctgtgccaaggtcccttctgatcctgcccttctcaggcctcaaggggtaagcatccatcttcggtgaggttttatgtcccatcggggagcccgccactgcctcctgngcagtgggaggtcagggccctcctggctttcccatgcat

SEQ ID NO: 148153 - DNA, 875 bp, Homo Sapiens
tttgttttaatttccgaatttattaaaatgattaacctcaatactgcaagtgcatgtacaaaatatttgtaaaaaatgtttttaatgaaacgttaaagaacttacctcaaatgctgaaaaagtcctttttcattctttcagtacaaggaatacattgtatctcaaaagtattacaactcagcaaaaacaatttataacagtaatttgaaaatgattgaaaattgaatactttacatatatttctatgatcatctcctaattcttacaatgccaaaatcttaaccaatcattgcataagctcaagctaagagttttattgaatgcaacctcttctaaactggtcaacggtgtgtggctgtcaccattccacacggtgaagttctacagcagatccggaacagttccgaggcccctacctttaccaacggaaattaggtttccctagaaggcatcaacagtggctgctgagtgcttgtgcataccgactcctgagaggcagtgatttactaccaaatgtcactgctttgagacccatgggaaggttggcctccaaagaggaggccatgataaaattaaaacatcaaaaataagttactaaaattcagctgaaaaatgaaaatgggaaatgtgttttgtcactttttaagatcgaaattcccaaaatagctatcgttggtattcaaataaggtttaagatttagtctctgaacctcttcaaaacaccccaaactaaggtgggaatacaagaggtgacccgctgccctccagcacctccagacacagggtctaccttcatcttcctcagtggcaggggttcacatttctatgcagggaccccatgagggctggacgtgctctgcaaagtgctccgggcc

SEQ ID NO: 148154 - DNA, 510 bp, Homo Sapiens
  misc_feature (476)..(476): n is a, c, g, or t
  misc_feature (489)..(489): n is a, c, g, or t
aagaggcatagttttaatatttttacatatctaaaatctgaatatttcttgtcatttcatggcatgtccaagtgtattaagacttgcaggtggggtgaggtcagcttgaagccaagttctggctcaaatcctggttttatttcttcccagctcgccatcttctggcaaatttcctgatttcagagggtttgttttattgtctcataggtgatgccttgtagacacagctttggacagtagatggaatgaaacgtcagactggaaggatcatgctagtttccctgaattctggtcaatgtcccaaagattgaaatgagttgttcctagagtgtgagagtgtagaacagtgtaaaagaatgggcttataatttgggagatgctttgagtttctgcatgaaagatgttatcagaatccaagaatttttgctactcaatagcaatcctatcagaaggcaggctttttcccaaggcctggnggcatcaaccagncttagagtccagagaaaaaaa

SEQ ID NO: 148155 - DNA, 277 bp, Homo Sapiens
ttttttttaataataatagctaccgtttattgagcacctactctactgtgtgccaggcactgtgctaggcacttttcgtacaatatctaatttaaatcctcacaacaaccctgtgaggtaggtattattatcatcattttacatacgagggaactgaggctcaaagaggttaaataactctatcacacaaccaaaaatagtagagctggaattcaaacccaaaaccacctaactccaaatcccatgctccaatgaattaaagtagagaggggagagg

SEQ ID NO: 148156 - DNA, 195 bp, Homo Sapiens
tttgtgtttgtttgtttattgggagtggtttgcacagatgggatacagcaaaaggctttgggactgttctcgtctgtgctgtgtgctcctggtcaactcccttgcctttgcctgcacaggtccaaaggtgccgggttgtttcagttaatgagtttcatagtcacacaggatttggagtctaacaaaggtaagcaa

SEQ ID NO: 148157 - DNA, 463 bp, Homo Sapiens
atgatatcaggttcatttttcaactaatcttatgtggaattgaattagagaacaaggcattattcttttagggaaggtgagagcttatttgtatcagagcttattacttgtcaggataagtaaatttctgtacatgtactgttttcatatgtgaagtgagaagaaactttatgcttgtttaatgcttaaatttccatccattgtgagaatattttcactgacctctgatggcacttgttgacaaatcattcaagtgagaccatgttactagacatgatcttgaaagaggccatgatttcacaaaactcatttttattttattctcagacagtctgttaggtaaaaatatgagaaattcatgtacattttatattttctgaatttataatctgtgcactcccaattttaatgacactaaaatattaatagaattttttaaatatactctaatttttaaaacaaa
